United States Patent Application Publication US 2011/0183924 A1 - sequence listing, part 249

SEQ ID NO: 702868 - DNA, 673 bp, Homo sapiens
  misc_feature (537)..(537): n is a, c, g, or t
  misc_feature (667)..(667): n is a, c, g, or t
ggtgtatggcacatgtatctcatggggtcgacgggaccctacttctcctatcataacaagaacttatcgcctttcatttcacaccctcataatcgtttaccttatctagctccctagacctgcatgcgctcgtaataacattcacaacagacctaactaatactggcatctaagactcttaggagatagcggccgacctgaactatcctcgccattcatcatactaatccttatacccctgtcatgggtacttatcctttacataacggacgaggtctacggtccttatcttaccattaaatcgatggggcaccgatggggctggccactcgaggacattgtctaaaacggactattcttcaatttctactttcttgcccgatcattgctagaacgaggtggcctccaactacctgcacttgactatatcgtcgttttacccgactgacgcccccctttgactaataattagggcacatcaagcagtggcactgttgcgctatcccaacctttggattgacccatatggaaaaaccnggcgtttaatcccaacttctttctacatacacgaccgttgcatacttggtggattgccttagagcccttcagccatccacagttgtatgccctgtgctagatcaatttccctaaagggctcggtggcttntcacga

SEQ ID NO: 702869 - DNA, 758 bp, Homo sapiens
aacccagctacgcaaaatcttagcatactcctcaattacccacataggatgaataactagcagtgctaccgtacaaccctaacataaccattcttaatttaactattgtatattatcctaacatatcgtaccgcattccgtacatactcaagcttaaagcgtccagcaggcacgacccatactacgtatctcgcacctgaaacaagctaacatgactaaacacccttaagttccattccaccctcctctccctaggaggcctgcccccgactaaccggacttttgcaccaaaatgggccattatcgaagaattcacaaaaaacaagtagaccctcatcatccccaccatcatagggcaccatcacccatcctttagaccgtctacgttcgtaacctacgtccgtaatcatacgtccaactcacatcacactacatccgccagtatctaacaacggtaagaaactaaaagtgacagttggacacagtacaaagaagaccaaaccacccaatttcccgttcgcagcagcaacgtcatccggcccctttacacaagagcttacgtccttaacctaattcttcccccgttttaattaactaacataaattctttattcgcacaacgggacaaccaacgcgcgaccgcaaaggaacagcatagataccataggtaggctacgagcgcggcacacatccaaaaccggcgagaaaaaccgatcacatgcgggcaacggcgccacaacagcgacaggggacagggc

SEQ ID NO: 702870 - DNA, 964 bp, Homo sapiens
  misc_feature (664)..(664): n is a, c, g, or t
  misc_feature (683)..(683): n is a, c, g, or t
gggaggttgcagtgagacgagatcacgccactgcactgagcctaggcgagagaggaagactccagctcaagaaaaaaaacaatggactggccctaattggtacagccatttaaatgtgtctattacatttaacttttcttaatgttgtcaactaaagagtttattcattatactgggagcatactggaacacaaatactggattcctttggaaaaactaaagagaagctcgataaaacaaaatacagaagctctagattcctaatggaagtgagcgtactctcatttttaaaagagtggacgatgccgtaataaaagccgaccatgaaattaacttgattctttctttcatggagcttgcacaggaaagctagaaaggagggtctgtgtggagacacggggctcaacactaagagaggggaaaatccaagttctatacgccaagaaccatatcggaggccgggcacagtgtgctcacgcctatatcccagacacctggggaggctgaggcgagcagagtcacctgaggtcaagagttcgaaaccagcgtggccaagcatgggtgaaaacccatctctactaaaaatattttctaaaaatttagctgggaatggtggccagatgcctgtagttcacctacttgggacgatgcaggcgcgaaaatnggttgaaccccagaagtgnacgttgcactgcagcccaaatggcgccatgcatcccaaccgggggaggaaccaaccgggtccacacaaacaacacacgggtcgggcctggcctccacggatggggcccagaggggcttttccccagctactcccacgatgggccacctgcctcgggccgaggaggggaaactcaccaaaacgcgcagaagacacacgcgtgagcgaacacggaacacggggcccgcacgacacagcgacactcccaagggacaggacccaccacaaaacacccagactcac

SEQ ID NO: 702871 - DNA, 112 bp, Homo sapiens
cgattccttgaggtatccccattcattgcggatgagccatcatcacaccactgtactcctgttctctagcctgggcagcctcggtctttaaagtaagacactgtctctttat

SEQ ID NO: 702872 - DNA, 233 bp, Homo sapiens
tagttggtagctgatccagcatttggatcttatccaagaaggatgtatcaacatgacagggttgatgctatagcgattccacggggagcttgtcatggcttcgcgaggaggtgacgtcatcctttcatactgctctttgatcttctcttcaagtaagatgcaaagtacactaacttcctgacagacacacgcatggagtaccgatgctcgcacagttcgtcaatcattggttc

SEQ ID NO: 702873 - DNA, 390 bp, Homo sapiens
cattgagcccctttgatgctacttacatacaagaagactttataaaataatcactgcacaaaatgttaaagggtggggttatgcatgtgatattaatttttcctcaataatgtttttcttgtactgttcatgagctcattacagtttccacggtaaatttgttttcagaatgccgaattgcgaaacacttgctggcttcacgtttcttaatacctttaatattttctctgcgttgcagttagtaagtttccttgtcgtgacacagactatcattgaagaaggccaggttatcaatgttttcaatgcgatcagtaataaccatgtgctcatgaatcagataggactgatgcaaataggttccagccttgatgttcataagtactccagtag

SEQ ID NO: 702874 - DNA, 151 bp, Homo sapiens
ccggcgcatccgtgataagcaagaactcttccacttcggagcgcaagaagttcccatcctcctcctcttcctcctcctctccacctcctcctcggcctcccgtgctctcccggcccaatggaccgcccatgtacgaagtgcctgagcattg

SEQ ID NO: 702875 - DNA, 429 bp, Homo sapiens
aataatacctaatgttttttttccttaccaccatatatacttatttataaaagtttaatctaataaaagtggggcccagccaagagattaacaacaactaataaaatagaactataacaatgtattgtaataagttatgtaaatgtaggccaggcatggtggctcacacctgtaatcccagcactttagaaggcccacgtgggaagatcccttgagtccaagagtttgagaccagcctgggaaaggtagtgagacttcatccctacaaaaaataaacaaaaaattagctaggcatggtggcacatgcccatagtaccagtgactcagaagaggtggaaggatggcttgagctggggaagtcgagactgcagtgagccaagatcatgccactgtactccgagcctgcgcaacagagtgagatcttgtcta

SEQ ID NO: 702876 - DNA, 1261 bp, Homo sapiens
  misc_feature (483)..(483): n is a, c, g, or t
  misc_feature (486)..(486): n is a, c, g, or t
  misc_feature (488)..(488): n is a, c, g, or t
  misc_feature (492)..(492): n is a, c, g, or t
  misc_feature (631)..(631): n is a, c, g, or t
ggccgtgggacgggcggaggcgcccgagttcccgcttccccggtcgcccttccatccccggagcccgactcatgcccgtcggccacctgcgtccccgcccctgtcgaggcgtgcccgatgcccagcgccgcgagaccgtctcccctgggcgggctggctccttggcccctggaagcgcgagctgttcacttatggcggcgtagtggctccgtctccgcggacagagtccgcgcgccccctggcccggcccgcgaggggctcccggcgtcggttccctcgtagcatttcccgccggtgtggtagtcggtgccgtagcccgggcaggagtgaccagaccccggcggccgctcaaagccggggagattcgtacttgtttgatgacccggcaagtcagcatgcatatgctggtcggaagcccggtctcgcgtgagaaaacgggtcggcccgcgcggatgctcgcgagattccgcatgaaggagctgnatngnaganaaggaggtagaagagagaccagaaaaagattttactgagaaggggtctcgtaacatgccgggcctgtctgcagccacgctggcctctctgggtgggacttcctctcggagaggcagcggagacacctccatctccatcnacaccgaggcatccatcagggaaatcaaggactctctagcagaagttgaagagaaatataagaaggctatggtttccaatgcttcagttagacaatgaaaaagacaaacttcagtgtaccaggttgataccctaagaagatatgtggcatggagctttgaagaaacagcttggttgaattcttaggcgggcaagtacgaagagacaaaacaaagaattcgacacacggggaaaaacacgcccacagtatacttgcaatttccagttgctgaagtcaaggcaggcccttgaaggcaaaggaggaggaaatggctcgagttaacattgggattaattcctaaattcaggacaatagctaaccattggagaagccttccggaaaacccttcaataaattgttcggataccaaggtcctaccaagatgacaacacgaagagttaaatgccctcaaagtcgacaggggatgggaccctaggaagagccagtgaagtggagcgtgacaaaatgaacatcgtggcgacatgtcgccgcaaaagagaactcttgcagcaactcactgaccaaagaaacacccacacgaggacacagtgaaggactgtgtggacctagagtatccctgctgggagaatc

SEQ ID NO: 702877 - DNA, 140 bp, Homo sapiens
gaaagcatgctgcagcctctgcagttacagggacactaacagctggctcctgaaggagcggagcgaaaccagcgacaagcggaagttcctgaaggagcggcttgcacggctgacgcaggctcgaggcctggttgcccagt

SEQ ID NO: 702878 - DNA, 82 bp, Homo sapiens
tcttctgtgtctctttattaccctccaggcccgtcaaaccctcaatctctccctttaccccctttaaagccaaaaaaaaaag

SEQ ID NO: 702879 - DNA, 322 bp, Homo sapiens
cagtattctgaaaccctgtctctaccaaaaatacaaaaattagccgggcgtgatggcgggcacctgtaatcccaggccactcgggagactgagacggagaatcgcttgaacccgggaggcagaggttgcagcgagtcgagatcatgccattgcactccagcctgggtgacaagagcaagactccatctcaaacaaacaaacaaacaaacaatccacacttttccctgaaatgagaggcactcatcctcattctttggtgtccctgtggcccaggacagagtctactcccaggacagagtctactcaggacagagtctaactc

SEQ ID NO: 702880 - DNA, 980 bp, Homo sapiens
aacagaggaggtattacaatgttatgtggaatgaaatcctttatctccctttattactgtggtaggtccctcacttggatatacctctgttatcacgatagaaataagggaggtctagagactttctattccttggacatcgtcgacggagagctggccatgtcttcacaaacccttgctagattgactgaagtttatggaataagatgtattctcactcccttgatctcaagggcgtaaccatctggaagcacagcttgactacatgtcatttttaccaatgattttcaggtgacctgggctaagtcatttaaacgtagggtctttgataaacagtaaagaggccaaccatttaattattttgcaaagcaatctaagagctaaagatgtaatttttcttgcaatgtaaatctttgtgtctcctgaagacttcccttgaaaattagctctgagtgatagaatcaaaagagacaaaagacatcttcgaatccatatttcaagccctggtagaattggtttgctagcagaacctttccacaagttttatattgagattcataactacaccaagaattgattttgtagcccaccattcattccatactgtatatcagaggagtaggaagacgaggcaacctttgacttatcttggaacagccacaatgtgctttagaataagaataactggtccattccccttttatgttattgatatcgtcttggtcaatcatttggtttggagttttcccagaataggccccttggtcatcttgggctggccagacacggtcttggtacttggactttaggagaccacccttctctggttggtattatgaggggccagcaaggagagtagtttttggggaaaccttggaattaagggctctcgaaacaaaataaaacacacggcgagtccctcgcccacctaagcgtcagcggctcgctctagaacttcacattctatcgtttaagtctat

SEQ ID NO: 702881 - DNA, 396 bp, Homo sapiens
tagttaagtggttactccaacctctatggcccggggatttatgctgactctgaatgggagaggggcaaggtagaccgcaggttactcacatgtaaaaggagttggggtaggtaaataaaagctatccatgctagcctgctgtgtttattgtagagactgtttaagtatatgtggtaagcattcttttcgcatcctctggattggatgagaggcaggaagatggcttgccagaaataggacaagacataaaacccaaaatggtcctgtcctgtggtgtccacagcttctccacctggaggagtgccttgcatcgggggactcagaattttgtaattacgaatctcctctccgtgaaacacctttaacccaattccaataaatcatgtatttgcttta

SEQ ID NO: 702882 - DNA, 651 bp, Homo sapiens
  misc_feature (277)..(277): n is a, c, g, or t
ggagtcggcgcttgcgcggagaactcagcgctgagattgtctaaagccccaggaaaaatggtggaaaattcaccgtcgccatgccagaaagagcgattatggcttgtcttttcttaagctcccaagttgcttcatactttacctcgtgtgggcctttattcctgaatctttggctaaactctttaagtttaacctatgtggcctcaaaaatagttgggcagttgcattacctgtctacctccttatttgctatagtaatgggctacgtgctcttgtngggattaacatgatgagtacctctccactcgatccatccatacaatcacagataactatgcaaaaaatcaacagcagaagaaataccaagaggagggcattccagccttaagagataatttctatagtgaagtaaacaaatgttctttcttgcagccaaagaactttacacaaaaatgaatgtgtgtaaccaatagtaacacaaagcaagtatttatttataagttgtgcattataattttgacataaattaattgtgaccatctctcttatcaatagagaagtaaaaaatgtatgtgaccttctcttagatgatgtcactgaatatggtaatgtcagtatggtaatgaatagaataaatacaatatgggattc

SEQ ID NO: 702883 - DNA, 1432 bp, Homo sapiens
gctgccttggaagagtgtgggggcggcgacgtggagtgggcggcgatgcccccgggagcctgggcgttaggccctgggcgtggctggggccccgtgctggcctggggggtctcctgggccccacaccacaaccatggagcccagcagaccctggaggatcaggtctcagaatgacatgaactggagcacacgaagctgcccctgagtgtccctcagacagatgaacatgacgccagaagggagacaagctatgacacggaatccagacagaccatcatcacggcagagagatccaagaaagacctcactgagagagaccaatagcatggacagagagagagtcatgagagcaggaagcggcacataggactcaaacataccggaggatttagacaaaccaagcacatcatcgaagattggacccctagaggaagccttctttcaaccaaatgcttcagacccggcatatgagcaacgaggcaacagaaaatagaggagaagtgttctaacaaagagagccattcggaataaacacacacaaaaggacgagtaggataggaacaaataaaagactcaatcagaaaccttggaagagaaagagacagaaggtgaattgaaagaatcaaaagggaaaatacacaagacaagaagaatcaacctgatccctcgaggatcaagatgcaagaacagaccccaataacaaatcaaccccggataacaatttgagaaatacacatacacattaaaaggatggcaacccaaaagacatacatggacattcaatcgaatgagacaggataacccttgaggaacggaataaggatacaagaaacaatagggaacaattggcctctaaaaacccagaggaccaccttgagaagggacgaaccaataccaatttgagccaacaaaaccatagagagaaagaatacaatgaaggggcacctgagataaatcgtgaaacccagaaaagacaagaaaccgacaagaagacaaaattacaaaggttgccaactgtgattaacacaacgagaagaaaggtgattgacaataacagctggtcaggacaataggggataacaagagcagacaaaacagaaaacggacgaattaaaaggaaccaacatcgacggaacaacccacaatgaaattaaaccgaggctaaacaagaaggcgacctaaaataagcgaaaaatagcaccatggaaaagaaaacacgaaaggacagggagacacaaaataagcacacaccgaaaaaaggacaaaaacaaaaaagccacaggtggcagaaagaacacaagaatgaaggaactaaaaacaacagcagagaagagaaaacagaagacaaaacccgagaaagaagaaaggagacaaacagaaggacagattcactgccactctctcagaagataataaagaacaaaggaaaaag

SEQ ID NO: 702884 - DNA, 1409 bp, Homo sapiens
agtgttggtagtgtcttgtgtgagttttctgtcgtggagagtgtgttagcgtgtcaggcgagtgtgagggtgtgttgtgtgttgtgtagttgttgtgcgtagggtgtagttgaggtatgttgtgtgtgaggtagtttctgtgtgctgtgtggtttttgtgcatgagcgcagcgctgctgcgtgtgtagtaggggtagttggtctgttggtgggacggtgtttagtaggtttgaggagggtggtagtagtgtgggtgtgtggtactttgtgttggttgttggtttggtgtgtgcgtcgtgtgtagagggtagtagatggatgtgtaagcagactgatggatgtagtggttggtcgttgtatgtgtgttagtgttgggtgtgtgtatttggtcggttgtgatgtgcagttggagtgtcgtttgtatgtgtgattatttggtatctatgttgtttgtatatattgagtgtagtgtaggtttttgggttggttggtttctttgtttgttgtggttggtggtctgttgtatgttgtcgtgtgagcgtgtttttgtgtaaatatgactgaagagagtagtgaggtgatatcgtaggtgttgtcgctttagtagtttgatttggtagagtgttgtacgaggggtacttggtgaggagtgtgtggtgtttggcgtttgagtgatttgcttttggcgctaagtgatactatgtgagagagtgtgttatagtgcgttgtttgcgtgtagtagttgcttgtagggtatctggtagtggagtgggtggtatagggtggctggtgtttcgtttggtttatgtgtttcgtttatctgtgctgcgtgtttggtctttcggcgcgcgtggtgtggttcgtccctccttgtttctctttctttctggctgtttgcgactgcctctctgtttccgctgttgtcgttgctgtgcgtctcgtctctacgcgttctgctctatctctgcgtgctcgcgccggcgactcgtcgcactcaccacgggcgttcattgtgtctgtatgacttgtgagttgttcggggtgcgtccttgttttgtggcttgctccgctccgtccttcggccgtgtggtcgggctggtttctctcgctcgctcgaggagtgccatgctatcgtttatatgagtatcgttagttcgtgttatattgtgtccactctacatgttggtttttgtgttttctttgtgttgtgttgagctagtgtttggagaggttatgttgttgtacgagtatgatgagtgaaagggagtgtttgggtgtgactagagtaagataagaatagtgagataagaatgagataaaatataagaataagtgatataatagagtttattaaaaataaatgttaaaattaaattaaaaattataatatataaaacgttaatagataa

SEQ ID NO: 702885 - DNA, 305 bp, Homo sapiens
gattgtcgctgcctgagcatatgaagatctagcgacaccgaaattggcgtttctagcttggttgagtccttctcgagcgccgcaatttgggcctcaatttctcgttttgcctcttcgacactgtcaagatctcgatgatcaacatgaattgttcgcgtgcccgcaacgtcaaagggtatctgctcacccttcttgatcagttgaacgagcggtttccgaattgcatggcgtattgctagttcatagaacacgtttggattgcgttctgtcagatcagcaatgacaagttgatcctctagagtcga

SEQ ID NO: 702886 - DNA, 255 bp, Homo sapiens
aacaagagacaaaaagaaaggaggagtataaaggaaacgttctaaaacaccaccaaagaagttacagcatatccagacgttctagaagtgcaatcagggagagacgacgacgaattagcatgattggcacaagatctccttaaaagcctcggtctcctaaaagaatattgtcccgctcaccatcccctatggagacatataaaaggagaagaagaaagataaagacaaataaagaagtagggatgtaagagaacg

SEQ ID NO: 702887 - DNA, 214 bp, Homo sapiens
  misc_feature (35)..(35): n is a, c, g, or t
ggttcgacgccccattattcagatataacacagantctaccagagcatgtatcatttcaagctcctgtcactgaggaatagaaaaaacttttaaagagcgtttgtattcaacaacttcctccagcccctaatacagtctctgtggcctgtctgtgaaacaatctctaacatcctagatatgccaggtggaggtcaacttaaagttcgtcgacgc

SEQ ID NO: 702888 - DNA, 107 bp, Homo sapiens
agtttaattaggagcggaaatgtctataagtaggctttatttcatgattgatatgtcacagaactcatggtagtaaatcacattgctattgaaacttctaaaactag

SEQ ID NO: 702889 - DNA, 555 bp, Homo sapiens
  misc_feature (151)..(151): n is a, c, g, or t
ctcacccactgggacgtgcccaacctggagacattgcaccagatgctgaaactggggaggagcaaccgtggccaccgccgccaccgccatgaaccagcgcagtctttctcctggctttccgcatttgcccttggttttcactgcttgactngctgcgcgcggcgtctccaccgcgcgctccaggcaccgcaggcacgctgcacctggtggacctggcgggatccgaacgcgcacggaaggcaggggcggccgggccccgccgcgggtgggagacccagaagggggcccggggccgcctgcgggaggccagaccataaaccgtcgctgcttggcggcctaaggaagggccgggttgaattggccggcaacttgcgggggggcccaaccgggccggcaacggttgcccttccgcgattcgcagttcacgcgattgtctgcagccggcgctgggcccaggcacacaccgcggtgctgcgtggctgcagtggttgggtgcggccccgggggggcggtgggggcaggtgtgtgcgttgcccctgtgttcgcctgacagcc

SEQ ID NO: 702890 - DNA, 714 bp, Homo sapiens
ggacctcccaagtgtgcaggataaagcccggatccacacggatgacaaccttcccaaaagcacccggagatcattcggggcagagcccatgggggagaaagccagttggggtccctggctcgcagacttggcgtgaaaggtcacatagagagcaaggaaggcctagcgtcggtaaaggggggtatgctgacaaagagcaaactgttgtccctctcggccaacgtcttcattcggtgccttcagaggcaacgactgaaggaccatcgtaccagggaagtggcctgccaacgacatctcgtggcgccatacggccaagcagtcccggcgacccgccttcgcgagtagccatgtcgagacgtggttgcggagcgccctatcttcccgattgctctcagggaagctaaaacaatccccagccactcatccagagccagcagccgagtagggactcctccatgtcctctacgaaggaaaagattgctattgtcgtactcactccgacgtactccggggtcttttgggagttttctcccctaaccaggttcaactcttttattggattctcgctcttgcatgcctcccccgtcctctctcctcccttgccagttacctggtgacagttaccagctctcctgtatggagtcaccggccccatccctcaccaaccaccttcactttcaatccgttgatacaatacgccggttttggcagaac

SEQ ID NO: 702891 - DNA, 107 bp, Homo sapiens
cgaggcaagtcaacagtgtggcagctgctgagggcgaggcaaggtaggaaggcaggagtcctaggtgcgccggctgatatccacgcacctgctacactccttcttag

SEQ ID NO: 702892 - DNA, 1004 bp, Homo sapiens
  misc_feature (249)..(249): n is a, c, g, or t
gatcaaaagggacaagcatcaggccaccgcagctaaatgcgagctcaagaaacgtctatagacggctaggctcactaatcgccaccacggggaaatccagacagtgattaatctttagcaataaaacgaaagtttcatatctaacgcttgaattgatctgacactcctcgatgggcttaggctacaagtattcagttggccagcactaccgacggtcacacggaatcaaccacaagtcgatagaaaacnggggtagacagtaggtgtatttaggaacctgatcctccctttcctccaaatacaagacgtaagaacatcagcactgatgcttggtctataggacatcacaggtttgatcaccatacaagtatgtaacttaacggaaaagtggtctgtaaagctactattctgacatgcactacagagtacgactaacgaacctcaaatttggggattctagaatagcgcactcacttaatgcctttaagcactcattagaaatacgtcagactaggttaatattcgaaaacgatacaacgtggcatcagtcgctagaaacaagcataactgaagcgcacaatgcttgtaaggcaacttcggaataggacacctgggactggatgctatcgattatctaagaattaatataagcaagggaaaaatattataaattcaaaaactaatgtccggacaagggaatttggtgtaaacccctggagagaaggaagtactctgggttaagacccaccaggcctttggagagagggcaagcagggtgggccccacgcgcaaaacacatgtggataaagagagtgaaaccaacggggttgtcaaaaaaagtcccatagtggactaattcgagaattgggcgtacagaggaagttggctcaaaagaacaggtttgggcaggaaaataaaaggaggaacgcaattataataagagaaaggcgggggcgggtgaacttcgaatgtaagaatctttgcatgtgaaaagcatataaagg

SEQ ID NO: 702893 - DNA, 262 bp, Homo sapiens
caatcaaaagggttctttattatgtagatggggtcataatccatcaaaataattttataattaactgccatactgtcttataaaggatgccttctgaaggtaaacataatatagatccccttttttaaagtggtctacttaccacttactaaacaaatattagaagttttttttttttttaaacccctatctcctatgaagtctgagaaaggaaatcatgacgagttcctgatcagataaaaaccactgcatcattaaaggg

SEQ ID NO: 702894 - DNA, 1515 bp, Homo sapiens
gccgccctattttttatatattttttattatttaaaataaagacgagggtctcactaatgttgtattggggctaggtctcaaactcctgtgggctcaagataatccgtcttgcctttagccttcccaaaggtgctgggattatgggtgtgagccaccaccacatccagtggctatgggctaccttctggtttttcttttttattttttattggaaaaggagagtttacactatcttgtgtatgcgccacagggctagtgaacgcagtgagagtgtcgcacaggtggcagacaaactcttgtgcgctatcaactgtgcaacattcttcccacctctccaccggagtctacacaggtgtgattatctctcactgtgaccactaaaccacgcacccccgaaaagttaggggtgtgggagatctacacagaggggtcgcacatagtgcccacccacacaccccactgtctgccaaaccttatatcattcacctgtagataattttaacaaaaagataaacaaccaaaagggggattatatcccacccatttggggatgggacccaagagtgtgggccaccacgacacactcacctgagacaccgcccgggcggtgcactccccactgagatgcactcgagcgcacccctccccccaacagagagggcagagaacaattctagccaggcgcatatggacgcccccaaacacaacatcaacgagggcaaggacaccccggggaacgaacagagaaacgcagaagaaacaacaggccccggaacacatccaccaacaacaacctactaagagacaccggggaatagtcacaaacacgcgcctgtgctaggcaacaaacaatgacgccggagaccccaaccacaggcacaaaacgcggggggggctcaacaccaaagacgctccaacgctgaaacgaaccacagtagccacagccaagaccagagacaaacaaggcgagggcagcgccaacaccacaacaaccgagacaaaaactaccctaggaccccagagaagggacacccgctcaacacaaaaaagatgtacccacagggctaacacaaaaacaatgccacaggggtgagaccccggccaccccagcgagaaaagctgcgagcggaaataccgacgagaccaccggccacccccgaaaagagaagacaataacacaacccacaacccaaagacactgcttccgcactcaaaaacgaaagtgcccgagcaaacacaacaacccacggggacctaccagcgacaaacatccaaccgaatacataacaaaacagacaagaaccccgacaccaacctccccaagagccacagagacaacaaaaaccaccactaaaccgccacacgaccgagactcacagacgaacacacaccgcgcggaacaagggagaacacccacacgagaaaccacacctagaccaacgaaccagacaacagacgggaacgacacacacacaacatcacaaacaaacagacaaaacacacccggaaactaa

SEQ ID NO: 702895 - DNA, 907 bp, Homo sapiens
  misc_feature (14)..(14): n is a, c, g, or t
  misc_feature (115)..(115): n is a, c, g, or t
  misc_feature (121)..(121): n is a, c, g, or t
  misc_feature (132)..(132): n is a, c, g, or t
  misc_feature (148)..(148): n is a, c, g, or t
  misc_feature (153)..(153): n is a, c, g, or t
  misc_feature (157)..(157): n is a, c, g, or t
  misc_feature (160)..(161): n is a, c, g, or t
  misc_feature (164)..(164): n is a, c, g, or t
  misc_feature (167)..(167): n is a, c, g, or t
  misc_feature (170)..(173): n is a, c, g, or t
  misc_feature (216)..(216): n is a, c, g, or t
  misc_feature (219)..(220): n is a, c, g, or t
  misc_feature (227)..(227): n is a, c, g, or t
  misc_feature (242)..(244): n is a, c, g, or t
  misc_feature (251)..(254): n is a, c, g, or t
  misc_feature (257)..(257): n is a, c, g, or t
  misc_feature (260)..(260): n is a, c, g, or t
  misc_feature (266)..(267): n is a, c, g, or t
  misc_feature (270)..(271): n is a, c, g, or t
  misc_feature (289)..(289): n is a, c, g, or t
  misc_feature (312)..(313): n is a, c, g, or t
  misc_feature (320)..(320): n is a, c, g, or t
  misc_feature (322)..(324): n is a, c, g, or t
  misc_feature (327)..(328): n is a, c, g, or t
  misc_feature (337)..(337): n is a, c, g, or t
  misc_feature (375)..(375): n is a, c, g, or t
  misc_feature (390)..(390): n is a, c, g, or t
  misc_feature (407)..(407): n is a, c, g, or t
  misc_feature (414)..(414): n is a, c, g, or t
  misc_feature (417)..(417): n is a, c, g, or t
  misc_feature (420)..(420): n is a, c, g, or t
  misc_feature (451)..(452): n is a, c, g, or t
  misc_feature (460)..(460): n is a, c, g, or t
  misc_feature (468)..(468): n is a, c, g, or t
  misc_feature (472)..(472): n is a, c, g, or t
  misc_feature (474)..(474): n is a, c, g, or t
  misc_feature (481)..(482): n is a, c, g, or t
  misc_feature (490)..(490): n is a, c, g, or t
  misc_feature (523)..(523): n is a, c, g, or t
  misc_feature (529)..(529): n is a, c, g, or t
  misc_feature (533)..(533): n is a, c, g, or t
  misc_feature (542)..(542): n is a, c, g, or t
  misc_feature (544)..(544): n is a, c, g, or t
  misc_feature (567)..(568): n is a, c, g, or t
  misc_feature (572)..(572): n is a, c, g, or t
  misc_feature (610)..(610): n is a, c, g, or t
  misc_feature (793)..(793): n is a, c, g, or t
  misc_feature (797)..(797): n is a, c, g, or t
  misc_feature (812)..(812): n is a, c, g, or t
  misc_feature (835)..(835): n is a, c, g, or t
  misc_feature (839)..(839): n is a, c, g, or t
  misc_feature (841)..(842): n is a, c, g, or t
  misc_feature (844)..(844): n is a, c, g, or t
  misc_feature (906)..(906): n is a, c, g, or t
cattcctcctcttncatcccaaatctcctcttcccaccctttctcccagagccctccaaaacaaaataccagataagcactctccacccagcagccagacgcctccttcttgacnccatcncccaccctctntcttctcgagcccagnaaatncctnaannaanagnccnnnnaaatatccctccctctctcccttttccctccatccacccatcnccnncatcttnagaccctatttcccnnnctcactnnnnctnctncccctnnctnntcctcctcttttcttttncctggggccacacaaagccagtnnacctttnannncannattttatanacttttccaccaaccccccttaccttccagttactgtngtcaataccacaatntcactcacagccctccnccatcanatncanacccagaatctctcatcctacatcatcccanncacatatnctcacatnaacnantacatcnnccaacatnacgagaggcgtgcgtggattacaggctttacanggtctncagnaactctttntnactattaagaaagcagctgtctnnaccnacagtcgctactggactcaggctgagcggcagatggantgcaactgggagctccataaggaagttggcaccactcctattgtcacctggctcctcaccgagattcctgctggagggcgtgtgggttttgaccccttcctcttgtccattggtatgctcttccttcagtccctgaatttgtccatgctaacgagggtgactcagcttccctaggatataaanaaanggaccttggtagaangaaggggcggtgggactataaanatananncnttgaaattgtagttgcagaatgttttgcaatgaggatgtattcatggattgtgtaattaaana

SEQ ID NO: 702896 - DNA, 122 bp, Homo sapiens
attactactatctcatgagtaacgaaaagataaaaggtttctaataacatgacggaggttgacgatgaagcttcttcatggtagtacaaaatgtatttatccagaaaattgacgagaaagga

SEQ ID NO: 702897 - DNA, 117 bp, Homo sapiens
  misc_feature (7)..(7): n is a, c, g, or t
  misc_feature (17)..(17): n is a, c, g, or t
  misc_feature (91)..(91): n is a, c, g, or t
ctgtggnagttgctgtnaaatatgcatgttcctttcatgtgtatttaatcatgatgtttaattttgcacaatatttgtaatgtttcttttnaaataaaagtgaaaaattttgttgta

SEQ ID NO: 702898 - DNA, 435 bp, Homo sapiens
  misc_feature (117)..(117): n is a, c, g, or t
  misc_feature (142)..(142): n is a, c, g, or t
  misc_feature (406)..(406): n is a, c, g, or t
  misc_feature (418)..(419): n is a, c, g, or t
  misc_feature (421)..(421): n is a, c, g, or t
  misc_feature (433)..(434): n is a, c, g, or t
gtagtagccgcttgctgtgaagacacatcttgacagtccaagtgattttgtgaccagtgatttgggtcctgttttccgctcttctaagaaaaagataaaaagagccgtgagttattngcccagccaataatgcatgttgttnactgtgagttagcaagccatgcctgactgtcctgatagcatatactgttttctacgttgttgttgtattggtatattatggtgtggttcttatttgggtagtttatttagtgtgttgaaggttctctgcaactgtctttatgtgtcttcctgagtgactaataacgtgaaaggttctgtaaagacatgtagagatgtcaaaactctgcggatgaatgtctataacgtgttctttagtgtagaagggaaacactaaagttctagnatctactggagnnanaaaagagaaaanna

SEQ ID NO: 702899 - DNA, 2312 bp, Homo sapiens
agaggttgtggttgtgttagtagttgtgtgttattgttgtagtattttggtttatgtagttgctgtttcttgttgtattgtctatgttgtgtgtatgtttatttgtgatgagggtctatcgataatagtcttattatttttatttgtgattgtgttataggtattgtctatttattgttgttgatgttgtgttattgtgtgcgttttgtttgagtaatttggatatgcatgtgtgatgttatgtatatgtgtgctcggttatgtagatgtagttgttttttttttgttgtatcgattatattatttgtagtgatatattcgttgttgtgtgtaggatagtcattttgaagtagaagtgatcattatatatgctattgtttagtgttattatagtaagtatgtatcgcttatgtcgtcgtttcgttgtatgtagaatcgatggagtgagagtgttgagagattattgatgtgtatgtttagttagtgtaagtagttggtgttgttattatattgcttaatacgtggtgattgatatggagtaagttgatcatgatagttttgaatattagtgaagtaaagtatgcagtatagtagagtatagagagtgtatgtatagttatgtgattatacgtattgtgattgtgatagcttttgtagaggtaatagtaggttagatgttttaaagtgaattagatgtattctgagaggtcattgttagttgttggtatatattattatgattagtgtagtagatgattagttatttgtggatagttagtttgtgatagactgtgagattgtgtagtagtgttgatagattggtatgaggtgatgagtgtattgttagagagttgtgtgttgacggaatatagagtgtgttatatggtagagtagtataaatgcgacagtattatagtgatttaattgtgtatgtagtagagagtagttgtatagatgtggtcagctgatatctggtattgtgtgctatgcatatgatgtgtaattttgactgatgtagctgctggaagattaggcacaacaacaagatgtggaggacactacagacacaagagaatagtaggcacaggcacgttgttcttcatatggtttataaggtggtgtgcctctggtgatcacgagctaaggtacgtgtgtcttgtaccacacacagacgtgggtgtgtgttcgacgctgttttcgctctgtgggttatggagaggtagatttcctgatgggtcaccctagtatgccacttggtgtcggtgtgttgactcgccgtttgttcatggaacttcgggttgtgggctttgactcttttaggggtgtccataatcctgtgtggtgtggggcaaacgaccaacgatgggacctctgtgttcgctcgtctacaccctccacagggttgtggtggccaacaggaacttcgggcacttataggtgttccgttggcggttgaatgctaccccggcgctaatggtggggccccaccaacaccggggtggggtttcccgacacgcgtgtccacatccgtttgtggactgcccgcaaggggcctggttgtctatcccaggcacgccctttagcagtggtgttccgttgtataaggccgcccttttggcgcgccagagcgccgccgcacaggtttagttgggaagagggccacaggctcaagaggcgcaccattggtgttttgcccccccaatataggaggagcctcgggggccctcgtgctccagtgcacacaggggtttgggggctcttataatgagctgttgagctaaaggttagcccgccactgcctgtccttggcccgcgaaaatagggaggatgcctatgaggctcacactgcaacggggcactgttgtggctgtctgaacctctgtagaagggaggacgcgtggttgtagcctggcttttctggagaatgtgagctgagatgctcactatcgctaggaaaagggctctgggggccacgcgaaggaaggtggggaaggggccctctccttcggacaaggtacggaattatgatcacttatgctcacgtgaacctccctaagggtgtttcgaatgtggctaatggtgttcataccgtaccacacttgggcttggtaaatgatgctgcccaagcttccccgaggaggccaccacgcaccacgctttgccgagaacgctttccatataaaatttataccaacccaggtctggcactttgtaacacacccgccttgcgaagcctcctccaactcgcgggggccgggggaccccgtgaaccgaaaggccctttgggctccccttaagcaaatgccacccca

SEQ ID NO: 702900 - DNA, 440 bp, Homo sapiens
  misc_feature (49)..(49): n is a, c, g, or t
  misc_feature (51)..(51): n is a, c, g, or t
  misc_feature (333)..(333): n is a, c, g, or t
  misc_feature (407)..(407): n is a, c, g, or t
ctgtcactcaggctggaatgcggtggtgccatcatgactccctgtatantntaactcctgggatcaagcgatcttcctgcctcagcctcctgactagctggatcacaggtgcataccgccatgcccagctaatgatttagtttttatagagatgtggggtctcactatgttgcccacactggtctggaactcctggggctcaagtgagccttccagccttgacctccccaagtgctgggattaactgttaactggttgattttatggacttttttaaacaggatttggaggcagttacattgggaacactggcatttacttttcatttataanttagggatgtttcaaaaaggctattacaacttttaggctctcttacagggacacaactggaatgtttaagggantaaatctggcaagtattatggttctaaatatgg

SEQ ID NO: 702901 - DNA, 939 bp, Homo sapiens
  misc_feature (429)..(430): n is a, c, g, or t
  misc_feature (435)..(435): n is a, c, g, or t
  misc_feature (438)..(439): n is a, c, g, or t
  misc_feature (444)..(444): n is a, c, g, or t
  misc_feature (447)..(448): n is a, c, g, or t
  misc_feature (450)..(450): n is a, c, g, or t
  misc_feature (499)..(499): n is a, c, g, or t
gatccttatatgctgtctcactctgtcgctcaggctggagtacaatggcgcagtcttggtcactgcaacctccacctcccaggtttaagcaattctcctgcctcagcctcccaagtagctgggattataggcacatgccaccacgcttggttaatttttgtattttagtagagatgggggttcaccgtgttggccaggatggtctcttgtctcctgacctcatgatctgcctgcctcgacttcccaaagtgctgggattataggcgtgagccaccgcgcctggcttgacatatcccattttttatctcttttttggaatataatattcttgccctcaactcttcctagtgtcccccattctagagaccctctgtttgcccttctagaaaataactgcagtcttctgtagggtgaggaaaagacattcannctctnggnntcctnaanngnagagaggatctaggagtctttcttatcttcctgttataacgtttgccancatttccagagggaattggttctccccttcctatgtattttcatagtgtaagtctcttcaccaccttcccatccctaccctgtgtttgccacttaggattcagctttcttggctctgctgagacatgtattgcttatctacctgctttccaaatttcaaattttgtcgctgctatcactttggttcttttttgtccttatggttaatgcttatgttttcctccctactcattcagtgaggtatgagaaagaacagaggctgtgcactcattctgctatctctgactggaagtagcccgagctgccctttatctcctctcttctcactttttatcctgccttttatctatttgtcgcctctgacttctgacttttaccctcaccttgttccaagcccagtcatctttaaataccttacttttctcatctcattgggcctct

SEQ ID NO: 702902 - DNA, 1210 bp, Homo sapiens
  misc_feature (688)..(688): n is a, c, g, or t
  misc_feature (746)..(746): n is a, c, g, or t
gcatgacgctggaggatgggcggggatggcgccccgaaccctcctcctgctacatctcgggggccttggctgtgtacccagaggctggtgcgcgcgctcgcagtccaatgacgggtaattctctgcgcaccattcctgatgttgcacgagagcgcagagctaggtgcgcatgcatgacctccggtcttctactccgccgaaggtaggcgccgtagcaggtgggcacctgaagaccggcgagctattcgctggctgagttgcgcacaggctgaatgcgcgagacgaccaacgtagggtagtggatgcccggcggcgtgccgtggactcgagtcgacggataacggctcgtcgaaggatactttcgtgcgtatctccaggcgacctagcagccggcaggagtgctgcagacggtccacaggtcgatggaaccatcgtaccaccgcatgttggcacgctggttgggagctccatgccggccgggatactgagcaatgcatgagacgcaacgccggtttcgtcgcatcgttgatcgatcagtggtctgggcggtgcggatcgttggagggatcgggagtcgtagcagcgtcttcgtccgttggagatttggggaccgtgcattgccctaccatagtggcgtagcggactttccgaatcaagcgcgcgtgatcacccgacgtagttcgtggcngcgtcttgatggccacggttgcacggacagttgtgcctggttgtctccgcatggtcancaccaaagcgcctatacggtaggagcaagcgtcgggagccactggtccgttgggcacggatggcaacggggttggacgcaaggtccttaccctttgtgtacgcgtggcaaactgttgtcggttaggggaatgtctgtggcattaccgggcggaggaattacccctttgggtagggaaaacccgtggcaaccgtgagggtacgttcctcggaaaaggaccgcatattaggggatcactctccacattccaattcgcaaacattccactttttcgcagtcggcttaggcgaccaccacaagagtccatccctccgagccctatctggagggcggttcggaccgccgtgcattaggaatgagttggggggcccgcgatattggccacttttattaacccccctttgataggaaggggagtgctagctcccatgttgcacctgttgggcgcctggagggactgggggc

SEQ ID NO: 702903 - DNA, 292 bp, Homo sapiens
  misc_feature (101)..(101): n is a, c, g, or t
  misc_feature (119)..(119): n is a, c, g, or t
ataaggagagtaatatgggtttgcctatcccaccccatggtgccaaacccatatactctcctatcctcaatacctccctctactacccattactctgttcnggatctcaaacatgcttnctttactgttcccttgcccccttaatcccagcctctcttcgctttcacttggactgaccctgacatccatcaagctcagcaaattacctaggctgtactgccccaacgctacgtttcttttaattcttcaggcttcccttatctctgctgttcctcttctggtgaggagataa

SEQ ID NO: 702904 - DNA, 1392 bp, Homo sapiens
tttattattatttaattacggttcagtctaatccttatataggtagtacactcataggccaaacttagggctaggatgcatgcattacactcaagaagggcatgcaccatcacactattaggtggccaggttagcttgcttcgctagggcctcagtggctcaggggtctaacaaggcaggagcaattctcctagaactccacacatcaatcaagacaaggctaactcacgctctcactcttacacacacagaacattatatcatagagacacaacgagggcacacgcgggcgcggtggcggcacttatcaggcgctccgcacacgcccgccacatcgtataacgaggtggtggcaattttctctctagtgatacgccgagtgggaaacgatatgagtgaggtagacgcgcacacacaaatatgtgcacataaacatataatatatacatgctacaacgtaaacatgcgcgtacaagcggcgacgacgtgtgtgtactgcgcactatcctatactcacaccacccgcggtgctacacaatatgagcgcgctatatacatataccagacacacacaccttccgaaaaaaaacaatcggcgcagcgtcgtggggtctaaaaaccagcatactacaccccgcagacaaactcgtcgagtaccacgatgcagaagcccacacattgcacacaaaaacgcagcgacactaagagcgccgacagcagaccccacaccgaaggagccggcaccgccaccgccgacgaaaacgtcattactaaatagtcacggtcaggagcacggacgcagaaaagtaggagtatcccaaatacaaaaaggatccaacaaaaatgaataaacgacagagacagaccacagggtggctaatgagagcaatccccaaggagcggtagctagggccaacaggagacggattaaacgacccatcctatataactcataagcaggaaccttaaactactataagagccagaggtagtagcacgccccccatacaaaagaaatattgatgcggagaaaaacccaccaccttataacagcggagacgacaaattcattggggctggttaaacccaccccgcaggcaaatgattacagcacccccagacacccatataaccagatagtgcgagagaaccacccaaaggcagtccaactatatatcaggagggagcgcctgttggacccccacgccaggggtacagaatgtaccccgcgagcaaaggatcgaacaaggtatggtgcactctaggcaacaacgcagaaggggagttacaaacgacgcgcaggtagaacaagactacaaaggacacgaggagagcaccaaagcggaggcacattaaacagacgaggagcaggcagacccccacacaggagaa

SEQ ID NO: 702905 - DNA, 136 bp, Homo sapiens
gattggaggaggtgcagaaggtggacagggtaaaagaaagagattttttctaaagaattgcgatgtatgatgtatggctttggggatgaccagaatccttatactgagtcagtagatatagaagagtgcacttttg

SEQ ID NO: 702906 - DNA, 1169 bp, Homo sapiens
cttgtgaacactgaacacaacaaagagtatggatatgggaaagcaacatcctatctattagtaaggcttcatggaacatcccaacacaggcacagtcaacacaagtgtagcacacagcaagttcatcggcttcagtggtctgtccagatgcacaagcaattaccaagcaacactggagaggattcctaacacaaacagcttttgggcaacatcagactctgtcagcatactgaaggaaaaggagatattcagcaagctaggaagcgggcagcacaggagacagaacgtctactcaaagagtcggagcagaatgcaaaccacccacaccggatcgaactacagaacatttttgaggaagcccagtccctcgtgagagagaaaattgtgccattattataatggaggcaactgcgtaactgatgagtttgaagaaggcatccaagatatcattctgaggctgacacatgttaacacctggaggacaaccatctccttgcggcaagcaaggtatcacactttaaccacaaatctgtgcggtgcaagagataatcgaagactgcatgaaaaagcagacttccctgccgctataccgaggatgcacataccttccgttgccacaatcagattcgtgatgtgtgcaggtgaacaaggacagaggggtcctgatagcacttctgcatgggtgtgaacaagaatgaagacctggcaggcaccagtatcccggtgagcacacggggaccgctcggatgagccgggatcgactacaatgtgtcgggcccgaacaggaaacaccaactaaccgcagcacagcagaaaaacgacacaacacaccccgaccaaacggcaacggcacaagacacaccgaacgcgagcaacggaatggaacgagaacacaagcaaccaccgaccacatagacggacacaaaaacgcaagaaaaagaggccagaagaaggccaaaaaaaagaacgagacgcaacgcgaagcaagacgcaagaagcaacaacgaaaagaaacactgagaaacgaccggaggcaacaaaccaaggagagagagcacaggaaaagaacgaacgaaaaggacgacgacgaagcacaggagcgaggaaaggacaaaaaagccgcacacagagacaagagacaacacgacagtcacgcaaaaagagaacaa

SEQ ID NO: 702907 - DNA, 161 bp, Homo sapiens
tgcgtgctttggattcattcactgacaaagaactaatcttccgtgatggtctcctgggttatggccttgatcttgggagtgcagacactttcatgctcgactttgattcttcccgtgtccttcactctctccctccaggagccgtcggtacgtggtgattt

SEQ ID NO: 702908 - DNA, 881 bp, Homo sapiens
  misc_feature (1)..(1): n is a, c, g, or t
  misc_feature (67)..(67): n is a, c, g, or t
  misc_feature (71)..(71): n is a, c, g, or t
  misc_feature (91)..(91): n is a, c, g, or t
  misc_feature (97)..(97): n is a, c, g, or t
  misc_feature (122)..(122): n is a, c, g, or t
  misc_feature (138)..(138): n is a, c, g, or t
  misc_feature (143)..(143): n is a, c, g, or t
  misc_feature (171)..(171): n is a, c, g, or t
  misc_feature (173)..(173): n is a, c, g, or t
  misc_feature (176)..(176): n is a, c, g, or t
  misc_feature (178)..(178): n is a, c, g, or t
  misc_feature (181)..(182): n is a, c, g, or t
  misc_feature (192)..(192): n is a, c, g, or t
  misc_feature (196)..(197): n is a, c, g, or t
  misc_feature (244)..(244): n is a, c, g, or t
  misc_feature (255)..(255): n is a, c, g, or t
  misc_feature (259)..(259): n is a, c, g, or t
  misc_feature (279)..(279): n is a, c, g, or t
  misc_feature (282)..(282): n is a, c, g, or t
  misc_feature (313)..(313): n is a, c, g, or t
  misc_feature (321)..(321): n is a, c, g, or t
  misc_feature (343)..(343): n is a, c, g, or t
  misc_feature (352)..(352): n is a, c, g, or t
  misc_feature (354)..(354): n is a, c, g, or t
  misc_feature (364)..(364): n is a, c, g, or t
  misc_feature (367)..(369): n is a, c, g, or t
  misc_feature (382)..(382): n is a, c, g, or t
  misc_feature (392)..(393): n is a, c, g, or t
  misc_feature (400)..(400): n is a, c, g, or t
  misc_feature (406)..(406): n is a, c, g, or t
  misc_feature (426)..(426): n is a, c, g, or t
  misc_feature (430)..(430): n is a, c, g, or t
  misc_feature (435)..(435): n is a, c, g, or t
  misc_feature (450)..(450): n is a, c, g, or t
  misc_feature (455)..(455): n is a, c, g, or t
  misc_feature (461)..(461): n is a, c, g, or t
  misc_feature (467)..(467): n is a, c, g, or t
  misc_feature (469)..(469): n is a, c, g, or t
  misc_feature (501)..(501): n is a, c, g, or t
  misc_feature (508)..(508): n is a, c, g, or t
  misc_feature (519)..(519): n is a, c, g, or t
  misc_feature (525)..(525): n is a, c, g, or t
  misc_feature (542)..(542): n is a, c, g, or t
  misc_feature (547)..(547): n is a, c, g, or t
  misc_feature (552)..(552): n is a, c, g, or t
  misc_feature (554)..(554): n is a, c, g, or t
  misc_feature (558)..(558): n is a, c, g, or t
  misc_feature (651)..(651): n is a, c, g, or t
  misc_feature (663)..(663): n is a, c, g, or t
  misc_feature (751)..(751): n is a, c, g, or t
  misc_feature (875)..(875): n is a, c, g, or t
ngcacaaaaggccattgggtggggctggatggagcatgaactggtccttaaaggatgcggatcgccnggcnggcccagcctatggagaccnggaggngagggagatgctggtgactggaganggtgagagcctgggcnggggnagtttttagtcatgggcttatggacccncnccncngcnncagcgagcgnaggnntttaagaggcaggcccaagaagggaaccccaggaagccctagaagcnccccagcgccnccancccatggacccggatccccngcnggagggggaagttgagcagtggcccaaaganacagtcgncctcctggcttggggctggggntaccagggncnccaagggggnggnnnggaaccagagggncgcagagganngggggcngggggngaggcccgccaagaggggcngagnggagngacagcggagagagngcccnggcccngggggngnggggcggcccaggagcgggccataaaggaccngagcgcnggggccagacngggagnggggggggggggaaacngcgcnggggncncccnggagcagataggtctggaccagagtggggaggccacaggtctctgagctgttatgggactcccagggcaccggcttcttttcatcctcctccngcactgtgagcntggtgatgggtggcgtgccaaggccgggcagctggaaggcatcctcctccatgattgtgggcaccaggagcccaggctgctgttagcngggtctgggacacttggccagaggggattcttcctgttggggctgcaacagagccaggcagtaccacagaggcaggtgagccacagcaggaggccgaacaggcccaggatgatgtgtactccgnccctct

SEQ ID NO: 702909 - DNA, 923 bp, Homo sapiens
ctcgtagaatatagcgtgggttgagagttgagccgccgctttgccgtggtttgcccgaaagatgtgtccgggttccaagcgcgttgataccaaacaagggttgtatctggccgccacgcgtgtgcgccacagatttccaatatgtgtggacgacacaagaaaccgcgaagggtcttccctggggtgttgttaaccaccaggaggcactgcccgctgtgtcgtgtgtgttgttcaagaaaagtgggacacccctttatggcgaaggcaccctcttgtcacaccttaggtgcaggccataagtgtatgtattaccaaccttcgcttggtgatgtacccgctcgacctcacttttgggagagcactcacacagagatattagccgtggagttacgctctgggcaggaccgccccgcgggtttctcgtggctcctcctcgcttggcggggggacacactatgtagggtgggagctcacctcacgtcgtttgtacctgaagtgctgtagaatagggtctgtggcgccccggcacttgagttgggaggagcaagacttgtgggggtggacgcactcgttactttgtcggagagcgccgacgatgtagtgaaacttgagtctgctagtgctcccctcggttgggtgttatgaagaattggccctggtgcggcgtttctgttactcctatctgctgttcctcacctggggcgatcccacgtctcagacactcttgcggcataattctattgggctcctgaaaagcacttcctgctagtttattatgaaacctagtgttactgtctgatgctgggacgacattgtatttcggaacagacaaagtttcccacaatatatgacccaccccgtgaaacctcctgtcactcctttcgcctgcaaaatttttttttgcccaaatcagcccacataac

SEQ ID NO: 702910 - DNA, 92 bp, Homo sapiens
tgtgtgccttttctcatccgcttttgttgtgtgtgactccaaagaatgccaagtgtgcgctggggcgtgaattaaactgaagcccaggcctc

SEQ ID NO: 702911 - DNA, 390 bp, Homo sapiens
  misc_feature (152)..(152): n is a, c, g, or t
caggatcccccggccgccaagcttctcatgttggctctggttaccagcaagatgttgcctcgcaatgtgtgtttaggttatcttatttgttagatggaatcggccttggtgtccctgaagtagacacaaggtgctccatggcacatctcaanaaatccacagatatttggtacctccaggtccaggcaattgtggttcacgcactgttatcccacgcactttgtggaggcctgagtgcgggcaagatctactttagcgtcaggctgtttgcagaccagccctggccaaggcttgtgaaacccctatcttctactgaagaataccatacacttagcttcgtacattgttgagtgggctatcctgtacatctccagttacctttggagatcc

SEQ ID NO: 702912 - DNA, 231 bp, Homo sapiens
ctgacgtggaggaatgtggcctaccaatggtgtcagaggtaagtacacccatcatgcctgctctatcgtgaaggatactgagactctcggggggaacagcgatccgtcacatttacagacaaagaacagagtgacctggctaacaaatggctgatgcgaggttgaatccgtctgacccgaagcctgtgacaaggcgccctaagacagaggttgacaaagttctttttttct

SEQ ID NO: 702913 - DNA, 502 bp, Homo sapiens
gatgaattacttctgggtcttgggaatataggtttctccaaactccgggtaggtgtcatgggccagtgggtgcgcgcgaggggctgggagcatagcggtggtcaaacaagccgggtataaggcaaagggtgtttgagggcaccagctctcttgaagccagtggcaggcagagcaggggcacaaggccctttccggtcaatttcctttaaaggtttcaggctttggcaaccaatacttccccccggtgaacccaaaggactttgggtttcccgggaatgctggcccgggggggtcatgggagaataacggccggccatcatctgccgggtcgggcactcgttaatgggtcgggaacatacagagggtatctggaatcggtcttcgaaacctccggactttcggtctctggattattggagaaacattcttggggcaaatggctttcggctctgggtccggtcgtggcggccggcgtccaagaaatttccacctcttagcgggg

SEQ ID NO: 702914 - DNA, 219 bp, Homo sapiens
  misc_feature (208)..(208): n is a, c, g, or t
tgactctccaaaatgcttggattaaaggtgtgtaccacaatgcctggctccttttatgttgaagggacttaaagggttcagagtcagtcctgaagatactcttaaagctctgggaccaggagacgaaatgagctggggaagactgagtgagtgagtgagtgagtgagtgagtgagtggctggctgtgtgcacacattggttgtctganaagttctgtca

SEQ ID NO: 702915 - DNA, 100 bp, Homo sapiens
agcggagccgttggcagcggcagcaacaggaagccgcggggtctcctcccgcacctgggaagcaggcttctcgctgttacccgtggtgatcgccgctcgg

SEQ ID NO: 702916 - DNA, 334 bp, Homo sapiens
tcttggtccatcaggtgggagtacactccctcaggtacggacataatcttgtgatccatcgtctctcagtccacggaaaccgacttatgaatactgactgctcaccccacaggacacaatcttggacattaacccctgaggctccacctacccaccctttcatttcacccccatgaagcctaaggtctaatacctgatgggagcacagatgtgagactcaagttaaacgaatggggcaggaacaacctgtccactgcaatgcatcagcagttacatcatatgattgttgccccacttcgattctatcttgagatctgatgtgacgaatactgcg

SEQ ID NO: 702917 - DNA, 523 bp, Homo sapiens
cagtcagcatttcaggattgttgataaccatgggcatattttccccaaataattttgccgtccttgcttctcaatggcccgaattcgcgtcacatttacttcaatagacagtacctttggtaactaacacccaaagttgtatacagtgcggatgagggattcttctttacaccaagtattgctaggcaaaaggtggctttcagttcaggatgtgttacatgggcttgcttgaaacgcaagcccattggcctgatgaatctttcatatttaggtggttttcttgtaaagccatctccaacaaagcacactttagtaaccattctcttccatgccttcttctttttctttcctgttcgaataacttttaatacttctgtttctccctgggcacgtactttaggcagagggacttcccattttcccgccttctcttttcttttctgtttaatcatattggaaagtactttagctcgagattgtccctctctgtccagcagataggcaggtactgctccctgtggtg

SEQ ID NO: 702918 - DNA, 700 bp, Homo sapiens
  misc_feature (38)..(38): n is a, c, g, or t
  misc_feature (131)..(131): n is a, c, g, or t
  misc_feature (376)..(376): n is a, c, g, or t
  misc_feature (384)..(384): n is a, c, g, or t
  misc_feature (623)..(623): n is a, c, g, or t
tagagaggctcagtaaccagcccaaggtcacctgggtnagaaatggtaaaatgaatccaaagggaaaatcttacatacacttcagatatagctgccaaccataacaataacgtaatggggcagggcacagnggcttatgcctgtaatctcagcactttgggagaccaaggcaggcggatcacttgaggtcaggagttcgagaccagcctggccaacatggtgaaaccccatctctactaaaaatacaaaaaggtagccaggcatagtggtgcacgcctgtaatcccagctaatcaggaggctgaggcaggagaatcacttgaacccgggaggtggagtttgcagtgagccaagatcacaccattgcactccagccngagcaacnagagcaaaaatattccgtctcaaaaaaaaaaaggagagagagagatagagaacatattcatgttgtttttgtaataaaaatgtaactgtaaagcattttaaaaattcatagaggataattggagaaataggattggactaaattggctgatttgcctcaactctggaaatgggaaattcaggaattcagtccccgtcccctgggtaaaagacatattgaagggctcccccatttctttnttttttccttttttattttttatttttttgtattgatcattcttgggtgtttctcgcagagggggatttggcagggt

SEQ ID NO: 702919 - DNA, 1168 bp, Homo sapiens
  misc_feature (596)..(596): n is a, c, g, or t
gtgcacctgctttacttcgctctgcacgatgtgccggtggcgggactcgtgggggaagataacggtgttgcttcttccgcacatgcgtgatacctcttatagaaatgctggtggtgtttctaggaattccaaaagttgttacaaggacagggaggatgacagaatcaggtcctgcgagttgcttaattcaccgaatatggcgtgagattctagatgaattgaagttgaaaattaggtgacctatgaactcagggaataactacttaccatactattgtagacatggacaacgatatttacgaatatatagaatgtgagacgaaagatgagggaacagttgatatttaagcatggtacttaaaaacagatgataagggaatagctaagaatactaaatagcattgtgactataacacgacgttgtttttacccacaaggcaggacagggatgacaaacatcaaagggtccagattaggagaaagataggctatatggaaaaatgggtttgcataatactttcacttctatgaaatgcatataattaatttgacgcgagggttgcacaattagcgaggttcgaagcatgcaaaagtanaggtggctcgtaaatgggttgacttcctagccttgtatccctttggaggtttacgctacgttggagaattcgcacccgtgtatgaacttccttcatactcaaaggattgaactttattaaggactgattgactgaaaggtaggggctttaggcttgggctaccggaattgataatagatttcctatttcctcaacgtatagttgcgccggttgaaaattttgggtcggccagtcttaccccaaagcggaagtaatttggctaccctataggggcaagagcaacgagagacactaggattatggctcaagtaattgtttcacatgtgtccttccagcgaactagactaatttccaaatgtggggcctatgtctctcacacactgttaacaattggtttcgccattggctcactgaatgtgtcttatgcgcagggcccaaagaattccccataaggactaagtttgaaagctctggcggccacgagggaaacccccctgccgtgtgggggcatttaactaaacgcgcaacacctgtgctgccgccatgttgtggcttggccgacaatagtgttc

SEQ ID NO: 702920 - DNA, 980 bp, Homo sapiens
gtgtgacgtagagcctgggggagagtggtatccaggtgaagggggcagaggactgtgagttctcgtcctcttgaatattagaactcggacaaacagagtggtaagcttacagtctctgatcgatccgatgtgcactgtgtgtcagcacttggagcacagtatgacactacgatcgtgcggcgcgcagggcgggggggtcggcgttgctcgccgcgtgatggctggcgcatgggctcggcagtcgagtagcgcggcgctgattcatcgtatcagccctgacatctggagatggtcagagcatgctgcttgtgttgtgcttgctgtccaatagcctccggggcggtgaggttctctgtcattttttgtattcttcgtatgctgtgatcatcacgatcagtatctgttgctatttcccggtcgagctggttgaattcccagccccagaaagtggaagttaagatatgtcggatgactttctcattggccgctatgtcctgtctcggactttccttcagtagccatcgttccttgtaggcctcttgcttggtttttatccatttatgttcttggtaggccgagtctatgccaaagcactgcactccgtagtgaccacatcttcaggattactgaccaaccgtgttctctccttcatcgtgatgacgttgatgagcaggaaggtcactattcagagtccgtcgtttgacatgcctcaatgcttaaggttagaggagtatctgttccatcatggagaacaaatctctggagtccttggctcccagaaactgattggcaaatgtccctgtgggggtagattcttacacgcgtaaaacgaattggcatctccttagcaccggccttagagttccaccgtttgacgggaaacaacggggaccgcaacggctccccgcccctcgggcttggcaaccaccggccggcccgcaactacaaaaccacggcgttgccgcccccacggtggcccg

SEQ ID NO: 702921 - DNA, 385 bp, Homo sapiens
agctcgatccctatccgtgcccggggttggtggcttacgcctgtaatcccagcattttgggattttgaggcaggcggatcacctgaagtcaggagttctagaccagcctggccaacatggttgaaaccccgtctctactaaaaatacaaaaattagccgggcgtggaggcaaatgcctgtaatcccagctactcgggaggctgaggcaggagaattgctcgaatccaggagacagaggttgcagcgagccgagattgcgccacagcactccagcctgggtgacaagagtgagactttgtctccaaaaaaaaaaaattgtactgtttaacagctgtaaaaataaaaaaacgttaaacagtaaggtgcatgtacatttcacgattct

SEQ ID NO: 702922 - DNA, 276 bp, Homo sapiens
gtctctttgaacaatgactgtagaatggctacataagtatataataaatattttattaatattttgtactgaaacccgtggccaattgacaaattttactttggggaaaggaacatattcggacatatctcaggcatagactgtatcagaggatatataaggctaccatagttctcatcttagagtgggagagaagagtctaaatgttaaatacagttctgtctcaatttatctcacagccagttcacagtattcactgtgaacccaacgcatgtg

SEQ ID NO: 702923 - DNA, 1041 bp, Homo sapiens
gtggcgcgtgtaggtcgtggtacttacgttactgtctagtgaagcgtcccgcgaggtctccgacagagcaccatgagagatgtgcatgtactcacaatcagctgatttaagaatacgactctaattcggcgcctatcacgtcctcaaatgcgcacagaaccccttctcggagtgtagcttctctatgcttaactagtgacatcgtgtgtggtaaaacagcttatgacgtcgcacgccaaactccgtcacagaagtatcttcgcccaactataatgggaatagctgtgattacaccggggtccccatgttgactaccacaccaatactgcggcaacaagtaacaaagtcccacgaagccggaattgttaccccaaattgcagcggcgtagctatgaacctctctgaattgcaggcacacatatggcatgactgttctaggtggcctgggattctgagtcgctaatagggtcatgcctgtcttggtgatatatcctgggatgctctcgcattataatggtatagttcaaaagataggcactaaatgattttctgcctctctatgtgacacgctcatatcaacatgtggcctatgaacgtgcacttaggacccgacggatccatacctactatttaaaatggttgaaatacgaggtggtacgttaactaaaaaattgttttcatcatgtccaaacacaatacataggaacaagggtgggcactccgctacatatactctccacaagggggtcccctaaagtccctaaagtaccatacctagtcttctccttagtgtttggaagagagcggggcactactcaaaagtgggggccgtaataaataaagcctagagggcactgtggcccgtaggtttgtgaccaccggctcgtaagagtgtgggccaacacatggggccccaagggacatcctttgggaaccagggaccccttttattttccggggggggggccattattgggggcgcattaccatatacgaagatttaagcggctcgagggtaaaattataggttttggagagcaa

SEQ ID NO: 702924 - DNA, 263 bp, Homo sapiens
tccctctgagccccacgccagacgtgccaccatcagcgtctcgttctcttcctctcactttccaattgctctgtatcggagagtaggagcacggcacggagggagcgagagaattgctcaacagttgcacgagctcagactagtgagcagcactagggaagagcccgccatcaatgcctcaccactccacttctggcacatggccttcatgcctttacactatccaccttccaaccctcctttgctagcttaagtaaattctg

SEQ ID NO: 702925 - DNA, 111 bp, Homo sapiens
tattacataaatgctgttaactatgtacacacatcaattatgtgcgtgatttaaaatctacttattttcatgatattcagatgtgttagtattttttttttttacttggcg

SEQ ID NO: 702926 - DNA, 107 bp, Homo sapiens
gtattgcatcacaagtcataaagggatcaaatccccgcaatattccttggacatgtctgccacatttaatttcaatgaaaacttcttgtccgtaaattttttcaact

SEQ ID NO: 702927 - DNA, 759 bp, Homo sapiens
  misc_feature (328)..(328): n is a, c, g, or t
gtgcgccccccatgggtcaatgttcacgtgtcttcgaaaatgggaaaccgtcaccccaggagtgtcagagacatcttcctgcccagggaagacccccttgttccgcaagtgtcccctatcgtccccgtcctgccctccagctgaggacgtttacgactccgggtggacccctggggcttggatgacctcttttccagccctgggagtttgatgctcccagccctctccccgagactccgagacgtggtgtgtgccctgggcctgactgtgggtctggtgggcatccattattgggacccatcttcgatcaatccagggattgcgccanagccaatgccagccagaccccgggggcctctgtttaggccacctggaggtgatggtgtttcttagagagaagatccctgagagaaacttctgctttaatggctttaccaagctggccatattaccatccttgacctccagtgaagcccgtcatcttcagccttttcccgccctatagccacccccagagtggttatgcctcctcgattgctccatactctaacatctagctggcttccccgtctattgccctttcccgtatctattttcctctatttcctatccttttattatcccccagccatagcctctgggattaaacataccggagtctgtctctgctatgggatgccccctggggcctctcttgtgtacttattgtttaaggtttcctccaactgtgatttttctggaccccataaactattttga

SEQ ID NO: 702928 - DNA, 585 bp, Homo sapiens
  misc_feature (13)..(13): n is a, c, g, or t
  misc_feature (46)..(46): n is a, c, g, or t
  misc_feature (69)..(69): n is a, c, g, or t
  misc_feature (74)..(74): n is a, c, g, or t
  misc_feature (91)..(91): n is a, c, g, or t
  misc_feature (94)..(94): n is a, c, g, or t
  misc_feature (97)..(97): n is a, c, g, or t
gcaggcccaccgngcgagcggcaaggtctccgcgcgctcccgggtntcctctccccactgtggccgcgnggganaggacagtgagcggccngantgnctgacgagattgccaaggctcaagtggcccagccggcggcgacacgatcttcggcaagatcatccgcaaagaaatccccgccaagatcatcttcgaggacgaccggtgtcttgcttttcatgacatttcccctcaagcaccaacacactttctggtgatacccaagaagcatatatcccagatttctgtagcagatgatgatgatgaaagtcttctaggacatttaatgattgttggcaagaaatgtgctgcagatctgggcctgaagcgcgggtacggatggtggtgaatgaaggtgcagacgggggacagtctgtctatcacattcacctccatgtccttgggggtcggcagatgaactggcctcctggttaaagcaggttggggataaagtgtccttctctagatagttggcaagctccagtaagataaatggcacacgtagttttgcctgtatatggagaaattgaagagatcatttaaaattc

SEQ ID NO: 702929 - DNA, 106 bp, Homo sapiens
  misc_feature (44)..(44): n is a, c, g, or t
  misc_feature (50)..(50): n is a, c, g, or t
caagacagggaaacgttatatgaaccatccataagcgtgcggcnagtcgnctgctttttagcgaacgacgagcgcagcgagctggagcgaggaagcggcgcatacc

SEQ ID NO: 702930 - DNA, 257 bp, Homo sapiens
ccgggctttggcggtaaggttgtttacatttcgtactcgagccctgcgctcttctgagagcgagcacgcgggtctgtatatgtcgcgtacgggcggtacggaggagaaaccaaggtgtatttttggtaaccccggacctgcgctggcaaaggagaagtagaaagggctttcagatattattggcccctagacctctatggattcgagaaacctccaggatttccctttgtggattcgagatcccgagatgcagaaga

SEQ ID NO: 702931 - DNA, 944 bp, Homo sapiens
gctgaaccgcgcggccgaaccctccggtgttccgacccaggctaagcttgtcgcatggcttgagcagggagcccacagcctgagcagctggtgcccagattgctatgcggataacgatgaggatgaggcactcggtcaatctacggagcgccccgggaccagaagagctagtccaggagatccaggagctggacacaggagctactgagagcctgcgaaaagtcacggcggccctgctgggccgcgtggtcctggtttccgcataccccagagcgtctcccaacgtcttggtgactggcctggccctggtgtgcacgtctcggccccgggctcccctgtgagctgggacctgagcgtggtcgagctgggtgagcttcaacgatctcagtcgtttgtgctgaatggagggtgtggccgtaccggattggactctctttccggtgttagcccgagagtatatgagtcgctggcattaagtacaagtcccagagtacttcacggaggagccgtcaacgtattgacaagacgtgactacatgtgttaggaccagcatagtggcgccctcgggccgaagacttactgaggtccgctgtagccccggtggaggacgcaccctacgggtatgcttgcccgggctgggtagcagcgtcaagtgccggttcacaagacgatcaggaaacgagcacgctgtcctggccagttgccgatcttcaccatccagaagggcctgtaattggcttgtgcccctgcagagggcgggcaggctgactgacggaccgacgaggacaggcgttttgtatcccgggagaccaggggagaaggcgcgtctcaggcagaagactccgctccgaaactccaggcacaggcacaatgaagtaccagaggtatatagcccctaagcaccctgtataagaaacacgctaaaagccgagtacaacactgat

SEQ ID NO: 702932 - DNA, 472 bp, Homo sapiens
  misc_feature (40)..(40): n is a, c, g, or t
  misc_feature (83)..(83): n is a, c, g, or t
  misc_feature (94)..(94): n is a, c, g, or t
  misc_feature (102)..(102): n is a, c, g, or t
  misc_feature (120)..(120): n is a, c, g, or t
  misc_feature (147)..(147): n is a, c, g, or t
  misc_feature (154)..(154): n is a, c, g, or t
  misc_feature (157)..(157): n is a, c, g, or t
  misc_feature (171)..(171): n is a, c, g, or t
  misc_feature (175)..(175): n is a, c, g, or t
  misc_feature (184)..(185): n is a, c, g, or t
  misc_feature (199)..(199): n is a, c, g, or t
  misc_feature (249)..(249): n is a, c, g, or t
  misc_feature (264)..(264): n is a, c, g, or t
  misc_feature (276)..(276): n is a, c, g, or t
  misc_feature (282)..(282): n is a, c, g, or t
  misc_feature (286)..(286): n is a, c, g, or t
  misc_feature (305)..(305): n is a, c, g, or t
  misc_feature (371)..(371): n is a, c, g, or t
  misc_feature (377)..(377): n is a, c, g, or t
  misc_feature (402)..(402): n is a, c, g, or t
  misc_feature (437)..(437): n is a, c, g, or t
agcttgaccacaagcctcgggcagaacagattcgcctatnactgaatcgactgaatggatggccagcaacagcctggcctggnaatggattggnagctcatnactaaaatgactcctttnatggaatccactgtaatgcagccaaantgaccanagngcaactgaataggngagnattggattnnagaggacaactctncagcagaacaattgtatgtataaagggactgtattatgatgaaataactntaatttcctggagcnaattgttgaatnaaagtntgtnaactgtttaaatgaatttnatttgaattaacaattatacagccactcagaggtcctacattcgccagaattggcatccagtggangggttnatttgaatgaaatggtttggaggcnagcgtgattgtttaaattgaatttcatcactattntgtgtattctatttatcactattctaaatgactca

SEQ ID NO: 702933 - DNA, 784 bp, Homo sapiens
  misc_feature (38)..(38): n is a, c, g, or t
  misc_feature (84)..(84): n is a, c, g, or t
  misc_feature (188)..(188): n is a, c, g, or t
ctgggttcaagccattaacccctcctacaacccccctntcacccacccatcagaatcccctatttcccccacctcaggcaactntgcccacctcagggcatgcccctgcagctggcccagttcaaggtgtgggccccgcccccgccccccattcgcttccagagcctggaccacagcagcaaacattngcggtcccccgaccaccacatcagcccctgcagatgccaaagatgatgcctgaaaaccagtatccatcagaacagagatttcagagacaactgtctgaaccctgccaccccttccctcctcagccaggagttcctggagataatcgccccagttaccatcggcaaatgtcagaacctattgtccctgcagctcccccgccccctcagggattcaaacaagaataccatgacccactctatgaacatggggtcccgggcatgccagggcccccagcacacgggttccagtcaccaatgggaatcaagcaggagcctcgggattactgcgtcgattcagaagtgcctaactgccagtcatcctacatgagagggggttatttctccagcagccatgaaggtaaggaacctgcttttctttcctcttctctcctctctcctctcctttcttcctttctttctctcggctattctttctcctaccttccttccttcctctttctttgcttgactaatatccaagcttaaaatggctcagttcccaggctaagatttgagatcatagttaaaccttcttagctcatgaatatagagtgttg

SEQ ID NO: 702934 - DNA, 608 bp, Homo sapiens
  misc_feature (130)..(130): n is a, c, g, or t
gcgatcgtgggcatcgagacgtctaacggcgccctcaccggccgctatcgggtcgtcgacgcgctcgccacgctcgccttcgactatgcgccccgcgccgcctacttccgcggcgagctcgagcagttcntgctgctcgcgcgcgaggcgcacgtcgacccgctgaaggcgacgggttcctacgccggcgcgatgggggccggccagttcatgccgagcagctaccgcagctatgcgcgcgacggcgacggcgaaggccggatcgacctgtggacgagctggccggacatcgccgagagcgtcgcccactacttcgtggcgaagggctggcgggggcacgagccgctggtggcgccggcgacgctcgtcgacccggacgtcgaggacctgccggccaaccgcctcgagccgccggatacggtcggatcgctgcgcgcccgcggcgtcgagatcgccgcaccggcggacgacgcgacccatgcgtggttcgtggcgcttcgcgatgcggacgcaccgagctaccgggtcggcttccacaacttctgggtgatcacgcgctacaaccgcagcgtcatgtacgcgctggccgcgaccgagctggcggccgc

SEQ ID NO: 702935 - DNA, 90 bp, Homo sapiens
aagagacagtcttgttctgttacccaggctggagtgcagtgcaatcctacggagaatttctagcccattagaagaacacatccatgaccc

SEQ ID NO: 702936 - DNA, 3468 bp, Homo sapiens
  misc_feature (38)..(38): n is a, c, g, or t
  misc_feature (84)..(84): n is a, c, g, or t
  misc_feature (188)..(188): n is a, c, g, or t
ctgggttcaagccattaacccctcctacaacccccctntcacccacccatcagaatcccctatttcccccacctcaggcaactntgcccacctcagggcatgcccctgcagctggcccagttcaaggtgtgggccccgcccccgccccccattcgcttccagagcctggaccacagcagcaaacattngcggtcccccgaccaccacatcagcccctgcagatgccaaagatgatgcctgaaaaccagtatccatcagaacagagatttcagagacaactgtctgaaccctgccaccccttccctcctcagccaggagttcctggagataatcgccccagttaccatcggcaaatgtcagaacctattgtccctgcagctcccccgccccctcagggattcaaacaagaataccatgacccactctatgaacatggggtcccgggcatgccagggcccccagcacacgggttccagtcaccaatgggaatcaagcaggagcctcgggattactgcgtcgattcagaagtgcctaactgccagtcatcctacatgagagggggttatttctccagcagccatgaaggtttttcatatgaaaaagatccccgattatactttgacgacacttgtgttgtgcctgagagactggaaggcaaagtcaaacaggagcctaccatgtatcgagaggggcccccttaccagaggcgaggttcccttcagctgtggcagttcctggtcacccttcttgatgacccagccaatgcccacttcattgcctggacaggtcgaggcatggagttcaagctgatagaaccggaagaggttgctcggcgctggggcatccagaagaaccggccagccatgaactatgacaagctgagccgctctctccgctattactatgaaaagggcatcatgcagaaggtggctggagagcgatacgtctacaaatttgtctgtgacccagatgccctcttctccatggctttcccggataaccagcgtccgttcctgaaggcagagtccgagtgccacctcagcgaggaggacaccctgccgctgacccactttgaagacagccccgcttacctcctggacatggaccgctgcagcagcctcccctatgccgaaggctttgcttactaagtttctgagtggcggagtggccaaaccctagagctagcagttcccattcaggcaaacaagggcagtggttttgtttgtgtttttggttgttcctaaagcttgccctttgagtattatctggagaacccaagctgtctctggattggcacccttaaagacagatacattggctggggagtgggaacagggaggggcagaaaaccaccaaaaggccagtgcctcaactcttgattctgatgaggtttctgggaagagatcaaaatggagtctccttaccatggacaatacatgcaaagcaatatcttgttcaggttagtacccgcaaaacgggacatagtatgtgacaatctgcatcgatcatggactactaaatgcctttacatagaagggctctgatttgcacaatttgttgaaaaatcacaaacccatagaaaagtaagtaggctaagttggggaggctcaaaccattaagggttaaaaatacatcttaaacattggaaagctcttctagctgaatctgaaatattaccccttgtctagaaaaaggggggcagtcagaacagctgttccccactccgtggttctcaaaatcataaaccatggctactcttgggaaccacccggccatgtggtcgccaagtagagcaagccccctttctcttcccaatcacgtggctgagtgtggatgacttttattttaggagaagggcgattaacacttttgacagtattttgttttgccctgatttgggggattgttttgttttggtggttgttttggaaaaacagtttataaactgatttttgtagttttggtatttaaagcaaaaaaacgaaaaacaaaaaaacaaaaacaaaccttttggtaactgtgcactgtgtcctttagccagggccgtgccaacttatgaagacactgcagcttgagaggggctttgctgaggcttccccttggccatgtgaaagcccgccttgttgcctgctttgtgctttctgcaccagacaacctgatggaacatttgcacctgagttgtacatttttgaagtgtgcagggcagcctggacacaagcttagattctctatgtatagttccccgtgttcactaacatgccctctctggaaagcatatgtatataacatgtgtcatgtcctttggaaacctggtcacctggtgaaaacccttgggattcttccctgggcatgactgatgacaatttccatttcatcagtttgttttgttttcctttttctttaaatcttggactttaaaccctacctgtgtgattcagtagggtttgagacttacgtgtgatactgacaggtaagcaacagtgctagcattctagattcctgcctttttttaaaaagaaattattctcattgctgtattatattggaaaagttttaaacaaccaagctaaagctatgtgaaagttgagctcaaagtaggaggaaaagttactggtggtaccttgctgcctgctctgctggtagaattctgtgctccccgtgacacttagtacattaagaatgactacactgttcctcgtatgtgaaggaggcagtgctgactccgtgagtgtgagacacgtgctttgaactgcttttctattcatggagcactccatagtctcaaactgtcccccttatgaccaacagcacatttgtgaagaggttcgcagggataaggggtgcactttatagctatggaaacatgagattctcctctattggaagctaattagcccacaaaggtggtaaacctgtagattgggccttaattagcattgtactctaatcaaaggactctttctaaaccatatttatagctttcttaacctacacatagtctatacatagatgcatattttacccccagctggctagagatttatttgttgtaaatgctgtatagatttggttttcctttctttacttaccctggtttggatttttttttttttttttttgaatggatttatgctgtcttagcaatatgacaataatcctctgtagcttgagctacccctcccctgctgtaacttacgtgacctgtgctgtcactgggcataggacagcggcatcacggttgcattcccattggactcatgcacctcccggatggtttttgtttttttcgggggttctttggggtttgtttgtttgcttcttttccagagtgtggaaagtctacagtgcagaaaggcttgaacctgccagctgatttgaaatactttcccctgcgcagggccgtatgcatcctgccaagctgcgttatattctgtactgtgtacaataaagaagtttgcttttcgttta

SEQ ID NO: 702937 - DNA, 195 bp, Homo sapiens
gagacaggaatgtagtttttactcagaaatgacactgaaaagtgcatttatccacagagggacacaagcatgtcgcttagtaagggtgattcattccgatgatgccatgcaatgaggagaagtccaaccctgtctgatttcacttggactgtaggagatcattattagaatcaggaatgcctagtagtcacaaga

SEQ ID NO: 702938 - DNA, 189 bp, Homo sapiens
aaacccgtattctactaaaaatacaggaaagttagctgggcatggtggcacatgcctgtaatatcagctactcagaagactgaggcaggagaattgcttgaacccggtgaggcagaggtttgcagtgagccaatgatcacgtccagtgcattcccagccgtgtgcaacagagagtgaaactcagttctc

SEQ ID NO: 702939 - DNA, 3028 bp, Homo sapiens
gaccacagagctgcagttgaccgatgtgctgtttctgctgcagaaactattgacaggattgtgtccacctttgctttcctttcagaagtgcctaactgccagtcatcctacatgagagggggttatttctccagcagccatgaaggtttttcatatgaaaaagatccccgattatactttgacgacacttgtgttgtgcctgagagactggaaggcaaagtcaaacaggagcctaccatgtatcgagaggggcccccttaccagaggcgaggttcccttcagctgtggcagttcctggtcacccttcttgatgacccagccaatgcccacttcattgcctggacaggtcgaggcatggagttcaagctgatagaaccggaagaggttgctcggcgctggggcatccagaagaaccggccagccatgaactatgacaagctgagccgctctctccgctattactatgaaaagggcatcatgcagaaggtggctggagagcgatacgtctacaaatttgtctgtgacccagatgccctcttctccatggctttcccggataaccagcgtccgttcctgaaggcagagtccgagtgccacctcagcgaggaggacaccctgccgctgacccactttgaagacagccccgcttacctcctggacatggaccgctgcagcagcctcccctatgccgaaggctttgcttactaagtttctgagtggcggagtggccaaaccctagagctagcagttcccattcaggcaaacaagggcagtggttttgtttgtgtttttggttgttcctaaagcttgccctttgagtattatctggagaacccaagctgtctctggattggcacccttaaagacagatacattggctggggagtgggaacagggaggggcagaaaaccaccaaaaggccagtgcctcaactcttgattctgatgaggtttctgggaagagatcaaaatggagtctccttaccatggacaatacatgcaaagcaatatcttgttcaggttagtacccgcaaaacgggacatagtatgtgacaatctgcatcgatcatggactactaaatgcctttacatagaagggctctgatttgcacaatttgttgaaaaatcacaaacccatagaaaagtaagtaggctaagttggggaggctcaaaccattaagggttaaaaatacatcttaaacattggaaagctcttctagctgaatctgaaatattaccccttgtctagaaaaaggggggcagtcagaacagctgttccccactccgtggttctcaaaatcataaaccatggctactcttgggaaccacccggccatgtggtcgccaagtagagcaagccccctttctcttcccaatcacgtggctgagtgtggatgacttttattttaggagaagggcgattaacacttttgacagtattttgttttgccctgatttgggggattgttttgttttggtggttgttttggaaaaacagtttataaactgatttttgtagttttggtatttaaagcaaaaaaacgaaaaacaaaaaaacaaaaacaaaccttttggtaactgtgcactgtgtcctttagccagggccgtgccaacttatgaagacactgcagcttgagaggggctttgctgaggcttccccttggccatgtgaaagcccgccttgttgcctgctttgtgctttctgcaccagacaacctgatggaacatttgcacctgagttgtacatttttgaagtgtgcagggcagcctggacacaagcttagattctctatgtatagttccccgtgttcactaacatgccctctctggaaagcatatgtatataacatgtgtcatgtcctttggaaacctggtcacctggtgaaaacccttgggattcttccctgggcatgactgatgacaatttccatttcatcagtttgttttgttttcctttttctttaaatcttggactttaaaccctacctgtgtgattcagtagggtttgagacttacgtgtgatactgacaggtaagcaacagtgctagcattctagattcctgcctttttttaaaaagaaattattctcattgctgtattatattggaaaagttttaaacaaccaagctaaagctatgtgaaagttgagctcaaagtaggaggaaaagttactggtggtaccttgctgcctgctctgctggtagaattctgtgctccccgtgacacttagtacattaagaatgactacactgttcctcgtatgtgaaggaggcagtgctgactccgtgagtgtgagacacgtgctttgaactgcttttctattcatggagcactccatagtctcaaactgtcccccttatgaccaacagcacatttgtgaagaggttcgcagggataaggggtgcactttatagctatggaaacatgagattctcctctattggaagctaattagcccacaaaggtggtaaacctgtagattgggccttaattagcattgtactctaatcaaaggactctttctaaaccatatttatagctttcttaacctacacatagtctatacatagatgcatattttacccccagctggctagagatttatttgttgtaaatgctgtatagatttggttttcctttctttacttaccctggtttggatttttttttttttttttttgaatggatttatgctgtcttagcaatatgacaataatcctctgtagcttgagctacccctcccctgctgtaacttacgtgacctgtgctgtcactgggcataggacagcggcatcacggttgcattcccattggactcatgcacctcccggatggtttttgtttttttcgggggttctttggggtttgtttgtttgcttcttttccagagtgtggaaagtctacagtgcagaaaggcttgaacctgccagctgatttgaaatactttcccctgcgcagggccgtatgcatcctgccaagctgcgttatattctgtactgtgtacaataaagaagtttgcttttcgttta

SEQ ID NO: 702940 - DNA, 835 bp, Homo sapiens
tccccaccaccacaaaaaagatttaaaggggggggggggggtccccccccccccccaggggggggcgaaaaacccgcgggggggccccaccccacacccccccgcgggcggggcagacaccaaagcaggggtcagcaagcagaaggaggggagtagataactaaaacaacacgcgcgcgggggtggtaggtagaaaaaaaaagaacagggagtccacacgcgggaagaaacaaaacatttaagacacagcacccctctataaagagaaagagaggttgcccgacgcgggggagcgaaaacttacgaaaacgagacgaaaacggggggccgacgtcacagaaggccatgaccgcgcggagcaccgggtgggaggaaaggggaagcgacacactcggacaacaagatccgacggggcaacaccgaaggtcacccctacatcgagaaaagagcaacccgacgcagttgtcccctccagaaaaacgcgatgtcattgattcgatcaaccgctacgtcgaggacaccaaaggtgggagataaacgaagagaacaactctgcaccgcgggtgcagcacaacaacaactgagtaaaaaaaagagaccgcggcggcccccggactgcgtacctaagaaacaagcgcacccaacacaaggggggcggcggcgaacccacacacacacccatgtcactgatcgacagcagatttagtcgaccaaagaaggactactgcccccccagaaatgagaaagcacgccccctatccaatctgtgtcgcaaaaaaaaaatggtggccgccccagacaacggacaaccaactgactcgagacgacgggagcc

SEQ ID NO: 702941 - DNA, 3529 bp, Homo sapiens
  misc_feature (38)..(38): n is a, c, g, or t
  misc_feature (84)..(84): n is a, c, g, or t
  misc_feature (188)..(188): n is a, c, g, or t
ctgggttcaagccattaacccctcctacaacccccctntcacccacccatcagaatcccctatttcccccacctcaggcaactntgcccacctcagggcatgcccctgcagctggcccagttcaaggtgtgggccccgcccccgccccccattcgcttccagagcctggaccacagcagcaaacattngcggtcccccgaccaccacatcagcccctgcagatgccaaagatgatgcctgaaaaccagtatccatcagaacagagatttcagagacaactgtctgaaccctgccaccccttccctcctcagccaggagttcctggagataatcgccccagttaccatcggcaaatgtcagaacctattgtccctgcagctcccccgccccctcagggattcaaacaagaataccatgacccactctatgaacatggggtcccgggcatgccagggcccccagcacacgggttccagtcaccaatgggaatcaagcaggagcctcgggattactgcgtcgattcagaagtgcctaactgccagtcatcctacatgagagggggttatttctccagcagccatgaaggtttttcatatgaaaaagatccccgattatactttgacgacacttgtgttgtgcctgagagactggaaggcaaagtcaaacaggagcctaccatgtatcgagaggggcccccttaccagaggcgaggttcccttcagctgtggcagttcctggtcacccttcttgatgacccagccaatgcccacttcattgcctggacaggtcgaggcatggagttcaagctgatagaaccggaagaggttgctcggcgctggggcatccagaagaaccggccagccatgaactatgacaagctgagccgctctctccgctattactatgaaaagggcatcatgcagaaggtggctggagagcgatacgtctacaaatttgtctgtgacccagatgccctcttctccatggctttcccggataaccagcgtccgttcctgaaggcagagtccgagtgccacctcagcgaggaggacaccctgccgctgacccactttgaagacagccccgcttacctcctggacatggaccgctgcagcagcctcccctatgccgaaggctttgcttactaagtttctgagtggcggagtggccaaaccctagagctagcagttcccattcaggcaaacaagggcagtggttttgtttgtgtttttggttgttcctaaagcttgccctttgagtattatctggagaacccaagctgtctctggattggcacccttaaagacagatacattggctggggagtgggaacagggaggggcagaaaaccaccaaaaggccagtgcctcaactcttgattctgatgaggtttctgggaagagatcaaaatggagtctccttaccatggacaatacatgcaaagcaatatcttgttcaggttagtacccgcaaaacgggacatagtatgtgacaatctgcatcgatcatggactactaaatgcctttacatagaagggctctgatttgcacaatttgttgaaaaatcacaaacccatagaaaagtaagtaggctaagttggggaggctcaaaccattaagggttaaaaatacatcttaaacattggaaagctcttctagctgaatctgaaatattaccccttgtctagaaaaaggggggcagtcagaacagctgttccccactccgtggttctcaaaatcataaaccatggctactcttgggaaccacccggccatgtggtcgccaagtagagcaagccccctttctcttcccaatcacgtggctgagtgtggatgacttttattttaggagaagggcgattaacacttttgacagtattttgttttgccctgatttgggggattgttttgttttggtggttgttttggaaaaacagtttataaactgatttttgtagttttggtatttaaagcaaaaaaacgaaaaacaaaaaaacaaaaacaaaccttttggtaactgtgcactgtgtcctttagccagggccgtgccaacttatgaagacactgcagcttgagaggggctttgctgaggcttccccttggccatgtgaaagcccgccttgttgcctgctttgtgctttctgcaccagacaacctgatggaacatttgcacctgagttgtacatttttgaagtgtgcagggcagcctggacacaagcttagattctctatgtatagttccccgtgttcactaacatgccctctctggaaagcatatgtatataacatgtgtcatgtcctttggaaacctggtcacctggtgaaaacccttgggattcttccctgggcatgactgatgacaatttccatttcatcagtttgttttgttttcctttttctttaaatcttggactttaaaccctacctgtgtgattcagtagggtttgagacttacgtgtgatactgacaggtaagcaacagtgctagcattctagattcctgcctttttttaaaaagaaattattctcattgctgtattatattggaaaagttttaaacaaccaagctaaagctatgtgaaagttgagctcaaagtaggaggaaaagttactggtggtaccttgctgcctgctctgctggtagaattctgtgctccccgtgacacttagtacattaagaatgactacactgttcctcgtatgtgaaggaggcagtgctgactccgtgagtgtgagacacgtgctttgaactgcttttctattcatggagcactccatagtctcaaactgtcccccttatgaccaacagcacatttgtgaagaggttcgcagggataaggggtgcactttatagctatggaaacatgagattctcctctattggaagctaattagcccacaaaggtggtaaacctgtagattgggccttaattagcattgtactctaatcaaaggactctttctaaaccatatttatagctttcttaacctacacatagtctatacatagatgcatattttacccccagctggctagagatttatttgttgtaaatgctgtatagatttggttttcctttctttacttaccctggtttggatttttttttttttttttttgaatggatttatgctgtcttagcaatatgacaataatcctctgtagcttgagctacccctcccctgctgtaacttacgtgacctgtgctgtcactgggcataggacagcggcatcacggttgcattcccattggactcatgcacctcccggatggtttttgtttttttcgggggttctttggggtttgtttgtttgcttcttttccagagtgtggaaagtctacagtgcagaaaggcttgaacctgccagctgatttgaaatactttcccctgcgcagggccgtatgcatcctgccaagctgcgttatattctgtactgtgtacaataaagaagtttgcttttcgtttaccaggcacccgaaaaaaacaaaaacaaaaagagaaaacaaaacacaaacaaagaggggggg

SEQ ID NO: 702942 - DNA, 1124 bp, Homo sapiens
  misc_feature (332)..(332): n is a, c, g, or t
  misc_feature (422)..(422): n is a, c, g, or t
  misc_feature (485)..(485): n is a, c, g, or t
  misc_feature (505)..(505): n is a, c, g, or t
  misc_feature (512)..(512): n is a, c, g, or t
  misc_feature (540)..(540): n is a, c, g, or t
  misc_feature (654)..(654): n is a, c, g, or t
  misc_feature (671)..(671): n is a, c, g, or t
  misc_feature (683)..(683): n is a, c, g, or t
  misc_feature (687)..(687): n is a, c, g, or t
  misc_feature (698)..(698): n is a, c, g, or t
  misc_feature (704)..(704): n is a, c, g, or t
ccaggctgtttccgcccggagttacgggatctacaagcttctttctcccccaccacattcagttgttctcaggtctgaattccaaatgggctcatctcctgctgttcttcgagctgtccggctgtaccaatggagcctgaagagttcggcgcagttcctggggtctccacagctgaggcaggttggtcagatcattagggttcctgctcggatggctggcgacgctgatcctggagcctgcgggccgctgctgctgggacgaaccggtgcgaatcgccgtgcgctggcctagccccggagcagcctggtcactgctgcgctgctgtccctgncgctgacgagaagggctgctgcttttcccatgtgcccacgctgcgctacctgctgccgacactcttgtgctgagctggacctggagcgcngctgccctgctgctgggctgtgcatgcttctgctggggcttgagccccatgggggcttgctcntgggccttgtgagccctgangaaaccntttggtgctggctgtgtgaatgcgcganggtgctgaactgcccttgtgccgtggatgctggaggttgctggatggccacgacccctgaccccggggcggctgcttgttgccagactgcggcactgagcgctacttcctcccngccctgggggttgcggngcgatgccgggntgcngtgggccgggntgcganggcacgctcttcctgccgccagaaacctggggccctttccctgtggattgtgcggaccattgttcgcgggaacttgcgcgcgtgagccctgcatgtacgtaatcgcggcgcttacgtctgctggcttgagaacggggtaactggttgctcgatcggctctgcgctttctcactcacctatgaacgaccctccccaagatccagtgcaccacgcctccccatcttggcgaactaacctttcgacagcaaaccccattgaaatctaactttggcactcacgttccattcccggacgcctcatcacctggccccagcggaccctcggggccctgcttcgcaaacttcccaacacgcgggcggtgaaccccgtgcctatccaagtccctcctaccctgacggggcactcccagagctgcagacg

SEQ ID NO: 702943 - DNA, 452 bp, Homo sapiens
agtcctgccaagggtgaggcggcccagagaggtttttccactgggtattcctggtacgggggcaggagccaggcctcccaattggttctggctcttgggagatggtggctttcaaaatgccaaataatgtactttatcctcaagaggaaagggccttggctgggcatggtggctcaagcctataatccatacttgggtaatttttgcatttttagtggagagggagtttcaccatgttggccaggttggtcttgaactcctaacatggtgaaactccgtctctactaaaaatacaaaaaaaaattagccaggcgtggtggcgcacgcctgtagtcccagctactccggaggctgaggcaggagaatggcgtgaacccggaaggtggagcttacagtgagccgaaatcgcgccactgcactccagcctggacgacagagcaagactctgtctc

SEQ ID NO: 702944 - DNA, 3233 bp, Homo sapiens
  misc_feature (38)..(38): n is a, c, g, or t
  misc_feature (84)..(84): n is a, c, g, or t
  misc_feature (188)..(188): n is a, c, g, or t
ctgggttcaagccattaacccctcctacaacccccctntcacccacccatcagaatcccctatttcccccacctcaggcaactntgcccacctcagggcatgcccctgcagctggcccagttcaaggtgtgggccccgcccccgccccccattcgcttccagagcctggaccacagcagcaaacattngcggtcccccgaccaccacatcagcccctgcagatgccaaagatgatgcctgaaaaccagtatccatcagaacagagatttcagagacaactgtctgaaccctgccaccccttccctcctcagccaggagttcctggagataatcgccccagttaccatcggcaaatgtcagaacctattgtccctgcagctcccccgccccctcagggattcaaacaagaataccatgacccactctatgaacatggggtcccgggcatgccagggcccccagcacacgggttccagtcaccaatgggaatcaagcaggagcctcgggattactgcgtcgattcagaagtgcctaactgccagtcatcctacatgagagggggttatttctccagcagccatgaaggtaggttgctcggcgctggggcatccagaagaaccggccagccatgaactatgacaagctgagccgctctctccgctattactatgaaaagggcatcatgcagaaggtggctggagagcgatacgtctacaaatttgtctgtgacccagatgccctcttctccatggctttcccggataaccagcgtccgttcctgaaggcagagtccgagtgccacctcagcgaggaggacaccctgccgctgacccactttgaagacagccccgcttacctcctggacatggaccgctgcagcagcctcccctatgccgaaggctttgcttactaagtttctgagtggcggagtggccaaaccctagagctagcagttcccattcaggcaaacaagggcagtggttttgtttgtgtttttggttgttcctaaagcttgccctttgagtattatctggagaacccaagctgtctctggattggcacccttaaagacagatacattggctggggagtgggaacagggaggggcagaaaaccaccaaaaggccagtgcctcaactcttgattctgatgaggtttctgggaagagatcaaaatggagtctccttaccatggacaatacatgcaaagcaatatcttgttcaggttagtacccgcaaaacgggacatagtatgtgacaatctgcatcgatcatggactactaaatgcctttacatagaagggctctgatttgcacaatttgttgaaaaatcacaaacccatagaaaagtaagtaggctaagttggggaggctcaaaccattaagggttaaaaatacatcttaaacattggaaagctcttctagctgaatctgaaatattaccccttgtctagaaaaaggggggcagtcagaacagctgttccccactccgtggttctcaaaatcataaaccatggctactcttgggaaccacccggccatgtggtcgccaagtagagcaagccccctttctcttcccaatcacgtggctgagtgtggatgacttttattttaggagaagggcgattaacacttttgacagtattttgttttgccctgatttgggggattgttttgttttggtggttgttttggaaaaacagtttataaactgatttttgtagttttggtatttaaagcaaaaaaacgaaaaacaaaaaaacaaaaacaaaccttttggtaactgtgcactgtgtcctttagccagggccgtgccaacttatgaagacactgcagcttgagaggggctttgctgaggcttccccttggccatgtgaaagcccgccttgttgcctgctttgtgctttctgcaccagacaacctgatggaacatttgcacctgagttgtacatttttgaagtgtgcagggcagcctggacacaagcttagattctctatgtatagttccccgtgttcactaacatgccctctctggaaagcatatgtatataacatgtgtcatgtcctttggaaacctggtcacctggtgaaaacccttgggattcttccctgggcatgactgatgacaatttccatttcatcagtttgttttgttttcctttttctttaaatcttggactttaaaccctacctgtgtgattcagtagggtttgagacttacgtgtgatactgacaggtaagcaacagtgctagcattctagattcctgcctttttttaaaaagaaattattctcattgctgtattatattggaaaagttttaaacaaccaagctaaagctatgtgaaagttgagctcaaagtaggaggaaaagttactggtggtaccttgctgcctgctctgctggtagaattctgtgctccccgtgacacttagtacattaagaatgactacactgttcctcgtatgtgaaggaggcagtgctgactccgtgagtgtgagacacgtgctttgaactgcttttctattcatggagcactccatagtctcaaactgtcccccttatgaccaacagcacatttgtgaagaggttcgcagggataaggggtgcactttatagctatggaaacatgagattctcctctattggaagctaattagcccacaaaggtggtaaacctgtagattgggccttaattagcattgtactctaatcaaaggactctttctaaaccatatttatagctttcttaacctacacatagtctatacatagatgcatattttacccccagctggctagagatttatttgttgtaaatgctgtatagatttggttttcctttctttacttaccctggtttggatttttttttttttttttttgaatggatttatgctgtcttagcaatatgacaataatcctctgtagcttgagctacccctcccctgctgtaacttacgtgacctgtgctgtcactgggcataggacagcggcatcacggttgcattcccattggactcatgcacctcccggatggtttttgtttttttcgggggttctttggggtttgtttgtttgcttcttttccagagtgtggaaagtctacagtgcagaaaggcttgaacctgccagctgatttgaaatactttcccctgcgcagggccgtatgcatcctgccaagctgcgttatattctgtactgtgtacaataaagaagtttgcttttcgttta

SEQ ID NO: 702945 - DNA, 148 bp, Homo sapiens
tggaccgctcgtctacacagacttccgcgggacgtgacggcgagatgtatgcgagctcttctacaggaagctgacgggactgccacgagaccaatcccccggtttgttcatgcgttacccttggcgtcattttcatttcacattatga

SEQ ID NO: 702946 - DNA, 204 bp, Homo sapiens
gaggaccaagaaacctgtggttatatcgtgccagcaaggcagtggtttataaacatcacgggatattaagactgcagccaaggaattgttaaaaaaggtgaaatttattcctggatcaagactgaatggcatggttgaaatgatggacaagcggccatattggtgtatatcaaggcaaaaagtttaggggcgttccaatcctgt

SEQ ID NO: 702947 - DNA, 392 bp, Homo sapiens
gtttgggtattctcagcatatataggcaatgtaagtatagtgtccacttgtaggcataggatagatctagaactgatttctcacatgacatgacttttttccatctgactttctgtcacttcctcagacttctaggaagggtttggtggtctgcttcatttaggaagaagtcggcatcctgatttttccgcaaatatttcagtcccagaacttgtcttagatggttctatggctacatcttcttcctatattgttggcatttatatctaatctgatatttcctctcctccgattaggcacatgagttcaccactcggacttttaacttttctcttcatttctggcacctgagtattacctttccttcctttgagctcagctgtggatttaaa

SEQ ID NO: 702948 - DNA, 280 bp, Homo sapiens
cgtcgactttttttttttgattcttcatttctgaaagctcctatgttatataaaacttatattaagtaaatttgtatgcttttaccttcttaatgtgtcttttgttttaagggccttagccatgaacctagtgatgggtgaggaaaagctgtttctttttgcccatcctacaaactattcctgagagaaatttaaaaggacttaactaagtagagatacatgccttattcatgtgttggaagactcaatatttctaacatgtcagttgtccagtcgacgc

SEQ ID NO: 702949 - DNA, 292 bp, Homo sapiens
ccaaggggtagagatttatgtattttatttcacagattctctggtcacaggtttttgcccagggaaattctgagaaattcggaatatcttaccagataaaacatgaaaagtttgccggtagtggaaaaaagaagcgtcatctctttttagttttaatttattggttaaactgatggcagcaatccatgaggtgtgtcaaagagtgtacatatgtatgtgtgtatattgaatgctaaacatattactgaaagacacattttaataaagatttctgtcataattcaaaaaaaaa

SEQ ID NO: 702950 - DNA, 211 bp, Homo sapiens
  misc_feature (118)..(118): n is a, c, g, or t
  misc_feature (120)..(120): n is a, c, g, or t
ccgtaacttttggacaaccacaaggaggttgttattaccaacattaaccttattattattagggtttttcacaccgaatttaagaagcccttggggagccaaggttttttcctcagtnantggcgtgtagatgagctgtccattcttctctgtgtagaagcgcacagacttgatggggctaccaccacgatcatgcacagagtgacaggca

SEQ ID NO: 702951 - DNA, 653 bp, Homo sapiens
  misc_feature (181)..(181): n is a, c, g, or t
  misc_feature (186)..(186): n is a, c, g, or t
ggggttttgtgccaccgaacccttgaactcccccgggaaaccgttttttgttggtgcggctccccaacggtgtaccccctttttaatttgccgggaaattgcgggcctgtggggcccaagacccatggcccttttcccctggggggttccctcccggtttccccccgcgcggggtttgganccccngcccttcccggctctgggggttttccggggatcccgttttgggggggggaggccgggcctccccttaagccaattgggccggcccgccaaaaggggaaaagggtttttttttttttttgggcgcctttaaccagaaacccccccgcccttaaaagccctctttgggaaaggggggtccaaaaaaattggtttttaagaaccccgggccttggggggggggcccaggcctttggggggattcctttaaaggccaaatttggccgggggggtccccttttggttttttggccccccccccccatttttggcccccataaattttttaaagggggtaaaaaatttgggtttttggtttggacccaagggggttctggtttttggttccccctggaggggccaaggggttggcttcccccggccttttggttttaaaaaaaaggggggggggtggggtcccctttacccga

SEQ ID NO: 702952 - DNA, 295 bp, Homo sapiens
actactactattaaattgcgcggcgggcgtcgaccccacctgccgctgccattcctgagcaagctctgtactggtggtgccccgatcccgcagctcaaactttacaagacagtcctggtgcttactggaccttcttgggcgccctgaagccaccttcacaacaattgaaccactctccttgaagttgttgatgatccgataaatggttgatttaggtgcaatcttactggcagcaatatccttgcctgtgaagccctttttgtgcaaagcaatgatgactgcacgtctttccttg

SEQ ID NO: 702953 - DNA, 710 bp, Homo sapiens
  misc_feature (395)..(395): n is a, c, g, or t
tttacaccgggggaaacatttttttcacggaacaaaggtgatttaccaaagttttgatacttaaactcccagccctctgtgttcatataagggaaacccaatgtgttgccatgtagctttgtttatgtaattactagcaagatgctttaatactcagctgggaattcagcatctctgactgcacgcgcaatatttatcctctgattgtggcccttaacgtcagttccaatcgggcgcgtgttcttggttttatcatggctccaatatgcatctcctcagtcaagtgatagttctagaaatctcatttctctctggcattcagtattaagaacactgttttctagcgtttaagcatagggtcatttcatgtgtcttttgcagttaatggcaataangtgtctatatgtgcgtctggcaagtggtgctgtcttgaatattagcacagtttgtggcctcataaggtgtctctcttaagttcaagattcagggtcccgtctggcctaagtggataaaacctgttcttactaacaatgcacaaataaacttgtagcttgtgctcacgcaccggtatcctctgtatactcgaaactctagtcttagcttctgcttaacccagacccatggttgtagttagcatagatcgtgccttgagacactgcattgtacggtgggagcatcactctgtcgtgtgagtctctctttaatcttga

SEQ ID NO: 702954 - DNA, 462 bp, Homo sapiens
  misc_feature (70)..(70): n is a, c, g, or t
  misc_feature (394)..(394): n is a, c, g, or t
  misc_feature (412)..(412): n is a, c, g, or t
  misc_feature (429)..(429): n is a, c, g, or t
aaaccaaaaataaaatttgaagaccctccccaaccatctaaatgggcttcctcctctaggccagggcgtnctaaatttaacctgaaagactggttcaggccatgatgggaagtgggggtccaacacgcctctttacaccctccagcattaacatcaaatggaccttcagtctgataagaagaaacacttaccatctatcctctctgaagcctgctacctgggaggcttcatctgcatgataaaatttggtctctgcaacctcttattcataacccagacattgcttactattgataataactctttcaaccaatcaggaaaaatcttaaatctacctgttaccggggaggcctgcacttcgagttcttaggagttttgactcttctggcaacantgtgggatttggattccnattgtaggtaatcctcngtttttaggcttaaagggattccctttaggttt

SEQ ID NO: 702955 - DNA, 120 bp, Homo sapiens
  misc_feature (19)..(19): n is a, c, g, or t
tgcagcccctaatcagagncaatttacacacatttctgctcatttacacagtcatatttaaagcagggaaattgactcttggtgggagcttaagctcataaaggagtgaaactccgactc

SEQ ID NO: 702956 - DNA, 172 bp, Homo sapiens
ggaccagtcgtgacagcccctgtccaggtactaacctgcccatagccatccaagccactagtagctctctcccaagtagtggaggcccgcaagccaaagagcatgtctacagtgggcagaggtgctaggagcctttttcttaggcactgagtaagggtgcatggctgcttca

SEQ ID NO: 702957 - DNA, 440 bp, Homo sapiens
  misc_feature (33)..(33): n is a, c, g, or t
  misc_feature (36)..(36): n is a, c, g, or t
aggtgactctacaggatccctcataggttcgcnggngctatggcttctacaccaaagtgctcaactacgtggactggatcaagaaagagatggaggaggaggactgagcccagaattcactaggttcgaatccagagagcagtgtggaaaaaaaaaaacaaaaaacaactgaccagttgttgataaccactaagagtctctattaaaattactgatgcagaaagaccgtgtgtgaaattctctttcctgtagtcccattgatgtactttacctgaaacaacccaaagggcccctttctttcttctgaggattgcagaggatatagttatcaatctctagttgtcactttcctcttccactttgataccattgggtcattgaatataactttttccaaataaagttttatgagaaatgccagtgtgcaaaatgaaaaaaaa

SEQ ID NO: 702958 - DNA, 343 bp, Homo sapiens
aaaacgaaaaggatacattactttttgaaaaagttcactggaggccaaatgcactggctcatgcctgtaatcccagcactttgagagtgctagacaagcaaatcacttgagatcagcagttcgactccagcctgggcgacagatcaagactccgtctcaaaaaaaaaaaaccaaaaaaaaaacccaaaacaacaacaacaacaacaacaaaaaccccaaaacaaaacaaacataatagctgtttggagggcagccagcatacttgtgaaaacatgtccaggatgactactttttagagaatggcaattcaaacccacatggagacagcatatcggggtaccga

SEQ ID NO: 702959 - DNA, 859 bp, Homo sapiens
gaaatgggtagcaatgtttgaatgcaaaagcatttaagaacgtcacatggaaaaatccacattaaatatataaatatggcaaatgtattttgtcattatgaataacaaattctattttcaatctttttttagtcttatttacttgacttcttttctttcataaaatctgagtcattaaacccctttaaaaaaaattctgatacagatgcgttgaggacttttctacttggtggtggactatatccaaaaaggtaaagttttttaaatgcacactatacattattcatttattttataatacacgaattcattgaaatttaaagatttaatttcaacatgtatagaaacgtttaaaactagaggtttcacattgtcatcttttcttactgaggctttcataaccactgcaaaggtccttattgagccactaaaacaataaaagagagaaaatatcctttcttcacacacaaattggaaaagaaaagagggatctttcagtagaataatatttgcagctacttttaaaggttactgaaaggtgagggcatcatcttaagaaaagagatttgtaggcatatttggaaaaaccagattagtacctgattgtggactcttaaacgaatctaggtatcgaataagcgatctccttacccaaaaaaatggaactgtcccttttaaagagacaattaggggttaaaacacgtcgtgaacatgagctcccttttaggttgggacacgtcactttggggcaacccccggttcgcaaaattcggtgcccaaacacatttcttgggacagaagctttccaaggagggttctccccaacatttaacctattccacaccgggattagacacac

SEQ ID NO: 702960 - DNA, 115 bp, Homo sapiens
  misc_feature (82)..(82): n is a, c, g, or t
gtctcacgactggtctacagtctgggaacatccaacgcttggtgaattctgcttatgagagcgacatcgaatggatcaaaanagcgacgtcgctatgaactgcttgtgcctgcca

SEQ ID NO: 702961 - DNA, 429 bp, Homo sapiens
tccccctttgggtcgcgttgctgttcgtggtatgggaccgacagttgcggtgggtgtcctcaaagcagtggacaagaaggcttctggagctggcaaggtccccaagtttgcccagaaagctcagaaggctaaatgaattttttccctaatacctgccccccccctcttaatcagtggtggaagaacggtttcagaactgtttgtttcaattggccatttaagttttgttgtaaaagactggttaatgataacaatgcctcgtaaaaccttccgaaggaaaggggaatgttttgtgggcccctttggttttcttttttgcgtgtggccgttttaagtttttagtttttaaaatccgtactttttaatggaaacaacttggccaaaaatttgtccccgaattttggggccccttaaaaaagttggggggga

SEQ ID NO: 702962 - DNA, 194 bp, Homo sapiens
tttgaattaatgttttattcactagtattcttaaggtagtaaaggaggatgtaagttgtatttcttcagagaagttatgagtctctaatgctgtgctgacagaagttctttttgcgagtacacactttgttcaagtattgacaaagaggctaagggccactttttttttcacggacaagaaactgaacagaatt

SEQ ID NO: 702963 - DNA, 279 bp, Homo sapiens
  misc_feature (63)..(63): n is a, c, g, or t
  misc_feature (81)..(81): n is a, c, g, or t
  misc_feature (87)..(87): n is a, c, g, or t
  misc_feature (152)..(152): n is a, c, g, or t
  misc_feature (241)..(241): n is a, c, g, or t
caaagagttcctgactggcaattggttgagagagttaaactttacctgaaaagatgaagtcancttaagttaaagtaaggnaggctnggcttaagtcatgtagatgaagcctccaggtagcaggcttcagagagaacagatgatgaattttnctttttaggccttaaaaggtgtcagactctccagaaaagacctaataagagaaggagattctctacagaatgcagtttcccccacaagngacagctttgtagggccatttcaaaatacgtcaaataa

SEQ ID NO: 702964 - DNA, 150 bp, Homo sapiens
ggatcctttaaatcgattttaaattgttgcctagtcttgccaaggttattatgtgcatctgttatttttccaatacatgtaaacaaagcatcatgctgcaactgtttacatgtattggaaaaataacagatgcacatgataaccttggca

SEQ ID NO: 702965 - DNA, 165 bp, Homo sapiens
gatcggtattgcaccccagtcgactatgcatgaacgtgctggctatagaagatattcactcacatgtaggtcaccgtcgctgacaggcagagcgcaatcattcgtccgtatccatgaagcgcacagcctagcctaatgtgaactcttctacataagtccatacta

SEQ ID NO: 702966 - DNA, 90 bp, Homo sapiens
gtggacacaggcacatattactgtgcacacagaacggtttcctacggtccctataaagcagactggtatttcgatctctggggccgtggc

SEQ ID NO: 702967 - DNA, 1094 bp, Homo sapiens
ggctgttggctgggctcgggagggaacgctccaggtaaagcgctgggggaggaagcgacgccgaggagctacggtttcctccagaggtctccgcccctctgcccctatattcccagagctcgagtctgatccgggccttgccgggcaaccctggaaagggcggcgggtgatagtacagatgcgagacgcaactgcagagcattttcgaacgacggtggtgacaaccggaccgttcatcagcacgaggcttttcctggcatgtctcatggcatactcctgacgatgacgaaaaccaaacctaattagctgtatgggggccttcagacagtacgggggtggtctttctcaggagtctcatgaaccagtgtatccagtggattgtcacagtccattcattggtcagcatagtcctaaaagaacttctttctttatgactgcttagccaatggccagttgagacttggtctctttccacccaggctgggtttggtgattccctgataaaactctgacactcttgacgtgcggacagaacacagcttggggccttaacatttaacttggtccggaacacatcaaactcatccaaacaaccctgctgccacagacatagacaccacacaggaacgcttcgaaagccactccgtggcgcaacgggcgaccaaaacaaaagtcacacgcgcgcaccgcgcggccccacagaaccccgtgaaagacaacggagagacccccgactaaacgccccgggggaacacacacggcgttgaaccacaccacaaagagacagcggggcaccgggggcaaaccaaggaagacagagggcgagtaattaaacaccgcagagggcagacccaaagaaagagacaaaaccagacacacaagcacacgacagccacaccaagagccacgtgagcaacaggcagacgcatcaagagcgcgaggcgcctcgaccaagtgtcgctcagagctgcagagaagaggagtcagagccaggaggggcgaagaacgcacatcaaaaaaaagagagaaagaaagatagcgcagcgacgcacaaccagacaggcgagcagagccgaccgaggagcccggacccc

SEQ ID NO: 702968 - DNA, 154 bp, Homo sapiens
atctaccactatggactgtcgcggcagttaatatcatcggagatattgatgatcataggtctcgctcgacagtgagcgtagcttagtacgtagcagcgaagtatttgccatgaatgggtaaccacattgtgaccgtgacttggccgatgtagaa

SEQ ID NO: 702969 - DNA, 439 bp, Homo sapiens
accattcacggctcttctgtcccagatggcacttgaggcggtgacgtggtacgagggcattgccttgagcatggacccctacctcatcatcaccattccgatcgtttggttgctttacgaagtgaagctgaacaaggtctggacacggaactcaccattggcaaattactccttcgaatccggcacgatttcgggagaaggcaacattacgttctggcagagcctcatgccgcactacactcacagatactgtccatgtacatgtcgctgagtcatcgacaacctctacgcccttggctccgatgtaggtctgcttcatggcgttcgagcattttcacactgtgaaaaatcagctggtctatgatctgatggcatccaccatagtcagatatcgatcccgctcacatgtaggctgacatctcccgtgacgctcctctgc

SEQ ID NO: 702970 - DNA, 228 bp, Homo sapiens
  misc_feature (73)..(74): n is a, c, g, or t
  misc_feature (83)..(83): n is a, c, g, or t
  misc_feature (108)..(108): n is a, c, g, or t
  misc_feature (211)..(211): n is a, c, g, or t
  misc_feature (227)..(227): n is a, c, g, or t
agcaagtccgctggatggagaaatggttatcatcaccaccaatgatgctgtgtccaggtaccgaggtcaggannactgcctcnccccaatagagcaccaagcgcttcntcaagtggtacaacgcctggaacgagaagcgcagggtctacgaagaatagggtgaaaaacctcagaagggaaaactccaaaccagttgggagacttgtgcaanggactttgcagattana

SEQ ID NO: 702971 - DNA, 250 bp, Homo sapiens
  misc_feature (73)..(74): n is a, c, g, or t
  misc_feature (83)..(83): n is a, c, g, or t
  misc_feature (108)..(108): n is a, c, g, or t
  misc_feature (233)..(233): n is a, c, g, or t
  misc_feature (249)..(249): n is a, c, g, or t
agcaagtccgctggatggagaaatggttatcatcaccaccaatgatgctgtgtccaggtaccgaggtcaggannactgcctcnccccaatagagcaccaagcgcttcntcaagtggtacaacgcctggaacgagaagcgcagggtctacgaagaagcgcagggtctacgaagaagaatagggtgaaaaacctcagaagggaaaactccaaaccagttgggagacttgtgcaanggactttgcagattana

SEQ ID NO: 702972 - DNA, 195 bp, Homo sapiens
cctacacaacaaaagtgactatgtactatcatctcagatgctcagggacattgcttacctgaccgtatggactcagctgtagttgactgaagtgctaaacaggacggattgacgtagaggtgatatgtccatgtcaccggaatagagacgtcctctgcgtcagcatccacacaaagggctgcgtggtcgacatca

SEQ ID NO: 702973 - DNA, 106 bp, Homo sapiens
ccccccccccccccccccttctttttggtggggggggggggggggggtttggggggccgggttttccccggggttttttccccctttttttttcccccttttttta

SEQ ID NO: 702974 - DNA, 869 bp, Homo sapiens
gacttagtagagtggggacgtccggcttcgtagcgggagtgttcgttgtgccagcgacgtaatagaagcagaattaaatatgggtgatgttgacgaaaggcgagaagattttacttatgaagtgttcccagtgccacaccgttgaatggggaggcagagtcacggatagactgggtccagatctccatggctctctttgtgcgggaaggacaggtcagtgccccctggtatactcttacacagtccgcccatgtagagaacaaaggcatcattctggggagaggctacactgtatggagtattcggagaatcccaaggaagtacatccctggtacacaagacaagtgatcttcgtcggtcatcttaacgaacggaatggcaaagaaagggcagacttaataggctgtatctgcaaagacatacgctactagatgagtaataattgggccactgcgcttagttattacaataagagaagtgtctcagtgaggtcccttatgtgtaccatcctttaatagatctcatacaccagaatggcgggatcactgaatgactgacatgacatattcttgttgggcatgtcctgatgtggaaactaaggactggcttgtggttctaatgacctatgttcaggttgtgaccttgtaactaagtcacctcccaacttccggttctttggcatcactgtttaccactttttatggattttgttagaccttcggagtaatgtcccactttgcccacacgcccgggggtgccgtcttaaactcctgggatggtgttattaggaatttacgggcgcgggaatttgaccggggatgggcgggcctaaccccgaaacccgggtgggccgcctcgcccgcacggga

SEQ ID NO: 702975 - DNA, 149 bp, Homo sapiens
ctagtcagatttctctgcggctctcagtgatagcatctctagatgatggatggacttttctgctattgcttcagaagaaatggtaaaagtggtcccctctttccacacataacctaaacattcagagttaagacagcgagaatgaggat

SEQ ID NO: 702976 - DNA, 255 bp, Homo sapiens
cagcagtattaacctttagcaataacgaaggttaactaagctatactaacccagggttggtcaagttcgtgccagccaccgcggtcacacgttatccagtcaatagagccggcgtaaagagtgtttagatcacccctcccaataaagctaaactcactgggttgtaaaaactccagttgacacaaatagatacgaagtggctttaacatatctgacacaattgctagccccaactgggattggatcccccctatg

SEQ ID NO: 702977 - DNA, 790 bp, Homo sapiens
gatccgatacactttccaaggcccagccccatggccgtgtcagaccaggaatgtattgagacactccgaggagatgaacggatcctgttccattctgatacatcagaattgactgaaggagctccaagaactcgctctccaaggcgccaaggagagggcacaatcagcagaagaaacacagcggttgtgaaagatgaactctcagaggttcttgagaaccagagcatccaggccgatgctgaaagaggcggtggaagagccatcatccaaggatgtttatggagaaaagagaggattccaaggaggcagagaaaagtgtgtgaagccacagacgtgagccaggccccgagagtgcctcccggaggcccatgcaggagatccaaggctgaggggcacacaaatcaggccacatggggcggaagaggagcgcaggaggagagacggccagacaagacaaactcgatcactcccaaggacacgcaatactgcaagaccataacatagagaggggacccaacaagtgacgacatggagacccaagctgaaagaaccatactacaaaagaggacatgagatggcacagagcacgcaggcacaggggggccacacaggatgggaaacaagaaagggataggcggaaaacacagacaagaaaggtaaagaaggcagaacggaacaagaaggcaaaagagcaaaggcaaaagtgagaagaacaaacacaagagagaagagcgagagaaagaacagaacagacaaagcagaaagacgacagcagacaaaaccaggaaga

SEQ ID NO: 702978 - DNA, 333 bp, Homo sapiens
gtaagctctgccaaaccaaagccccctctctagtatgcgcggttagggttaaaaaagggaattggctcacttcccgtgaagggtcagtccagacagcttgctgcttttaatgaccaaaatgccctgtggaagcaacctgggcattttaggaaccagtccctggaaaaggcatgttcccaaaaaggtttttggaggggcaaacccccccagtaaaacataatgtttcatgaaaaaaactgattttttatgccatgaaatgaaaattttaaggccttgttataattactaatggccgctgctgcaggccattaataaagttgcttttttaggcta

SEQ ID NO: 702979 - DNA, 146 bp, Homo sapiens
ttatgttgatgatgaagaagcggcagagttattgacatatccatggacatcccgttctccttcatcatcaacaaggaaaattaaactgagttgaacattgtgaacctgcagatcacggaagaccctggcgagtgaaattacggcca

SEQ ID NO: 702980 - DNA, 261 bp, Homo sapiens
  misc_feature (247)..(247): n is a, c, g, or t
agcgtgagcataccagaaagccatgagatctatgagcaggtggggcaacacaagggataatccttggttgaaatacagggcaaaggattacttcttcaaagcggccctcgtgccatcttccatagtagcacgagttgaatgccaagctggctctgtgagaacatatgacggaaatgtttccgagcatttacgtgattcaaggagaatgtaaattaatggaaaaggactccatagaagctcatgaagnaacagaacagtgaa

SEQ ID NO: 702981 - DNA, 966 bp, Homo sapiens
gcagtaatacctgacacacacgctgcggaaagtggctccaaatgtgtatgaagacattatgaatgggcaatcaccaacctgctcatgtactttaagagcatgatccggtctcgccgggaatccggcacgccatgtggcagttacttaccagtgagtccaccaatcacagctgggatgtgctatgtctggcggctctctggaccaagccgctcttgttcttgggaaggatatgatgcatagaaactgttccttgaacctgtattccatactctcgtaacgacaacaatgaagggtttgatccatatcctccgatttagttcctaggggagctcttggttatcgagatttaattgtaggaacttattaatagccagctaccagcaaactccccttgtgaataacgcaacatcccaatttgcagtagaatatgtcgctcttcctctaggtctgagagtccttatgacctggctttccgatgcggcctggatcagcgtggcgaaaacggggtcagtcttgccagttaggggactctctatgaaagcacaaggccatcaagccttgtgtacagaacttcatgttctgccctggatttaagctgaaggttagactagatgatctcctggtttacctgcactctgatgactcatcactggcaaggagcgtttctccacgacaggtgctaagatttctagacctgtgtactgataggcaggaatgcggggaccgcgtacaggatatgctcgcggactcaagtccggcgagccattgcatcaagtccacatcgtggaactgtatgcgggcagtatctaaagaggttttgatacggtgtgccgggctacgggatgaccttgactgttgccagcttcctcattctttcatggcccactcttcaatcctggagactttgcccattgaacagccccgggaatacaactcttaaccgggattatgtctgcaacgaagaac

SEQ ID NO: 702982 - DNA, 2641 bp, Homo sapiens
gggaattagtaccaagaaaacactagtataattaagaaatgttcagtttgcacaaagaactatccagataacccaccagcatgttagtgagatggaaatacagacccacaacagtaacccaatacttgcaggggttgggggcacggttatagattcaaccattgacctaagtctgcgtagcactgggaagaggctttggtttagaagccaaggaataatgagtatattggggagaacagattatttacaagatgaactctttaatgtttgtgagaatctcaagtttcagagtttctcttttgagaaagaaaaaggggtaataaggtagaaattcacaccaatgaacaagaggattgctgcaaagtaactgaggagatgtctcgccattgggaccctaatgccatttttggtcaaacattgttttgagcaagaatctggcaaacaaaataatcaacaacaaatgtgaatatagtttcatttacttttaatttttaaatctgtggaaaagtttagttgtgcttcttgttaaaaagaacatttctatccctgaaaatgctatcttgggcttatgattattgttaaactccaagtataaactgaaaaaaaaaacatatccctaactctgttatgaaaaatggagacttctgatattaaatgctttcttctacttggaagaggccagagaaaacagggaagagaaagacattattgagtttgaccatgtattatgctgaataaacaataagcactttagagtccctccctcaaactctcatacatttcatatttcttttccatttattttcagttttgttttagaagaaaagttcatcagagaattttgttctgataatttcaagtggccatcttaggtcagtggaaaccgtaagtccattggactttacctcatcctttctttgtagacatctgggagaggaagaggagcttgtaatgatagcacggggatggtgctgtaaacaggagtgaaagtgtttgtggaagtccagagaagtgactcaacaggctacctagctgcagaacaaggagtagagcccacatatccagatggtgttttgagaggtgcgtagacagtgaaattcaattaaagagaggattttctcctcagcctcatgactcagaacagctccctaaatacctctctcatctaattggacccatccatagtccattctcaaacatgtgacattttcccctaagtagatgtgattatctcttaggcatttgttgaaaaataattcttaggtccatggtgcttgcacttgtgtcttttctataaaatgtttggtcttacaggtttcatgtcatttaagctgcacttctcagcaagttaaaagattagcagttaatctttattcatttggcctttgtgaatttgtatttaaattatttttttcaggattggcaaattattcttgtttctcctttacaaaaaaataaatgcgatattttgttcaatgaccccaaaaccaacttgaaacttaggtggtcatattggcttgcaaagcaatgtccctaattgtaccagtcagtcacacaagtggattcaaggacctgctttgccagattgacctgtcaccaagctcacaacacatatcctccacaaacaacatgtgttatgtgaagaaaaatggtaattataaataagaacaggatataacacacctttcatccactttaaatctccacagtttcattttatgtcattctctgagcaaatctctttgggatgtgagctagcgtgttcttctcccatttggaatataaggctgggaatagaacaatgcttaacaaatcagtgaagctcgacagtaatatgtaattttaattcagttaggaaagagttgtattgcattgcaacaagttgacaaatcatagccatctctgtagggtgtcaggaattatctcctggtcaactttaatgataactaggggtccctaagtgggctaacatgtgctgcattggagagaagccaagggctgagagtacagtgccaaccacgtaatgaattgcttgcagaaattccaaagaggactcagccacttatggatttccacacagcatcttttcccagctccacattaagacacaggatcttaaaagtaattttttaaaagctggctgtgtatttatttatatgaaagtgttataaatatcaaagcttacaaatacattaatacatatcacctttgttgaagctagcaaaatggctcaaaattgagactgtagagaaaaatccatgaaataatcacgatagtcataccacaaaagatagcatagctaggtgggcctacctggtcgtatcaacacactttcagatagatgcttcaaaaaaaaagggaaagcttgttactggaatcttatgtgcattacagtttaatttcttcttgtgacaaatggtgctcaaagaaggatcaatccggttgcatccttcaatttcccttttagaatgacttttggttttcattacagtaggctatgttagcctttattttggtggttctcaaatacctggtgacttgaaagagtattatgctggtggcctttcataaaggttactgaactttaatcaggggtgagatgaatgaatgtgaataggcctatatactattttttttaatt

SEQ ID NO: 702983 - DNA, 271 bp, Homo sapiens
atcaggacgactgttggggggtcggacgactgcgggggtccacgagatgtgggggtcggagatgtgcgggtctggagatgtgcagagcagacgcaaagatgagctgatcggaagatgcccaggtccggggatccaccgcgtccggagacagcgcgggtccggagaatgcgtgggttccttgcagactatcgctccgcccgggaacatctccggacctgcacatctcccatccacacattcttcagatttgcacatctttggagccgcacat

SEQ ID NO: 702984 - DNA, 372 bp, Homo sapiens
cagtaatcaccctaatttattatggggaaatgactaaaaatgagggcaaggccaggcgtgtggcttatgcctattatcccagcactttgggaggccgaggcaggcggatcacctgagggagttcaagacctgcctggccaacatggtaaaaccccgtctctactaaaaatacaaaaattagctgggtgtggtggtgcatgcctgtaatcccagctaatcaggaggctgaggcaggagaatcacttgaatccaggaggcggaggttgcgtgagcggagatcacactactgcattccagcctgggtgacagagtgagactctgtctcaaaagaaagaacaaacaaacaaaaactatatacatttagggttgatg

SEQ ID NO: 702985 - DNA, 224 bp, Homo sapiens
atggagcggcatctggctatgaaatatcggtctaatgaaggacatacggtttagagttgtagtgagtttgacggaaattcttagataaatttatttcatgaccttactaaactgtgtaatcattagattgaaaaggcattagttgattaattgttaggctttacttctgggcaaccaaaaaaggaaaccagccaaggtcgaagcaatgagctcactgggtaggt

SEQ ID NO: 702986 - DNA, 190 bp, Homo sapiens
cgacctggccgattttaacaaagtacaaactacagctgatatcactatggtgacctttcttacattttaatatttctcttactgggactctccctgattgacatcacctcatgcgatgacctccctcattctgtgctgcctcagcacttatcttttgagtttgtactgtggtccatgtacttactaatat

SEQ ID NO: 702987 - DNA, 213 bp, Homo sapiens
ccggttctcactcctccatcctggtcgtatatcttgtctctttgtgatacctcagcactttgggaagttggggcaggcagactgttcacggtcaggagttaaagaccagcctgggcaatatggcaaaatcccatctctacaaagagtacaaaaattaggcaggtgtgatggttcatgcctgtagtcccagctactcaggaggctgaagtggga

SEQ ID NO: 702988 - DNA, 1301 bp, Homo sapiens
  misc_feature (289)..(289): n is a, c, g, or t
  misc_feature (602)..(602): n is a, c, g, or t
  misc_feature (1063)..(1063): n is a, c, g, or t
ggagagaactagtctcgagttttttatttttttttgtggcaaagatccccttttttttttctttctcctcccaacattaccttaattaagacccaagggaggaggcaggggggttcgagggtgaaaggatgcagcgtggtaggaacccgcaatgaggggttaggctccccgtgtgtggcaaaagagggttcaaaggcacaagaggagtggacagggggctcaggcgtggacacgtgaggaaccaaggtgtgggggcacactatctctcccctctataacaacttcctcnccctgtgtgtgtgaatagcctcttgtggtgcacgggcaaaagcctcaagagccctgtgaagtgggtgtgaatctctcggcagagagctgctagacacattgtgcggttatcgcctcgtaaagctcgtggctattgtgcgctcgaggagttcgcggggtgtgcgtgcatggagagccttgtttagggtgtcgtgcgccttgtggcgtgttcccgtggctccgtgtggacaccacttgcctcctgtgtggagagtttcaccgcgaattggggagaggagcggtttcatccccactcttgttcacagcgtgtgtcncttgtgggggccagctcttcgggggggaaataccaaacgctttaattgtcacgacgggggggcacaccaaatagacgagaaagggaaaggtttctcccagaattttctaccaagtgtggcttcaatctccagaatgtgtgcgggcgaacagaacgtgtaaaagacccacggtattggtgtacaagcccaaaaaaggtctcgtgttagggatccctccacagcgcttttggggtccccccttccccagcacagaaaaaatgtgagacagcgggggaagtaacactatataaaatatatttgggcgtagaccccaaggtacaataaaacatgtgggcgccacaattacttttacaagagcactttggagagggccctgcttaaattggggtcgaaacagggtcgaaaactttgggtcttcccaaaaaccccgggttggcacatctgaaatttcgggccaaggnggaacccccggaatattaccccgggggttagaattggccccagttaatattgaggacaacactataagaaggttggcccgatggtcctgtggtgggatccccaggctaaggaatgaactaaaattcatcggagatggtatataaaacatttctgcggaggaaactcgcgattaattgtgtggccccttttgcccgaatagtaccagacacggagagtctggacaacatggtgcaacaa

SEQ ID NO: 702989 - DNA, 495 bp, Homo sapiens
cagctataacatgctctgggcgtcgtttacactaacagactattaccatgcacgtgggagtcgtagttacagctaaaacagttataaccatgcacagaggggcactttacagtaaacagtatataaccatgcacagggcgagtcgtgttccaccaatagccattcctgttgactctatcgttggcactgtgaatggcacttctcctgcataactgaggattcctacgcagactaagcacactgtgttgctaaactctctacagagtgtggcagcatcaacccgggaaatggcacattcgaaccaggatcgccctgacaatgggcttgcctttttgtatgtgttttccccaccccctgatctagctgtatcttgtggatgttgctgtgacagtggtaaccagtaaataagattgcatttaaggggtaagcaggtgtataaaaacaaaacaaaacaaataaaaactaaatataaactaaagaggcaaacactgggat

SEQ ID NO: 702990 - DNA, 226 bp, Homo sapiens
agaggatcccccggtagagcggtcgatactctgggtatggcaaagactttcggtaaggtacaacaccaaaagcacaatctatgaaagagctggttgataagccggacttcattacattaaaaacttctgtcctgcacaaggtaatgtcaaaagaatgaaaacaacccacagaccaggagaaaatatttgcaaaagacacatcagataaaggagaccgatcttaccg

SEQ ID NO: 702991 - DNA, 440 bp, Homo sapiens
ggtcggaggtaaaagtctgacggtgaatcttcgagcagaagtaagtcattagagtatacttggtaagcaagagacaaagctttagtgtaatagttcttaggagtatactgttcctaattttattctgaaactcaattttaccccagaccataattaccatattaacttggtaacgcacagttgtatgcaattccgcaaagcagtagtataccatcaggctctattcacccagagcataggaaaaccaggatgggtcacacccattaagaaacaaatctatcccacgctatttgccaatgtgtagtttcagtctaaattctgacaataaaatgtctggatctctatctatatatctcatcttgattttcaaaagtagccaacgggagttcttcagagcttcgcgtcgcctggctgaagctgaagattaggtaacttcatag

SEQ ID NO: 702992 - DNA, 332 bp, Homo sapiens
tactctggcgcgccgtgtcttgtccagcgtggtgtgattctgtgctggctgctgctactgacgctctggctgccctggatcaatcaccggatcacctacgctcctgttgccgaagaattggcacagcaattaccgaacaagagctattgcatcgaagcgtatatcggcccttcgcaacgcagctcttttgcctatttcggaaaaatacagttcgccaccttctccgatcacgagtgtggatatatgctcttgcagagcagccggcgacacatacttaaaaccgaattgcctgcaccttatcaacccgaacaatgggatcaggtctggtctgg

SEQ ID NO: 702993 - DNA, 1947 bp, Homo sapiens
  misc_feature (1143)..(1143): n is a, c, g, or t
agcatgttgctctgttgttttttctgtcgggtttttttgttgtatcgctccccgctatcagatgtttgtgcgttgttgcttcgctaagtgtcttcatcgtgcgtaccgatgagttgtgcgtcagcttcactacggggggggagttctctctcctcgacgggtcgcctctcacatctcggggggggtttgtggacctcacgctgtctctcctctccgaagagttgtttggggtcagtctatagagcatcgcggggcgtacgtcgtgggtgttccttgtggcgtcgatgcgatcttagttctcatgatcggttcggcggagtcgccatccagggcggtcatagcactatgatgtggaacccccgcggtagtatgggtatttttcgatgatcgcggccctgattctccggtctctttttctccgggctgtgcccacaccgtgttgttaggagagtccctctcccccagaggggtatttctctgtgccccacgagagtctgctggtgtgcgcaacacaggagtgttgtctcctggcggctctttttgctggtgtttctacctggggcggacgcctctcctcgtgtgtctctatccttgcagttaggaccacgtggtccgctctcctgagagatggttttagtcctacgaatgagccacccccccttcgggggggttgtgtctctcggagcactaactctactagggggcgacacgcggccaaccgacgtcatattgtagggtggtcatatatccttcctggtgtggggctgttgatccgtctctctttataggcgggggtgactctggatgatgtccctgcccccccactccgcctgccctgcggttgtgcgcagcgcatcttggtgggggtcattgtctcctctgctttggtgctacagagctatcaaccgtcgccgctctatgttggccgccgtttctcccctaaggtgtgatcctctgtgtcaccgcctgtgtctgtaggtgggttagggttgtacccttggggaggattttttgcgtcattatggggggggctcgttacccactatacaaaagtgctggcggaactacgtcgccccccacgcaggggggatagtagcctcttgcctccagcagaatgttatctatggacgaccaataggggtncttccccgcgagctttgtgaggcagcgcccgcaattaggggccgacatcgctccccatcgtggggaccaccacgatcgttgtgccctcagcgagatataggttatgaggtcatcaggaagagaagtggtgcctcgcgaagacgtgaacatcgccaccatgtggggagaccacccctcgcgttgaagttgttatgccacaagagattatctccgccccctccaggtggccgtatacactaatattgtgtcagcacacgtcgcgtcgagagctttatcctggcgtcgtctagttgcgcggaagagtattctcagaaacgcgatatatattggcgcgagatatatatctcgggaaagagtgagcactcataggctacacactcgctccgctcaataatttctttcagagatctctccacgcagagaggaaatatactgcccgcgacactcactggtggcacacgcacaccgcgcgcaatggggcccgtgttacaggtccctcgcgcacacgctcatcgcgcaccctataaatgagtgtctgaagtaaggaatgtggcctcgaggcctcatatgaggcccacggacggagaacccccactcatcactggcacataggttcaacactcacgcgggaagagagtatctccccacttttataactcgcgttgagatatatatcgaggtggtcaccgtaagacccggcgccctttgtggttttttccggactcaccctatgcaaccacgtcccacaccgggtttattgtgaatacagaattgacccggatagagccatacatgtgaaggaac

SEQ ID NO: 702994 - DNA, 305 bp, Homo sapiens
  misc_feature (36)..(36): n is a, c, g, or t
  misc_feature (44)..(45): n is a, c, g, or t
  misc_feature (207)..(208): n is a, c, g, or t
  misc_feature (217)..(217): n is a, c, g, or t
actctagaggattccggcagctatccggttcaatgncactcggnntggagagagaaggccatgctgagtcttcctagacctgctccctgactcttcagatgccacccctctgctgggctgatggcttgggtttcctgtctgcacagactgaacttctgttagaaacaccaggtcccaggagcagactctggtccctgggtgcccagnnctccaggcngtgaagttctgaccaccaccggcgcccaggctgggcggcacttacactgcatgtaccaggcccgccagatggcattattgaaccggat

SEQ ID NO: 702995 - DNA, 210 bp, Homo sapiens
tctggatggctctcccattcttctcttccttccgcctccgccgatgccccagctgctcttgtcactgtctctgatgggtatttgcctggctttgttgcttctctatcttgtatttagctgcatgtgatcctttagctggttggttcagaaaaaaaaaatgtgctttaggtgccctgtaatcctgaggcatagggggaatcgatccttccc

SEQ ID NO: 702996 - DNA, 973 bp, Homo sapiens
gtgatccatttgttcatttttgcgttggctgcctggctgtggggtattactcaagacatctttgttcagtttaatttcctggagagtttcaccaatgtttttgtagtagtttcatagtttgatgtcttagatttgtctctaatccgtttgatttaattttttttagatggcaagagatagaggtctagttttattcctctgaatatggatattcagttttgtaacacaattgttgaagagactcccccattatattgaggcaggaaaatagagtctggaggcagaaaacataagaccacttcacacttcacctttccatagggcatgggccataaataactttgtaactttatttcatcctctccatttacatagggcatactagggggtatttaaactcccaaaaattctgtaatggggcctttgagcccctacgcttgggctttttcccacactgtggagtgtattttcattttcaataaatcacttcatgccttccttgcaaaaaaaaaaaaaaaaaaaaaaaaaaaaaaaaaaaaaaaaaaaaaaaaaaaaaaaaaaaaaaaaaaaaaaaaaaaaaaaaaaaaaaagggggggggggaaaaaaaactgccgcgaggagggggcacaactattaggctagaaccgcagttgattggatgagcaggggcgcgccccacaatgaggaggctgtattaataaaacgaagagaggaggggaggccatggttaaaaaaacatgctgtggggtggaaaaacaacagtcgtggtcggtgcgtgtatattgttagagagagcaaaccccccaatttattggtgggggtagggaacataatagggaggcaacaaacccagcaataaatatatgccctcgtgggggagatcaaaaaaaatgggggtatatggtggtggataaaagacaagtgtatatgtcggggagaagaatgtgtgcaagatgttatataaaaaaattc

SEQ ID NO: 702997 - DNA, 139 bp, Homo sapiens
gtacgcctcgacagttctgtgtgaaatgactttgcagtatcccttgatatcagaaaaaattcagctcaccagataaatgcatttccacactgagaacattcagggtctatttgctccgtaaattacagatggattcagg

SEQ ID NO: 702998 - DNA, 295 bp, Homo sapiens
gtccgaccagtcttgagagaggtcactgatatatcttcaattggactattttgacctctatcttattcattttccaagtgtctgtaaagccaggtgaggaagtgatcccaataatgatgaaaatggaatcaatactatttgacacagtgtatctttgtgccacatgggcaggccatggataattgtaaagattcaagattgtgcaagtccatcggggtgttcaacttcaaccacaggctgttggagatgattctcaacaagccagggctcaagtactagcctgtttgctacctgt

SEQ ID NO: 702999 - DNA, 412 bp, Homo sapiens
ccgagctcgttacccgtcctacatagtgtttccaacaggacagtgtctctgtgtcaaattttggtaattcttgaaacatttcaaaccttttcattattataatatctgttatagtgatctgtgatcagtgatcttagaggtaactattgtaattgtttttggggccacgaaccgtacccatatgaaaggataaactgaattgataaatgctgtgtgttctgagtgctccactgactgtcccttccctgcctctttctctctcctggggtctccctattttatgagacacaacaatattgaacttaagccagttaataaccctgcagtggccggtaagtgttcaagtgaaaggaaaagtagcatgtctctcactttaaatcataagcaagaaatgaagctagtgaggaaggcg

SEQ ID NO: 703000 - DNA, 467 bp, Homo sapiens
agacggcggcaggagaagcacgatgtatgctggctcaaaccctgtggccatcgtctcgggggcgcgggccatcataggttccttcactggagccttagctgctgttcctgtccaggacctgggctccactggcatcaaagaaggctcgaagagggccactgcggctccggaagatgtgtctgacgccatctttggacatgtcttggcagcaggctgtggtcaggatcctgttagacacgccagtgagggttgcaagaattccctactctgttccagcatggagctgccagatgatctgtgaggtaggcctagctgcaggaggcatggcaaatatgaacctggcctcctactgggcttacttgaggacaggagcaaagatcggtgagatcccactgactgccggtatactctgagatggtattacagatgcatttaacaactgtcatattgggtattacagctgataa

SEQ ID NO: 703001 - DNA, 111 bp, Homo sapiens
acgggatgacaatgcgcgggatgtctcgacttgtccatgtcctatcctgaagcagtagagcagccgtagttcttgagcagtgtgtcatggtttgtgcgacgtttgtgtcaa

SEQ ID NO: 703002 - DNA, 539 bp, Homo sapiens
  misc_feature (415)..(415): n is a, c, g, or t
  misc_feature (445)..(445): n is a, c, g, or t
  misc_feature (453)..(453): n is a, c, g, or t
  misc_feature (482)..(482): n is a, c, g, or t
  misc_feature (497)..(497): n is a, c, g, or t
  misc_feature (514)..(514): n is a, c, g, or t
  misc_feature (529)..(529): n is a, c, g, or t
caaaagtcctgagataatagacatgagccactgtgcctggccagtaatcaccagcttaagaagttatagctgtgtggaaagacacaggactcataggtcaaatggtaacatcctacatacacagaaggaaacacacacacaaacaaagcctttgttcacaagcaaagaatttctttctcattcttgcctcatcccctgtatccagagatcttatttttttcctcttatcaccttcattttacactggtctgatgttttttgttttgtttgtgtgtgtgtgagtgaatttttcagagctcagctttctagagggtggagcagtgtctgtcacacgggcttctcatagctcaaactgtcatccctgctttagctcatctcttcctaattgttctctaccctccaccccccacaactntgccttttttttttttttcctgctggccangattccanggagaaggaaacgaacctttcatttggtnccctcagatggggcnttctaggaactttggcnccggtttaactcaanggcgtttggg

SEQ ID NO: 703003 - DNA, 1008 bp, Homo sapiens
ggtctgtcgcggctgctgaaaggccccggcgtcgcctctctgtgccgcggcctggacgtggaggccaagacacgacttacgtgcgcgacaagtcccacatgtgaatgtgggtaccagtcggccatgtggtaccacgggaagaccacgctgactgccagccatcacgaatattctagctgagcggaggtggggctaagttcaagaagtacgcaggggatctgaacaatgccccggaggagcgaggctcggggtatcggcatcaatgcgggtcatgtggagtatagagagctggcgtgccacggcacgtagctggcccggacaatggactgggccgggtcatgcagattatgtgaggaatatgatcagaggcactgcacccgcgtcggacgtgatgcatcctggtgtgatatgcagacctaggacggccccatggcccagacccgagagcacttgattaactcgggcacgatcgcgattgggtgtggagcatagtgtgtgggtgtaatagtgacactacacgttgaccgctgtctccacggcactgcgagtgagtgggtggaatggctgtgaacttggtagcatcctgggaagcgttgctcatcgaaggtgggggtattaacggggagggagacccgcagttgagtgcctacgctcttgactctgctggcgtactcttgctgggtctccgaaccgtgaacttatcgactagtaagggcggggtcaagaagcgtatagggatgctgggacggttacattccagcggccgcccggggacaggctgcagcatttcctgggcctgcggatggcgggtactccggcccatgggcgggcgcggtggtgaagcccctaaagcctcgggtgaaggaaggcgagcggtgggccctgggaatcagaactccgcagggggaaagggtgccatttcgccgactgcaggcacgcgggaaaccagggcaggcacgtaggagcaaggggctagcatgcaggggtcaccccgggacgccccggcag

SEQ ID NO: 703004 - DNA, 181 bp, Homo sapiens
ggatgtacactagcagtagccacacggggaacaggcactggcagaacatgccgcatctcctatgatgaggtccaggtgcagccactggcactacgccctggcagcagaggacaccatcttaccttaaagggctagtactatcatgaagctggtacataggactccgttgaacgagactttc

SEQ ID NO: 703005 - DNA, 214 bp, Homo sapiens
accaaaggagcagaaggacagcagggattacgtctactaccttgccggtgaaaacataccaggctcaaggaatacgagaaggccttcaagtacgtccgcaagttgatgcagacagagccccaaaacaaccaggccaaggaattggagcggctcattgacaaggccatgacgaaagatggcctcgtgcgcataggcaatcgggacatttgccatc

SEQ ID NO: 703006 - DNA, 2065 bp, Homo sapiens
gacgtgcgtagtgaactaagggcatcatgaggtagagatgggggctcgcatgacccgcgccttcaggaacttcaacgtggagaagcgagcggagcaggagatcagcaagaggaagccctccatggcacccaagcacccttccacccgcagtctcctgcaggagcacctgagtcagtatccagaaatcgaggaagaagtttctagaaaagataacaagctgctgtccttactaagagatgtatatgtcaattccaaagatccggtgccttccttgccggtaaaagccattgaaccacagcaacaaccaaaggagttcagattgccaataggagatcaatttgacaagaatatcaaggacattcccaaaggcaagatcactgttgtagaagcactgacccttctcaataaccataaactctctccagagacatggactgctgagaaaatcgcccaggaataccatttagaactggaggatgtaaattcccttctcaaatatttcgttacttttgaagtcaaaatcgttcctcctgaagacaggaaagcaatacaatcaaagtgaagaaaatcacaaaacgatttcctatgtgcgctcccaagctctgagtccttgtttttcgtgtatataaattatacaagttactgtgattgagggccataacttggatagccctttgacctcttcaggattgttcatataattttttttttaatttatgtgtagttcctggctatatgtcagtgttgatcatgtgactgattcaatattaagtttcactttccaatttaggatggtttgttctttggaggagacactgaaagaagagccctccctcctgactcctataagactggcattgtgctagggacagataatcagcaatgagacatagtgactatatttcccaagtgaagaaagagagaaaactgagtgcaaaggaagaaaaatatatattagtactcaacaaaataaaaatccgtgagggtttttaatgttttaaatatgaaatcactttttagaattattattagtatctgtgacctactagctgtctcttgacaaatagaaataggtaacttgaaaagttttctgagaggcaatacttaagactatttgaacaaaataacttcctttaatttagaaatgagagaaatattaatagctaaaaataagaggatccgatttgataaccaaatatttatacctgttttcattctaggagaaaaagtagccagtagaagtataaaatccctgaagggacctagaaagttactgattcattcacttaaactcgagtctgacacattccagtattagaatctcaaatgaggtaatatgagtttggttcattctggcatgctgtaccggtgggttcttggccacattgtttgacctctctgaaagtgaatttctgtaaaagtagaactctgcttatgtaaattccaggacaacagtgaagttaaatggcaaaaggccaggcgagcacagagtcttatagttaaaatgggtgtctacagaacttatgatggagttgtctatagtttatgatgcaaggagaccagaatttaggttctcagaatcctactcgtatttttatttattctgccaaatgaaacccatttcaagaggacagaatggagttgggggaactgggcttgtccaaattctttcaagggaacaaacagacatatttgcctcgagattcccctggaaatgatgtggaagatgagaggaattcagcatggtgatggagggaggcagagtaacagcgaagaggggagatgaatggaaagtttgtaaggtttttcagatctaggtctagtgaacaaactatacctacttatttgtggttcggtacagaagtttaagagaacatgctaagtctaatcattgcaaattatattggacaatatagtcaaaaccatcttccttcaattcaaaataagtatgtgaatcagtagtactgactcgtgtttcctaggtggtgttagcagatataaatacggtttcatacggtatcacaataaaatccttccattttactcattagcccaaaaaaaaaaa

SEQ ID NO: 703007 - DNA, 2328 bp, Homo sapiens
gacgtgcgtagtgaactaagggcatcatgaggtagagatgggggctcgcatgacccgcgccttcaggaacttcaacgtggagaagcgagcggagcaggagatcagcaagaggaagccctccatggcacccaagcacccttccacccgcagtctcctgcaggagcacctgagtcgtgagtgcggccccttccaggcctccggtgacattgaggtcgtccccgcgcgggctccggtggtggcagcggcaaggaatcccagagcccaaggcagcccgtgctctctttcggggtctgcacagaatgcgctcagagtctcgccctaatgtaagtccctagggtgtccagatgattgtttttttttaattgtcatacatgtttacgattttagggatatttttttctttaaaaaaaaattacggccttttttctttccctagagtatccagaaatcgaggaagaagtttctagaaaagataacaagctgctgtccttactaagagatgtatatgtcaattccaaagatccggtgccttccttgccggtaaaagccattgaaccacagcaacaaccaaaggagttcagattgccaataggagatcaatttgacaagaatatcaaggacattcccaaaggcaagatcactgttgtagaagcactgacccttctcaataaccataaactctctccagagacatggactgctgagaaaatcgcccaggaataccatttagaactggaggatgtaaattcccttctcaaatatttcgttacttttgaagtcaaaatcgttcctcctgaagacaggaaagcaatacaatcaaagtgaagaaaatcacaaaacgatttcctatgtgcgctcccaagctctgagtccttgtttttcgtgtatataaattatacaagttactgtgattgagggccataacttggatagccctttgacctcttcaggattgttcatataattttttttttaatttatgtgtagttcctggctatatgtcagtgttgatcatgtgactgattcaatattaagtttcactttccaatttaggatggtttgttctttggaggagacactgaaagaagagccctccctcctgactcctataagactggcattgtgctagggacagataatcagcaatgagacatagtgactatatttcccaagtgaagaaagagagaaaactgagtgcaaaggaagaaaaatatatattagtactcaacaaaataaaaatccgtgagggtttttaatgttttaaatatgaaatcactttttagaattattattagtatctgtgacctactagctgtctcttgacaaatagaaataggtaacttgaaaagttttctgagaggcaatacttaagactatttgaacaaaataacttcctttaatttagaaatgagagaaatattaatagctaaaaataagaggatccgatttgataaccaaatatttatacctgttttcattctaggagaaaaagtagccagtagaagtataaaatccctgaagggacctagaaagttactgattcattcacttaaactcgagtctgacacattccagtattagaatctcaaatgaggtaatatgagtttggttcattctggcatgctgtaccggtgggttcttggccacattgtttgacctctctgaaagtgaatttctgtaaaagtagaactctgcttatgtaaattccaggacaacagtgaagttaaatggcaaaaggccaggcgagcacagagtcttatagttaaaatgggtgtctacagaacttatgatggagttgtctatagtttatgatgcaaggagaccagaatttaggttctcagaatcctactcgtatttttatttattctgccaaatgaaacccatttcaagaggacagaatggagttgggggaactgggcttgtccaaattctttcaagggaacaaacagacatatttgcctcgagattcccctggaaatgatgtggaagatgagaggaattcagcatggtgatggagggaggcagagtaacagcgaagaggggagatgaatggaaagtttgtaaggtttttcagatctaggtctagtgaacaaactatacctacttatttgtggttcggtacagaagtttaagagaacatgctaagtctaatcattgcaaattatattggacaatatagtcaaaaccatcttccttcaattcaaaataagtatgtgaatcagtagtactgactcgtgtttcctaggtggtgttagcagatataaatacggtttcatacggtatcacaataaaatccttccattttactcattagcccaaaaaaaaaaa

SEQ ID NO: 703008 - DNA, 568 bp, Homo sapiens
aaatccaatccaaggtttcccaaatcggcccgcacatccaacgtattaataactagcggaaataatagtacagtgccagagtgggctctcttgaggggggggggtacgggacggggtttatgggtgctcgggatagtaataagacctgtggcgtatttttcgggtttctggtgatatatatggaggctcagactactgtaggtttatttgcctttctgcgaagggtggttatctgcatgactaaattataggtccctataatcgtagtaagaaagtacggagttaaataaatggggtggagctgagcggggaagggataggtttgttggggaatcggcgcgcgagcgcgagcggcgttttaaagggggaggggtcgcttcccggagttgacgtatctttgggctggtggtgcgtcgaaaggttttgtactcttaataccggaaaaaccgtatatgggcgcacgtacgcgcgcgcgtacgaagggcgtagaatctggttttaactataatcgtggctgctctattgccctaaatggatcgaatggcctataggtatctcgatttcttcg

SEQ ID NO: 703009 - DNA, 107 bp, Homo sapiens
tagtgctggagtgtgatatctccatgttccagtatcccaagtagctgggattacaggcatgcacgtgccacacctcagctaatctttgtatttttagtagctgacag

SEQ ID NO: 703010 - DNA, 270 bp, Homo sapiens
gtggtcatgccacaagtgcagcaataaaaataataataatgaaaaatttataaataaaaaggaaagttggggagttccctgtggctcagtgggttaaggacctggccaaaagaaaagggggaaatgtgggaagagatccctggctccccttgattctctgagcaggaagggctgccaggtacaccagtctgggtgccctcccacaggggcagaatcaaacacctggacgtggtgaccctgctgagaaggatccaacgaccacgacgacga

SEQ ID NO: 703011 - DNA, 957 bp, Homo sapiens
acgggctggtgataggctgagaaggtcaacgggctgacacgtgtgctctaagcgtgcacggatcagatcctggtgagggaggtcgtacaacatttgctgattgggtgttcgtgatcattgatcgggaggaggtgcaggtagatttctagtcatggagcgagctgatagagggctgggggcgacggcgcaattcaacgaccggcaccgagacaggatgtcacaccgcctgagcacacgagcacttggcaggacccgatgactgaatatgcttattcatgacctgtcttctctcagggggaggacagggagcgtgccggactcaatgttacctaggcggcagctggttcgatacgagcggtggaagaccgaacgagctcagttgaggggcaagggtccggactggcatgctgatccgcacagctctattcattccctgagtcacttagtaacacgggccacgggattgactgtctgtcaatgataactaattggcacgaagggtatttattatgacatttgtgctaatggactattcactcgaccctcgtttgttggattcggaaatgtacgaaaaggtctggtcgaatgagatggatcggggtctgcaggtactatttggatgttgccatcagtgttgggatggcgcggaaactggggtgctgtggtttcaatcctccggtggatccgatggtaaggttactcgagtatgatgtcatggccactcaagtccgaatgcctggagattctcgtgatcctaatcgggcgcatcctagagttttccactggggtgctcatgttgagctgctgataacttctggtgggtgaaacatggggacaacgaacgctggtgagccatttggcttggtggctttcatgggttcgaccaaggagggcttccaaaaaatgtgggggaaacaacacggtggtttgtgcggggggtacctatttaaaattgga

SEQ ID NO: 703012 - DNA, 667 bp, Homo sapiens
agcgggcttttgcaaggctgatgttcggtggtcatcagtgctcttgacccagtgtccagcgagccttatccctggtgttgcagctgttgtagtaccgccgccgtcgacagacgtcgccgacatgctctgcggggtcatggtgtgcatatacgactcttacccggatataccgggctcagaggctcgtatctggtctgactagatcctgggagctgtgcaggtcttatgcattggaacttaatttgacagattcagaaaatgccaattgccgtttatgcaaaatggcagatgacatttcacagtacgctatgaaactacaaataaaacttataaaagctgtaaccatttcagaccatggcactgtgacatatcactggaagcaatatgttggggatgatcagaatggtcccaaaataagcagtgacagttcggacctggcttattcctggattgcgaatttataccaaggcagcatctacttattcaattgacagcgtctacaatattttcctacaaaacctggtgataacacaaacatttacctgatgctgaagataaaggaatacttactagttgactgaaccttttgggccatcagaattccatttgaatgaccttttatagaatgcaaaaaggtataatccaacttttgggaaacagaactgaa

SEQ ID NO: 703013 - DNA, 367 bp, Homo sapiens
tgagcctggtcgacccaaccatagcggccttgtgaccttccaaccttcatcgacttcatgtccgggagaccaccgaacggacacggctgaccaggcatccttcttcaaggtctacaggacaaaacttcatcacactgaggactgcggaagactgcccccgacagccgagtactgcatcgcgatgggccataccagggcctgacgccgtgccggtgcctgactacaagtcttctccagccttgtatgcgagacgacctgtgagcccagagacctgaccaacacccccgacggctccaggagggctgggcagccccacagtcccattcctccactctgtatctatgcaaacactctctgcagtcctccg

SEQ ID NO: 703014 - DNA, 111 bp, Homo sapiens
atagaaggtcgacgtgtattcaccactgcgtgggcatgcctccctgtacaagttccagtcgacacagtgagcacctgtgctgacctccaaatatctgttaagctggagcct

SEQ ID NO: 703015 - DNA, 139 bp, Homo sapiens
ggtttttgggccccctttccccccccccccgggcgggggggggggttcccccccaaaatttttttggggggtccccccccccccccggggggggggggggccccccccccccccttttttggttttttttttcccccca

SEQ ID NO: 703016 - DNA, 804 bp, Homo sapiens
  misc_feature (518)..(518): n is a, c, g, or t
  misc_feature (604)..(604): n is a, c, g, or t
ggcagttactgagaactcataagaggaagctgaaatcccatcttcggatccgacagttcaagcggcctgaacacactccttgcagaaaagcccgagagaaatggagcgccatgtgattacttacaggaaccatgtatgcagatagtctgtctggtcacatttgtcgagatggtgttcatgcagtgattctccagttcctgcatcctgactgtgcaggaatctgcccagaatgtacgctgactggtaaagacccagtatctttcctcgccagggcggagggtgtcccaagtacattcaggtgcaatggggcttggcgtgcttcgtctagaagcatatccgcacgtccagcttaatcggtccatcgaaggactgattgtttggatcgctagaagacgaacaggtgatctctcagaggtcgcagttgcgtgctgtagacttaaagttcatattaatctagggtgcgaccagcttatatgggggggtttccaaaagggggttagaaatctaaacgggcgtgncgcgaatggctagtagctcgttatatttagtcatcggagagtgcttaaatgttttaaccatgctgtctagtacgagaatgaattgnatgatcgtcttggataggggaaaattaacgtggatcccagaagttgcatggctctgattgagataaaagctctgccttttcccttagcgataccactgtggacatgcgtcagggatgatctgcgcttgaaatgtctcctgccgatctagcagtacatcggcagtctagtctgtgcttggaatggtccgctagaatgtccg

SEQ ID NO: 703017 - DNA, 400 bp, Homo sapiens
gtaaactaggatctgtcgcacaggagtccaggcagagcaccgattatcaaaataactaccccgatccatgcacaaatgacaacatgatatcacaacacgaacatgcacacacaacatacaaccggcataaaagaacgaagataaaaagagaacaagaacaaacagacccacaacgaccgagaagcacatgaacaaaagcggacaaaaataaagagaagacagaacatacacatacattaggaaagaccaaacctagagacgagatccacaacaagacacattgacagccaaaaaagagcacaaaaagcataacagaaaaaacaaaaggaagataaaaagagcaaagaagaaagaaaacaaacagggagtaaccacaaaaaacaacacaaaagacaaggac

SEQ ID NO: 703018 - DNA, 1137 bp, Homo sapiens
tacgctgtctctgcctcgcgggaggacaacaagagaatatgaagaaggaggaagagggagaggagaagagaagagaagacgacaagcagtcagtgctgacggtgtgtctcgactcgttgtgtctgcgccgtctgatgtgatcgatcttcctcgtcgtgtgaaaaatactcctcgtctgcatgtctatcgttgtgtttcccaacactttggtctgggagtgtttttcggccacagtggttccgatcgaaagttgtgttcgtcactcttgttcgtcgaggtcgcgaaagttgtgttctcgtgcccgggggcgttgtgttgtttcttcccgctgtgtgctgttcgggcggagacggggtgtgccccccgtgtgcccgtgtgcttctgcccgggtggtgctccctgcccggggggttcttctctcttgtgcggccccccccgccgcgccccaagtgttcgcgtttcccgtggagctgttctcctggttgcctttgttcgcccccccggtggttagtatttgaattagtggcgccccttgtggttcggagcacccctggccactgagggctgttgtcaccgctagcgatgtgatttgccctcgactggggcgtgtgtactggccatctcattaatctcccccagcaaccccccggtggtagaaagatcaatcacgtctatggcacaactaataattgtttctttcaccaactgggtcacatcattgtgaaccgcctcctttcaagaggtgcgccccacttgtgcgtctaatgcccataagattccccgcccacccttggggaggcacgggtggatagtcgcctgatagcccacaggagacttttgagaccctattcctgcggcgcaacaccggtccaacaatcgccccttgcttcgttacccataaagatattgatgaaatacttaaggccacaggattgaggtgaacaccagtgtcccaagagagatttgcaaggctattctgtgggaggcgattaggggtggggaaatttgttgttgtaggcccccagagcagcgcgatggtctatccacgaacacacccatgagtctccaccccctggtcacttatacatgcgccgggagacacccacgagccacaagcacccgttattggtacaagaa

SEQ ID NO: 703019 - DNA, 125 bp, Homo sapiens
gtctgtctagaggatcccgaagcgcacgatggcgcgcctgccacgctgtgatctgtaaaacgccgaggtaagcttgaaagcagcacacatccgggtcaacctctttacggattttgacaagtata

SEQ ID NO: 703020 - DNA, 438 bp, Homo sapiens
  misc_feature (306)..(306): n is a, c, g, or t
  misc_feature (308)..(308): n is a, c, g, or t
  misc_feature (330)..(330): n is a, c, g, or t
  misc_feature (430)..(430): n is a, c, g, or t
tgttactgtaaattcagcttattccaattaggttggcacagatttaaactgatacacattccacagaaaccaattcagtgtataagtattgaagtataagcagtcattgcagcttgatgccagatcatgtatgtaataacaagtggaagttaatagggccttctaatactgtatgggtactcctaagaattatttcattttggatataaagaagttatgaggcctcctgtcacattcacagctggttctccaaaataatttggttgtttcaaaaacaaaggtaatcattggttggttttctcagtntncagaatgaatacagtggttttnaccaaattgccaatggtgggaggtagcatactgaaatgtagtgtgtgtttgttgttttttttcacttttgtgaacaaagcacatttatttaaaaattttnaattttcc

SEQ ID NO: 703021 - DNA, 834 bp, Homo sapiens
  misc_feature (180)..(180): n is a, c, g, or t
tgtggaaaacttaaaattaatttaaaccttgggggtttccacttttttccaaaaaaacccggtaaaaccaaataaaaaaaccccccaccctttaaaaaaggatgggaaagcctctatttccctgtcaccccccctttacctccccatcgtggttacacacaacatatcagccacgtgggncgtggggttccccacaatgttccctctcatttccccgatggtcaccgtggtgggtgcccctcagcccgtgatgtggacggcacgtggtggcgtggggactggtggccgccagggggtggctccgtgcgtgggtgccctcctcttcacaaagaagagctccctcgcgtcgtccccggcggacccaatagccacgtggcccatatcggagggtgcgccaagccctcggtatgaccgagtggccggataaaccactcccaaaaaagacccccgcgtgggccttatatccccgaaaacgcaccccccgtgaaaagacacgtgcgtgcgtggcccccggctttcaagaggaaaaactttctcagaggggccctaaatcccgcggggggaaacataattaccccggtgggcaccaatggtgtggtgccccgtgcacctctgcggaaaagtcgcctataaaaatttctaaccacttatacgaccacgaggagggttccaatcccctctttctgaaaccacagttaccccgggtccaacccccttaatttcctcagttgggccccctttctaatcggcaaggggcatccctatgaggcttacccagacgaaaacatcccggcttatcacactcgcaaaggcccccaggtttgtggccccagg

SEQ ID NO: 703022 - DNA, 206 bp, Homo sapiens
ggggaactgctttcagagagaaaacctttccaagagagttttgttttgttttggtttcgttttgtttgagatagggtcttgctctatcacctaggctggagtgcagcggcatgactgcagccttgaactcctgggcttaagtgaccctcccacctcagtctcctgagtagctaggactacaggcacacactactgtgcccagctac

SEQ ID NO: 703023 - DNA, 442 bp, Homo sapiens
  misc_feature (16)..(17): n is a, c, g, or t
  misc_feature (442)..(442): n is a, c, g, or t
gacccttacggctgtnnctcattccgctgaccatcgtgccctggacggtctacctggccatccccatcagcatcagcccccttttgattctgttgccctgcgccgtgctgttgggtgtgtccgtttacatcaccgtttcaagcttcaaaaaatacctttaggagctgcccatgcagtggacacaagaacagcagcccatcatccattccacggctgacaagctactggttcaggcttttgccggtaccggcaaaaccaccacactggtgggctacgccacacaacacgcctcggtgaaaatgctctacctctgctacaacaaatccgtcgagctcgctgcacagggccgctttccacgcagaaacgtggtgtgtaagacggcgcatggcctcgcatatggtaaagaccgtcgagggatccgtagatcaccccagcaacaccn

SEQ ID NO: 703024 - DNA, 439 bp, Homo sapiens
  misc_feature (106)..(106): n is a, c, g, or t
  misc_feature (398)..(398): n is a, c, g, or t
  misc_feature (427)..(427): n is a, c, g, or t
cttaaggtaactgatatcccaaataccctgactactgtgggaagtcagggaccccaaatggagggaccggctgaagcatggcagaagaacgtggattgtgaagatntcatggacatttattagttccccaaattaatacttttataatttcttatgcctgtctttactgcaatctctaaacataaatcataaagattgcatggacacttatcacttccccaatcaatacccttgtgatttcctatgcctgtctttactttaatctcttaatcctgtcagctgaggaggatgtatgttgcctcaggaccatgtgataattggcgttaactgcacaaattgtacagcatgtgtgtttgaggcaatatgaaatctggggcaccttggaaaaaagaacagantaacagccattgtttcaggggattagggnggagataaccct

SEQ ID NO: 703025 - DNA, 266 bp, Homo sapiens
  misc_feature (161)..(161): n is a, c, g, or t
ctagcaggatcctctgggtgcatgcatgtgggtggggagaagctataggggaaatcttggtatgttctgcacaactttgctgtgaaactaaaactgctctaaaaaatgaagcctttttgtttttgtttggatatggggtctcaatctatcacccaggctgnagtgctgcagtgcgaccatagctcactgtagcctcaaactcctgggctcatgcaatcctcctgcctcggaataccgagcagctgggaccacatgcatgcaccagg

SEQ ID NO: 703026 - DNA, 361 bp, Homo sapiens
  misc_feature (1)..(1): n is a, c, g, or t
natccaggatatgtttcctaattctgatttccctgtaggattgttcagatttaaataaagcctgtaaagcagaagtatgtgaccaagcttgggtcctaaagttaaatatcacagagccagataaaataagtctgaggaaaattcatgcatttatttctatctatttcgcccacatagttatgctgatatttcattcacgtgaattcaccaccctaaaattggtacctataatgaagaatcttttttctgtatttgaacaaagcgctctgagccaattaatagtataaatatgatttcaaggatagctaagagaatatttctttctatgtatggttaatccacatgcccccttacacactcc

SEQ ID NO: 703027 - DNA, 242 bp, Homo sapiens
tgaatcatctaggactacagcgtgtgcaccaccatacccagtgtatttttaacttactgttccacagcccccggccatattacctacatagtctatacatactccaagtagtactgtctgcctcctgctctttctctttaaaacattttagattcttatggccgtgagaggtggatcatgccttttacctcagcactttgtgatgctgaggcacgttgatcacttcaagtcaggaagctgtt

SEQ ID NO: 703028 - DNA, 402 bp, Homo sapiens
gtgtagccctaggtgaagctaccaccgtaggattcccattcctaggccattctggaaaaggccaaaccacagggactgagaagcagtctgggtggccaggggctgacggatcggggagaggctgggtgcataggggccaccctggagacttggaggatgaaggagtcgccccaggaggggctggagcggtggccgggagactctgcacatcggtttggaaccgtggaggaactgtacacccacagactgaactggcgtgtgtgcaaactgaaaaaaaaaatcattcagagtgaaaaggatcaggcaagtcactgtacaactgggctattggcatgtcacagatgtggattttactgaaacatttcttcaagagtctcaggccctgaagagctcactgcttat

SEQ ID NO: 703029 - DNA, 274 bp, Homo sapiens
gggctgctggtcctgctggtcctgctggtcctcgggaaagccctggtgaccgtggtgaggtcggtcctgctggccccaatggatttactggtcctgctggtactgctggtcaacctggtgctaaaaggagaaagaggagccaaaggccctaagggtgaatacggtgttgttggtcccacaggccccgttggatctgctggcccagctggtcccaaatggtcccccccggtccctgcttggaagttcgtggtcatggaggcccccctggtataga

SEQ ID NO: 703030 - DNA, 590 bp, Homo sapiens
cgcgttcacacaactgggacccatatctaggagcacacaggtgtaacccatattccgttgaagggaaactgccagatatttgagcctgtgttggaagagatggtgaagggcctgagcgttctgttgttggtcttactgctgggtctgggtctgaccccaacgaccctgggtcaagataactgcaggtacacacacttcctgacccagcactatgatgccaaaccacagggcccagatgacagatactgcgaaagcatcatgaggagacagggcctgagcttaccctgctaagacatgaacacatttattcatggcatcaagcgcatgattaaggccatatgtgcatgaatgtgaacccttacagagataacctaagaataagccagtgtctttttcaggtgaccacttgcaagctacatggagggtacccctgggctccatgccagtaccgagcgcacatgagggttcagcgtcgttgtggcttgtgagggcccctgagcagagctgtctctgctgtgcttgcctatcatttacgctctgcacccagaacagaggtggcgcacatattgtcgggcccacagagagagctt

SEQ ID NO: 703031 - DNA, 340 bp, Homo sapiens
gcattataatatgtggtacgatatgcagtatgatatgcactatgatatatggtatgatatgcggggtgacatgcaatacgatatgtggtaccatatgcagtaggatatgcactatgatatatggtatgatatgcggtgtgacatgcagtacaatatgtggtacaatactgatatgatgctggcaacagcagcagtcacacctctcaagtagcctcgtgaccaataggctgaacaaccaatactctacagcgtgctgcacgtcataaattatatgagatattaaacaccttattacaaaaataggttttgtgtcaaatgattatgccaactgtaggataac

SEQ ID NO: 703032 - DNA, 155 bp, Homo sapiens
ctatacggagatagcgaaggctttgaaattcttctcttcctcagtgatgactctgagctttctccttcttatgtacgtttcggacgggcatgaccggtccggtcagctgggtggccagtttcatgttcttcagcagaactgtctcccttcttggg

SEQ ID NO: 703033 - DNA, 137 bp, Homo sapiens
tctagcaccacagtggctgatgacacttaaataatacacaaagctcagtccatgccaattaatgcagcaacaatttccataagattcaagtcaacaacactgttgagcaagtttcaatcaccggaggcagcaacagg

SEQ ID NO: 703034 - DNA, 335 bp, Homo sapiens
cggaagattggacctctcggagattggccctctaatgtctccaagattttctttgtagcttctgatgctcattatttagagttttttgatggtgatttcttgatctgtaaaagcctcatagatttttttttaaaacaggattagaaaaattgtggggaaaagagacaggatcagagaatttccattccatcctatgatggtgtctaaatgatgtgatgagtaaaacatgcaggaccaaccatgtacgtaacttcactgaagcagtgacaatagcaccagtgaaaatcaaagtgacgcatgtttgcattggaaatggtttctgggcaacaatgact

SEQ ID NO: 703035 - DNA, 822 bp, Homo sapiens
  misc_feature (17)..(17): n is a, c, g, or t
  misc_feature (125)..(125): n is a, c, g, or t
  misc_feature (202)..(202): n is a, c, g, or t
  misc_feature (221)..(221): n is a, c, g, or t
  misc_feature (233)..(233): n is a, c, g, or t
  misc_feature (253)..(253): n is a, c, g, or t
  misc_feature (259)..(259): n is a, c, g, or t
  misc_feature (277)..(277): n is a, c, g, or t
  misc_feature (287)..(287): n is a, c, g, or t
  misc_feature (297)..(298): n is a, c, g, or t
  misc_feature (315)..(315): n is a, c, g, or t
  misc_feature (344)..(344): n is a, c, g, or t
  misc_feature (361)..(361): n is a, c, g, or t
  misc_feature (379)..(380): n is a, c, g, or t
  misc_feature (388)..(389): n is a, c, g, or t
  misc_feature (396)..(396): n is a, c, g, or t
  misc_feature (405)..(405): n is a, c, g, or t
  misc_feature (410)..(410): n is a, c, g, or t
  misc_feature (413)..(413): n is a, c, g, or t
  misc_feature (431)..(431): n is a, c, g, or t
  misc_feature (449)..(449): n is a, c, g, or t
  misc_feature (459)..(459): n is a, c, g, or t
  misc_feature (466)..(466): n is a, c, g, or t
  misc_feature (495)..(497): n is a, c, g, or t
  misc_feature (518)..(518): n is a, c, g, or t
  misc_feature (629)..(629): n is a, c, g, or t
  misc_feature (633)..(633): n is a, c, g, or t
  misc_feature (746)..(746): n is a, c, g, or t
  misc_feature (756)..(756): n is a, c, g, or t
tttttataaatgctatnaaattgtttcctgtcaacattttcttatactgaaaacacaacacaatttataataccttgaaaaatatattcaattcacatcaattcttgaatctctcactggcaggnatgtttgtccctcaactaagattccggaacactgctgaagataccattattttacacagttcaccactacttctaanatagtaatgattggctaanacgggtcaatcncacagacgaatgtgcttgangttgtnggggtttgctcattttangccatctggnggctgagtgnnatgccattttgcttttncctcctatatagttgattttgcttaagtnacacgccaatgtatgcntacctgggccctgggaanncatctttnntttgtcntcattaagnctatnganccaatgaatgttcttgtntgtcaaacacagccatgngatattcacngctttcncacttgttgacatcggttcataatataannncatttaagctcgagggttgcntttgagttacttttctgaggcattagacagttcgaagtcattttgggtacattttatcatgtcctcaaataaggcaggcatattaattgttgcacacactttaaaaaaggntganaactattaaatttatgttctcatctattagaaacaatctttactaggtaattaaacttttcaagtaattaaaatataatgtgaaattttaagattttaatctaaaagtcagcnaaaccttaanatctcctgtatttcacagtgttggccacatcttagctggattaaaataattgttcaaactgtaggg

SEQ ID NO: 703036 - DNA, 260 bp, Homo sapiens
agcttccccccccccccaggccctttcctcaggcaaggtttggcctcaggtgggccccaggcgggaaaaacagcccttggccaaaagtcaagcccacccccgtggagcctaaagtgagggcctgaggtttggctgcttgcccccctgctggggcccccaacttttccatcctttttgcctctcaacatcccttgaatcctagggcctgggttttcatgttttttaaccagacccctaaagcatatgtgttggcttgttta

SEQ ID NO: 703037 - DNA, 239 bp, Homo sapiens
  misc_feature (44)..(44): n is a, c, g, or t
  misc_feature (46)..(46): n is a, c, g, or t
tagctctatcccataacctaccccgtccccccaacacacccaanancctagtgtgttactacacagcaccatcgctacatgaaacctggagaataacaaggcgcgttcaacggaaaagtttttggaacaccaaccatgactggaggcaaagttgtgaatcaagattcaacatacgctgagaactctccccttcttccctctctcatcccttccccttcccttccttcccatttacccat

SEQ ID NO: 703038 - DNA, 454 bp, Homo sapiens
tgacggggaatatatgaggctcttcgatgcagagaacggaggtagtgtttgcagagcatcagtctactcagataagttttctttctgaacttaggactcttttagcacttgggtgttctgtgggtcatgcggagagagtttagtgaaagcggtatttatttctaggcaatgtgcaatcggtttagacgccttcatatttgtaactctagccttagcactttctacacaggccctagtgtgtgttgtctttcaatctgtctctcatctgtggtcgggcttttgcagggctggcggtacaaggcgcgcccttggagaagggtgtcagcacagagactgctgccttatgctcttggctgaacgaaggcttggtgtagatggcgtttcccgctacattctcaggcccctgctgtgtgtgaggctgttccagctcccttggggctggactcccgagcct

SEQ ID NO: 703039 - DNA, 815 bp, Homo sapiens
cgccgtggtgcatgcctgtaatcccagcactttgcggggccgaggcaggaggatcacctgaggtcaggagttcaaggccctgcctgaccaacatggtgatactccatctctcctaaaaatagaaatatgagccaggtatgccggcaggcccctgtaatctcagctactcgggaggctgaggcaggagcaatgtgcttgactccaggaggcagaggttgaagtaagccaagatcatgccattgcactccagcctggccaacaagatgtgggagactccatctcaaaaaacaaaaatagccaggtgtggcctgggcacggggctcatgcctgacctccctagcactttggaggccacggtggtagatcacgaggccaggagtcgagaccagcctggccaaagagaaccccccatctctatcaaattacaaaaatcttcattgggcaggtaaccagatgcttgttaatcccagctatcagaaaggctgaggccaggaaaaatcacctttggaacccaaaaaggcggaggctgcagtgagccaagaatcgcaacacgtgcactccagcctggggcgaccaagaacgcgagagctcacgtcttggacacctacactactacctactacgtacttctacaggctgtgagttaggccagcagctatttcatttctccctgaccagtgctaagtggtatacgccttcctcacccataaaaggtacccaggccaggcattgaaggtcagctataatctagcattcagacccgaaggggtgaccacgaggccggacgagatcaccggcattgggaacccttctaa

SEQ ID NO: 703040 - DNA, 210 bp, Homo sapiens
  misc_feature (32)..(33): n is a, c, g, or t
ggggggaaaaaaaaacccaaaaacccaaaaannggggccccaaaaaggcggggggggcctgagcctgggaacaaagcttgttgggggggggggggggccccccccgggttttcccccccgggggggggcccccccctgggggtttcccccccccggcccccccgggggaaaaaagaggggccctttttaaccgaaagggttttccgaaga

SEQ ID NO: 703041 - DNA, 136 bp, Homo sapiens
cctagagtgccttctgatctgggtcaggcgccaaggtccccagcatatgcggaagctgagctcgcagagttaggacagatcatttggcacccggcgatcccttcccaggcccgcagcccagaatcccacgtttgcg

SEQ ID NO: 703042 - DNA, 251 bp, Homo sapiens
acacgcgtcggaactggtcacaggcgccccagcgcaggcaatgcaggcctcactgttgcttgtgccccagtggggtctgtggaccctgccaccacggcaggctagagagggagccacctgcccttcccacgtagggagtggggtgcgcccagaactgggggctgcttatttccctcttctacaatcagggcggcgagatctgagacttcctccagaaaacctttggttggtggggtgcttcagaaaaaaag

SEQ ID NO: 703043 - DNA, 272 bp, Homo sapiens
tcccaattttgtgcaaaaccggtggggggtgccctgaggcccagattcaaacccaattttgggaagacttttggcccccccgttaaaattttgaaagtaaaaaagggatattttccccccgctaaagcttgaaatggtccctttcccaggggaaaatggggggggccctgttttggccgatttaaaagggtttccttccctggggaaaaaaaaaaccccgttttgttcctaaattgcccagggccataaatttaaataggggtccctgttta

SEQ ID NO: 703044 - DNA, 647 bp, Homo sapiens
gcttctatgtgtgctatgatccatctttagtacatttttgttgtaatatgaggtaatggtaaatgttcatttttttgtttttgtagtgaaatgaattattcacttcttctagcaccagtttcttgaaaagacgggtcatttctccagtggaatgggcaactttatcagaagtcagttcactctatatttcatagtcatattataattctagggatcgtgtaatatttatccttaggccaatactataatggttattactggtgatagctttatgatcaggtagtgtaagccctccaagtctggtactttttcaaaattctttgggctatattggatcctttcatatccctatgcatttttaaattggcttgtcaaatttctaaaaaaagacctgggatttggatggagagtatattgaatctataaagtaactgggggaggttggacattttaacaactattaagtttggcaattcattgaacatggtatattggtcattttaattaaggtcttaaatttctctcacaagtggtgaaaccagttataaaattaaaagaataggttatatttacatgtgatagaagaatacttattgggagtggaatgattatattaccagtgaatatatgttactagggaacatctg

SEQ ID NO: 703045 - DNA, 298 bp, Homo sapiens
atccttactggaggtgaagtgcctgccgccttgttagtttggtcagtctgtgggctctgtggtatatgcctgcttcgaggctgccctagggagtgaggtacgaatctggtcccaccgctttcctgggagaatgtcactgtggacgtgaacagctcggagaagctgcagctgcaggagtgcttgtgagctgactccctggggcctctcaaagacgatgtgctactgtcggagacacgaggcccccaggacaacagatccctctgtgtctttggaacccagtggctgtacttcactaccc

SEQ ID NO: 703046 - DNA, 250 bp, Homo sapiens
  misc_feature (73)..(73): n is a, c, g, or t
  misc_feature (97)..(97): n is a, c, g, or t
  misc_feature (102)..(102): n is a, c, g, or t
  misc_feature (141)..(141): n is a, c, g, or t
  misc_feature (156)..(156): n is a, c, g, or t
  misc_feature (191)..(191): n is a, c, g, or t
  misc_feature (205)..(205): n is a, c, g, or t
  misc_feature (235)..(236): n is a, c, g, or t
aagcgcgatctctcctacaatttctaactgtaactcctttgtttgttaattatttcacgattctctgctgcgnttcataacctggctgaaatcttanaccantgccttatattcacctgcaaatgcactgttggaagaggntatccgacataacgnccataaccggagttcctgcagcccgggggctccantagttctagagcgnccaacaccgaggtggtgctccaagcttttnntccctatagtgagg

SEQ ID NO: 703047 - DNA, 535 bp, Homo sapiens
ccccacttcgaaagtataatgatttaagactacatgttttaaaaaaccttcatcctactgatttcaaaaagcgtttccccttcaataagaccaccaccaaggccgggtgctgtggctcaggtctgtaatcccagcacttcaggaggccaaggtgggtggatcacccgaggtcaggagttcaagaccagccaggccaaaatggtaaaaccccgacttcatgaaaaatacaaaaaattagccaggcgtggtggtgggcacccgcaatcccagccacctgggaagctgagacaggataatcccctgaacccaggaggtggaggttgcagtgagccgagatcgcgtcattgtactccagcctgggcaacaagagtgacactcccatctcagaaacaaaacaaaacaaacaaacaaaaaaaacaaacaaaaaaaactcttttggacgaatgagattattcgtaattgtgggggtctgcattcaagcattataaagtaacaaatggatgtggaatacattgggcttttcaagtcctacaga

SEQ ID NO: 703048 - DNA, 179 bp, Homo sapiens
tcgtgaaatcaccacgtagtcgttttttacaagcgatcaaagcctcgcagtctaatgtcagctcgagaaacgctctagccgtagccacacccccacgggaaacagcagtgattaacctttagacaataaacgacaagtttaactagaactatactaagccccagggattggtcaagttt

SEQ ID NO: 703049 - DNA, 964 bp, Homo sapiens
gctccaccttactaccagacaatcttagccaaggcattgacccaagtaaagtataggcgatagaagttgatagatcctggcgcatagagatatagtaccgcgagggaaagatgaagagagagttagtaaccgagagcactgagtaatagcacatggacataaaccgcctgatagcctctcgtgcgataatgaagttacctagacaataactattgcaaggagagccaaagcttaagacccccggaaaccgaggacagagcataccgtaatgaactagcataacaaggagtcaccactccggtgctagtgatacgcagaaagtagctgcggacagcattgtataggcgctacgaagcggtaggagagctctgacgcgatggcgctggggtgatatggtggttgtccaacgagtaggaatcttcagttcaacgtttaaatttgcccagagaaccctctaaagtccccttgtaacatgtgtaatctgtctaggtccaatggaggaacagctctttggacagctaggaaaaataccttgtagagagagtaaaaaactgtaagcatgccagtagtgaggcctaaagagcagccgagcaatgaagaaagcgttcaagctcaacatgcgcaggtacgctaaaaaatccctaaatcatatgactgaactcctcagaccaatggagcaatctatcaccctatagaagaactaaggtgtagtatagcgtaacatgacaaagattctcctccggataaggctgcgtcggattacaacactgaactgacaattaacaggccaagatctacatcagcaagaagtcatgattacctcactggtcaaccagacaggcatgttcataggaacggtgaacaagtacaggactcggaaacttaccggctgttaccacagaataccttagattcaaggtaaaggcgcggccgtgccaggtaaaggcgggactacgtgaagggc

SEQ ID NO: 703050 - DNA, 105 bp, Homo sapiens
  misc_feature (26)..(26): n is a, c, g, or t
  misc_feature (70)..(70): n is a, c, g, or t
  misc_feature (92)..(92): n is a, c, g, or t
ggacacgatgttttttatttattgtnagtaaggatggcgaccggccgatgtgtgtgctttgcctgttatnccgaaagcaagctttgagagcnacctacctataga

SEQ ID NO: 703051 - DNA, 884 bp, Homo sapiens
gcatggtccgtcgcgccgcttgtgagctgaatgtgccgccgccgccgggcagccacggggaatccgcccgcatctgccgccctcgccggctcgggcggccgtggggcccagatgcgccggaggccagggctggtggcggcaccgcgcagcggcacggggtcccgtatatgatgcatgcgcccggcggtctatgccgatgagcccggagcggccggaggagcagaggggccggcgggagggatggaaacctttctgcgagtacgagccaaccggcagacccgactgaatgctcggatagggaaaagtgaaacggaggaagcaagatgaatgggcacgagggaaggctcctgtcatgagctgaggagtgactgctgatggaacatcgagcagtgagaagcaagcaaggcgacatttgaggagtatgagatggatgtgagagagaagacggaatactaggacagactagttcgtccttctgaatggtggcataaccggaaggcgtctggcgtttcatcaatgtacaggcaggcaacaagagaaacccggaacagatgatgcatgacatatgggagtgatggaatggagagtgaacactactgagaaaataggcgacacagcccacacagcaacagacgaatgaatgctgctaaaaataaccaacatgacaacaaaggcacgcaaggaaagaacaaacagagaaaagcaccacaagggagacagcagcagacgcacaagaacacgaggacgacaacgaaacgtaaaaacggtagacgaacacacacaccaagagaaagaagaccaacaacaacaacaagagttgacagcaaacaactcaggcacaaggacgcagagactacaccaaacaacataagaaaatgccggaa

SEQ ID NO: 703052 - DNA, 174 bp, Homo sapiens
cctcgtcccgctcggcgacatggcggggaacgacgccacgctggagctcggcgacggatacgtcacgagcatgcgaacgctgtccaccgaggcgatggatgagggctcgctctacacctgctcgctcactctccgatcgctctacgctaacgatcctcgctcgatcgagctcca

SEQ ID NO: 703053 - DNA, 83 bp, Homo sapiens
atggaacgatttcaaaggcaggctgccctgaccaaaaatatctgccatgaataaaggtgcctgaaatcctgcaaaaaaaaaaa

SEQ ID NO: 703054 - DNA, 196 bp, Homo sapiens
ctctataggatccccagaatcatggatgctctacgcctcctatgttaaccgtgtccatgtctttactactttgatccgcgcatgatgtggttttgacgaacttgccatatactttcttcaccaatctcttgaagacgatggaacatgctgagaaactgacgaatgctgcagaactcaaacgagtaggctaatcttc

SEQ ID NO: 703055 - DNA, 217 bp, Homo sapiens
cggatcccttaggcgagactgtggcgtgggctgacgggtataagcatggtcctgaaagagctgcttaccagtgccggcgctggtcagtgtgcgccgcaggaggagtatggcaccttgtcatactctagctccccaagcacgtctcggcttctgtacggtcaaaggtgaagatgtccccctcgcacttggcactcttgggggtgttgagctccgagct

SEQ ID NO: 703056 - DNA, 542 bp, Homo sapiens
  misc_feature (464)..(464): n is a, c, g, or t
ttttttttgggtaaacctttttactttttggttaagggctttcattatttggaatagaatggggattttggcacaatagcatttttggggaccggttccttctttaccaggaataaactttggatggcccatttaaagataaagctcaaaatgccaatccttcccctgggagggggaaagccttaaccaatgggagggggaaaagccttaaccaagcatttacccagggctttacctattcaaaaatttaaactaatggctgggttattgacttgattttaagacatgggagttaataaaaaaagtctaagattgaaacaattttgcaaaaatatacatttggatatggggatatatggatggggatatatatatctactaggaaaatttatcgcttaagggtgttgtgccatttcttagtaccaattttacattctgcatcacagcattttgcatcccatctntacactaaggccaccatattactttaaattactttatacacattttcagccattatctgaataatcatttatagcccc

SEQ ID NO: 703057 - DNA, 263 bp, Homo sapiens
  misc_feature (41)..(41): n is a, c, g, or t
  misc_feature (128)..(128): n is a, c, g, or t
attattttatttatttgcttcagagatggtgtcactcttgntgccccagctggaatgcagtgtagtcctgaactccttggctcaggaaatccctcccgcctcagcctcctgagtagctgagactacangccatgtaccacgatgcccagctaatttatttctttattcatgtatttatgtatttatttatttatttattttttgagatggagcctgggcaacagagcaagactctgtctccaaaaaataaaataaaataaaat

SEQ ID NO: 703058 - DNA, 904 bp, Homo sapiens
ggggctgcaggagaatgatggcggtctccacaggagttaaagttcctcgtaattttcagcttgttggaaggaacctatgaatcgaatggtacataacaatggatgataggctgacggtacagttagctggggccttgaagattgatgaagatatgacacttacaaggtggacaggcattgattattgggctcagctcgaaggacagaacttatgaagatactagagatagtatagcctgaaagtagaatgtggacctaaatacccagaagctcctccgtcagtttagatttgtacatcacagataattaatatgaacggtaatacacataagttccagtgggatggtggatgcccggatgctataccagtgttgagcaagaatggcacaaattcatatagcattaggagttgtacttcaagagctaagacgtctaatgatgtccaaagaacatatgaagcttccacagccaccagaaggactaaatacaagtaattaatttctagtggatctcaaacttgtcttaaatcaacaaccttctactcatgtgaatgtcttgattaaatatcactagagtgcagaaatacgacattaagtccacaagaattccagctggtaaacatgacctggacatttgtaagaatatatctaatatattgtacacccatttatgttttcacgggtaacaggaggaaaaatgcagcacaattttttttgctcttgaaaggcactgtcattaaacataacctggagtactcgaaatagaattcaggttaccagatggaagcgtgtggagaagtgtcagatggaatggaagctgtgtgttcctaaacagtaaaatctcaagaaacagaatgggatggtttaccatcttatagtgaagagacctgattgaattgtttaag

SEQ ID NO: 703059 - DNA, 1229 bp, Homo sapiens
actgcgcgcgccatcgcgagacctgactgggtgctagtggcgaggcctcgggaccgcgggcagccgcgaagcccgactgcaccggccctcggctcgaggagccagatggacgccgatgggctgaggagaggcctgaggaaaaggtagccacccacccgcgggattgaggcggacgggccgccgcgggcctctgacgaccgctgaataggtcgcagcactgagcacagggcagggaggacagacatatagggcgggagccattcgagacgcaacagcgaccgcggacagcaaggtcgatgaggaggacgaggggtaagacggaaacgataaactacgagcacatggggattcgaagggcagcaaatcatcccccaaaaggagataccgggaccatgagagtgagaagacggcagggtcatgacataggggaaaacccatgaacccaagagaagagagaggaagatgatcataccatcaccatgagacgcggaaaccacacgggaaaacacgcagggaaaacccagaaaaagaggcagccgaggcacaatggatgggaaagagacgtaccgtggacggtggcgatataaccaacagagaagcacccggaatggaacagcgatacaacggacaccccacgaaaacgagcgacacagacacataaatgggaaaagcggaggcacacagcattaaaaaggtacaaggaggcggaacacacgcaaaagaaagcagatcacgaccaaaacgcgaaaaggaaccaacaataacaaggaggcaagctcaccaaaccgggacacccgagcagacaccctgagcacaagaaagaaaacacggaacaaccgggacccaccccgaacatgaaaaccacgtacgacaaaacaaggagagcccgaaagagcatgcaacagacgcaggaaccaaagaccagtacgccccacaaggagtgacgaccaggagagcagagtacggaaaacacacaaccatcaggaaccagggaagaaggcgcatggcatcacggaaaaccgcagaacggacaaacccaggacagccacccacgaaaaacgaaccaacccaaaagaaccacaagaaaccagcgacaacacacagaaccaacacagacacgaaaactaaccgcaagacaccaccagagcaccaatcaagaccacaaagacaacacacaacaaaaaacaccaaacaaagagaaacaaacacagaaaagaaaaagaacaaaa

SEQ ID NO: 703060 - DNA, 188 bp, Homo sapiens
gcgaactgggaggcccctgctgtctggagcccatcgtgataggcccgatgagcctgctttccctacctgcagcttgttctctgtggaattccctacttatgctcctcgcgctttcttcataacaccagtttgggatctccacgtgtagtgcccatcattactaggtacactagccaatactgcccaaa

SEQ ID NO: 703061 - DNA, 548 bp, Homo sapiens
tgaaacctatgagctccactgacctgccggtgcccgatgcgcgcgccgaaaccgctgcccgggcgcgccaactgcaactgacgaagccacccgggtcgctgggccgcctcgaagagctggcgtgttggttcgccgcccgcagcggcaatcccattcctgagatttcgcgcacggaagtcttcgtgtttgcggccgaccatggcgtcgcggcacagggcgtatccgctttcccaccttcagtgaccggccagatggtcgccaacttcgccgccggcggcgccgccatcaatgtgctcgcccgcctcgagagctgccccatgcaggtggtcgatgtcggtgtcgccggcgatgccgagccaccgcccgccgtgcgccgggaaaaagttcgggccggcacgcgggatctcctcgtcgaagccgccatgaccgaagacgagttgactgcagcactcggtgtcggagcgcgttgtgctcgcgaagccattcaacgcggtgcccaactgctcatcgccggagacatgggaatcgccaataccaccgcggccgca

SEQ ID NO: 703062 - DNA, 516 bp, Homo sapiens
  misc_feature (12)..(12): n is a, c, g, or t
  misc_feature (193)..(193): n is a, c, g, or t
  misc_feature (245)..(245): n is a, c, g, or t
cataacctgtgntaccaggtttcctgattcgagctctagtgatacccccagctagttcggtaacaatatattctcttctaatgtattcatcctattaaaggtattataggaacactttttaaatatcttccacattatagtagagcagtaaagacataggggagagggaaaacttggactcactgtggcctantagacttccctatctttataccctctggaaggcagtcattctagagtaccgnccatgcttgttgcaaagacaaagtccgtttatccctcaaatctttctgtggtggttatagtaaagattgtggcagtagggttggtaaggtaggttggccaggtgtctcctgggtcccacagagaattacaacacaggaaaggaaaacatagtatgccaagagacatttgatgatcttctgctttcatccttcccagcaatttattgcattcttctctttaaggaaatgggaaactatacttaagcaaatgcattctttttctatggatcat

SEQ ID NO: 703063 - DNA, 431 bp, Homo sapiens
ggggggcacttgtaatcccagatactcaggaggctgagacaggagaatcacttgaaccggggaggcggaggttgcagtgagccgagatcacgccattgcactccagcctgggcaacatagagaaaccctgtctctactaaaaatacaaagaacttagctgggcgtggtggtgcaggcctgctaatctgagctacgcgggaggctgacggcacggacacatgcttgaacctgggaggcacgaggtgcaactgactcgatgccagttgcacctccagcctgggcaaccagagccaaacacctgaagtctcaagaacagaacgaaacacgaaacaccaagaactaaaaccagaagcacgcccgcgaacacaaaaagaactgaaaaaccccggggacatctaaggcgggggtggggcaaaaacacaggaggacag

SEQ ID NO: 703064 - DNA, 396 bp, Homo sapiens
  misc_feature (44)..(44): n is a, c, g, or t
  misc_feature (56)..(56): n is a, c, g, or t
  misc_feature (63)..(63): n is a, c, g, or t
  misc_feature (137)..(137): n is a, c, g, or t
  misc_feature (183)..(183): n is a, c, g, or t
  misc_feature (264)..(264): n is a, c, g, or t
  misc_feature (328)..(328): n is a, c, g, or t
  misc_feature (342)..(342): n is a, c, g, or t
  misc_feature (350)..(350): n is a, c, g, or t
cagcagtctggttgccaaggtccaaagaccttaaaaaacctggngctagaaagcantagactngaggcttctacagactgtaggattcaagggcaggcactcgggaagggaagatggatgtaaagtgtgggagaccnaggacacagtggagcccacgagcacgagctggaacccacgaggatngcctggaacccatgtcagtctctcaccacctccagcttcgatgatgtgggtgtcctgcagaagaagctggtgcccttcctnacagagttaaatatgcatcttggcccaggaattagagaagctgaaaggatggatcctggggganggtggagcagcttncaggcctnggctgcaggcctgaacttacttggtccacaccaacgaggtgatttt

SEQ ID NO: 703065 - DNA, 971 bp, Homo sapiens
gactcgattgggagggggacccgggatggtccccaatttgccctacgcgccctcccccagcaggtttgcccgatgttatataatccaagcgggcaccgaaaggtttccgcactggggagtcggaccccctggcccacccgccaattaagtggtgttagcgtctactctttgggcccccccccgggcttttcacatttctaggctccgcgcccctgttgtgtggtgacaattgtgcccgggaacacatttccacccccggacaccgccatgaccgggattacggatttttattacatctcccaatgggaagtgggcccgtcggccgccgcagtgcgccagggggccaatctgccaggctaaagggcttggcctggattcccagacggagagctcagatgggaccacagcgggcgatttgccctgtgcctgcccttcttagcatgcaggataccccagagactcgcccgtcagggaatactagggactctcctctagcgccatatagttccgtgggattagctctgtggccaagcaggctgagctcgggtcccacctttcacctccatttcgtttgttagaggataagggacataaacgtacttgccatctttcagaagattaagtaggaggcgaggggtttcctgctctccagggccacaagggacaaatagggactttgtttaggccaaggaaggagcggaagtagggcaactcggtcctgcgattattaatcccactccccacttgttctagggcacccaaacactattttacgtctctaaaatcataaaacggcagaacagattcggttggtttggaagaaaagaaagctctataaatctaaatcgctattcctgtatgttgatttgatactttggaaataccaagttcatttgacttgtatttttgtgtaatatgtaatgatcgtattaaaaccaataaataaagccctggagtttaatgagaaaaaa

SEQ ID NO: 703066 - DNA, 812 bp, Homo sapiens
  misc_feature (812)..(812): n is a, c, g, or t
tttcttaaacttgaggtgggcagggagagggaggaaagcacattcgggaacgagttctcaaattaatgctcataactgttgtcttagtgacgtagaatccactttcccaaatggcggaggccttgtgcttccgcgtggaggaatagatggacaagcagaggtagtgagcagccgagctgctatgaatgctcatgtgtggcacatcacactcgtctagttccagaggtatgctcaatttatctaattcttttctctatatcgacgatggccaattcttggcacatcgagggaattgatcactgatcgaccgttagtacagttcatctgatcaaagttgcattagtttacaactcattcttaaaaggtacacccaggtagttcactctagggtgatagccttgcttcactacttgatgggggcgacagcgtatagatatgcgaattatgtagagtgcctgtcataaaacattaatacccgattggtaaggttaatcacaagttcccttgtttcccaccaaaattaaatttcttcttcacgagtaatggtcagtgcgagtaagaccgtttgccatctaaagggcgtgcgatagacagcctattagaattgcagattagcgcattgacacgatagagggacctatgatagtggcctaagaaaaaacctggggaaccaaaggaagaaggggcacccaccaatgcagggtggtgggttctcccttttgataccaattttcattctctccgttcccttcatttttaagccgttccccaatatgtcccttgaatcccgcccattttattcaaaaggcttn

SEQ ID NO: 703067 - DNA, 413 bp, Homo sapiens
cacagattgaacctccagccgtactctctggaacaagaaagatgactggggaggaaacacaggtcagcatgggaacaggcgtcacagtggacacaagggtgggctgtctctccacctcctcacattatgctaacagggacgcagacacattcaggtgcttttgcagaaagagatgccagaggctcttgaagtcacaaaggggaggagtgaagaaatcctgcatctcagtccctcacaagacagctgtctcaggcttttcgagctgtgagagacacatcagagccctgggcactgtcgctggacgcagcctgagagtagctccctccttttccacctgagctcttcctcctacacatcacagtagcgaccacagctccgatgaccacaactgctaggacagccaggccagcaac

SEQ ID NO: 703068 - DNA, 112 bp, Homo sapiens
cgagagaagtcttcgctttacgatttttggaccgcttgggcttcatggacgtctggggcaaggggaccacggtcatcgtctcctcagcctccaccaaggggggtaccgagct

SEQ ID NO: 703069 - DNA, 537 bp, Homo sapiens
agttcgacggagactctccacaaccgatccatcaggatgtggagagatctggacaaatggcaaataatttggggttgaataattggtaatacaatgaaacaatggagagaatagtgtatgtacaatgactctggaaagatgtagtatacttctaatatggtatgtcttcaaggaagcatactaaggattgacttgcggacagggatatgagacataaatgtcactgaccgtgtgacttacttctcttagcaagtctatgcaatacttagagactattagaaggagcctagcacagggacagtctgtgggggtatgggggtgggataagctctatggtccataagagagtaaagaggtcatgcaccggggctggctgccgggcacagagagtctccgtcgaagctgcacaactacagctcggccgtgagtagatggtcagcaaatgtaacaacctaggctggatgagtgacccgaaggcgtgaccgagtgcatccaggatcgatctggcaagccaccaggggtcagacctcgtgcgct

SEQ ID NO: 703070 - DNA, 264 bp, Homo sapiens
caaagaggtccaaatatccacttgcagactttacaaatagagtgtttccgaactgctctatgaaaagaaaggttaaactctgtgagttgaaggcacacatcacaaactggtttctacgaatgactctgtgtacttttaatatgaagatatttccatgtctaagattggcgtcaaatcgtttgaaatctccacttgcaaattccacaaaaagtgtttttcaaaactgctctgaataaaggaaggttccactctgtgagttgaata

SEQ ID NO: 703071 - DNA, 297 bp, Homo sapiens
tcacaatgcaaaccttactcctatgccacacacccagacactctgtagcacatggcctggaagctcctgaggaccgctgcagtgatagcacacaggactattgcatcagcatcgtgcctcacagggaataagagctcagccaggagaggtcccaagaatgacagaaccatgagcactcctaccaaaactcagctctgcacagcacaaatcaaccattcacccacaacaggccaactcctaacacatcccatccagacagcacataagagtgcgcccagcagattgcacctactactt

SEQ ID NO: 703072 - DNA, 409 bp, Homo sapiens
  misc_feature (267)..(267): n is a, c, g, or t
  misc_feature (289)..(289): n is a, c, g, or t
gctcagctagatccgagttattgtctcatgaccaggaaaaattaggcacgggaacatcaaagagtgagtggaatagaatttattaagcgaaaaggaatgatctcagcaaaaagagcggtcctgaaagcaggttgctggttgtcttccttcatagttgaacacaagggcttctatatccgctgatggggctgggttccctatttgcatagggcatcaattcttggttggctccaccccatctttccagtgcgcgtgcggcgtccttangtctgagccactccacattgantttatttccttactgcgcatgtgttaagggacggaatttttcattgcgggcatgtttgggcaagccttctgtgcacaatgagcttggcgagtcgggggttctccagggaccctcccctat

SEQ ID NO: 703073 - DNA, 101 bp, Homo sapiens
tagagtctcgccccttctctatgagattaaatcaaaacacttccctccatctcctcctgctcctgcgtggcgggggaatgtgtgctggctagggtggagga

SEQ ID NO: 703074 - DNA, 570 bp, Homo sapiens
cgtttacctggcacgaggaagtctggagcagggcttggtctcgccaatattccaggaaagcatgctgacactctcctaggtattcactcatgtctggtctccttcaaagacgctaaaaggccagaagggtagctggccccccaagtaccggggtcataaggacataaataaaagaactggccggcgtatgaaaaactaatagaaaattgcccaagaaataacactctctcatctctttgacatatagtaccttttccccacactggctagtatgaaagcaggattagaaaaaaaaaaaacaaaacagtaaaagaaagggcccaagagagcaaagatactttggaatagagttcagacagagaatagaaaaccacaatagtgccaaagggtttggtttaacaaagacgggtgcctaaggaccaccacagggatgcagcttcccgggtggggtggcaagggtgcctaagatgctctgaaaaagtgctatgactagagcttacaatgacgggtctagccaagacaatcaactcaatctccaggatcagtctctggaaggctgccggaggggag

SEQ ID NO: 703075 - DNA, 1040 bp, Homo sapiens
  misc_feature (444)..(444): n is a, c, g, or t
ccgcagtgctgtaggcagccatggtgcccagccggaatggcatggtcttgaagccccacttccacaaggactggcagatgtgctgcgtgtgcacgtgtgttcaacccattactggccctgtaatgatccatgcagactgtaatgtgccctgtgctaatgccaatggctgctgcctgacatctgacccctgacgcccctgacgtctggtgtcaccatcctggcccgatctgttgctgcttgcaccgagctgtgttcgtgtgtaccaacacagaaggtgttgctgctgcctgtgcactgctgtgctttccagcccattgtgatgtgatgcatcatgtggttgtgcctggccattccacaaggcaagggtaggacccagtgacacattctggacaattatcttgtgggatcgcagatgagcatggcggtgaaagccaatgttcccancggggatgatcacccgtgcaaggggaccaaaccagtgcaacgacggggctcgaacgggacagtaacccagggatacacaacgagcggtcgattccctcttttaccacacatgggaacggccccttcgggagcgccccacaaaggcgaacggggggcaggcacccacggttccttggccttggcaacgcaccactggcacccacgtggcgacccaacacccaagaccatcgaacccggggcacccgggtccacatggcccccggtccccgggggcacaccggatcacctcatcagacgccaacgggccagcacaaaggctccgacagatacgatccaacctagaagcggaagatgcacgacacaggcaactttatcccacgaagcgccccgtcatcgggccgtaagggaccttcccagggacaattggggcccccctggatgcgcccaaactggcacccggcgacgtccatcccaccggcacacttcaccgcgcggccacacaacagggacagccctacgtcggacccgccccgcgccaggcaacccaccgcgggactggtttcggccacccacgccaacagacaactcacaagccc

SEQ ID NO: 703076 - DNA, 379 bp, Homo sapiens
  misc_feature (12)..(12): n is a, c, g, or t
  misc_feature (62)..(62): n is a, c, g, or t
  misc_feature (80)..(80): n is a, c, g, or t
  misc_feature (95)..(95): n is a, c, g, or t
  misc_feature (105)..(105): n is a, c, g, or t
  misc_feature (119)..(119): n is a, c, g, or t
  misc_feature (197)..(197): n is a, c, g, or t
  misc_feature (221)..(221): n is a, c, g, or t
  misc_feature (229)..(229): n is a, c, g, or t
  misc_feature (233)..(233): n is a, c, g, or t
  misc_feature (239)..(239): n is a, c, g, or t
  misc_feature (245)..(245): n is a, c, g, or t
  misc_feature (248)..(248): n is a, c, g, or t
  misc_feature (257)..(257): n is a, c, g, or t
  misc_feature (290)..(290): n is a, c, g, or t
  misc_feature (293)..(293): n is a, c, g, or t
  misc_feature (295)..(295): n is a, c, g, or t
  misc_feature (298)..(299): n is a, c, g, or t
  misc_feature (304)..(304): n is a, c, g, or t
  misc_feature (306)..(307): n is a, c, g, or t
  misc_feature (309)..(309): n is a, c, g, or t
  misc_feature (360)..(360): n is a, c, g, or t
caggaaaaaagntagttggagttctgctgcatacttattcaagtactaaaattatgcagggnaatcgttcttgtattaanacttagataattaanaataattatnaatgccttttaacntgaacctctttaataatctgttttagatggcctaacttatagcatagtgggtttttttttaacttgttttattttganattattatcaattcccaggacgtnacccaganggtnccgccncgcccnggnttcccttcncccagttttccccaatggtgccatcttacatgnttntnctnnaatgncnnancccggcaattgcccttggtaccatgtgtgtatctcgttctgtgtcattttntcccttgtgtaggtttgta

SEQ ID NO: 703077 - DNA, 845 bp, Homo sapiens
ggtctggaggatggtggccctcttctcacagctccactaggtggcgctgcagtaaggactctatgtgggggctccgaacccacatttcccttctgcagtgccctagtggaggttctccatgagtgccctgcccctgcagcaaactcctgactggatatctaggcatttccatacaccttctgaaatctaggcagcagttcccaaacctcaatttttgacttctgtgcacccacaggctcaacacttaattggtgggaagctggttagggttgggggttggaaccttctgaagcaaaagcccacgtggtccctgggctccttttcagtcgtgcagcgtggagtggctaggactcaggcaccctaggctgctcacaacaggggtccctgggtccagcccaaaaaaacatcttttcttcctaggcctctggacgtttgataggagaagctgccaaagaagacctgtgacatgccctggagacattctccccattgtcttggggattcacattttgactccttgttacttaaacaaacttctgcagccagatcgaattttccttgagaaaatgggattttcttttctatgcatgtcaggctgcagattttccaaactttcatgctcgtgcttcccttattaaaactgaaggcctttaacagcacccaagtcatctctgtgaatgttgtgtgttgaaatttcttctatcagataccctaaatctcaagttcaaataccttatcagatacctaaatctctccaagttccaaaattccacaaattctctacagcaggggaaaatggcaccagtctctttggttaaaacataacaggagggtcccattgtgcc

SEQ ID NO: 703078 - DNA, 1134 bp, Homo sapiens
acaattctggtcccaagcacgttgcataaaaataagactaattagaggaaaaagtttttgttgaataagttttaagcattagaaaaaagccgacaaaagatactacaacgaaacaccagtagttacatcaatgggtcaccagtcgttcataatatgctacatggtcgtttatcatttagttctcctcttgtctgtctctttttctccctcccgtccctctacacacacacacacagcagcacagcacacacacacacatacacacacacacacagtcacactcactcatacagatgtatacacatattatttctctgaaccatgtggggtctatcaagtgtgtgagtgagcaagttacctgtgcctctccagtgcctgggactttctctctctctaaacactaagatacgtgaagagaactcttattgagacgcacttagtgagaactcaagaggactctatattacatattacaacccttagaaagttgtgtgtgagggtacacagtagaaaccctgcagataatatacttaagactataagttgtaagaaatatgggtggatcgtgactgtgatggtctccaagaacaatgggaacgagtagcccagtagccccacgtgactacgcaacgagtgagggacacactcagatacacatgacgcatcatagcgacaccatgtctgacaataataatcataagtaagagatatctaaaacatcggcgctgcatacatcacgaagtaggagtgagcacggttgagcaccaatactaccacaattagaaaacccacaatcttccaggagaaattaaaaccataggaaaagggaaagaggcaccggagacatccggactgacaaataacaaggcagcacaagcggagacataaaaacacacccaagtctggggcacccactgggacacaaacggacaatacaaaacagcaatcaacagtagtactccaaaagaacaaacagccaaaataaaggaaaagagcaacaagacatacaacttatgaaacatgacaaacagtagatcacggacaaaagtaccaaaacacggagaccctacagtgccaacagacaccccagcccggagcaaaaagcggacccagatttaggcaaacagagaaaaa

SEQ ID NO: 703079 - DNA, 222 bp, Homo sapiens
tcatccccttcctcatcactcttgtagtactggcggagtaaagacagtgaggcccagggctagggggccacgagcttctcgaacaagccatgttactccacttccccacccccaggagggctccctcctcccctgctacatcccttgtctcagctctcatccccaccacagattccctggatttgctgggaactggaagccaggcgagggtcgtggcacaat

SEQ ID NO: 703080 - DNA, 895 bp, Homo sapiens
ggaagaggagcggcggatgttcaactcggccgttgtcaccatgccggtcgtccggaatattttccgtcgccgtcggggtgattcggattcaaagtgaagataagggccaggagaacttgcgtctgaactccataggggtcggatggattgatgtgtgatgcctgagacttgctaccttttggtacatccatgccatgggctcacgagttgccataaaaaactctctgttcgtcaatagaaatatacctattggttgactgaatgagggaatacgtgggcctatctcagagtaccgttcactattactcggataaggcatgcactgcgtcacgtcgccggaacacaaagaagccctggatccttacctgtgcaatgttatcctgggggatttttgaggacggcctgataattccatatactttttggagattacgatgacatgtgttcaaccttgccagtcttggaggcgtgcaatacatgctgtgttacgtatgctgaaggcattcatgcagagagtactgcgctgtggttcactatagtcgattggcttcttaatatgagcactgggtcacaatagaacctgtatgcgttgtaatctgactttttcagagtctgccgctgtaccagttcatgctcagtatgcatcactgttcttctgcttccactgctttctggtatgcccggctcacatcctggatcttgcatgtgtcaagagacagccggggtggggatcgaaaaggatacaggtgtttcccgggactgtaccaaatgtccttgcgtcgttgtccttgtcactgaaatgctaactattgtggcgtggttacgtattgcattctcacatttccaatgtttccctgagtacaatacacaacattgcgggggctgcccaaaaaat

SEQ ID NO: 703081 - DNA, 214 bp, Homo sapiens
  misc_feature (114)..(114): n is a, c, g, or t
  misc_feature (120)..(120): n is a, c, g, or t
gaaatactgggaaaggtcctgtcctttcaggaataaggttttggggctgagaacataattcaaagcacaagttaacttttgtcaactccaattttgtattgttctccattgagnttttantttatagacagcagccctggtggatttaaccaatttgcctataattcaattatataaatatttttatgtgaaaataattgtataagagctcttg

SEQ ID NO: 703082 - DNA, 294 bp, Homo sapiens
cgaattttcatcaggcttccaagaatcaggccaactgaattgagtcaacttctgaagataaaacctgaagcagttactgggagctgctattttatatcatcactgctttttaagaaattcttgtttatggatctgatacaatctagatctctaatatttttaagcccaagccccttggccaccgcagctcttttcagtttttgctcataccccattcattctttgcagctaactaagccgaagaagcctggcaatcaagcctgaaacaaagattaataaagctctctgcctagt

SEQ ID NO: 703083 - DNA, 2490 bp, Homo sapiens
ggctccgtgacctcctcggcctcaggccctgcccaatctgttgccaagatgttcagggcagtggaggagggcctgacgtacaaattccatgcggcctggagctccgtgttgcagctgctgtgtgtcttcttcgaggcgtgtgggagacaggcccaccctgtgatgaggaagtgcctccagtccctgtgtgacctgcgcctctcccctcatttcccccacacggcggctcttgaccaggcagtgggggctgcggtgaccagtatgggacctgaggtggtgctgcaggctgtgcctttggaaattgatggctctgaggagactctggatttcccacggagctggctgctgcctgtcatccgagaccatgttcaggaaacgcgacttggttttttcaccacctacttcttgcccctggctaacaccctgaagagcaaagccatggacctggctcaggcaggcagcacagtggaatctaagatctacgacacactccagtggcagatgtggacactcctgcctgggttctgcacaaggcctacagatgtggccatctccttcaaagggctggcacggacgctgggcatggccatcagcgagcgtccagacctgagggtcaccgtgtgccaggccctgcgcaccctcatcaccaagggctgccaggcaggctgaccgtgctgaagtgagtcgctttgccaagaactttctgccgatcctcttcaacctgtatgggcagcccgtggcagccggggacactccagcccctcgccggctgatcataagggaggaggcagacggcaacaagatggaggaagaggaaggtgccaaaggcgaagatgaagagatggctgacccaatggaagatgtgatcatcaggaataaaaagcaccagaagctcaagcaccagaaagaggctgaggaggaggagctggagataccccctcagtaccaagctggaggctctggcattcatcgccctgtggccaagaaggctatgcctggggctgaatacaaggccaagaaagcaaaaggtgatgtgaagaagaaaggccggccggatccctatgcctacatccccctcaacagaagccagctctgactttaccagattgtctgtcctggacctggtcgtggccttggctccgtgtgctgacgaagctgccatcagtaagctatactccaccatccggccctacctagagagcaaggcccacggggtgcagaagaaggcctaccgagtgctggaggaggtgtgtgccagtcctcagggccccggggccctcttcgtgcagagccacctggaggacctgaagaagacactgctggactcgctgcggagcacctcctcacccgccaagaggccccgtttgaagtgcctcctacacatcgtgaggaagctctcagctgaacacaaggagttcatcactgccctcatcccagaggtgatcctgtgcaccaaggaggtgtcggtgggcgcacggaagaacgcttttgcactgctcgtggagatgggccatgctttcctaaggtttggctcgaaccaggaagaggccctgcagtgctacctcgtcctgatctaccctggcctggtgggcgcggtgaccatggtcagctgcagcatcctggccctgacccacctccttttcgagtttaaaggtctgatggggcccagtacagtggagcagctgctggagaatgtgtgcctgcttctggcctcccgcacccgtgacgtggtcaagtctgcactgggcttcatcaaggtggcagtgactgtcatggacgtggcgcacctggccaaacatgtgcagctggtgatggaagccattggggagctttcagatgacatgcggcggcacttccgcatgaagcttcggaacctgttcaccaagttcatccgcaagtttggatttgagctggtgaaaaggctgttgcccgaggagtaccacagagtcctggtcaacatccggaaagctgaggcccgggccaagaggcaccgagccctgagccaggctgccgtggaggagatctgtgctgttctggctgctgtcactgaggttcccaggtgggacacaaaaaccgcagaaaggatcgtcgaccctgaggcccagggcccctgggctgccctgtggtccagtctgaggccctttcagcccccaggctgccttgccaccagctccaggtgctcaagattctggcagagcctggactcaggatgacttggaactagggcttggctctcagaagtcctggattttggaaactccaaatggaatcacccttcagagacatccctggtgcctggagatgggaatgtggcctcagtgcctctgagtaggtgccatgaggcacctttgctttctgcccagagtggccatgagcaccagaacagatgatctccatttccgccagctgcctgtagccacgtggcatcctgcctgtggtctgggtgagatttactgtgaccagatgtagaataaatgtgtctcatcctgc

SEQ ID NO: 703084 - DNA, 189 bp, Homo sapiens
acctttgagtgatggtcacatctgtatctacacgccttgtgaggctctgaggcgggtagatcacctgaggtcaggagtttgatgacagcctgggcaacgtggtgaaacccgtctccactaaaaatacaaaaattagccaggtgcagtggcacacacctgtggtcccagctactccgaaggctgaggcag

SEQ ID NO: 703085 - DNA, 237 bp, Homo sapiens
cccccccagggtggggtttttcccggggggggggggggggccccccctttttttttcccccctttttttccccccccccccccccccaagggggtttttttgccccaaaagggaaagggggggttttttccccgggtttttcccccaaatttttttggggcttttttgggggttttttcccccccccccccaagggggggggttccccttttttaaaaaccgggggggtttttttta

SEQ ID NO: 703086 - DNA, 177 bp, Homo sapiens
ggataaggaggtatcacatatgtaagcacattgttgagtctcaaaacataatatgcgtcactgtataatccatcacattttttcagcctctacatactagtggggtgtttcatatactcactagtcgagctgtataggtgactgccgtgttcgcccgccagcgtttttgttttttgg

SEQ ID NO: 703087 - DNA, 266 bp, Homo sapiens
  misc_feature (261)..(261): n is a, c, g, or t
ccgttagcgaggctgtagaagtcatcaaaaagctatggtgggagtagagtttgaagtccttgagagaggattatgatgctgaccttcattgctccatttgtagatttttgctcttctcagtttactcattgtcccctggcaacaaatcactgtacatctacaaccagttaccatctacactaagataacgactttctactccaactaatgtattgcatacgctcaaagtgtaagaatgcgtcgatactcaagcatttcatncgtcc

SEQ ID NO: 703088 - DNA, 551 bp, Homo sapiens
  misc_feature (66)..(66): n is a, c, g, or t
tttagcctaatatcccacttatccggggagtacttcccatggggtgtcttctgtgactgggctccntcgctcggatggatattttcaagttccttccattggtctataaatttcatgaagtcattgtttttaatagcccagtagtactccattgtgtaaatgtaccacattttctctatccattcctctgttgagggacatctgggttgttttcagcttctggctattgtaaataagactgcttttcacaacatacccaaacttatgggacataatgaaagcagtgctaaaagggaaactcatagttctgagtgcctccataaataaactggagagagcataaactagaagcttaacaacacaactgaaagttctataacaaaaagaagaaaatacacccaagagtagatggcaggaaataatcaaactcaaggctgaaatcaaccaagtagaaacaaagagaactatacaaaaaatcaacaaaataaggagctggtactttgagaaaatcaacaagatagataaatccttagccagactaactagaggcc

SEQ ID NO: 703089 - DNA, 362 bp, Homo sapiens
  misc_feature (25)..(25): n is a, c, g, or t
tcctgagagctggagatgatgtgtntccaataaagttaatgctgtcgtgcctgcattcagctataacggagattcaggccagtcatgcctgtgattggggttctcttcagagctctttctcgttttctgagaatctaatctactgttggttgagcttcttggctggacatcactaccaactagaagtggttcatagttttatccttcttgttgatagcagtggtgtctaggcaggataggtctttactggtcctgactgctgttaataattggcagcagcgctccccagatcccagaaggtccctgctggagtgtatccagtgcacctgtatggaaccaactagacttctctcctggttagt

SEQ ID NO: 703090 - DNA, 449 bp, Homo sapiens
aatgtgttggttgagagcggtgaaaaaagtcttggagagggggagaaagctgatgtgaatgtatttacgaaagcgaaatggcggtgaaaatgaaaacggatattgtcggagttcgggtgtagacggtgtagggcgaagaatacgtgcggcgtaattcgaaggcgtattaagatttcgcgagtgcggaatatttcggatataacaaagtacgatgtaatcgcgtgcgtaggcgatgataacgggaattttaattgattattcggattcgacgtttattcatttgagttattttaattatcttttcgtattgtttattgtttttaaagtatgttattggataatttataaaagaataaaattggagttttaaagcgtgtgttgtagcgttaaaatgtaaaagaaaaatgtaatgatgataagtgtaaataaatgaagtatttgtgagtgga

SEQ ID NO: 703091 - DNA, 819 bp, Homo sapiens
  misc_feature (448)..(448): n is a, c, g, or t
  misc_feature (566)..(566): n is a, c, g, or t
  misc_feature (621)..(621): n is a, c, g, or t
  misc_feature (627)..(627): n is a, c, g, or t
  misc_feature (632)..(632): n is a, c, g, or t
  misc_feature (656)..(656): n is a, c, g, or t
  misc_feature (666)..(666): n is a, c, g, or t
  misc_feature (693)..(693): n is a, c, g, or t
ggctcaataccccaagcaatacctgcaactgaggattcttcccgggagaccgcagcccatcggcatggctcaagagtttgtgaactgcaaaatccagcctgggaaggtggttgtgttcatcaagcccacctgcccgtactgcaggagggcccaagagatcctcagtcaatgtgcccatcaaacaagggcttctggaattggtcgatatcacagccaccaaccacactaacgagattcaagattatttgcaacagctcacgggagcaagaacggtgcctcgagtctttatgggtaaagatggtataggcggatgcagtgatctagtctctttgcaacagagtggggaactgctgacgcggtaaagcagatgtggagctctgcagttaaccacagatctcataggacaatgttcaacaatttctgtgacaggtcacaggacccaatgtgngagaaatcatatgaaaagcatagtgtggtctgtggtgtcatatggatcagaggcacaagtgcagaggctgtggtcatgcggaacatctgttatttaagatgggtatccagataaatcntgaacactggtgtattaatttatttagactaccagcaaagatttaagcatgcaantgtaanacatnttgataaaattacagcccctaaancaagagtgtntctgtgaagagctctacatttgaaaanttaagatccttatatgaagtgccgttctaaattggagatggtaattcctcatctctatgacccttaatttttataaactattaaaaaaaagaaaaaaatttggcgcccccagaagttaacactggg

SEQ ID NO: 703092 - DNA, 485 bp, Homo sapiens
ggatgctgtatagtaatgagctcaggaatcctcttacatacagtagctggggaaaaatgccaagaatgtagttgaagtcagaattggagttgtgaacaaaggacatggactggagaaaataatggaaaaggatgttataactcatttttatctaccgagacgattgaattgagagtaaaattgtacacagatgcatgttgctcatattataatagttatgggacacgaaatggtgcgtgtgtaaagcacattaaggatgtaaccatttaagtagtctggtaagcaaatcgaagactccagtactgtacaggtacgaatattgacatgactgcaaaaatgtgtatagcagtgggataccagcaatacaaagatgatagatgaaggtatatctaaaggaacaatagtagaaaaagaaaaatgagtaaaataactacaagatacatttacatagtgaattaggaaatgatataagtagtagataggaa

SEQ ID NO: 703093 - DNA, 359 bp, Homo sapiens
tgttgcaatggctgtacggtattggtacattgctatgaaaaggtcacaggccagccacagtggctcacgcctgtaatctcagcactttgggaggccgaggtgggtcgggaatttggaaaaccagccagaccaacatggagaaaccctgtctctactaaaaatataaaattagctgggcgtagtggcgcatgcctgtaatcccagctactcaggaggctgaggcagaagaatcgcttgaacccgggaggtggaagttgctgtgagccaagatggagccattgcactccggcctaggcgacagagcgagactccatctcaaaataataataaacagttagttaccagccattacactccgg

SEQ ID NO: 703094 - DNA, 880 bp, Homo sapiens
  misc_feature (4)..(4): n is a, c, g, or t
  misc_feature (88)..(88): n is a, c, g, or t
  misc_feature (97)..(97): n is a, c, g, or t
  misc_feature (126)..(126): n is a, c, g, or t
  misc_feature (135)..(135): n is a, c, g, or t
  misc_feature (151)..(153): n is a, c, g, or t
  misc_feature (159)..(159): n is a, c, g, or t
  misc_feature (163)..(163): n is a, c, g, or t
  misc_feature (165)..(165): n is a, c, g, or t
  misc_feature (176)..(176): n is a, c, g, or t
  misc_feature (182)..(182): n is a, c, g, or t
  misc_feature (184)..(184): n is a, c, g, or t
  misc_feature (188)..(188): n is a, c, g, or t
  misc_feature (194)..(195): n is a, c, g, or t
  misc_feature (201)..(201): n is a, c, g, or t
  misc_feature (205)..(208): n is a, c, g, or t
  misc_feature (225)..(226): n is a, c, g, or t
  misc_feature (232)..(232): n is a, c, g, or t
  misc_feature (247)..(247): n is a, c, g, or t
  misc_feature (259)..(259): n is a, c, g, or t
  misc_feature (274)..(274): n is a, c, g, or t
  misc_feature (277)..(277): n is a, c, g, or t
  misc_feature (281)..(282): n is a, c, g, or t
  misc_feature (285)..(286): n is a, c, g, or t
  misc_feature (289)..(293): n is a, c, g, or t
  misc_feature (297)..(297): n is a, c, g, or t
  misc_feature (309)..(309): n is a, c, g, or t
  misc_feature (312)..(312): n is a, c, g, or t
  misc_feature (343)..(343): n is a, c, g, or t
  misc_feature (413)..(413): n is a, c, g, or t
  misc_feature (455)..(457): n is a, c, g, or t
  misc_feature (480)..(480): n is a, c, g, or t
  misc_feature (482)..(483): n is a, c, g, or t
  misc_feature (499)..(499): n is a, c, g, or t
catntggcttcttcctgagcagggaatttgatgcttgtttctgcagaagtgccacttctagttgtagacttggacaattagtcttttngatcctggnattccccattggaatatgctgtattaaancccacttanagcttacctagaacannncctggnacangnaagcacaaatncaattncnttangaaganncctttntttnnnnacttaactctgtcaccnngctggngggcggtgggagggngtcagctcagtncaacctccatctccnggnttcnnggnnttnnnnntcancgtcccacaggngcncaccaccatgcccagttattttgtatttttngtacagacagggtttcaccgcgttggccaggatctctagatgttgtgatccgcctgccttagcctaagtnctgggattacgggtgtgagccaccaagcctggctgcattttnnntgttctcttaaacactgcctcantnntcttagcttgtaaganaaatcaagctgtgttcccccacaatcatagctagtaactagcttccattctcaaaccaaccctgacctcaacaccttggcaagcaagctctacagtccaccaaactccaatctcacccacctccctcaaacctgtctccatcaagttccaaatggcttaacggctgtcccacctcccctatgccagtaggtaactttaccttctagatgatcccccttcagtcccatccttcagggtactgaacatttatgttggcagccagtgcagggggcttgacaaagtttccattgtgactcacgtcatgaggcaagcaattctggcaatcttcaggcggaggtgcgccaggtagtagaggctcatacaactcatcagctagggata

SEQ ID NO: 703095 - DNA, 661 bp, Homo sapiens
gcggcccccgcgctcccgggtggcaagatggtggcgcgcaggaggaagtgcgccgcgcgggacccggaggaccgtatccccagcccactgggctacgcagcttattccaatcaagttctctgaaaggcaacaggcttctcactacctctatgtgagagcacacggcgttcgacaaggcaccaagtccacctggcctcagaaagaggactcttttgggtcctcaaatgtgccccccatactgcacagaggagagcctgtcccgccttcctgtccacctgtggcctcgtccagtcgtgtagagttgcaggagaaaggccggacctggttgagagccccaaaaggagtcaaggtcgaagttttttcatcccaaagccagttccgggtttccaggtagcctatgttggtgttccagaaagccaaagtgggggtgtcagcggctttggcccttggaagagggcccccttgcttgggtggtccaccagagaagccacctctgggtgaaggagttgcattcacaaggtggatcagtgactacgcagactctgtggcccgacccctgaaggccccctgagggtggaacgtgggacacgttcattggaggccttatgacccagaaagatcgctgaaggaagaaagctaaggggcaagggagaaggagggg

SEQ ID NO: 703096 - DNA, 343 bp, Homo sapiens
ggttacccaagcgggcacccgggcctcagggaccccttccccgagagacggaaccatgacccagggaaagctctccgtggctaacaaggcccctggcaccgaggggcagcagcaggtgcatggcgacgaagaaggaggctccagcagagccctaagccccaccctcctatgaggaagccacctctggggaggagatgaaggcaggggccttcctcccagccaccacagcgtggccatctccaccctagctggtcctatgtggaccccagaagcagcatcagctgtgacaacggttattccaccggagaccatgagctcttcaccactttaagctgtgatgacc

SEQ ID NO: 703097 - DNA, 245 bp, Homo sapiens
  misc_feature (156)..(156): n is a, c, g, or t
ccgtttggctgtcgatctggccgtggcctgacttcggaaaacccaaggggttgcgtgaaaatggcattgatctcttcagccttcgcatgcacggtggcataccagcgttgttcgtccgcatgcgcatggacggctccgtatgcccaacggagcagngtatcgaatagctggtgatttctgcccttgtagaccgtgttaccgggaacagcgatgcgagcgctttgcagatcgatccattcgagaaa

SEQ ID NO: 703098 - DNA, 710 bp, Homo sapiens
gggggagtctgggtgttgagtgcggggaccggagttcccgggccttttggcttctgtagtctgtacctttttaagcagtggaagtgcctgggtggattctccaatgctttattgttttcttgttacaattatttattttacttcccgtgatgtttcagcctcatcccttcaccatttgttgttgtggttgtttttgagacggagtctcgcactgttgtccaggctggagtgcagtggcgtgatctcggcccaccgaaacctccgtctcccgggttaaagcgattgtcgtgcctaagcctcccgactgccttcactgttttttgaaactttgtgttttgctttctaattggagtaactggccttggaacctgtagtcagtcatttgcctcaggtttacctgccagtcccaccagtctaaagcaagggaattgggacccccttgtcttgaatgggcctaagaggagccatcagttctccttttcccttcttggtggacagtcgtttaaaacttggagtttggactgtatgttcttaaatgttttcgttcggtggacaaagtgatctgggacatttaaattggaagtttggctttttccttgggtgactcccgcagggaatcagggcattctgacttaacatggcgagactgggaggcgatacctgctccgccacggccgaaaaggcacgacccgtccttggggacattttcc

SEQ ID NO: 703099 - DNA, 109 bp, Homo sapiens
gagtgagccccatggtgtggtggtaaatatgtagaggcagaatagtaatgaggatgtaagtccgtggtgcgattatgagaaatgactggcgccggtgaaagcttcaggg

SEQ ID NO: 703100 - DNA, 119 bp, Homo sapiens
caggttccaaagtacaaaatcaaccaggtctgaagggattgggtgataagagcacacagatcagtctttctttagggaaacagttccctccctgatgccctctggggtcacaatcagat

SEQ ID NO: 703101 - DNA, 374 bp, Homo sapiens
ggactcttccagttacaactaaggagataaagacatgcgtgaccaaaaagcaagatgagccctggatgacagcccatggggacaaagaaattggaggcagctctgagcagcagaaatcccatttctcacccgtgtcccagaagaaaacgcgtcagactgtggaagctgagcagaggccagttctgtgcctagtgtcagctctttgaatcagacacgagacgcttctgctaatggctgcaaggaagactggcctttcagtgcatctcagcactctcctcctgcctaacttttcttttttttcttttttttgaaacagggtctggctctgttgcccaggctggagtgcagtgggcaacagagtaagagtccgtctc

SEQ ID NO: 703102 - DNA, 471 bp, Homo sapiens
cgctaactactaacccccttccgctctcagggctcgttatctctggtagagaatatcaaggtgtcttctaatttccaatcattctccaggagccccagttatcattatcattgggtcactccctctgaaaaaaaaaaaaaaacaaaactgggtttggtttccccacaacttacgggatgaggccaaaaattcttacaagcttggcttatttaagcgggtaagcttatatcacgtgtctccacttccaggaaaatatccccaaatgcacgggtatgtgcttccagatctatacacaagagttgtccttctgccaagagcacccttcaggttcttctcaaaggggaaggcaacaatttttccttcacgagtcacacatctgtcatctcggcttcacaaagagacacaaattactatgtccccccagcattggtcatttagaataataatcggggtgggtgtattggtgtgtct

SEQ ID NO: 703103 - DNA, 135 bp, Homo sapiens
cccgtagcgtcatggtagctagtgggacgctgtatgattcctcactacggcctgaggttgtaggagctgtcaggcaagtgtgttgttagcagtatgagcccgggctgctgtggtagctaggtatgcttcctggga

SEQ ID NO: 703104 - DNA, 266 bp, Homo sapiens
cgactgtcagaatcagcagggatgccgagtcaaactcaggacacttgagcttgtggagacagaccagcaggagatagaactcccagaagtgtgcagctgtggtggtgcttctggagaagagcagagattacacatgccgtgtacagcatgaggggctggcgaagcccctaaccctgagatgggagccgtcttcccagtccaccgtccccatcgtgggcattggtgctggcctggctgtcctagcagttgtggtcatcggagctgtg

SEQ ID NO: 703105 - DNA, 576 bp, Homo sapiens
atcactcgtatctacacgacaacgctaccttacggctgttagccgcactctcccacctattgttcctactcaactacggatgcatgtattttgcccagtcactagtgaggtccttcatttcaacgtgactttcccctaattctccatggactacatcactctagacctaagacctacgccaaatatccattgtcactatcaatactgtcattccaggcagttaatattcttaacatgtgtctttccacacatacactttctcggcactatccggaatgccccgtacgatgtactcggacgtatcctccgatgcatacaccacatgaaacaatccttatcatctgtaggttcattcatttctctaacagcagtaatattaataatttttcatgatttgagaagccttcgcttcgaagcgaaaagtcctaatagtcgtagaaccctccataacctggagtgagcgtatatggatgccccccaccctacacacattcgaagaacccagtatacataaatctagacgctaaaggacggattcgacccctcaaatatcgcttcagccaaccactgctctgc

SEQ ID NO: 703106 - DNA, 714 bp, Homo sapiens
  misc_feature (55)..(55): n is a, c, g, or t
ctttcccactaattctgcccttttaaacgtccccttgtgacgtctaaactaagangtttttacaccatgcgccggtgtataacctcccttctctggggatcaacaatcgttttatacgcgcctgttaacacaacgttccccatgaccccccttttatacccctataaggccccacctctttatcaatataatcaacagtcactttacacccttaaacattttacgtttttaaaggtacttagtgactaaaatcaattattcacgcgcatctctatttaacaacaggatattatcaccccaagcgacgtcctaatgaaagccctgtcaatcccccaccccccatcaaggaaattgtcggcctccttttaagtccctttcgttaccccactgtcatacctatctcccacactcccttcaatagtaaaacatacttaattattgagattgtgctagtagtaaccacctctttgaggacataattcgaagttttcaatagtggtgcaatctgcgctaataccaccagtaattccggtagaggtcgaatggtataaagtctcgacgactagttcgggggaagttatataaagcgttaatcaaccacactcttctcttcagaggctacagcaaaagacgcatctgttctaccccacgaacctaggggctagccccgagcagtcaatacgtacccccgtttcgccatcaattgtacgcgca

SEQ ID NO: 703107 - DNA, 314 bp, Homo sapiens
gtttcaagagtgaaactccgagtcaaaacagacggacgaacaaacaaacaaactccatcttgcccgggcgtgttggctcatgcctgtaattccagcactttgtgaggccaaggggggcagatcacgaggtcaggagtttgagaccagcctggccaacatagagaaaccctgtctctactaaaaatgcaaaattagccaggcatggtggtgcatgcctgtagtcccagctacttgggaggatgaggcaggagaattgcctgaacccaggaggaggaggctgcagtgagctgagatcacaccattgcactccaggg

SEQ ID NO: 703108 - DNA, 817 bp, Homo sapiens
tacagtagggactaaaggcatgtaccaccatgcctggcttatatatacataagtacatatatagatatatatgtaaggagagcccatcatatatatatacatatatatatacacatatatacatatatatacacacacacacagtacaagatatccctatgtcgcccaggttggtcttgaactcctggcctcaaaccatcctcccacctcggcctctcaaaatgctgggattacaggtgtgagccaccatgcctggccttaagttagtattgatggagagattaaatgcacttgtatacctgagacttttacaatcgatatgagtttatactaagtattctatattacttataatataagacattaaggaagatttcatttcaaaatatcagagggggaagtatatatttcataaacctattagataaaataacaaatacacttctacactctgcattaacttagcatctataatttctaagagctggcgacagggcatggagagtattacactgcaagcactgccatgcttcaatacttggcaccattcacaacggtgtcctacacttgaacataatttcatttcaccgacgccaccgcgaagcacgtacgcctaccaattcatccccacatcaagagacggacgaacaagactggtagaagcctacccgacgccaatccggccgggggtgggacctgctcacaactcttacacgcaacggcccggacccagtcggaaccagcaggaattgcccgacaataccacaggcacacaccccgcagaccacactaaaaagccaacccacaccaccccccc

SEQ ID NO: 703109 - DNA, 114 bp, Homo sapiens
gcactgcaatccagcttgggcacacagagtaacacctatgtcactccaaaaaaattacttaattaaaataaaatacaataggatacgtatcatctatagtacataacgttactc

SEQ ID NO: 703110 - DNA, 304 bp, Homo sapiens
aaaaaaaagaaaagaaatatggagccctcgtagtagagaaggtaagccatacacagaaacacctctcatgtgagataaataagagaagtactgagtatgtttgggaaatggagtagtccatcaagtttggtagagcacagagtatactggggaaatagtgggagattaaaatggaaacattgtcctgaggtctggctattatggaccttgatttaaggactctgcatttgaactttactcagtggatgatgggaagtcactaaaagtttttttttttactttttaacagtggaatgacaatcag

SEQ ID NO: 703111 - DNA, 174 bp, Homo sapiens
tgtgtagctaattcgaaagggaagcaagggtgtcacaattaacaagggtgcccaattatattgttcccatacatcattccaccactccaataggacatgggcttatagagaacagagtcaagccttgtggttcctgttgtgcccagcacacacagcattgtgcttggtatatag

SEQ ID NO: 703112 - DNA, 318 bp, Homo sapiens
  misc_feature (89)..(89): n is a, c, g, or t
  misc_feature (101)..(101): n is a, c, g, or t
  misc_feature (107)..(107): n is a, c, g, or t
  misc_feature (113)..(113): n is a, c, g, or t
  misc_feature (119)..(119): n is a, c, g, or t
attgttatattaaggaagatcttgatccttgtgctcgtccaaaaagacgtcagccttacaacgcaatattttctccaaaagggaggggncgggagacatanacattnaaacanaaacanaaggatgaaggacagttttttccttcttagttatttatagtgaaagtgtggtactaaacattgatttttttgatcttctgtgaatggatttataaatcagttttctattgaaaatgtgttgggatagttggcgttttgcacctttaaaacaataagggcgctttcattttgcactctaacttaagagtttttactttat

SEQ ID NO: 703113 - DNA, 1222 bp, Homo sapiens
acttgctggtctgatccatgcacatggccaggctgctaggcctctgtgcctgggcacggaagtcggtgcggttggccagctccaggatgacccgcctgggaccctgctcacaaataatggtggccctggtaactggcctccacctgacgggatcggcttcgccatcgcccggcgtttggcccaggacagggcccacgtggtcgtcagcagccggaagcagcagaatgtggaccaggcggtggccacgctgcagggggaggggctgagcgtgacgggcactgtgtgccatgtggggcaaggcggcaggaccgggagcggctggtggccactggctgtgaagcttcatggcaggtatcgatatcctagtctccaatgctgctgtcaacccttactttggaagcctaatggatgtcaccgaggaggtgtgggacaagactctggacctcccctcgctgcaggccccagccctgatgacccacggcctggtgccagaccctggccacacgcagggaggcggctcacgctggtgactcgctgtcttccctagcagccttcagtccatctcctggcttcagtccttacaatgtcagtcacacagccttgcttgcgcctcaacaataccctggacatagagctggcccccaggaacattagggtgaactgcctgcacctggacttatcagactagcttccgccggatgctccggccttcgcctcggcccagcggacacgctgcaagcaaccctgcggatcagcaggttacggcgaccccgaggcctgtcgctgccctcgcggccttcctgcgcccgccgctcccgcttcctctctgcgcgcacccgctggcctgcctggctccgaaaccccgaaccggcacataagaccgcgcacacaacccacaagcaccagcagatcggccctcaaccccagagaacgcccccagcgcttaccgccgtgtccctaccagaccacttgaacaaccattaggcgtacccccacacacgccacgcccacgaaaaagacccgccactcgccacacgagccccacacgccaacactgagacaccgcccatacggcccccaacaaagtacgccgtacacacagccagtacgacacactcaggaccggacgacgagcgcaccacgaaccgcactacaaccgagagcagtcctatcagccagccggagcccacgcacgcaaccccacacaaccaccaccaccccc

SEQ ID NO: 703114 - DNA, 172 bp, Homo sapiens
cggaggttgcggtgagccgagatcgcgccactgcactccagcctcgtcgacagagtgagactccgtctcaaaaaaccaaaaaaacaaaaaacagtcaatggcattaaatataaatacatttacagtgttgtgtaaccatcaccactatggatcccccagagcgccggaattc

SEQ ID NO: 703115 - DNA, 233 bp, Homo sapiens
  misc_feature (165)..(165): n is a, c, g, or t
ctctagtcatatcatagcaaaagtgctaacaaccaaaggcaagactgcattttttttttcaactttcaagttcaggagcacatgtgcaggattgttacataaggcaaggcgtaccatgagagcctattgtacagatcatttcatcacccaggtattaagcctggnacctattagccatttttcctgggcctctccctcataccaccctgcatcacttattaggccagagtgtg

SEQ ID NO: 703116 - DNA, 266 bp, Homo sapiens
tcgatctatagcaggatccccccctcaaacccagtcaagactaacggttttgttaaccacctatatatttgcctctctcatactgaaattttctaggttaagtattttatggaatacacatactgccagatatttttctttggttatctgtcatatactgcatacattacttgatacaaatataaaaatgttttaattatcctgtctggcataatttccgtcagtctcactgggttttcgaggtggggtacccgagctcaaatttc

SEQ ID NO: 703117 - DNA, 117 bp, Homo sapiens
  misc_feature (3)..(3): n is a, c, g, or t
  misc_feature (39)..(39): n is a, c, g, or t
  misc_feature (109)..(109): n is a, c, g, or t
gangtgacccatcatcgtatttaaacctcttctattccntgccataacatcgccacgtatagctggaattaagtgttgtcttggagctgttgtacatttaagaataaanttttgtac

SEQ ID NO: 703118 - DNA, 599 bp, Homo sapiens
  misc_feature (84)..(84): n is a, c, g, or t
  misc_feature (253)..(253): n is a, c, g, or t
atctaatttggaaatttgacttgttagtttctgtgtttgaaatcatggttctagaaatgtagaaattgtgtatatcagatactnatctaggctgtgtgaaccagcccaagatgaccaacatccccacacctctacatctctgtcccctgtatctcttcctttctaccactaaagtgttccctgctaccatcctggcttgtccacatggtgctctccatcttcctccacatcatggaccacaggtgtgcctgtntaggcctggccaccactcccaacttgacctagccacattcatctagagatggttcctgatgctgggcacagactgtgctcatggcacccattagaaatgcctctagcatctttgtatgcatcttgatttttaaaccaagtcattgtacagagcattcagttttggctgtggtaccaggggaaaattatcaggatataaccacattcaggtgtggtttttttccatctacaggcacattttaatgggatttttcaaactggaatcatctggtatttcaatcagggtcagcttttagggggagtcctaagggcaaatattttatccggtggtatatgtcagatgccgt

SEQ ID NO: 703119 - DNA, 193 bp, Homo sapiens
agtgactctacaggatcttaagaagacgacagaagggagagggcaggatggagctgccctgaatcccatgtggctgctcgggcagaggtctatctccggaagtcacctttgacatgttcacttcctggcctccccagcaccgggtgctccctgagggggccaccttgtgattgaggaagaaggatgaggtgca

SEQ ID NO: 703120 - DNA, 379 bp, Homo sapiens
  misc_feature (365)..(365): n is a, c, g, or t
  misc_feature (367)..(367): n is a, c, g, or t
acatctatcatattagttctgtctctctaggaaccctaatacagatggtatcacccatgaaaatttccccaacttcactagagaggacacaatattcaaattcagaaaatgcagagaacccttgtgagatactacataagatgaccatccccaagactcatagtcatcagattctctaagatcgaaatgaaagaagaaaggttaaatgcagctggagagaaggtcacttgcaatgtgaacaccatcaggctaccagcagactttttgacagaaaccctataagccagaaaatattgggggcctatattcagcattctttttttttttttttttttttgagacagagtcttgctctgttgcccggntngagtgcagtggc

SEQ ID NO: 703121 - DNA, 400 bp, Homo sapiens
  misc_feature (1)..(1): n is a, c, g, or t
  misc_feature (175)..(175): n is a, c, g, or t
ngctgtgaagccctagctgtgaaattgatgtgaagaatccaagtgaagataagaggggtgggggaatgccttgcaggggctcccacaagaccaagccaatgatgctggccctagagacccaccctcccacggagaaaggggagcaagattaacacaaagaaggcccagcgtgggngcacgcctgtcatcccagcactttgggaagccaaggtgggaagattccttgagcaggagttcaggatcagcctgagcaacacagtgagatgtcatctctaccaacaataataataatttttacattagcccagtcaagtgcacgtgcctgtagtcctagatacttgggtggctgaggcgggaggatctcttgaacccaggaattcaaggtcgcagtgacctgtga

SEQ ID NO: 703122 - DNA, 144 bp, Homo sapiens
tgctgactctagacggactcccggccgttgtcagtgggtttgactgtggtgactgctggctcgggaagtctgcgcatgtgtgcaccatttcccgtgaacacccagtggagggtcatgcctgatctgtacttctacagagatcct

SEQ ID NO: 703123 - DNA, 142 bp, Homo sapiens
gtcctctgacaatattaggggggtcctcttctcatcagagctgcatggtacacagctggcattgtggtaggctctccactgtggccatgtgtgcgcccagtggaaaggtttctgaacagggtgcaccctggagtggcctggg

SEQ ID NO: 703124 - DNA, 458 bp, Homo sapiens
ggcgaatcaaggtggacattctattcccacagagcggaaacccagaccccaactgcgtcactgtgactggggctcccagagaatgtggaggaagccatctgaccacatcctcaatctggagtgaggaatacctatgctgatgtgatggacagtgaggctgctgctgtgtatacatggaacccccagcacacgaagaggccaatggcaccttccagaggctttgtggtgcgggacgcaccctggaccgccagcagcagtgagaaggatcctgacatgagcatgctctgaggaatttcccagctttgtggctcaggtgtgatcccaagatcctcccttggggccccaaactgataattgatcaaaaagaacagaaccctctccagcctgctgacccaaacccaaccacacaatggttcgtctcaattctgaccgcgagagggtacctgagatctaattcg

SEQ ID NO: 703125 - DNA, 568 bp, Homo sapiens
  misc_feature (541)..(541): n is a, c, g, or t
  misc_feature (550)..(550): n is a, c, g, or t
tgagatctcggagctccggcgcaccatgcagaacctggagattgagcggcagtcccagcatcagcatgaaagcatcctggagaacagcctggaggagaccaaaggtcgctacggcatgcagctggcccagatccaggagatgattggcagcgtggaggagcagctggcccagctccgctgcgagagtggagcagcagaaccaggagtacaagatcctgctggagcgagaagaccgcggctggagcaggagatcgccacctaccgccgcctgtggaggggaggacgcccacttcctctcccagttctctctggatcgcagtcatccagagatgtgacctcctccagccgccaaatccgcacaaggtatggagtggcacgatggaaggtggtgtccacccacgagcaggtcttcgcaccaagaactgaggctggcccagcccgctcaggctaggagccccggtgtggaaacagatcccatggaagatcccctctctgcccagcaatcacagctgactgcttaccccgtcaactaacctccgcnggcaagtanatcagtattccctgggtt

SEQ ID NO: 703126 - DNA, 212 bp, Homo sapiens
tcatcgactcctgtccaacatctcatccctcgttccagcatctcattcctccttccatcatctcatgccccttccaacaactcatacctccttccaacattcatccctccttccaacatctcatagctccttccaacatctcatgcccccttccaacatctcatcacacctcccaacatctcatgccatgagatgttgggaggtgtactgag

SEQ ID NO: 703127 - DNA, 122 bp, Homo sapiens
tcgcaggaaacggtgcgggagcgcacggcgccctctcacttttgacttgcgtctcatactcagcctgcagccaccgctcccgccgcagcttaccgtgagcggccatggcggccttgcggccg

SEQ ID NO: 703128 - DNA, 157 bp, Homo sapiens
ctgtcactgtgtcaggtagagccatgctcggacgcacacagactgtacgcacctggacacagcacatctctagcaaatttagcctattcctattctgtaggctattccttaccacctgtaatctatgaccatataccttggcagttgaactattgtt

SEQ ID NO: 703129 - DNA, 529 bp, Homo sapiens
attcagtgtaaacgacggcagtgaatccgatatgtcatagtcataactgtttctagatgtttatagcatgctcagacttcccacctcttatctttctactgagacgagatatttatatacccaagttatttccatcattgattttttatagagtttctgtgacatgaagctggttctcaccataaaagataagactggaagtggctaggtggggtagcaggggtttggcgcatgttgagacagagaaaaacaatcaaagaagactcttggattatattgggtggtggtctgattcactgcagaaataatacacaaaaggaaaaaccagcttcagaagcagaagagaattgacatagttttggaaatttcaaggtagagggagctgcaggacattaaggagtgggagtcttagagtcaggctggatatatgtgttagatgctataacgaaatattaaggaaggagataccggtttggccataactatcatgtgtgtgatctgtaaggctactgaagtgaactacattacc

SEQ ID NO: 703130 - DNA, 157 bp, Homo sapiens
cttatggcgtagtaacatcttccgtgataagcccaggaggagccccctcgtaaaaggacggcaggtgcttgagctgctgcagctgctgcgcgtcgtgtcgccgccgcttatgctcccgacgtcgctgcagctcctgctccggcggctcacgcggccg

SEQ ID NO: 703131 - DNA, 152 bp, Homo sapiens
catctttatcaatccagcctatgttatttaagtgttaattttctccctttcttgaacttatagaacctctgggccatactttgaagttaattcttgccgggtaaagaccaagatagctccttcccagggatctctgtaatctattacttcta

SEQ ID NO: 703132 - DNA, 163 bp, Homo sapiens
ttgctctagaggatgccgagtgtcttaagagcccgcctatagaagctagatcccccagtcacccacgaccttcgagtctcccttgaagagatctactgtggctgtaccgactgaagatgaaaatctcccacaagcggctaaagcccctacgaggccaaggtac

SEQ ID NO: 703133 - DNA, 941 bp, Homo sapiens
aacgcaggcgccatacttcctatgctacaccctagttaggctcgcttcccctagtcatcgcgctgaacttacactcacaacgctccgtaggcgtctctaaacatgctagtagtcgactctcatgccgcagaagaactatactagaactgcgctgagaccaaacaacttgagatagtgacttagcttgacagccgaatcagcgttcattgagtaagagataccatcataggtagggacgtcgcaacgttagggacgtccgctaaagcccatggtcggaagccacccgatccgcttgtggtcgaatagtacattgcccggcagtacgtcttaagaataggccgggtatgtgtgtagatacagccctccattatcgattctcaacgcccgggaatcaaaagacgaatagccgtaactcattcctatgtgctatccctatgaggcataactgataatcaggctccagctgtgctatcgaggaagacggacctagaaagtcgcgtcatagcatgctctgtcaatcagccacgatggccctcgtagtaacagcatgctcgatccaaagcccgctgaagcgttcaggggcgcagtcattctcataagtcgccgagggcttacatcctcgttactatctggctagcgaatctgaaactacgagacgcacgcacacgacgcatcataatcctctgctcaggacttcatagatctaggtcccacggaatagcttgttgatgacttctagacaggctcggtaagactggccttgacgccccagtattaactatgggaaaactctctgggtgaataacccagtcgcctgatcaagtatcactctcctactaaggaccccacactactggtgacagccttatccctaaattcaaaaccagggggctccccattaaataactctctgaaaacccctgttaaaaccctttctaaag

SEQ ID NO: 703134 - DNA, 116 bp, Homo sapiens
tgggttactaggtatgctggttgctgcctgtatacgacgccctggccggggagttcatatgcctctggtgtggaggcccgccaggccctcttgaaagcaggtgcaagcggccgcaa

SEQ ID NO: 703135 - DNA, 167 bp, Homo sapiens
gggaggtggaggttgcagtgagccaagatcgcgccactgcactcaagcttaggctcagttctgttgatgcccgtcaggaacaggatggtgggccaggaagaggcagagggagagctctagatcgagggaggtgccggtgttctggatgggccggcacaggaggaagg

SEQ ID NO: 703136 - DNA, 100 bp, Homo sapiens
atagcgtaaaacagccttagggtccgacatcatggggaccctcacggtcctgtcttcatccagaaagacttccctcgaggatttctacttggatgaagag

SEQ ID NO: 703137 - DNA, 995 bp, Homo sapiens
gttctataatctcagagcgtggctctatttatactaggcctactaatctaaaaatctaactcatataccatttgatgggtacgagtgaactcttcgacataagtccataacacaggagtacatacagcacttggcctgatggtcttcgaatcgggatatatcctatataatacctcagaagtgggggctgcgcaggatttttctgagccgtggaccactccagcctagcccctatccctcgaattaggagggcccctggtcgctgagtcaggctatataacccgatgaatcgcctagaggtcccactcctagagactatgcgaattagtcgcatcgggagtatcgatgcagcggagagctcactcatgggctgttagaaaataggcgaaactacctaattgcaagtctacatgggtattacggtaaaaactggtctctatagttgaacctctccgtagctaaagcctcaggaggtaattttcgagtctcccttgcaccatttcggacggcaatctacggttcaacaattttttgtagccacgggcttcctgggaaacttcaccgtcataatggtcaactttcctcactatctgttcatccgcaactaatatttcactttacatccaaaacaccactttggcttcgaagccgccgctgatactggcatttgtagatgtggtttgactatttctgtatgtttccctctattgatgagggcctaacaccacacaaaccaagcacgacacgaaaacacacaaaaagaggggggggcgtcaaatacccgggggccagttcagctgccccgtttggcaagggcccaaggggcgaaaagcgagcggggcggcaaacagcggtgggaacgcctgggtttggaagccacttgggggttatgcaccccggaagccgggaaaaaggatggaacggcggggaatgtggttacttgcgaagaaaaggagagaaagtaggactataacaacaaagaaggataataatga

SEQ ID NO: 703138 - DNA, 128 bp, Homo sapiens
gccccccccccccccccaggggggcccggtaaatgtttgggggaaagggggcaaaaaggtttttcccccttgtttttcctcccccccccgggggccccttttgatttaataatttggggttttcccca

SEQ ID NO: 703139 - DNA, 245 bp, Homo sapiens
cgctcggagatcgagccccgggctcgcaaccgttgtcgcttccggcgccgcggccagaggccggaccacggcttcccgcgcccgcccgcccgccctcgcccgagaaagggcccgcgccggaccttcgaagccgcggcgggccccccggcccggcaaggggatggggaaaagcgggccgggaggggagggagccaacccgggagcccacccacccgcccgcccgtcttcccacggtccgccggggg

SEQ ID NO: 703140 - DNA, 130 bp, Homo sapiens
tctgtgggcaaatttatttttgattttgaagaatctcttatcaggagctttaaaaaacaggattttagttctaagtttttttctcaaatgcttgagaccatttctttttgaagtaatcctttagaaagag

SEQ ID NO: 703141 - DNA, 862 bp, Homo sapiens
agatcttcccttccagacgcttcggggttaagctgccgtccgcgagcactccaggaatttccagatccgctgttagccccatgacgcggctgcgtgctaagagcggaccccgacaatttctactctaattcttctacgacggactgcaccgccgtctaggaccccgtggaggaagccctcccttgctcctacaccaacaaagatggcaaataatacatgaagcctacggttttccagtgtgggtgactggcactaatgggagcgcattaaagcggagagactctgtgctgcaacacgtctctagcagctgtcatcgcctcccgtgcaagaaagacagtgtccagagaatggccgttggcggaggaggggcagggtcctcgcctcgacccaggcgcttaggcccaaacgtctgcgccgttaatggaagaccggggtgcaagggccacgcaagcgacggaaacagccagaagatgtccctgggacgagctcccgccttcgctggtgggtccgtaaatccacgaacaatgggcccgctcggtttccgtctaatacgacgcgcagggcggaagctccgactccgcacatgacgtatattttctgcgcttgcagcactccggaagtgagaagtttagcgccagtggtgatgccttggttggttacttgctatccgtcacgctgggcgatctgaaggcgttaagcattaaaacaatgttgcaaaagcgccttcttggtggagtaacgggcttatgtgaaaggttgagaaagggtctcacgctgtcgccaatactgggagtccagtgggcattcttagctcacttcagcctggaacatcctggtgaccgagctccagccaactttccag

SEQ ID NO: 703142 - DNA, 219 bp, Homo sapiens
acaattctcatcgttcctcgtcattcctcatcattctccttcttcgtcctcctccatcattcatccacagccatccacctcgtgcatcttgagtcaggtgcttcctggtcctcgcggtcacttgcctttctgctgttattaaaatgtggcatgagcttgaagacactctctcggtagtcattcaggtgggtgacctcacagattaagaggtccaggctt

SEQ ID NO: 703143 - DNA, 683 bp, Homo sapiens
atagagctaggtactgaggcctgggtggttaacacaacatggcggatgacgccgcgtgcagctaagggggcccggaggccctggatggccctgggataggggaaccgcggtggcttccgaggaggtttcgagcatgtggcattcgagggccggggtcgcggccgtggacggggccaggggacacagaggcctgcgagagctcgacggagtgcaatggccgaggataatggcagtggattgccctgtcacacaaagtttgggacctgcattggtcaaggacatgaagatcaagtccctggatggagatctatctcttctcccatgcccattaacggaatcagagatcatttgatttcttcctgggggcctctcatcaaggatgaggttattagaagattatgccagtgcagaagcagacccgtgcctggccagcgcaccaggttcaaggcatcatgtatgctatcggggactacaatggccacgatcggctcatggagtgttaaagtgcatccacaggaggatggccaccggccatcacgtggtgagccaatcataccatggaccaagcatctaccactcgtccccgtgaccgcaggcaggctactagggaggaaaccacgatcggccaagcacccacacatgtccccttgccaagggtgacatgggccgactgcaggcatctg

SEQ ID NO: 703144 - DNA, 124 bp, Homo sapiens
ctccttaggggtatatactgccccgaagggtccgtcagtgaagaatggctttgtggcaggaatagcaccccatgggggccaaagtccgtcagcatctgcactgagccccgtgtactcgtccaga

SEQ ID NO: 703145 - DNA, 446 bp, Homo sapiens
tctgatcttttaagcattcttgcactggtggcttgttagcggtgaattctctgtttgtctgaaaaagctgtatcttgccttcgtatatgaagcttagttttgctgaatacaaaattctcagctgataattgttttgtttgaggaggctgaagatagggttccaatcccttctggcttgcagggtttctgctgagaaatgtgctgttaatctggtaagttttccttttcaggttacctggtgcttttgtttcacagctctttctttcatcttaactttagataacctgacgacaatgtgcctagatgatgatctttttgcgatgaatttcccagatgttctttgtgcttcttgtatttggatctaggtctctagcaaagctggggaagttttcctcaattattcccccaaatatgtttaacaaacgtttagatttctcttcttcctc

SEQ ID NO: 703146 - DNA, 583 bp, Homo sapiens
tccgcgtcggtccccgcgcgtggcgccaacgaaggcctatactgtggggggaaacacacgagatctgggcacagcggcccacacacactggtcccccttgcaaaaggttgaacacaggccgcctgcgggctcttgttgctgggtaacgccctctaatccctgcgacacaccacaggggcacacatggcgacatctgtttctcgcacacctggtgcgctatagaaagctgtctcactgaatggcctggtatatcgagatgagctgcgtaacacacctcaagcccgcgggcgtgcacacatgccacacccctgggcaaacttctgccaaaggccacccctttgagatgccacatttttaagagcctatcacgctaacctgagacccccgagaccttctggagaaggaggagactgtagattcacccaaagtttccctatatcacaggaggttcacctgagccacacctcgtcaaagagacccacacacccacagaggtttccgtgcacgcggactcagggtccagctgggggtacaaaaaagggtttttaaacaagaaaaataaagtgaaataagcgtgaaacca

SEQ ID NO: 703147 - DNA, 301 bp, Homo sapiens
tctaccaattatttagagagtggtgttgaaatctccaactatgctatcctcccacctcagcaccccgagtagctgagactacaggcacatgccaccatgcctggctaaatttttttcttttttttttttgagggagtctcgctctgtcacccagactggaatgcagtggtgcaatctcggctcactgcaacctccagtctcgctctgtcacccagactggaatgcagtggtgcaatctcggctcactgcaacctccacctcctgggttcaagtaattctcctgcctcagcctcccgagtag

SEQ ID NO: 703148 - DNA, 175 bp, Homo sapiens
gcctggcttttcagctggttcttggattggaggagggcagacaaggggtgttccatggtgatctccgtgcagctgtccttgcccctttcacccttgacagcgattagcccttacagttcgccttccaccttaatgcctccctttggcttgagaaaaggagcccatacctcctttt

SEQ ID NO: 703149 - DNA, 178 bp, Homo sapiens
acttcggactttccctgcctcaatgcagctggtggcctacgtgcatgctcatcatgccgggctcagacctgagagcgccgtgcccaccttcatccatggcccagctggagcactcggaacccattgaggcagagcctgtggctctgtcaccagtgccagatctaaaatcaactccagt

SEQ ID NO: 703150 - DNA, 1089 bp, Homo sapiens
tgaaacggactcttgtactgtcacccaggctgaagtgcagtggcgcaatcttggctcactacaaccatccgccctccgtgggttcaagctgattctttgtgcctcagtccttcccaagtagcagggaacttacaggcatgtgccaccacacccggctatatctggatatattaagtaaagacagggctctcgccatgttgaccaggctggtctaaactcctctgggaatccgcctgtctgggccttccagggatgctaggaatatacaggcgtgacccagttggaacctggccttgtttcggcttaattttatctcttacatgacgtaaagcgctttggtcaaacacccaaaacatactggccttgtacctgggtggcgttgggttccactcaggggatcacacacagtgtccaactgggcttgtacaacatgggtcgccttcgagatagggtagagttggcgataagttatgtctgctcgtgtactgcagcttatacgccacacacttacagtcgcatgtgcacatcacgttccagtgcccacacgccaatcaacaacagttctaacaatctccccaacatgcctgccccaacaagattacaacacctctcaactaaaaacccaggttaaaaacttctcctggccctaagcggctccactattgaacaacaaacactgacattgatacacctaaacctatgtgaccaagatcttatcaccagcgggaacttatctcaccctcactcccgtggacaacctacttgttgaacaacgtgatacattcacagcgacttcacaatatctgaacacatcgccacatcgtcacacgcattatgtaccacaccacactgtgccccgtgttgctccacatttccctggcggcatctaccacctacttgttttctacagcttactaaccaaacaaaagaccacaaaagtcacagggtgtcaaatatcaggcgcgccattaccgttgtaaccgcccacactcgttaacaaccttcatctgcccaaggctaacacaacgagtacatatgcgtgagaatccaacaattcattcaacacaaacgattccctcttccaaccac

SEQ ID NO: 703151 - DNA, 293 bp, Homo sapiens
gattaccggagcttacgtgcaaagtcatgatgacggtgacttctaaacacagattttcaatgtagatgaaatggccttctattggaagcagatgccatctaggactttcatagctgaagaggagaagtcaatgtctggtgtcaaaggacaggctgactcttgtgttacgggctcatgctgctagcaagtttaagttaaagccaatgctcatttaccatcctagggcccttaagaatcatgctaaacctactctgcctgtgctctacaaatggaacaacaaagcctggatggta

SEQ ID NO: 703152 - DNA, 208 bp, Homo sapiens
gtgtattctgtacccctgtgaatggagggggcatgtaggaacaggcttggggatctcagagaatgggacagcccctccgactgcttgttcttgcggaccctggaggccagccctgagtggccatctccaaacacctccctgcactcccgtccttggccgttggcttgagcactcgaagtgtagccaaatggcacttgatcctggttct

SEQ ID NO: 703153 - DNA, 1348 bp, Homo sapiens
  misc_feature (67)..(67): n is a, c, g, or t
  misc_feature (104)..(104): n is a, c, g, or t
  misc_feature (140)..(140): n is a, c, g, or t
  misc_feature (228)..(228): n is a, c, g, or t
  misc_feature (306)..(306): n is a, c, g, or t
  misc_feature (472)..(472): n is a, c, g, or t
  misc_feature (901)..(901): n is a, c, g, or t
  misc_feature (1058)..(1058): n is a, c, g, or t
  misc_feature (1116)..(1116): n is a, c, g, or t
  misc_feature (1201)..(1201): n is a, c, g, or t
  misc_feature (1213)..(1213): n is a, c, g, or t
cgctacgaatcgagtcgtattgcatatttattatgtcgacgacgcacagaacacagagccttcggangcgcaaaacggtgaggttctatcttcctcaagagatngcagtataagacatcataatactagtcccacacatntatatcatatagcaatacctagttaatcataatgcggcctgcgctagtcgatagcctaatgtgtctcgtagaatcctgacgtagtcantgatatgcatcatgtactatgttgtatcaatttccactcgtacgatgaagtagagacatcatgatcgccggatctaanatatatatcgcagatacctactcgtgtgtgcgcagtcgttgaccgaccatcgcaaacatagccatcaacagttgtattcagtagagaactcaatacctagtggattgcatcacaccatggtcctttatttattgaattcgagcaacatcattcatagagcagaaangtcgttgagtagcgtcgtgaccatatgcggtaacgtactagttgatatcaacgctactctctccacgtacgtgcgcagtgtgttagctgacaaccagtcttaacgaattctacacacacgcgatggtcatgcgcgcctaacattatcgcctttgtgtgtcggctattatatactattatcctccgtagaatcgagcactgttctacatcgccgaatgataatctctaccgaatcaagcccatatctataccgacattattaccacctcagcaatatattaaatgcacgcgctatcatgatacccgatgtctcgttctgcagtagccgtattcaccaacgcacgagcgtttacatactccgtccctccaccaatacgagtagccttcctccgtgtcatcacgttatggtcaacaactacagctagtgcantatagtcgtgtgcagatagtgtctattgcactccaccgcataactactcaacaccctacatcagagcaccgacaattctgtacatatgcatccgtgttgcaatatacacgcgttgacccatgtgcgagtatgatctagggcagtaatgagttcaccntagcaacgaacgcgcatctacccatccgcacgactccgcgcgcgcagacatttacganctactacataaatagtcttgcccgtgatatcgcagtttgctgctgtcggacccaccgagatctactgttaccacgctactcactngctcgctcttanaccgcaattcctccgcgcattagtggtgtaatgagcatatcgtaatgagattgcctgacttataaggcgtagattctgggagacatgaaaaacgtgacagtagtggagagactgaatagaggaaccacaaccacg

SEQ ID NO: 703154 - DNA, 1133 bp, Homo sapiens
ggcacagaagaatgttctgtcgtctctcgcagtttacgcggcaagattcagagcccgagctctgatggcgaggctggaatcgaggcggctgggcagcgcggctgaggcagaaaggcggattggtactctgatgcctatggggaggactgactctttcatcatcctaggggcgtgactgaacgcactggcttactgcacacgaacgacagcacagactgcagacacacgtagcacacgctcgcgccaacgcactgcaccgatctccacgagcacctgacaaaccccctgcagcgcctgactgaccccacaaaggactaactaccacgcacacgccaggacaaaaggcgacacgaccccaccagcgcaaccctcgctggcccctcacctctcttcctcgaacacgcacgctctccggcaaccacctgctccgacctgcactgcaacactcacacgcactacccggcccaggaaccccccccctggccaacgcaatgcatctcacagacgtccacttgtgacaaaggaagcacaggaactcgcacgcaccggcgtactctactgcacaccgcacacccgccactacaacgggcacgcgcgcacacctgcgcacctcactgcacacccatacccacctctcagtcccgacacacgggaacacgcacaaacggcagcactcctatccagcgaacaccggcccgctcaagccccgactccctaagccgcaagcccaacacgccctcgccactcccccaccgcactctcccatgggtgacccccactcttgggacccggcacgcgccttgttgcagccaaccgctaaaccccttaaccgccaagacgagcggcaacttgacgttgacttaccgtcgccaactaccacaccccaaacttggggcaccctaggcggactcccttagcaacgccggaaaccattcccccgcttaaaccattaacgctggcaacgcgcggccagacttacagagcccgccaacaccgcgcgggcccgcccccagagccaatcaacccacgtacccggacccgcacaccctggcggcaagcccaaaaaaaccgtatacggggaacacaaacccagccgcgcccacaacgacaacacgaaccgcgacaaacgcccg

SEQ ID NO: 703155 - DNA, 883 bp, Homo sapiens
  misc_feature (391)..(391): n is a, c, g, or t
  misc_feature (414)..(414): n is a, c, g, or t
cttaacttcacaaacattggtcacttggagggccccttccacactcctacgcaataatattatctggggttcgtggttcaacatcttcttcacttgacagggcatcagacaccccattacccaaacgcctaaaaggctcccctagggcacattttctccatctggaaaattttggctttctctcctggtttggccacattcctaatctccgggtcggacattggtctctctccttaatggatagggatgggacaccaaacttggggtccattggtccaggtttccaggtcccctttgagttagcactatatacacttttacatccttgttaacgttccctggttgggcacaaaggaatatggtctctccacaagaaaccaagcaaggtaantaggggtatcacgacattccaanaaggtttactaattaccatctggaactttactcacgaaggaagttactttccacattttcgtcgggctcccactcaacactttacaggattttcggtaagttttcctacttcttacgatttccattggtttcctggatgggtctggttatctggagagtagacaccatttgaccgtgggaagttccccagaataggctaaagggccacggtcccagtaattcacttatgttcaccattagggtttctcccattttagacaatgggcaaaaccgggtggaaaaaggagaacaggccaacaaaattcttaaggggtaccggaacccccatggtgaccggtaaattaaccgaaaagcctcgagtcagatgccgggatcggtggttggagtggccccttaaatacgccacgtgtgtgcccaccatggggagaaccccaggtatggggggaacccccgtagactaagcgtcggt

SEQ ID NO: 703156 - DNA, 484 bp, Homo sapiens
agaatccataggttcctccacattgccctggaacctgtgggtagaggtgaccctgacgatgaaagtggccagtggtagcacaggcgcacagaaggttcagatttcatactacgggaccaagactccctacagtacaaagctctactctacctataccggggtcggtacatctccttgttgcgcagacatcaaccgcaccgggccacagtgaagccaacaccagagctgtgaaaagatcagaggacctggaacctggggccctctgttgcccagggtgaccatcctgctgtgtgaaactgtgacaagatgacaatctcgaatctatcttgccattggaactgcgaggatgatgaggtgcttgacagagaagacctgcaggacatgtcgctgatagacctgagcacgaaaaaccccaaggccttcttcacaaaccatacactggtgctccacgtggccaggtctgcgatggacaaagtgagggtgt

SEQ ID NO: 703157 - DNA, 789 bp, Homo sapiens
  misc_feature (43)..(43): n is a, c, g, or t
  misc_feature (83)..(83): n is a, c, g, or t
  misc_feature (94)..(95): n is a, c, g, or t
  misc_feature (105)..(105): n is a, c, g, or t
  misc_feature (149)..(149): n is a, c, g, or t
  misc_feature (172)..(172): n is a, c, g, or t
  misc_feature (180)..(180): n is a, c, g, or t
  misc_feature (200)..(200): n is a, c, g, or t
  misc_feature (203)..(203): n is a, c, g, or t
  misc_feature (213)..(213): n is a, c, g, or t
  misc_feature (226)..(226): n is a, c, g, or t
  misc_feature (231)..(231): n is a, c, g, or t
  misc_feature (244)..(244): n is a, c, g, or t
  misc_feature (254)..(254): n is a, c, g, or t
  misc_feature (257)..(257): n is a, c, g, or t
  misc_feature (272)..(272): n is a, c, g, or t
  misc_feature (274)..(274): n is a, c, g, or t
  misc_feature (279)..(279): n is a, c, g, or t
  misc_feature (281)..(283): n is a, c, g, or t
  misc_feature (289)..(289): n is a, c, g, or t
  misc_feature (291)..(291): n is a, c, g, or t
  misc_feature (293)..(293): n is a, c, g, or t
  misc_feature (296)..(296): n is a, c, g, or t
  misc_feature (300)..(302): n is a, c, g, or t
  misc_feature (304)..(304): n is a, c, g, or t
  misc_feature (306)..(307): n is a, c, g, or t
  misc_feature (312)..(312): n is a, c, g, or t
  misc_feature (315)..(315): n is a, c, g, or t
  misc_feature (317)..(317): n is a, c, g, or t
  misc_feature (319)..(319): n is a, c, g, or t
  misc_feature (321)..(322): n is a, c, g, or t
  misc_feature (324)..(324): n is a, c, g, or t
  misc_feature (335)..(336): n is a, c, g, or t
  misc_feature (338)..(344): n is a, c, g, or t
  misc_feature (349)..(351): n is a, c, g, or t
  misc_feature (355)..(355): n is a, c, g, or t
  misc_feature (357)..(357): n is a, c, g, or t
  misc_feature (360)..(361): n is a, c, g, or t
  misc_feature (363)..(364): n is a, c, g, or t
  misc_feature (378)..(378): n is a, c, g, or t
  misc_feature (382)..(382): n is a, c, g, or t
  misc_feature (392)..(392): n is a, c, g, or t
  misc_feature (395)..(398): n is a, c, g, or t
  misc_feature (405)..(405): n is a, c, g, or t
  misc_feature (409)..(412): n is a, c, g, or t
  misc_feature (418)..(419): n is a, c, g, or t
  misc_feature (427)..(427): n is a, c, g, or t
  misc_feature (432)..(432): n is a, c, g, or t
  misc_feature (434)..(434): n is a, c, g, or t
  misc_feature (436)..(436): n is a, c, g, or t
  misc_feature (438)..(438): n is a, c, g, or t
  misc_feature (448)..(448): n is a, c, g, or t
  misc_feature (470)..(470): n is a, c, g, or t
  misc_feature (472)..(472): n is a, c, g, or t
  misc_feature (514)..(514): n is a, c, g, or t
  misc_feature (528)..(528): n is a, c, g, or t
  misc_feature (548)..(548): n is a, c, g, or t
  misc_feature (604)..(604): n is a, c, g, or t
  misc_feature (607)..(607): n is a, c, g, or t
  misc_feature (618)..(618): n is a, c, g, or t
  misc_feature (631)..(631): n is a, c, g, or t
  misc_feature (634)..(635): n is a, c, g, or t
  misc_feature (639)..(639): n is a, c, g, or t
  misc_feature (682)..(682): n is a, c, g, or t
  misc_feature (760)..(760): n is a, c, g, or t
tagttaacatatgccacccaatgacgggacacaatctggtcanacgctgcctctcctgcctgttgctgttctttacaaaggtncgtgtgttggnntggcaaagtngcatcctgctggcatctctgtggtggccccggaatggtggagtncccaggtcagcatctactctggntcccattntcaactgctctggccttganatnagattttctngtttcctgctggntcttntgcacactggatntatgctaatntangttcaaattaggtananacctnannnacattnanancanaatnnncncnntcctnatntnancnntnctcacacacannannnnnnnaagcnnnagangngannannacaccatacacaanctcnatttttacanatnnnncctctcncacnnnnatatcnntcctctcncacananancncccctatctncacccctccaccccacacttcntnccacaccacacaccccaccccacctctccccatctccctacntctcacaccacacntatcaccctccatccccaanctctcccacatcctcctacattcttcacaactcaacactacacacacctccccacnatnccctctcccanttcattcacacgntgnnttanatacagctagagagaagtggagatatgcttttttgagggaggnctttcctggtgtttggataacagtgagacagactctgggttcggcatgctctggggaggacatgcgacggtgagagantccctactgctacactctgtacagggtgg

SEQ ID NO: 703158 - DNA, 191 bp, Homo sapiens
gacatcatacagtcgctacccttaggcccgaatgcgaagagccgggcgtaggacacgggccatacggagactagctgaagggctttgagaattcttactactatcctacagtgatagactcgagctttctcctatacttatagacgttccggacgggcatataccgagtccggtcaagcttgggtaggcca

SEQ ID NO: 703159 - DNA, 795 bp, Homo sapiens
cgcggtggctcacgcctgtaatcccagcactttgggaggccgaggcgggcggatcacgaggtcaggagatcgagaccatcccggctaaaaacggtgaaaccccgtctctactaaaaatacaaaaaattagccgggcgtagtggcgggcgcctgtagtcccagctacttgggaggctgaggcaggagaatggcatgaacccaggaggcggagcttgcagtgagccgagatcgcgccactgcactccagcctgggcgacagagcgagactccgtctcaaaaaacaaaaaaaaactctcacggggcagtatgggtgctccctcagactttcaaaattaaaaaccagatgcagcatcatttatcgaggatggcttcccacaaaactcattttctaaagtagcaacggccaacagaaacctcaacacttttacagggagaaacgagcttctggaatttataccatagaccaccgagcccaacggtcatagaagaacatttcttttgccaacttgcgaactctggcacaacttccatcttcgggaggggcactaccggacctaagctcccatatatctgcatccgtatcctgggaatttccaccctctgaaaaaaggcctacagaacacactaccttttggtcctacccattaagcttggtcccggaaattcatggggactacacatttctggggaatttcctttggtcattggggacatgatagatatcgccaatctgcgcttgaatcatccgtcctgatcaatgacacgggcattctggctcaaaggcagtcaaagtcg

SEQ ID NO: 703160 - DNA, 823 bp, Homo sapiens
aaaagagaaagagtattctgaagataaaccttatcagtctgagtcctgtcagaatcagagtatagtgaggaggtgcgagcaaaaaagaagaaaagcaggaagaacgagagaaagcaacagaaaaagacaaagaaagaaaaagaagcataagaaacagcagtcacagaagaagaaaaagaaggctgctagttcaagtccggactcgaccataacattaagaaaaatcaggattgcccttataaacgagaagtcgcaatgtcggaggaaattgcagactgtggaaaactacagagcatatgttactaagaatgcatgaatttgtcttgtgtataggaatgattgcctggactattcagtaggccacgtcacgatgccacgtgtgtgaaagggccataaatgttgcctgctgcttgaagcatctatttctgttctcttccagtgcttgataactctgggagataatacagctgcagtacgtactagtggttgaagatatctgggaataaaattaatacttttgactagaagcgtctaaggataaaccaacagaaatggaatcgggatacatctttaagatgtaatcagaaatgaccagatgactctagttagacatttcgaaggagggattaacattaatatttcaaaaaccttactctgtagataagtgtatacgaatgtctgcccctcgtatactctcatttacctggggaaggagctttgacgggctggggggtggaaagctagctcttagctagcagaaaagtgtgcctttgatcctcacagatcctgttatcatggacacagtagccatgctatcacgggg

SEQ ID NO: 703161 - DNA, 308 bp, Homo sapiens
tatctgtatcactgagcgcagtgggcatgatcatgtcagaggtgtgtgacaccagacactccatcttaaataggagccgggaaaaatgaggctgaaactactgggctgcattccctgatggttaaggcattctaagtcacaggatgacatagaaggtcagcacaaaataccagtcataaagaccttgcttgataaaacaggttgcagtgaaggagctggccaaaacccaccaaaaccaaaatagagacaagaccagcctagccgtaaatggtcgcaaccccacctctactagaaatataaaaattatg

SEQ ID NO: 703162 - DNA, 252 bp, Homo sapiens
ccgcgttactcgcatgcggaagcatgcacaggtgttgttcagtgcgaataggggatcgtccgccccctgcttgagctcgccgccgcccgtgttcgagcccttccggctaaggaattgaacgtgattcgctttgggaaagtgtctcttcacaatggccgcgtaagccggatgcgagtccgagcggatctgcgcctcttcgtgcacgagatccctaagagtatgaaacaggcggtttcttccttcttgtctcgt

SEQ ID NO: 703163 - DNA, 397 bp, Homo sapiens
tcttttccaagcccggcgtctctttcgtctgcacgactgtctagcatgctctgcagtcgctattgttagccttcagccattctctctgcggcgtcacctcgcttgtggtcttagttgcatttccccagtggtgggtgattccgaatctctttccaggtgcgtgtgtccatttgcatgttgtcgtgtgtgaaatgtctcttgagatctcttgcccgtttttaaattgttctctactgctgagttttgtttttttttttattgtgggaaaacatgcataacatgaaacttaccattttagccattttaaagtatgaagtgatacttagtacggtcacggaattatacaaccagcaccgctgtttagttccagaactttttactcccttgtggaaaatta

SEQ ID NO: 703164 - DNA, 416 bp, Homo sapiens
  misc_feature (27)..(27): n is a, c, g, or t
ctttttccaaggtgcccacgccacccntatgtcacgcctgaagtagttattgagaaagtcgtccctttccccttttctataaccaaatagacaggaatggaagattctcctcggggcctgaaagcttgcgggatgaataactcctcctcctcaggcccagtcccaaggtacaaacttgcaccagcagcaagatagcagaggcaggaagagagctggctggaagacacgtaccccctgaagatcaagagggaggtcgccctggtactacatagcagtcacgttaggctgggacaattcctgtttacagaggactataaaacccctgccccatcctcacttggggctgatgccattttaggcctcagcctgtctgcatgcaggcgctcattaaaacagcatgttgctccacaaaaaaa

SEQ ID NO: 703165 - DNA, 172 bp, Homo sapiens
aggaacgacggcaagcctctaacccgattgggagcagcatgggccccgcctcactggatcagaagtgcagcagataccctgctgcatccggaggggtgtaagtcagtggtggtgtctgcaacaacagcaatcatcaatggtcagatggacgcagcgaaagcatcagtacgaa

SEQ ID NO: 703166 - DNA, 752 bp, Homo sapiens
gtctgtttggagaagccgaaataccgttgcccgacttgccgcgtgccctactgttcggtcccctgttttcagaagcacaaagagcagtgcagctctgaagcccgacctgttgagaagagaagagcagggcctcctgtgaggtctgaggagagcaaagatgatgactcctccgtagctgatttcctcaacagtgatgaggaagaagacagagtgtctctgcagaatttaaagaatctaggtgaatcggaaactttaagaagcttgctgctgaacccacacctgaggcagttgatgattagcctcgatcagggtgacaacaaagcaaagctgatgcgagcctgtatgcaggagccccttttcgtggagtttgcagactgctgtttaggaatcgtggaaccatcccagaagagggattcctaagactggatgtgttctctgctcaagttacctgctgctgctccaagaggtggctgttttcaaggccaccatacgcagcatgcacacgtgggtcttcctctaccacatggctcgctgcagcaacttcatgaagaggaaacttgtagccctggagtgatggctcagcagttaggagcattgactgcttttccagaggaccccagttttcagcacctatttgactacttacaactgtaattggttgcagaggatctgacagtctttactgtatgcatgtgcatagccaatatgtacaggggaaaactcctacatacattaaatacttaaaacaaaag

SEQ ID NO: 703167 - DNA, 123 bp, Homo sapiens
gaatcacaagcccagcaacaccaaggtggacaaaagagttgagctcaaaaccccacttggtgacacaactcacacatgccactgcactccagcctggatgacagagccagactccatctcata

SEQ ID NO: 703168 - DNA, 534 bp, Homo sapiens
tgcaactcttgagtaccagacagaagcaatcgaatggctgggaaggtgtgaacgtgagggtgaaagtcatggagcccatcccacattcctgttgccaagcaggcctcctggctctccctcatggttgcctcacagggctgtggtcgctggtagctgttctctatcccagtgcttgtgttttatttccttgagtattaagtgtaaggatttcctattggaacgaagtttgtggtactcaatagagtcgtgtgcggactcccgtgtgcgcaggcgccgttccactctgcgcctgcctgggctgtctgagtagggatgggccctccctccgcggactcgcaccctccccggtgtggcctctcttctttcctggctgtgtcctttcctgggagagctctcgtacctcactgtggagtcctgactctcctcctctcgggcggcctctcatctctcctggctgtgtcccttcctgggagcacctgtgtgcccggccgtcccatgtgggaggtggagtcctgactcagcctctccctggga

SEQ ID NO: 703169 - DNA, 177 bp, Homo sapiens
ggcctgatatgggcacagaaattatatctcaatttggcgggtggggtgagtgtaacagctttattgagatataattcctgtaccatacaattcacttaaagtgtacaagtcagtggtttttagtttattcacaaaattgtgcaactatcacctgataaattttagaactttctcttt

SEQ ID NO: 703170 - DNA, 94 bp, Homo sapiens
  misc_feature (3)..(3): n is a, c, g, or t
  misc_feature (66)..(66): n is a, c, g, or t
ganaaaaactgggcttgtcattttttcccttgtagctttaagcagagacataagtgccttgcattnggttttggagatttagtacaaaaaaaaa

SEQ ID NO: 703171 - DNA, 201 bp, Homo sapiens
tcagtcgcgtatcgtgcgatacgggtgtccgcactatgtatcggcatacaatatagctagacctacccgggagcgggggaccaccatggttgcctacaggaggggtagaaccggcccatggtctggaacacggagcatggtcaaaacctccctgtgccgatacagtaagtagggactcgcgcctagtaatagatgcacatc

SEQ ID NO: 703172 - DNA, 235 bp, Homo sapiens
tcgagcggcgccctcgcgagccctggctggccggcggcgtcgcctggtgtgcgcgtctggatccgctggtggcccggcttttcgaccccttctccaagggcctcgccatgtaagctgtaactcttcgctcccctcgccgtgccaggagctcccgcccccaagggacgcccctccaccatcccgcgcaccgatgactggggctggaggggcggcggggcgggaatattttcctccc

SEQ ID NO: 703173 - DNA, 629 bp, Homo sapiens
agaactggaatacttgctccatgcatagtcatggacctgtacatttgtcttaaaggaaatccatcaagaaacaatcttggaatcttccgcagtgtcaatagcacgtccagccattccaccatcaccacgaactccagggttgtctgaatcatagccactatgtgtcgccagatcaaagtcatctgataatccctgctgaccagcgcttaatgttgtcataatagaacttagtgctttcttcctcagtactagagccagcatactgacggatggtccagggcctaaaggtatacatggtaggatatggtccacgtgtgaatggcttcactcctgtaagttcttcaggtaagtccatagtatctctcttgcaatacaagggatttatagagatcctagccagggcagaccattctgggtcaatggtctgttgcgggtgtataagtagttgctgtatgagcctggagcctgatgattcttcaacctgcctcaggtaatcaggtgaaagtaaagaaagctgattcttagctcttaacatggtggagcatgcacacacccaatagaaataagaaccggctggtaggcctgttttggactccgctgtgggagagggcggctgcaattctgcgtcc

SEQ ID NO: 703174 - DNA, 288 bp, Homo sapiens
tcatggcgtcactagcagccttccactcctggtctcaatcaaatcctcctactttaacctcccaagtagatggggactacaggcatgcaccactatagccagctaatttttgtattttttgtatttttgtaatgtcgtatttttctgtctccgaaaaaattggaatagtttatgctgtacagcataaactattgccaagcatgataatgatttactttatacttcctttcattctcccagaattgctcttagagctagggtgtcgtctttagcatgttgtcgctaatg

SEQ ID NO: 703175 - DNA, 666 bp, Homo sapiens
tgttagaatgctgctggaggattccgggatctcacaggctggatttcagagtcctgaattttagacttttcaaggacatgtgcccatctggggttcaggcataatagtctatattaactgatggtgactgtgtgcatgtcaccataacatgttacattattaactcacttaagggactccatgaggcaggtactgctatcttcactttacagaggacattgagcacaggcaagtaacttgcccatggtcacaaacctggaaatagcagagcagctgggatatgcacccagagtctgtgtacttagccacagtgcagtcctgcttaactgcagaacaaaattatgtgtgtgagctctgatggcaaggcaagctggctgggtttagatcctggctcctctactctggggcagaatggttgatcaagttacctactgtgcttcattttcctcctctgtaaaaggggcataataactgtgcctcctaggtttggagctgtctttgagcctagcctttctttgttcccctgtacccttgacattctgtgcaccatccaggcctgcttttaatgagcttctcccattccccaccatgactctggtaaattaatatctgtgcagcatgtgaatgactgatagcaactaactcaatttccttgcatcctaaccc

SEQ ID NO: 703176 - DNA, 550 bp, Homo sapiens
  misc_feature (508)..(508): n is a, c, g, or t
acatattctaattttgttttttcatttgttgttttttgagacggtgtctcgctcagtcgcccaggctggcgggcagtggcacgatctcggctcgctgtaacctccacctcccgggttcaaacgattctcgtgcctcagtctcccaagtggttgggattacgggcgcatgctaccacgcccagctaatttttgtatttttagtggagatggggttttgccatgttggccaggctagtatttgtcagtccaagcagttcattaaaaaaaaaaaaaacaaaaagagcaagaatataaatactggcatcttccagcctacttttacaaggggttcactctggggtccttaaagcttaaggggttacccttaggatttaattttaaattttattttttaactttatgtttttttagagacggggtctggccctggtcacctagtctagagtgcaggggtacgatagctcacggcagcctcaactcctgggtcaagcgatcctcccacctcagnctcctgagtaggcaggattataggcacgtgccaccaatgccg

SEQ ID NO: 703177 - DNA, 221 bp, Homo sapiens
tctaaatgggcacagaaatccttgttcgagagccttctggttatactttaaaaagaagggagcctagcatcttgggaggccgaggcaggtggattgcctgagctcaggagttcaagaccagcctgggcaacatagaccttatctctatagaattaaaaaaaaaaaggaaatcagcagcccagccaaagactacttatttgtaatttctgtgcccatttcag

SEQ ID NO: 703178 - DNA, 133 bp, Homo sapiens
ctgaggtgatctagaggatccctgcctcagaagactgtctttcatcgtgttcctcgtgagctggtcccagatatcagtttagagctgcctctcctgggcagctgctcccctcctctgctaggaatccacgcgt

SEQ ID NO: 703179 - DNA, 295 bp, Homo sapiens
gctaagggatacattggtgtagatgtccagaatttctacaattcatgatattcttcatagtcaaggaactaactctgcagtacgagaaactgcaacagaagttggaagaggatgtgatttccataatttcacagtcattcacaagacagatgagtcatcaccacgtgttatcagccaaggcaagccttcatcaccccagtcatggcattttttcacgttcaccatcttttacgctgactcttacctcaccagacaacaacattctagatcatacacgatgaccatgaacgcagag

SEQ ID NO: 703180 - DNA, 776 bp, Homo sapiens
  misc_feature (11)..(11): n is a, c, g, or t
  misc_feature (98)..(98): n is a, c, g, or t
  misc_feature (102)..(102): n is a, c, g, or t
  misc_feature (136)..(136): n is a, c, g, or t
  misc_feature (183)..(183): n is a, c, g, or t
  misc_feature (203)..(204): n is a, c, g, or t
  misc_feature (232)..(232): n is a, c, g, or t
  misc_feature (242)..(242): n is a, c, g, or t
  misc_feature (304)..(304): n is a, c, g, or t
  misc_feature (328)..(328): n is a, c, g, or t
  misc_feature (333)..(333): n is a, c, g, or t
  misc_feature (403)..(403): n is a, c, g, or t
  misc_feature (412)..(412): n is a, c, g, or t
  misc_feature (414)..(414): n is a, c, g, or t
  misc_feature (422)..(422): n is a, c, g, or t
  misc_feature (454)..(454): n is a, c, g, or t
  misc_feature (476)..(476): n is a, c, g, or t
  misc_feature (491)..(491): n is a, c, g, or t
  misc_feature (508)..(508): n is a, c, g, or t
  misc_feature (510)..(512): n is a, c, g, or t
  misc_feature (525)..(525): n is a, c, g, or t
  misc_feature (538)..(539): n is a, c, g, or t
  misc_feature (548)..(549): n is a, c, g, or t
  misc_feature (556)..(556): n is a, c, g, or t
  misc_feature (573)..(573): n is a, c, g, or t
  misc_feature (575)..(575): n is a, c, g, or t
  misc_feature (615)..(615): n is a, c, g, or t
  misc_feature (619)..(620): n is a, c, g, or t
  misc_feature (636)..(636): n is a, c, g, or t
  misc_feature (657)..(657): n is a, c, g, or t
  misc_feature (682)..(682): n is a, c, g, or t
  misc_feature (699)..(699): n is a, c, g, or t
  misc_feature (752)..(752): n is a, c, g, or t
atttcccaagngttctgctgcatcagccagtgaggacaagagttcttcagggcggttcagctcaaggacacctaggcttccccagcggggggcttgcntgcnggtctgacaaaccacagagcgttgagcagatggnctgggactcccagacctggcagagggttttattagggcccgcctggnctgcaccgtttcatccaagnnccctgacccagcactcatcttccctggnattctctgtnatccaccagctcctctgcacacctcagcgtctacttccacgaacttctaaacatcaaaaggnacaatggccagggggggggcaggngagtngggggcagggcagccttcaaatccaaactattgaatccacacgatggaaagaagagaaagaaggggaaantctccaganancatgagangcatccaggcagtgttctcatgggagagggtngggaggccaaaaactaaaattnctatcagcccccgcngctgtctggtacgcgangnnnctttccgagggcnttacaagcatagnngcaaaaggnnagtaggnctgggactcttcaactntntcttctagggccaagtagactcggtgtaacttattttgtnaganntgggtatgggtgagangaggggcaccttccacccctncagcagagtggtaagactccagcgngggccctgtgcaagggntcagcccagaggccatgagccacagaaactcacagcacctggtggccacaccntgaaatgcacactttgctccaagc

SEQ ID NO: 703181 - DNA, 943 bp, Homo sapiens
ctctgctgccagggcgagtgccagtgcttgtctctggacctcatcaaggagatgcggcagttctgccagtccctgtgccccgtgtgtgctatgcctactgaaacctccatccctcgactctatcccagtctggcacagtatcaggcttcatgcttgtgcagctaggtaacccgagcacggaacttccaggtagtcctggtgcacgccgagtgacacgagctagaaaggtgcctgcatgaattcgcgtctgaatgttctacaattctcagaacgttgcgagacgggcggccctttggtccatggcctgagttttgcccgacaacggtccttaatgatgttgaggcgtgcatcccgaggctgccaacctacttgaattgcccacccccatgtgtacacttcgctagcctttgcgccagcactgtggggcctgcggtcggccccctcgcagacccgggctgggtatctttcttgctagtgtctcggcactagcaacccaatgtgtttatcattctccccagaaattgctgcccctggacttgcccggtgttggcttgtcctggcctgtggtgtctgtctcttctggagttcaggctccagggcgtgtaccaagtcgtgtaccggggtcacatgcatctctggcaatgcattgttgcctctctatatccccaatacgccgtggttattttatcgccatcctaccgttagcaaaccctaaacataaccattccttttttgacctattgcgctcttagtcagtagtactaccgacatcctagtgcgcgctgcccctccaggaccaggaacctggtactatgtgccccgaaaagagtggatgaatagagcttgattcatcaccaaacaccaggagcagcccgcttaagcatgccgagtgtcggtctagaggccaacaggcccagcatttacccccggtagagaacactca

SEQ ID NO: 703182 - DNA, 112 bp, Homo sapiens
gtgctctcagtgcaggagcccggggacaattctcaaaaagccaagtgaacttgtggacagaacccgcggggatggacccagcgataacccgggggtcctgctcttcgggtac

SEQ ID NO: 703183 - DNA, 1018 bp, Homo sapiens
tagccccaaacccactccactcttactaccagactaaccttagcgtaaaccattttactccaagattcatagtataggcgagtagaaatcgaaacctgtgcgcataatagatatagtaccgcacagggaaagatgaaaacttatgaccatagcataattgatagctagaggactgaaccccatataccgttctgcgataatgaagttaggctagagaagtagacctctgtgcgatggtaggaagccaaagactagagacaccccgaagaccagtagcgagctagcctataggaatcagcggtaaagagagcagcacccgtgctatgtaggcagaacattagtgggcaaggagtattatacggtaagaggtcgactgagactaccgagtccttggatgaatagtctcgtgttgtgcctaatgcatagaactcttgagtgtacaggactgttaaatgtgtgcccatcagcaatccctctaatactcgcccttgtgatagagttctaagcgtagttaggtccgaagaagaggtagacaggctctatgtgggaccagctagggaaatagaatccgatgtaagacgaggatgtgaagatgattctgatcgagcccatgagtagggcctaaaagaagcagccgacgcaatctaagaaaacgcggtaccaagggctcaactacccgatttacgctgaaataaatcccaataacatgataagctggaatcgtccttcacgaacccaagtgggatccaaatcggatgcagcccttattgagagactgaaccggaaagtggtgtcaaagtaattaaaggttaacccatggaaggaaaccatttctcccttccgggacattatagacccttggcggtcccgattttagacccatcatttgaaacctggtcaatgtgaaacaaggccccaattgaatcttatcaagtccaaccccaaatcaaggttcatttaatttagcccctcatatgggcaaaccccaacaacagggcgatgctcataaaggagaagg

SEQ ID NO: 703184 - DNA, 114 bp, Homo sapiens
ggggtgggggggattgttttttgtaaaaatgtcattaccagggcccataaatctgcctttatggtgcataagtgaaaatttagaaaattaaaagccattatctttccggggcca

SEQ ID NO: 703185 - DNA, 811 bp, Homo sapiens
gtcgctatgaaaagactgggctatgtcctatgctggtgcatgcgtcgtcggcctctgggcagcaggtttacaaaggaggaaaacgacttcttctagatttttttttcagtttcttctagtaaatcaaaacatctcaaaatggagacctaaaatccttaacgggacttagtctaatctcgggaggtagtatttgctgcatggcgtcaaacaaacttaagtattacactggtgtaataactatccacaagcaatgctaattttactaaacatgatcgcagttcatataaggtataccataatgagtttgcaatttgaatttgcactaatgtggcaaataacaggaaaagctgattctagactggggcactatggtcaacagccatttctcttcacgcagctcggccacggcagctctcctactggcacattctcccattatgtagaagtagaaatagtaccatgtgatcacgggcaaagattctaacaatgagtgacagactatcatggaacaaagagctcaataatcaatccacgtgcaaaatcacaacgcaaccctgcacgcatgaacagctcacgacacatcaccaatactcatacagtgaccacgaacacatcaagaacccaagcctccagcatatgtgccacaacataacgcacgaaagtaacacacgatacactgtgaatcgatcgcgtcaagcacactcatcccagacacataccaagggccccgagcatactcaaacacgtccacaaaggctcgcacaccatggcgaagaaaccgcaacacatgatagagcatacaaatgataga

SEQ ID NO: 703186 - DNA, 130 bp, Homo sapiens
atcagagtccccagcatgagagaatctgctctgtagaccacatccagtgtgatttgtgtctgagatcacaccccagtagcaggttacgccatgtcaccgagcccatttgatccagaggtcttagtcctgg

SEQ ID NO: 703187 - DNA, 86 bp, Homo sapiens
  misc_feature (39)..(40): n is a, c, g, or t
gaaggtcattactatggttcggggagttattataagaannctactttgactactggggccagggaaccctggtcaccgtctcctca

SEQ ID NO: 703188 - DNA, 299 bp, Homo sapiens
gcaaaataattttgcgatgtaaagaaattcatacgcaatccaagagtcaagagagtgattaccagcccaattaagacaaaatgtggaccaagcagattgcagagtacaataaaaccatcgtggagtgcccttacatagcaccacgcggaaacgtgagtttaagtccactggaagtctctaaggaagtatcctcttgctgctaaaacattgggacaaggttgactaccagaaaaaaaataaagcttacttttggagtttacctaaaatttctgaatgttataattcttgggggcctcttt

SEQ ID NO: 703189 - DNA, 160 bp, Homo sapiens
  misc_feature (147)..(147): n is a, c, g, or t
gaggtcatctagaggatcccggtggttcttgcagaatctgtgaccttacccccaaccctgtgctctctgaaacatgtgctgtgtccactcaggttaaatggattaaaaacgggggggcaggtggccaaagaatggttggcctttttnttttttcccccca

SEQ ID NO: 703190 - DNA, 105 bp, Homo sapiens
acggccgtgtattactgtgccagaggctactatgatagtagtggttattttgcggggtactactttgactactggggccagggaaccctggtcaccgtctcctca

SEQ ID NO: 703191 - DNA, 175 bp, Homo sapiens
tttggggggggccccccccccccccttttttcccccccggggggggcccccccattttttggggggggtccccccgggttttttggcccccccttttttaaaaatggggttttttggggggtttttttttttaaagtgtgggggaaaaaagggttttaaaaaggagggcccatta

SEQ ID NO: 703192 - DNA, 102 bp, Homo sapiens
acggccgtgtattactgtgcgagaggggggagttattactatgatagtagtggcccctactttgactactggggccagggaaccctggtcaccgtctcctca

SEQ ID NO: 703193 - DNA, 149 bp, Homo sapiens
cttattatatcctgagacagaactcctgatctactaggctgtggaagagtcctataactgtggccccctgttagggccccccctttttcagttctccaatgacccagacacctttggcttaagacataaccatgcagaatccccaatcc

SEQ ID NO: 703194 - DNA, 270 bp, Homo sapiens
ccccccccttttggtataattgtgtagccccctttctttgggcttgacacccgtcttgaataagagtgattagagctgcaaaatgtccctcttttggctattgaccatgtgggtcccggacaaaactctgtataagttgaaggaaaatgttcatgttcaaaaggacctgtttgccaagaccaccttttgagggtttggaaaactggtatttttttttttttcccaatgtgaaactgaagggccataaattattaaagattttctcttcca

SEQ ID NO: 703195 - DNA, 93 bp, Homo sapiens
acggccgtgtattactgtgcgagagaaggggacggtggtaacttgagctactttgactactggggccagggaaccctggtcaccgtctcctca

SEQ ID NO: 703196 - DNA, 90 bp, Homo sapiens
acggcggtgtattactgtgcgagggggtgccaacacctggtgaactactttgactactggggccagggaaccctggtcaccgtctcctca

SEQ ID NO: 703197 - DNA, 895 bp, Homo sapiens
acttcctcctgtaattccagcaacgcctccgctcttctatatagccccaattgtcctacccgcccttgcctaatttaacacaacaccccggatccccgctcctgttgaaccgccaccgaccaccaaataagttttggggagcaccctgtgcgcaccctttttcttttaacggccccccctctcaatactatcaaactgtttactactcggagcccaccaagcatctagagataccatcattctctattctcggggcgggaaaaataaataccccacccaattatctatatgggaagaacacatctttttggtaatgaaacaaggagcacacccactctgtcgcagggtcattaatttcactcctggcgcgaaacttacatccgccgcgagatttagatgccctcccccgatgacctctcgtgtgcggttatttcacccccccctctctccaagagagtgggcccccacttttgtcttgatggaccgccagcacaggtgtgtcttcacttcaataaacagattcacacttcttgagagggagaagaacacacacgttcagacagtaataattagtagaaaaaaaggagggcagttggtagacccgtctctacataagggaccccacatttatctcagcagtatgtttgattgatcaggggagaatatgttgtataaaacatgaaggaacgccctttagtgacaaaccatttgttgtcacttgcaccacccgcactcatacattcgctttcacgcctaactgtttttaccatgttgtgtttctcccttcttaatctctatcattttggcaggctttccactcacaaaacttgtttttataaaaaatgacatcccaaagctcccccccccacataacaaaaaaaacagaacataaaaa

SEQ ID NO: 703198 - DNA, 81 bp, Homo sapiens
ggggtttatactatggttcggggacttatccctcgctactttgactactggggccagggaaccctggtcaccgtctcctca

SEQ ID NO: 703199 - DNA, 127 bp, Homo sapiens
gaagcgcacgatgtgcgcgccaagaaccagttctccctaacctgaggtctgtgccagccgcgacacggccgtctacgtactgtgcgagagatcgtaaaatgggagatactgatggctggttcgaccc

SEQ ID NO: 703200 - DNA, 158 bp, Homo sapiens
gtatattgtgaatagggtgtctttcgtactgtgtgtttgtttgctttgtcaagatcagttggctttaaatatttggctttatttctgggttctctattctgttccattggtctttgtgcctatttttataccagtaccatgctgttttaatgactacg

SEQ ID NO: 703201 - DNA, 132 bp, Homo sapiens
gcaaacttcacgggtgcatacgtacttacaagcataagcaaaacttaacttggatcatttctggtaaatgcttatgttagaaataagacaaccccagaccaatcacaagcaagccaaacaacaacaacaaca

SEQ ID NO: 703202 - DNA, 268 bp, Homo sapiens
tcagtcgtctgcatcactcatggtagaatgtgcactggagtgagctgccagatgtgactcccagagtcatgcgaccctgaaaaaaattactcgacctctcagttttcattttcctttggttttttttttttttggaaagggagtctcgttttgtcacccaggtgggattgcaggggcccattttggcttcagggaaagctccgctttccaggttacaggccattctcgtgcctcagcctcgggaggggtgggaatggcaggcacccgg

SEQ ID NO: 703203 - DNA, 265 bp, Homo sapiens
agagaaccgactcttaagttgtagcgagtctttcgtcaggagcctgaactgcgcctgcagaaggtgtgtgtggcagccaagtgcaggatgtcaggctggcaaagagtcccggaactggctggcatcaatccggtactgctccaggtagggcaggctggggtcccgactggactggccattgtgctggctgcacccccagtactggatagccaggtgcttggcattaaaaccaaccatgtacaggtcctccagctcttccctggag

SEQ ID NO: 703204 - DNA, 402 bp, Homo sapiens
agaatgtcctatatctcatgataattttattgcacattgaaatcttaatattttggatatattgggttaaataaaatacattcatcaaattgattttatcccgatgtttaaaaactcccaggctgggtatggtggctcatgcttgtaatcccagcactttgggaggccaaggcaggcagatcacttgaggtcaggagttcgagaccagactgaccaacatggtgaaaccccgtctctactaaaattacaaaaattagccgggcttagtggtgcatgcctgtagtcccagctactccggagggtgaggcaggagaaatgcttgatcccggcaggtagaggttgcagtgagctgagattgccccactgcactccagcttgggcaatagagcaagactccatcac

SEQ ID NO: 703205 - DNA, 145 bp, Homo sapiens
gggggtgggggagaaaaccccgggcttttcccccgggtttcccccccatgtaaatgaacccctatgttggtttttacccccctccgggaaacagaacccaagttttggcccaaatgggagggaaaaaaagtgttttgcattttta

SEQ ID NO: 703206 - DNA, 1040 bp, Homo sapiens
  misc_feature (5)..(5): n is a, c, g, or t
  misc_feature (63)..(64): n is a, c, g, or t
  misc_feature (85)..(85): n is a, c, g, or t
  misc_feature (99)..(99): n is a, c, g, or t
  misc_feature (109)..(109): n is a, c, g, or t
  misc_feature (111)..(111): n is a, c, g, or t
  misc_feature (113)..(113): n is a, c, g, or t
  misc_feature (118)..(118): n is a, c, g, or t
  misc_feature (127)..(127): n is a, c, g, or t
  misc_feature (131)..(131): n is a, c, g, or t
  misc_feature (141)..(141): n is a, c, g, or t
  misc_feature (162)..(162): n is a, c, g, or t
  misc_feature (165)..(165): n is a, c, g, or t
  misc_feature (171)..(171): n is a, c, g, or t
  misc_feature (183)..(183): n is a, c, g, or t
  misc_feature (185)..(185): n is a, c, g, or t
  misc_feature (198)..(198): n is a, c, g, or t
  misc_feature (335)..(336): n is a, c, g, or t
  misc_feature (339)..(339): n is a, c, g, or t
  misc_feature (342)..(342): n is a, c, g, or t
  misc_feature (350)..(350): n is a, c, g, or t
  misc_feature (359)..(359): n is a, c, g, or t
  misc_feature (373)..(373): n is a, c, g, or t
  misc_feature (378)..(378): n is a, c, g, or t
agaantcaaacagaagcacaaagcataatttataatgaacagattgaagaaaaataaagagcnncagaaagttcaggatatcaanagaagtcaagcaanacatcaatcntntnagagnaaatcatgnaggnaaagggaaanagttggaagagaaaatggtanagnagttanaagaggatgtgnanatggaagatgatnattaaaaatatatgtaaaaatttattttatgtaaatttgaaaatgaaatttggataattggaaatgataaattattttattttttaaataaggtaaattaaatgaaaagagattaaaagaaatatttaatgaattgnnatntanataatatnagatattanggatgttagattgnatctnagtgttaaatctttactgatagatgtacttaagtaaatcatgaaaattctacttgtaactatagaagtgaattgtggacgtaaaatggttgtgctatttggataatggcactaggcagcatttgtatagtaactaatggcaaaaattcatggctagtgatgtataaaataaaatattctttgcagtaaaatattccctttgttaatgttatagaaggggggatacaaaaaggaactaacaatttgtatggcagtgtcagatatttttattttagtatttcctgttttggtttatttgcatcttagaagagcataatgacattgtttgatgaagcctaattatgctggactgttttgacctggtttaacccttctgataggtagttgtggatgctggggatgagaactgaataatctttgcctggagtgacactacactctagaatttccactttggagaatactcagttccaacttgtgattcctgatagaacagactttacttttctagcccagcattgatctagaagcagaggaatcccagcgccttttaaaagttgttatgtggttttcttttaaaaagctcctgtttttggaaagtagaatttatgggtacaacgtatgttcattatttgtacataaaataaaaccatttaaaaagta

SEQ ID NO: 703207 - DNA, 335 bp, Homo sapiens
ttcattacgcaaatctttgtgaatgttgcactcttactgtatgatcttgaatatgttttacgataatgaatctacaaagttcatatgcagtgcattcattgtaaactataaatgacatttgtattacaaagaaagctgggtgatacacaaataggagagactctgacgagcaggcaatctgttgaggctcagtatatcttatttgctttgtagtctgctgtcattcctttcaaagagcacacagcacatgaggcatagtactcatctgtcttgttaacctctctaatttagaaatctgtagttcgtaatactggaccatttatcacaatctatca

SEQ ID NO: 703208 - DNA, 578 bp, Homo sapiens
gcataatgatgatgttggaaatgaaggccataagttatgcgtggagtgttttgaactggttaaccaaaacaggaaatactaaaataaaatattctttgcagtaaaatattccctttgttaatgttatagaaggggggatacaaaaaggaactaacaatttgtatggcagtgtcagatatttttattttagtatttcctgttttggtttatttgcatcttagaagagcataatgacattgtttgatgaagcctaattatgctggactgttttgacctggtttaacccttctgataggtagttgtggatgctggggatgagaactgaataatctttgcctggagtgacactacactctagaatttccactttggagaatactcagttccaacttgtgattcctgatagaacagactttacttttctagcccagcattgatctagaagcagaggaatcccagcgccttttaaaagttgttatgtggttttcttttaaaaagctcctgtttttggaaagtagaatttatgggtacaacgtatgttcattatttgtacataaaataaaaccatttaaaaagta

SEQ ID NO: 703209 - DNA, 1317 bp, Homo sapiens
gtgtttccttatttgaaagagtgagaatcatgtttccattgatagcagtttaatagacctctagtccattatatgtatattgatctccatcttagcccattggtgttggtctcttaagattggtggtttataaatcttgcgatgaattggtggtcttgattggtgaatccgtcatccaaattggtcgtgtattgcgccctaagatacgattcatgtactgctcttaagtgatgtctagagtaccggttgaggcggatttggataaatcgggagtgggggcgaatgcacctagtttgcttccgtcgcgctcgggtagtcgacacaacctatatatataagctagtggtgacagagtacaatttgaaaaccccggatactcacttgggttggctcgtaaataatactcgggggctaattgtaagtctttaaagagtacggacgcaaatagcacaggaggcgtccgaggcgcttccttaacattcacttgtaaactcaaaggtgattcttggacttgccagaaaatggagcgaaggtttgtaatcgggaattacgtggttatgcacactaaacacgctgtgttcaacttctcaacgcaccttgataccacaatctagctcggaactctttcacgtaccccgtgatttctccaataccaatttgcgacgaagccttatttttcccaattctattgtgagggttctagcacaatcccagggtgggcttccgaccaatatacccgtaattggcttactcggtaggaccctataaatttccgcgcggcaatcggtacacacggaacctccaccagtttcccttcagagctgtggtgaccctgtgcttcccagttggttattgacccccaagtaacccgttgtcactcctaggtatgcgccttataaaagttattggccgcaccgtgggtgtccctatggagggctctctaaagcccctgtccctacgtgttttggaatttccacacctgtgggtcgtggcgctaccgctaaggtggtgggaattctctcagtctatggcttgtggcgcccacgcggttttcaccatgtccatttgtccgtagttgtgcttccacgcaaccacggacgtctggctttgtgtggtttacccccgtgggcgttctaatatacttctgggagccacacctggtgctgtttcgcaacagaggttctcgttgccattgtccattgaatagggcgctcgctctgtgcaacgggcggttgtgacctccgcatggtcgcatatggtgcggcggttaacgccgcgtgttcaccactttagactatatatacgggtttctgtgcc

SEQ ID NO: 703210 - DNA, 333 bp, Homo sapiens
  misc_feature (233)..(233): n is a, c, g, or t
  misc_feature (247)..(247): n is a, c, g, or t
  misc_feature (262)..(262): n is a, c, g, or t
  misc_feature (284)..(284): n is a, c, g, or t
tggaagcaactcatggtgagtctatttattccggattcttacagtacctgtttattcatttgttcttctctgtcagtcatctgtgcagtacttccagagcccattcattccctgcccactgtggtccagctgagcctggggctgcagaataccaaacaccagtctcctttgctctcccatcagtttaagggaaagctggggtgacccccgcagcctgagtaagcatatgccanaggaaatgcctganggggccatgggaaanaaaaggccagcccacccccttnatggggatgcggcctttccctaatactgactgcctcatcttacattcag

SEQ ID NO: 703211 - DNA, 134 bp, Homo sapiens
atattgcccgctaagctgcgcaactctatcaccatccacacttctccatgatcattttctgatggacgtagggttcaccatgttagcggcaggtatatattgcggtgtgcggtagggactgccttgttcagcgc

SEQ ID NO: 703212 - DNA, 823 bp, Homo sapiens
aacccagcccatgacccctaacaggggccctctcagccctcctaatgacctccggcctagccatgctgatttcacttccactccataacgctcctcatactaggcctactaaccaacacactaaccatataccaatgatggcgcgatgtaacacgagaaagcacataccaaggccaccacacaccacctgtccaaaaaggccttcgattccggggaattaatccctaatttattaactctacgaaagagttttactctcgcgacgagtatttctgtgactcttactaacacctcgcagtagtagccctacataccccccaactgtaggagggagactggaccacaccaagcagtgccactcagcccgcctaacctccccatagcaagtcccacatcctaaacacatccgtacttactcgcatcaggagtatcactcaccttgagctcaccatagtctaatagaaaacaaccgaacccaaactaattcaagcactgcttattacaatgttcactggggtctctatattaccctcctacaagcctcagagtacttcgagtctcccttcaccattatccgacggcatctacggctcaaccatttcggtagccacaggcttccacggacttcacgtcacttattggctcactttcctcactatctgctacattcgccaactaatatttcaatttacatccaagcatcactttggattcgaagacgccggctgatactggcatacagtagatgtggtctagactattcctgaatgtctcatctatgatgacggtctacaacacagtataccacaacaaactacgacca

SEQ ID NO: 703213 - DNA, 965 bp, Homo sapiens
gatgacgaggatggtcaccatggtgtgccggatctgggattggctccaagagcgatatgagattgtggggaacctgggtgaaggcacctttggcaaggtggtggagtgcttggaccatgccagagggaagtctcaggttgccctgaagatcatccgcaacgtgggcaagtaccgggaggctgcccggctagaaatcaacgtgctcaaaaaaatcaaggagaaggacaaagaaaacaagttcctgtgtgtcttgatgtctgactggttcaacttccacggtcacatgtgcatcgcctttgagctcctgggcaagaacacctttgagttcctgaaggagaataacttccagccttaccccctaccacatgtccggcacatggcctaccagctctgccacgcccttagatttctgcatgagaatcagctgacccatacagacttgaaaccagagaacatcctgtttgtgaattctgagtttgaaaccctctacaatgagcacaagagctgtgaggagaagtcagtgaagaacaccagcatccgagtggctgactttggcagtgccacatttgaccatgagcaccacaccaccattgtggccacccgtcactatcgcccgcctgaggtgatccttgagctgggctgggcacagccctgtgacgtctggagcattggctgcattctctttgagtactaccggggcttcacactcttccagacccacgaaaaccgagagcacctggtgatgatggagaagatcctagggcccatcccatcacacatgatccaccgtaccaggaagcagaaatatttctacaaagggggcctagtttgggatgagaacagctctgacggccggtatgtgaaggagaactgcaaacctctgaagagttacatgctccaagactccctggagcacgtgcagctgtttgacctgacgagtgcccaggatgttagaatttgaccct

SEQ ID NO: 703214 - DNA, 421 bp, Homo sapiens
gaggggctccacgctgttcaattacacagagtttatagggtttatgggcaacttctgtgtgaactggtttccattgtggtcatcccgaattcaccagatcgagtatgttagtcaccccccactatatgtcttcgtacagctttgccacatagaacagtgtgctcatccagttgctcataggtagctcgtctggtttagctgttctaagatgtgcctgtcgttgccaaggcatcttcagttaaatcattatgcagaagcatatgcgggcaagctcttgacatttgaatgttgattacaatatttgggctcatcctggaggtacgactccaacagccacaggtttctactgctcatgcataggccgcatctcagaatcccataggtttaagattgtctggcagtaagatagagaagatttcgg

SEQ ID NO: 703215 - DNA, 460 bp, Homo sapiens
aaacagatggggattgtgaagaggatgaggaagaggaaaatgatgggagaaacacctaaatcttcacatgaaaaatcataatctgactaattttgggactgaatgaataagtacaagaggttggattttctatgttggctgattaccatattgaacacatggcatttgtagcattctctaaatctatctactgacatgtatttgacattcaggcagttatattcggtcctccattttatagatattggcactattattggtacagtttaagccattaatatgtttgatccattggataattcacagtaagtaggctcattcatttgacagttatcaaggtgtactctcacagttaattcacattatggcatttgtgatagttattggctctactgtagctaatcaaaatacttaaggcaggactcacatccatatgagttgcgcacagttcttaggtgaa

SEQ ID NO: 703216 - DNA, 1044 bp, Homo sapiens
taggctagtacgagccgggtgtgaatcggcaccgagggcgcaggagggttctcgttccccactgggcatctgaattctagctgtcctttcctgacagggcctggcagttgagcctcagcaggtttccttctctgctggctccctgcagatggcctcctggggtgaggttgggggtgggaggcacagagcagggactgttaaaaccttctttggacacttaagaagggttcctggcattttgtggtcactgataaacactgtggcaggtagaaatcaacgtgctcaaaaaaatcaaggagaaggacaaagaaaacaagttcctgtgtgtcttgatgtctgactggttcaacttccacggtcacatgtgcatcgcctttgagctcctgggcaagaacacctttgagttcctgaaggagaataacttccagccttaccccctaccacatgtccggcacatggcctaccagctctgccacgcccttagatttctgcatgagaatcagctgacccatacagacttgaaaccagagaacatcctgtttgtgaattctgagtttgaaaccctctacaatgagcacaagagctgtgaggagaagtcagtgaagaacaccagcatccgagtggctgactttggcagtgccacatttgaccatgagcaccacaccaccattgtggccacccgtcactatcgcccgcctgaggtgatccttgagctgggctgggcacagccctgtgacgtctggagcattggctgcattctctttgagtactaccggggcttcacactcttccagacccacgaaaaccgagagcacctggtgatgatggagaagatcctagggcccatcccatcacacatgatccaccgtaccaggaagcagaaatatttctacaaagggggcctagtttgggatgagaacagctctgacggccggtatgtgaaggagaactgcaaacctctgaagagttacatgctccaagactccctggagcacgtgcagctgtttgacctgacgagtgcccaggatgttagaatttgaccct

SEQ ID NO: 703217 - DNA, 917 bp, Homo sapiens
cagtgttgggctggaggtttggggaaggactgggcagctgctgatgagaacctctgtttccttcccgggtaccagagggaagtctcaggttgccctgaagatcatccgcaacgtgggcaagtaccgggaggctgcccggctagaaatcaacgtgctcaaaaaaatcaaggagaaggacaaagaaaacaagttcctgtgtgtcttgatgtctgactggttcaacttccacggtcacatgtgcatcgcctttgagctcctgggcaagaacacctttgagttcctgaaggagaataacttccagccttaccccctaccacatgtccggcacatggcctaccagctctgccacgcccttagatttctgcatgagaatcagctgacccatacagacttgaaaccagagaacatcctgtttgtgaattctgagtttgaaaccctctacaatgagcacaagagctgtgaggagaagtcagtgaagaacaccagcatccgagtggctgactttggcagtgccacatttgaccatgagcaccacaccaccattgtggccacccgtcactatcgcccgcctgaggtgatccttgagctgggctgggcacagccctgtgacgtctggagcattggctgcattctctttgagtactaccggggcttcacactcttccagacccacgaaaaccgagagcacctggtgatgatggagaagatcctagggcccatcccatcacacatgatccaccgtaccaggaagcagaaatatttctacaaagggggcctagtttgggatgagaacagctctgacggccggtatgtgaaggagaactgcaaacctctgaagagttacatgctccaagactccctggagcacgtgcagctgtttgacctgacgagtgcccaggatgttagaatttgaccct

SEQ ID NO: 703218 - DNA, 849 bp, Homo sapiens
  misc_feature (434)..(434): n is a, c, g, or t
gctcctcagaattgaagaggagctgggaagacaaggctaagtgttgccggcaggaacttcagaaagcccttggccaagtaagctgtgggcaggcaagcccttcggtcagcctgtatggctagcacagagccctcccctcgtgtcagtgtaccaggcagctcgaggcccccgaccaaacacttgcaggggtccctgacttagttaggcagccgccgcaccggccgtggagtgcgatgacacgcgtatctccattaggaacttctaccagaagccaaggggactacccgtggagccctgtgggcagtctctagactttgcaggtcgtgtaacttggccgcacagtgcatggttaattactcgtcctgccaactttccactctaatgtgtcattacgatgtcgaattagtgaggcactcgatgtcaatctcgcgggngtggacacaggctaaatcccccggatggattgtcttgttgctacaaagacataaataagcgctcgagatgatcgctcaatgacgaaaacaagaaacagaaaaagaaaagatagagacccaacacacataaaaatatagaaagtacatcccaaaaccaaaagacataacagatatagggcgcccgagtggaggcgcacgcggtagagaccatgacttgaacccccaaagggagggggtcccggacaaggcaggttggcccccaaatgcttgttgtgtcgctgctttaccgatggcagacgtcaccaccaaaggcgcgcagtgctcatgaatagtaagctcacacaatacatgggcttagcctagtcgtccacgattgcacgcgggcccgggctggacaaccattcgcggcaccagc

SEQ ID NO: 703219 - DNA, 341 bp, Homo sapiens
ttataccgggtgtcccatacttaatatggcgtcactctggtgagaatgcctctgacagtagtatggcatcaatgtgagttccgggtattagtacttgtagtatggttaagtacaggaaagctgaggtaaggatatatggaaactgtactatattcacaatttaactgtaagtctaaaattattacaaagtaagaagttttataaaatacaaaatagactagacagcagattagactcagctgaaaagagagtaagtgaacggaaagagaaaacagaaaaaataatcttgaattatctggagataacaaagagatgcagacataaggacaccggaaataagg

SEQ ID NO: 703220 - DNA, 154 bp, Homo sapiens
ccggaccgtacgtaacacctcatcttctcagctttacatctaacttcgcacaccagaaattaaatgatgggcttttaaaataaagtggttaccaataatttcctcattttttcagtgctattttatccaattttgggctttatatttttctatc

SEQ ID NO: 703221 - DNA, 1067 bp, Homo sapiens
cggtgttctgtttccaggcaaaggaaaataagtcaaagactcagaaggcagtcctgaatccaggtcccgggatgcaggggttcgcgtgggaacgccagccggtgcgatcgcgcccctgggattccgcattagcccgggcgtccatttccctgcaatggtggactcagtaacagccaggatctgtccaacagcctgcgagcggtgggatgtggaggcgtgactaatcaactagtgctctgtgtattatgttctaaccgcatccgcttgtatgctcgcatggctaatttaggttgagaaggtttaacagttgaactggagagcaaatagtcctgttctgtataattatcactccttgaggcattatgttactgttctttgccctaacaaggtgacggcatatgtttataagtaacaatgacgcaactcagtctactactatcttccaaattgtgtacattgaagggtaaaatgtgggaaaaggctaaatttgaatgctaaatgtgaagatttcacacaataataattgaaatgcgtgctttgcaatattatggcgtttcggaacagataaaaatacttcattgtcagacattgggtcaacagatacttcttggacgtggatatgcaaagcaaggcatgtaacatttccattactttgcaagtgtggttatcagtaaaagaatgtcgtttcacattctagccttcgtgtaactgtatggagttaccagattgggaagagaattagatagtactatgtacgggaaaagcatggaaactgggagttaagactatgtgagggaagggagagaacatggtcacgaagaggaacgcgaggaaacaaaccacgaaggtacgacgcgccccaaaaacacagccctccaaaacagaacgacaacggcggagcaaagaagaaccacctagggcagaacaccaacaaggatcacatagtggcgcaaacaaaaaaagaacaagagaggaagaacccccagaaaagagaaagacacagcaacaaacacacggaacagaccaacgagggacaacaccaaagcgccacgggcggcgcacaagag

SEQ ID NO: 703222 - DNA, 357 bp, Homo sapiens
ctaagtctacagggataccaggctctcctcaaccacccaatttgatttagaacctcaagcagcacctcactttcatgaaaacctaacacataaacacaacacttggttgtaagtgagccaacagcttcttgtctctttctctgctcaaggcttaaggccgtgtctccccaactacgttcagtggaagaaaagatcccctggacaaataagtttgaggactgtcattgcaggacttctcagaacctttaaaacacaaatcctcatccgcagggatcttcaggagggagacggctgatgcagcacaactttcttccacccgagcatcttgcagaatgcagtaagaaatcccaaaaaaaa

SEQ ID NO: 703223 - DNA, 538 bp, Homo sapiens
cgagggtatgtggacgcaatgatgcggaggcccgggagaagtgcagccaaggagttcggagtgtcccctgtacaatgatcatgtctccagcaatgatgagtgatgtatttggatacctggttctcgctctggacctacttccccattatccatttttgggctggcccaaccagtcagaagacctgagtgtgttctacaccctgtggacacatgcttgagagacctgtgtcaatgacgatcctcttcttcttggtgtgtgccctggatggtcatgcttgtggcctgaatgctcactgggcaggctgccctattagagatgtgtctacctccatgccatctgttgcgagatgctcactggcctggaaggatgagcaagtctctaggcaatgtcatcgatcccctggacgtcatctatgtgaatctccctgcagggcctccacaccagcttgctgaacagcaacctggatcccagcgaggtggagaaggcccaagaagggcagaaagctgattcccagcgtggattcctgatgtgtcaccg

SEQ ID NO: 703224 - DNA, 801 bp, Homo sapiens
atccaggccactgcagggtaaagaaaatgcatgaatgcagattatcccctcactgggggatatccgggagcgaagtccctgagctgctgaggaagctttacgcctaaggagaagaggaaactggttcagaactgtgggcagccagcccaagagcacgctgtctgtcccaggggcagagtcctacagtcgtggcttcgtttgtctggagttgaaagccagatcacacaccttctggcatccgcagagcgcatcctgtgcgaaaggaaggagctagtgcttgtgcgccctgggcgtcatgatccttctgcgggcctccgtaagtgcgagctagactgcttcacaataagttcgtggtcatcctgggggactctgtgcatagggcagtatacaaaggactctgtgtgcttctgcgtgcagtaagggaccgctctgactcagtcccgggcagcttagagcaaggggggcgctgaacttcgaacaagatgacgctggtggacggaggccagcggtggccaacatgcacaaatggccttgagctaccgtgaggtccgcgagtgccgctccgagcagcatctggtacgttttacttcctcagcccgcgtgtactccgattacctccagacgcatcttgaaagagctgcagatcgggcgagacacgccccccgacttgtgtcatcatgaacttcctgcctctgggacatctccaggtatggtccgaaagtcctggagaagctatctggagaacctggagaaacctgtccagtgcctgggccaggatgctggccgagtctagcctcctgg

SEQ ID NO: 703225 - DNA, 708 bp, Homo sapiens
  misc_feature (522)..(522): n is a, c, g, or t
taattgtggtttctattaagaatacatgggctgcgtggggtggctcacacctgtaattccagcactttgggaggctgaggtgggtggatcacctgaggttgggagaacgagaccagcctgaccaacacggagaaactgtctctactaaaaatacaaaattcgctaggcatggtggtgcatgcctataatcccagctactcgggacactgaggcaggagaatcgcttgaacccgggaggcggaggttgtggtgagctgagattgcaccattggacaccagcctgggcaacaagaaggaaacttcatctcaaacaaacacacaaacaaacaaaacaaaaaacaaaaaacaaaaaccaaaagaaaagaaagaaagaaagaaaaaagagtacattaataggctgggtgtgatggctcatgcctgtaattccagcactttgagaggcccagagaggtgaatcacctgaggtcaggagttcaagaccagcctggctaacatagcgaaaccccatctctactaatacanttagcctggcatggtggctggtgcctgtaatccagcttactcggaaggtgaagcaggagaatcatttgaccccagagcagatgttgagtgagccgagattgcgcactgcactcagatatctgcagtatctcagatctcatatctgctggatggtcatgctctgcatatcagtgctctaggtatagg

SEQ ID NO: 703226 - DNA, 188 bp, Homo sapiens
  misc_feature (75)..(75): n is a, c, g, or t
  misc_feature (78)..(78): n is a, c, g, or t
aaaagggcccccccccctttttttttttccccccggggggggggggggggggggaaaaaccccttttaccccccnctnagggggggccccccccccggcccccccctttgggggggggggaacatctcccccccccccctgggggtttttttttttcccccctttggggggggtttttttttttttta

SEQ ID NO: 703227 - DNA, 399 bp, Homo sapiens
gagctcggcccgtgttcagcttcggcagtctgaaaggtgcagagtcagtgggactgaagaagatgtgacaactggatggattttggatgatgtcctggagcagaggaaggattgggtaaaaagctaaggaatctgattagaatgtgcgtcctagttaacaatgtgtctaatgttcttgagacaactgtaccacacaaaggcaggatgttaatgatgggggacactggtgtagggcatgtattctaaagtaaaaaggtggttcttcagagtcatcggagcggtttaacaaaacattagaaacttcagaagaaaagattcctgaactaaaagcaatggaaactgtccacagtgatgtacagggagaaaaaggactgcaaaaactttgccgaagcttgatca

SEQ ID NO: 703228 - DNA, 203 bp, Homo sapiens
caatttttcccccaagtggctctgatttctagactgctttgaaaatgctgtattcattttgctaacttagtgattgggtaccctgctctttggcggtacttattatggagcccttctcagtcaagtctgccggatgtctttctattaccctaccccgtcagttgtccttaaaacgcgcatattactctagagagtgttaagaa

SEQ ID NO: 703229 - DNA, 438 bp, Homo sapiens
accccttttgaggcgctgtgcttataaacatcctttaacggcatagacagtggatactgagaatgatcaactaaatcgaattgagaacaggtgaagaggaaacaaagaattaaggtatccctgtggaatagtgcaagaaaggagtgccccacccatagtgttatctacaataggtactccggggaaaggaccccaaggagtcagaccacaaatgtatgaccagcacaattctatgatcaaactctacctctagcaaggcgtctcaacaatcaagttctatttaatcattcgctcgtgtcttctttcagtcatgatgaaataatgagaatatcataaggaacagaaggtaatgcattggtcaccacccttggtgaggctggtgggatgtatctggattagtcctcacggggggtgctattttcctgcatagtcttcatt

SEQ ID NO: 703230 - DNA, 687 bp, Homo sapiens
  misc_feature (25)..(25): n is a, c, g, or t
aaaaaaaagaagaaggtggatctcnggccgggcgtggtggctcatgcctgtaatcccaccactttttttttaaggcaggcggatcacctgaggtcaggagtttaagaccagcctgaccaacatggagaaacctcgtctctactaaaaatacaaaaattagccgggcatggtggcacacgcctgtagtcccagctactcggggggctgaggcaggagaatcacttgaacccgggaggcagaggttgcagtgagctgagatcacgtcattgcactccatcctgagccacaagagcaaaactccgtctcaaaaaaaaaaaagaagaaggtggatctccaaccaggccagagaagattctcacagaaggtttggaactctacgaaataaatgggttgggtaataaagggcttcgggtcagataaacaaaaaaaaaaaaaaaaaaaaaaaaaacaaaacgacgagcaccaaacagagaacagagaaaccacagcgcaaaaagcaacaaaaaacaaaagaggggggcgcacccaagaaaatgcacagaggagaggcaacgaaaagagaaaacacaaggaacgaaaagaacaacaaaagaaagaaaaaacaaaaaaaagagcaggacaataaaaaaaaaggagggaaagaaaagacagaagaggacaagagaagacgcaaaacaagagagagac

SEQ ID NO: 703231 - DNA, 139 bp, Homo sapiens
gatcacgctcggtacctacctgggttaggtctagcctgggattaggtcactgggattaggtctacctgggttagtctacctgggttaggtctacgttaggtctacctgggttaggtctacctgggttaggtctacctgg

SEQ ID NO: 703232 - DNA, 461 bp, Homo sapiens
tacacgagaaacagcttatcatatcaagtaaggtgtaaatctgtatattaatttgcatgatgataacttactcatgatacagtatagcagacaccctgttacttttcctcaactgtaagagcagactttcaatgttagcaattaagctgttgtcaaacaatcagtcatgagctttgttaattttcaatgttttcccagcctataaaaaaaggaaggtacacgttgtccttttaaaggttgcgaggtagattggagtgagtagacaggatattgcattaaaaattgaaagctcgatctcattattgtcaggaacccccagtgtgacctcacacataggatgtgggacctttgagccgatgtgcactggccaccaccagggttgggggcgccacagctgcgagcccggcccctgctgttctcagcagccacttcccaggctgcctcactttatgccatgactg

SEQ ID NO: 703233 - DNA, 248 bp, Homo sapiens
  misc_feature (32)..(32): n is a, c, g, or t
  misc_feature (61)..(61): n is a, c, g, or t
ggtaccctctactcacacggggaatggagcanaacagtcttgaatatcgaacacgcaaggnggtgagactacctatgtagatatgcaccctatgacatggtggtcctgatcaagaatgtgggtggacgttggccctggttgctttttataaaccgaactctatctgaaatcccaacaaaaaaaaatttaactccatatgtgttcctctggttctaatctggtcaaccagtgtgccagtgtggagagag

SEQ ID NO: 703234 - DNA, 576 bp, Homo sapiens
gacgagactttctctgatgcctctgtggcatattgccacttgagctggtctcagaactctagagatgactgtaaaggagcatggacatttcacactgttttagctcagcatctcctgtcctccctcacctaccactaacagttgctagctctgctttgttttattgttttgaacactcttttcatgtcatgctttcaactgctttctgtatgttcatatttctttttttctctttataaagtctccaaatacctaatctattagcccctaaaatttctacttcctatactacttttatctctggtggctaaatacacatttttgaacacaacaaaatgtgaatatagttgcagactcaaagtagataggcttgcatactaaacttaagtgtggacacagtatcatgttcatcttgtagcccacataacagaagatggaatcagatttttctctatgaatctgaaatagttctctagttatatcacttagtaacttgcatgctgacaacatgtctctaacttcttcatttaaagtaaaatataaatgggaagtgtggttatttcaaaacacaaaagt

SEQ ID NO: 703235 - DNA, 170 bp, Homo sapiens
tttttttcccccccccccaggttgggccgggggggtttcccgccccggggggggaaaaaggctttttgggggcccttaaaaaaagccccatttccaaggggaaagggggtttattcccggggccaatttttccggggggggggggtccaaaaaaggtttttttccccgga

SEQ ID NO: 703236 - DNA, 529 bp, Homo sapiens
  misc_feature (5)..(5): n is a, c, g, or t
  misc_feature (64)..(64): n is a, c, g, or t
  misc_feature (66)..(66): n is a, c, g, or t
  misc_feature (528)..(528): n is a, c, g, or t
aaaancttaaggaaaatcttaaggcaattaatttggcagaaaacatatggcagaggaataatangncatgcctccaaaactgataagaaaggaattacaaagccaaatatgaagaaacagaaagtttcatagaacccacagcacagcaccctggttccagctaaggtaaacagactgcataaggctggcggcctggctctggtaacacttgggaaacagtacaaagtcctggcagttaaagggttctacagcagggcaacctcagatttttcaagattgtggcatgctcaaattctcctttttttggtaataaaaatatacctacagtatataataaaaatatacatacagcacaggcattgaggaagatgaaagagataccatgaaatcaagttaatgtcataatttccagaaagaggaaaccagttcctgaattttgagaaataagatccttcggccactatgtgaagtttcttctataggaaactgtagtctctacccttttgtatatggtagaaaatcagagant

SEQ ID NO: 703237 - DNA, 199 bp, Homo sapiens
agcggagctgatgctggggggaaccaacacactggtgctgcacaacacgtgtacggactcgctgctggccgacccatccatgctggacctagcgctgctgaccgagctgtgccagcggtgactatctgcctgaccatggaccccgagccgaagaccttccaaccccgtgcttgtccctgctacagcttacctcttcaag

SEQ ID NO: 703238 - DNA, 475 bp, Homo sapiens
gctaccgagggcagaaagccgttgtctacaaagttaacatgtcaaacacaagaccccctcttcctggtctcctgctagcattgtggtgatgagagccagctgtcttgaacatttactaggggacaggcagtgttctaattaggcacttgatttaactcattcagccctcccggcaaagaacaacgttatgggccaggtgcggtggctcacacgtaatcccaagcactttggagggcctaggcgggcagatcacgaggccgggagttcaagaccagcctgactaacatggtgaaaccccatctctactaaatatacaaaaattagccaggcattgtggcgtgtgcctgtaatcccagctattcaggagactgaggcaggagaatcacttgaactgggaggtgcaggttgcagtgagctgacatcacaccactgcactccaccctgggcaacagagcgagactctatctcaaaaaaa

SEQ ID NO: 703239 - DNA, 390 bp, Homo sapiens
atcgacattcttttaaggaagtctgcctgatccccagcatgggagaggttggagagttgctaggctagttggcctttccctggcaccaggcctgtgttagacccctggttctcatcaagaaacacctttgttgagcagttgttattctggcctcacagcttgggtagtacacatatggcctggggatgggcaacaggctacaggaacccacctgtcttcctggtcaggggcactggcccctagcagcaggccatcctggtggggcacaggttctgtggcctttggtttgctacctctgaatatcctgggcagcaaggcatgccttccccgcccctgtggccctgagagcccttcagctcctgtccccataatgggtcctgggcctaggat

SEQ ID NO: 703240 - DNA, 576 bp, Homo sapiens
  misc_feature (238)..(239): n is a, c, g, or t
tttgggtgttagaattcttaaactctaaagccggcctccaatttgtccctaattctttctttttgcagggggccaagattcccccccctgttaagccttcgttttgtcccccccccctttttcttgggggccctgggcttggaaaaaggccccatgtcttttttgggcccccccagggtttaagggcccccggttcctttggttggatcccccaaaaaatttcccccctccttttttnngccccaaattttcccctaggttaaggggggggggtttttccccctttaaaccccccccttcccgaaagggttggccttggttgcccttaaaaaccccccccttttttcccccccttttttttaaaaaaaaagggggggtagttttaccccaagcccccctttccaaaaatttttccccgggtttttccgaaaacccccacccaaaaagccctttttaaaaaggggggttttttttttttaaaagttagcccccccaaaaccggggccatttttttttttttttttttttggcccaggcccccgttaaagccccattaattttttttttggggggcca

SEQ ID NO: 703241 - DNA, 481 bp, Homo sapiens
gagagaactgaatataagcctgaatatgagctataaaaatgagaacgaatgttctatcaaatatttatataaatagttaatcttatgagaacctatatatcttcgtacagagccatggtataaattaacaggttaatgtcagtcatcagatcttccttctcttcctaaggatgcttgtgttgcctccatctatcactctatctttcttgtaaagggttagaatactctctctctctctctctctctactttcttcttagagacatggactaacccatgttgtctaggatatagggcagtggctattcacagatgtaatgatagcacattgtagcctcacactcttaggctcaggcgatccttcaagcctccggggagctgtgaccaccaggacgtgcaacaaacccagctctctattcttggcattacatcatttcatgtatctatcaaagcccagcactctctctcctgcagggataccc

SEQ ID NO: 703242 - DNA, 1698 bp, Homo sapiens
  misc_feature (1)..(1): n is a, c, g, or t
ntggtctgtctgtgtctggctatacgtgcttgtacttcgtacttagctttgtctctctgttcgttctctttcttagctcttcttgtatctcgtgctgtgtgctttgtttgattgtgttgtgtgtgtagatttactgttgcttgtgtgtctcgtctgtcgcttctccttttgctcacgagcgctgtcgtgtgacttgtgtgggttggaaagcactacaagttgttgtgggccccttgctctcttgccctgggggagcacccacatatccccaccgtggttttgtcccctccctatgagagaaccccgcgggggcctcgaatccctactcttctcccgtggattttttttactccttataggccccccggggccgcgggattccacgcaaatagggtcgcgagacaccacggggtgaccctaggcttttgttggccccacatttaggccccttcttattttatggggggaccacacacttatataaggggacccaaaacgtgtgctgggttgaccacgaaaaaaagcacaaagggccttgggggtacaccgggtttctccgcggaattttctcccccgggcggatatcttcgcgtctcgaagaaccaccaacacgatgcgtggttctcctgcaggtcctcgtcccggtggtaacacaggaagtttgttatgggttctccttataaaagggggaggagaagccaggggggggtgtttttttagaagtttcctcaaatgttgggcgtacaacccaggcgggataagaaataaccccccaagagcgtttgtggggccttgtggggggccgcgccaccgcccccacaattgcgacacacaaaacctctgggtatgtgtaccccggtgggtaataaaagaggccggcgggtttcccgcgtgtttcctcccccccccgcgggggggaccacagacgccccttttatcacccgcccgggccacaaaaaagagttgtctctcgcaagaaaatagtcacagagccgcgggccgcccctttagagagggttctccccacccttctggcttttacactgttgggccccggggtgaacctgtggagcccaatttatgtgcccaccagatgtttttggccgggcccccaaaaactccgggataatctctctgggcacaacccgtgggggacactgggttcacattaccctccttataagatattgagagcacttttgtcgccacaggtgcaaccacatctccctccccacagatgagagttgcggggcgccacaatcacttctccgccacagagtctctcccacaggcgcttgtgtgctcaacgcccctttttgaagcgccctcttctgaaggagagtgtgtttctgagcacgaaacgagaggcacagctgttggggcacaactggtgcacagaagcaatatatgcgcgcccgcgttctcttgcacagtgcggctgagagcacaggtgcacagcccccacaccggtctacacctgcacacactgtggagggcaccacagccaacttcctgcctcctgaggactcctttgaaacgcacgggaaactggaacacatgaaatgagctgcccccccgcccctcccctgcaagaagtggccaagaatggaggtcctgaggaccctggaacacatgggcccggctttcctggatatcaggacttcccaataaataaagactccgtatactgggctttga

SEQ ID NO: 703243 - DNA, 202 bp, Homo sapiens
  misc_feature (25)..(25): n is a, c, g, or t
  misc_feature (29)..(29): n is a, c, g, or t
  misc_feature (32)..(32): n is a, c, g, or t
  misc_feature (46)..(46): n is a, c, g, or t
  misc_feature (54)..(54): n is a, c, g, or t
  misc_feature (60)..(60): n is a, c, g, or t
  misc_feature (76)..(76): n is a, c, g, or t
  misc_feature (85)..(85): n is a, c, g, or t
  misc_feature (95)..(96): n is a, c, g, or t
  misc_feature (104)..(104): n is a, c, g, or t
  misc_feature (112)..(112): n is a, c, g, or t
  misc_feature (123)..(123): n is a, c, g, or t
  misc_feature (132)..(132): n is a, c, g, or t
  misc_feature (146)..(146): n is a, c, g, or t
  misc_feature (155)..(156): n is a, c, g, or t
  misc_feature (173)..(173): n is a, c, g, or t
  misc_feature (192)..(192): n is a, c, g, or t
ttctcgcctccgtcgctggctactngtcnatnacgtcgacctgcgngggtgcgngctggncacgattgttgtttgngctctcttntggtcctatnngccctccngcgagagnggggtttcggngcctaccgntggctacgggctgngggtggtannctaggtggtgtttaacngtttctacgaccgttccgnctacttgggc

SEQ ID NO: 703244 - DNA, 1123 bp, Homo sapiens
  misc_feature (488)..(488): n is a, c, g, or t
gcggtgagccgagattgcgccattgctctctagccagggcaacaagaacaaaattccgtctcaaaaaaaaaaaaaccaacattagattgccctcgttttcacaatttggctgtttcccattgggtctattcttcccatctgtctgttaattaccacttttctctttaattagtattagagtacaaagctgcagtgtgtagtagcggattaggtgccctcctctatcctatagtcactctggggccgtgctattattcaaatttaccattagaacggggcgttgcactttaaagaaattaaaccattttatttctcggtggcagtctcttggaaggctccatgaaagttccactcttcagaagaagccgtgcgcagattcatagttgttccagcaaggggcccagcttctccgggtttggcaaattagactcgatcatctcttgtggggctttccttcaccatgtgaccaagacgcgcacgacgagaancgccgggcctcctccatgatgctcttctcttattaacgacgcacttaattcctcatttcgagaaagggatcttatactccttagtggctctcattctaatgtcctaattttactctcccagagcagtgttcccctttcgtagattacctatattgggcgcagcataggctaactaacacgtgttacgtagactttttggggactggaactggccacaattattttccaatttggccaataaaacagccctttcccacaggcagagtgagtctctaatcacgagggagactccttggggcatacttctcacagggcccactgcggtccgtcgcttattttcaccagggttcttttgcagaacaggtacccctttttgtacttaaaacttcacacacggatgacagcgcgaaaaaccacacacacagtgggcccgctggcgtcacatttttcccattcagcacaattattacaccctgttacgggcctttattttccaggaacagaagggcttcaacatccatataccgtgaattcccttaacgctctccgtttgttaaggcaaccacacgggcgccatttgttgcccacttatagtggcatcttaataccgcgaatgtctttggcacgcgtgttca

SEQ ID NO: 703245 - DNA, 713 bp, Homo sapiens
tggggggggggaaaggttaataaattttggctcttggacccacggcttaattatggcccttacacggaaaaacaaacacaaaaactggtccaaaagatgaactaaaactcagcagtggtctggtgtatcaagacgcttcctggtattgtttaacacgcctgatattgggagggataccgatctggctgtcgcctttgcagctcactgtcttacgcccaaatgtaatatgtctctttgggatagatacctccactctggtgcagatatcctctgaataatgtccaatctcaaaatgttggggatttccctcctcttaaattttcttaaattatttgggactatgcatgtttgtccgccaaactggaggtatccatgggaattcctatgtaaatggaaatcacctatacttggatactggaaaactggccaaatacataggaatttccttccttaaaaaacatgtaatgaagactattatctcctttccccagcactgatgtgtttctactagcacgggtgtgcctccccatgcacctgaaaaactgtgtggaacctcaaagtggtcgggacagatttccaagcatgtgcacctgattgttcctgtctccaattttaataattccccttttttgtttttttcagagaagtttaatatttctctgccctttttataacgtaaaaatgatttctcggccttgaaattcgctccagaa

SEQ ID NO: 703246 - DNA, 144 bp, Homo sapiens
gaaaaaagaaaaaaaatttgggaaaaggttagaaaaaaaaaaaccccgccccgggctttttcttttttttttcaaaggcccccagggtttaatggtcccctggggtatttttttcccgttttgtttttttttttcccccaagga

SEQ ID NO: 703247 - DNA, 106 bp, Homo sapiens
gctggactctccctctgtaaccctgtgaccacagggggcgcccccactggtggggcaaagggcttcaacttaaaagggaacccccgagcaggtttcggaacctcca

SEQ ID NO: 703248 - DNA, 1217 bp, Homo sapiens
gcgaagatcttcctcatcacaacctcatcactctcaccctgcttcgtgagatcaagatcatgtctccgagaaaagcccttattccggtggagtccacgaagtcgattcccaagtccagaggtgtgtgggcgctgagatctagaaatatagtaaagaggaggctagactgcaatgactgtgctggaggagtgtgaaggaaaagttgtgttgcaagagtggctaacgtggaagtgagctgagtcttgtatgggcaacgttgtacaaatctatcatgatgcgatttgtgactgccttgaactggtaatgcatggatagatgcacttacgtaatgggactacatctaagtgccgtaccaaatacacaggcaataccattgatagggacacatggatacccagtgtaatcgtacagcgagccacgtgccggtactaccgtaatgcaggtgccaggtagtgacgtatgcaagaacaaggcgtgctgagacatccgacctaaccacgtccagtgtcgcgtgatggtacggaccacatatgcttgccacggaaacggagatccatgaaagaatgtgggctatagagcaatacactgacgaaaaactacgcggtgcccccaaagagcgacaatacatgcgtcaccctcgtgctgtagaacaaggccccagtcgggcgaggccgacccctgggaacaccgggccctgcacggcagagtcgccaatacttccaacggaaaggcttgcagagtgaggacacaccagaaagcggaccacgcaaacgttagcccagaacggggagaagcaccgaaagagcaagggacacagacgaacgcatcaatggcgcacaacgtcacccagagctgccacagccaacatgctaagaagaccgccaaggccatgccccacaagaaaccgttagaaagcactactttgaggagaagtaatctgtggctgatataacggacaagatggtacagcaccgagggggacggggcaccgtctcaattggaaaggagggatcctcggtgcaaacgagaattcccatatggagggaagagtaggagtacgaacatcggcggtatcaaaagtagtgggaagagtgtggaagggatataaccgttggacaggcattgtagagcgtcaaccagcagataaatataagcaaacagacttggaaggcgtgtatatggggatccgaacaggaagaagacgcaatagaaattga

SEQ ID NO: 703249 - DNA, 297 bp, Homo sapiens
cttttaaaaaaaccggttttttttggggcccccattaaaaaggttaaatttcccccctcaccccctttttgggggccccattggggggcttgggggaaaaaaggaattttttttttttttttcccccccttttttgggggaccccctttggcccgttgggggttttccccccccgttaaggctggccccggggccccttttgggggtttcccggttgggggtttaaaagtttccggttaaaaaacccaaacccaaaaaagggttggtttttcccaaataatttttttggggggggga

SEQ ID NO: 703250 - DNA, 188 bp, Homo sapiens
ccactgtcagattgccgctcttgtcgatcgcgaggcccgtcggggtatcaaagctggcattggcgccaaccccatcggcatgcccggaactcaatacagcgccagccagcagggtcagcgcaccggtcgggctgatcttctggatggcctgggatccactggccgtgactttcacattgcccacgtgg

SEQ ID NO: 703251 - DNA, 1034 bp, Homo sapiens
gtggacaggccgggctcatttgcctaatgcaatgcggctgaactctcgctgaactcgcctggcggcgcctcacctccgagtgagccaaccaccgatgccgtgacatcacccgcatcgccagcacgccgaggggctcgcccagcagccccatgacccggccgaaccgggccactacccccggagaacgcggacagcggcggcaggaggcggtacagcacgggacgccgcggggccaaagtgtcaggcacaccgggatgtgacactagtgcacgacatcgcgaagctgggtcgagaagcgagacacccgacatcgccatccatccgacctgccgaccatcaatgccgtcacgtacaagcacgccgaacaccacgacgccggcacccccgcagagcccgacgacacacacaccacaggaccgacagcggccctcccatcacacacgacacaagaagttgcacacccagccgaagccaacgccccaaaccacacagtgacacccaccctgggcaaccaacgaaccgagccaccgggatagcaagagacacagacacatgacgacgcatcacacgagaacgagcgtgtagacaacaacaagaaacaaaccacacccaaagaagaccatcggctgagcacgatcacaacagaagacaggcctacgcttgcaataagaccccacaaccaccgcgccaccgcggaagaagggggtatcgtactcacacccacactaaggaccgagcaactgcacatgaccccccgcagtctagtgaccaccccgccaccaacgagcagcaacaataagcaacccaagacccggcacagcagccagcagccaaacacaaaccaccaaacgaagccaaacatccagcagagagacaagcacgacccaaacgcagccgcagcgagagaacagacaggctacaggcagacagaacgcggtaagaagcaacgaggccgcaaccagccggcactaacgcggaaccacacgcgagcgcgagaaacacgcacagccagaacgacgaaagaccggacacca

SEQ ID NO: 703252 - DNA, 300 bp, Homo sapiens
gggtttccctttgtctgaaggaggtgttagatgtgtgtggtgtgtgtgtgtgtttgaaggacgggtgtgttaggtgtgtgtgtttgaaggaggtgtgtgcagtcaacaaaggctggtgtgtggggaacacatcacagtctagatgtgtgtctgggcgccaccttgattttgagagtgtctttgtcatgaacatgtggtatctctcatcttggctgttaggagaaactgtcatagaagggacacgccacattttcaaaggcaggacaggttggggggctggaccgcagacaaagggaaaca

SEQ ID NO: 703253 - DNA, 428 bp, Homo sapiens
  misc_feature (21)..(21): n is a, c, g, or t
  misc_feature (140)..(140): n is a, c, g, or t
gtcggaagaacagggcttgtntcctaaaggagctggaggctgtagtcaacagaggaagtccccaaagatagcaggtcctaacagcctggaaactggcagtattgtctcatgtagtcacagggacttttagcaggaatgtntgcgtcaacaaagactggtgtgggacttttagcaggaacatgtgcagtcagcaaaggctggtgtgtgtcttttagcgggaatgtgtgcagtcaacaaaggctggtgtgtggggaacacatcacagtctagatgtgtgtctgggcgccaccttgattttgagagtgtctttgtcatgaacatgtggtatctctcatcttggctgttaggagaaactgtcatagaagggacacgccacattttcaaaggcaggacaggttggggggctggaccgcagacaaagggaaaca

SEQ ID NO: 703254 - DNA, 813 bp, Homo sapiens
cctgctcctcctgggctctctcttgctgccttccccccggcccgagtccgctggtcagcgccaagtgacttacgcccccgtaccctgatcccggagcgctaggcgagtgatgatcagatctccgtcgtacgagattctgatgtgtgccctgtgtcctggaggagttccgtcccagtccctgcggtctccctggtactgtcggggccccggccctctttgagcttcagtgaggcgcgccgtcagggtccgcgcggacgctattttcgtggctccggggtctcagggaagtggcggcgcctgggtctgcggtatcggaacagagcctgcttggagccaagtagcgcgctccctctcttggtacagacgcccttcggtcccagtgtccatggggtgcgaccgttggtcgcctcctctctgggcctgtgctgctggcctggccgttgcccgtccgcccaatatcgtgctgatctttgccgacgacctcggctatggggacctgggctgctatgcggcaccccagctactaccactcccaaacctggaaccagctggcggctgggagtggctgctgttcacagacttctacgtgcctgtgtctctgtgcacaccctctagtgggccgcctcctgaccggccggctcccggttcggactgggcatgtaccctggcgtcctggtgcccagctcccgggggggcctgcccctggaggaggtgaccgtggccgaagtcctggctgcccctaggctacctcacaggaatggccggcaagtggcaccttgggggtggggcctgagggggccttccttggcgcat

SEQ ID NO: 703255 - DNA, 298 bp, Homo sapiens
acaggcgatacatgtaagtataccagaaagtagcacatgtcccatatgtggcagatgctccggaatgttgagggcctaccgcacgtacgggttgttgaggtagagatggaagcagctgttgtagtaaggtagcagggggggtccatgcgcacttaatcccctgagcgcagcagtgcctgatgccacatccgcttgagtaggcaggcgagtgaagatagtagcccaaatcctggaccacaacagtgtccttctcatacctaaaatggctgggcacccctccagcacacggggcatagag

SEQ ID NO: 703256 - DNA, 187 bp, Homo sapiens
tgtcatggggagtaaaaattcttcatattgatgacattagatactacattgaacaaaagaaaaaagagttgtatttactcaagaaatcaagtacttcagtaagagatgggaagccctgcagtccatttgatgtagacaagccatctagtatgcaaaagcaaactcaggttaaactaagaatccaaac

SEQ ID NO: 703257 - DNA, 150 bp, Homo sapiens
ggagttgctctgtggtagcagtacccagagccaggcttcctggaaggggtgggcctctgtggcattggtactctctgttctttgaagagaactagagctgcccctcatgcagacaatgcacagctgcagattagatgggcagccctagtt

SEQ ID NO: 703258 - DNA, 544 bp, Homo sapiens
  misc_feature (13)..(13): n is a, c, g, or t
  misc_feature (86)..(86): n is a, c, g, or t
  misc_feature (99)..(99): n is a, c, g, or t
  misc_feature (112)..(112): n is a, c, g, or t
  misc_feature (132)..(132): n is a, c, g, or t
  misc_feature (144)..(144): n is a, c, g, or t
  misc_feature (153)..(153): n is a, c, g, or t
  misc_feature (188)..(188): n is a, c, g, or t
  misc_feature (237)..(237): n is a, c, g, or t
  misc_feature (274)..(274): n is a, c, g, or t
  misc_feature (283)..(283): n is a, c, g, or t
  misc_feature (316)..(316): n is a, c, g, or t
  misc_feature (339)..(339): n is a, c, g, or t
  misc_feature (343)..(343): n is a, c, g, or t
  misc_feature (357)..(357): n is a, c, g, or t
  misc_feature (359)..(359): n is a, c, g, or t
  misc_feature (364)..(364): n is a, c, g, or t
  misc_feature (373)..(373): n is a, c, g, or t
  misc_feature (384)..(384): n is a, c, g, or t
  misc_feature (390)..(390): n is a, c, g, or t
  misc_feature (403)..(403): n is a, c, g, or t
  misc_feature (543)..(543): n is a, c, g, or t
ggttggggttctngggaggtttggggtgtttttgatatctcattctttacaaaataattaaaaaattagttggggatggtggtatntgcgtgtggcccntgggtattggggngggtgaggtagggggactgnttgagtccaggnggtcaaggntgcagtgagccaagatagtgccattgcactccagntagggtgacagagtgagaccttgactcaaaaaaaaaaaaaaaacaaaanaaaaaaaaaaacccattggttcaaaaatgtgggaaantgggcacanttagttttcgacaaatccagttttccagtttcntttttcacagattgttgccaggngtcntttagctggcagantntcccngtgcattcnaaaagcattcnggttcncagaacaggtttntatacacttttcaggaacacttctgctgtgaaaaatacaatgtttgtagcactgggactccaaacaaagcctgaaggggaagatgcacttaaaaatatttattaaagaggccgggcgcagtggctcacgcctgtaatccna

SEQ ID NO: 703259 - DNA, 437 bp, Homo sapiens
  misc_feature (177)..(177): n is a, c, g, or t
tatttcatagggcggcttatgaatgagtgcctggcgcagattcacgtgccctggcagggtctcctcccctgccctcagtatcactttggcgttcttattgttattaaactgatgggactttgtgtttttatatgactctgcggcgcggccctttaaataaagctaggatacgccttnggtgcagctaaaaaaaaaaaaacaaacaaccacactcatcaaaaaacataaaaacaccaccccccgcgcgccccttatctcctggcgcggccacaacaacaacctacacaacacccccgcccttcctttcccacaccccacctttcttcaacaacaagggtgaaaaacggcgccgcgccccccaaaaaggagggggacgccaaattacacaaaaccacgcgctccacctcctctttattcatacacaccagcaacaccct

SEQ ID NO: 703260 - DNA, 158 bp, Homo sapiens
tgatgcggggaccacagacaaggtgcgaggccgccgatgactgcagcgctggctatactcgtccgtggtttctaggcatggctgggacgaacaggtcttttggagatggtgttttcttgggatctagcctgtttccaactggaaagcatgcccacggg

SEQ ID NO: 703261 - DNA, 265 bp, Homo sapiens
ggtctccagtattaccatctgttgtcaaaagtcccaagtagagagcatagcaatgctatacaacaaaagagaacaagtcactgtttcaactgcaggctgtgaactgtatggccttccaagctgttatttggaacgttgttttaaataaggccaacactataaaatctgaatttctctattcttggatttaagttcatgcctcagcatggtcctggtaccgggaagacagtgtctttgaataagttgcagacctgagcaagccagg

SEQ ID NO: 703262 - DNA, 109 bp, Homo sapiens
cattttaaggcgaaaaacaagtctgtgagaatatacttgagtatttatacaaacaagctgcaactactattcaaaaataggtttttttcatccaataggagtatactct

SEQ ID NO: 703263 - DNA, 545 bp, Homo sapiens
cagaaaacacacatatgaggcaagctctactgtcattcccattcaatatgctaggagatgagggcctggagaagttaatgaattgcagaaggtacacgggttgttaagttgcaaagatagaatctgaacccaggtttcaagttaagaactccactgtctgtgttgtcaggcacattgtctttcaaagaagcaccaggaaatgcctggatttggactaatttctcagaagagaaacttcttcccataacctaggctatctccaagggaatgtaaatatgaagattatccttatagacagtgtaaaatagagattattttctagtagtttgtgggccgaggcttgtactctgtgaaacacaaaacagttgagcatcggatctttaaacctggaggattttacttaaaaaagaagtctggattgccagctacccttgaaaaattggagatttgagctaggctggactcatattcccacatggccacaatcagctgcagtttttatctgctgttcctgctagatagatgtgtgtcctctggttgccaca

SEQ ID NO: 703264 - DNA, 515 bp, Homo sapiens
aagaacggaaagcttttaccctgcaccttccttgcagggaacaattatcttgccaaaacgtctttccctttcatctcccatttctctgtacccagtcccttcctgctccttgccaatgtgatcatgctttcttctctataaatgctaacatttgaagacccctttcctagggcacttaaccatccagtcagaccatcacattcagtagggacttgtcttggctaacagcagtgtatccatctggtcagctctactgagggaaggggccaagttactgctgccctctaatctgccctctggtcctatatctattactgtgtccataggaataataggtaagggctagtctctgtcaagccatgtaacaaaggacactgcaaaatgtctggcatcagaggggacatttggagaccaacttgggaggaaaatattcattttgtattgaatgatttttaatgaatgcaatattaatccttgcagatgagcaataatcattaaaatcagttaaaaatgat

SEQ ID NO: 703265 - DNA, 158 bp, Homo sapiens
  misc_feature (38)..(38): n is a, c, g, or t
cacaaggaacagcttactttttgccagatttcttaatntccacctagtggcgcaagggcccctttccccgctggccttctgcttttagctcctccgagttttctatctgctcctcttatttgtttctgcttgaaagccttatcttcctcgtccatctc

SEQ ID NO: 703266 - DNA, 250 bp, Homo sapiens
ttcaagatccccctggggactccttattaaaaattagtatatcattttgttgtccttgtgtgtgtctcatattggggtttcatgctatcaaagcaaatactaacaaaactgaataacacaatacgagagcaatacaattttagtaggatatttcaatactccactttctgtaatataacaagagataatattagtccggaaactgaagactagaaggcagtataaacaactattattttcaattaaggat

SEQ ID NO: 703267 - DNA, 743 bp, Homo sapiens
ggctgagctggagtcccccgcgcccccgcgttccgcccggccatggctgcggtggcgctgatgccaccgccgctgcgtgctgctgctgctgttggcgtcgccggccgccgcctccgggccgtccgcccgcgatcccttcgccccccagctcggggacgacgcagaactgccagctgcggtgccggacctgcgacctcgtgcccgcagccctcgcaggcggggcttggagggctgcctccgagtctccctatgacagagcctgttctagatcagcgcttgcgagctgtggctgccgcctcttctccatctgccgatttgtggccatgaagctccaagcccaatgccacccaaactgagtgtgaagccagcctgcgtggaagcctatgtgaaggaggcagagcacgcaggcctgtagcgcacggctgctggagccatgcccgctggatgcctgagcccggagcaggaagagaaaggtcctggaggctccaaggtggggccctctccctcttgtgactgtgttattccaccctctgcaaagtgaccttgtcaagtcagcccaggggattttgtctccatccacctggacatactacgttgcagactgacaatgggaaagtggtggtgtttcagactcagcccatagtggagagcctcggattccaggggggcgtctgaagcgcgtggaggtgagctgggaggtccaaccctgaagccctggaggtgaacgtggacctgtatgcccg

SEQ ID NO: 703268 - DNA, 678 bp, Homo sapiens
  misc_feature (472)..(472): n is a, c, g, or t
ccgggttcacaccattctcctgcctcagcctcccgagtagctgggactacaggcgcccaccaccacgcccagctaatttttttttgtatttttagtagagacggggtttcaccgtgtttgccaggatggtctcgatctcctgacctcgtgatccacccgtctttggctgccaaggggctaggattacaggcgtgagccaccgtgcccggccgattgtagctcatttttaagggagtgattaatttaacaatggggtgcagtgacatttttatatttgtgatctgtgctgattattggaattgaaggaagtgtcgacatgggagagggggatcaagggtgggggtattggggtttgtggggaggatggatccttatgactatgaaatgattgaagttgtcttgaaagttatagaacgagctggtggatggccaatgttgatattaatcaggggtggcggatgtatcaaggatntgagaatcatctgtctgctgtgatgtggatcatagatcatatcattatgcggggcctttgcggatgatgcatggggtgccctgtctctggggtgtattgtaggttgttgggtaggagtgtggcgtgagtgcttggttgtgcggtgtgttgggtgggttgaggtgagctggtgcgggttgtgaagggagtggtgagtgactgggggg

SEQ ID NO: 703269 - DNA, 192 bp, Homo sapiens
tactaggcctaacctcagaatctttgctgggtctgtaggctctgtccgggtggggcagctgccagttcgctcacactctggcctcctggctgttcctcctgtttgccttcctctcctttccattcactgtgtattccttcaccaagaccttgggggcctttgtttgtagtcgcagttgattcatgcgagctt

SEQ ID NO: 703270 - DNA, 294 bp, Homo sapiens
ttttgcagttagactggtgatgcacaggcccccttctccccgggccaggctcctgtcccgcctgggcactgcccactagtgatggcattaggtccggatgctgttctgtctctagctatcggacaccttcgcaaagatttctttcaggacagtctcaaaggctagctccacattcgtagagtccaggtctgaggtctccaggaagagcagtccattgtttacagcgaacattcggtgctcctcagtgggcacttcccgtgcgtggcttatgtccctttcgttacccacgagcat

SEQ ID NO: 703271 - DNA, 249 bp, Homo sapiens
cacagtgctattagtgtgtgttcagtgtgctccaggaacagaaaaaaacccggtgtggttggagtggattgccgcgcgaaaagcacgtgagtaagtcagaggttctggccgggcagatcgtgtacggcctacaggcattgtaaggagttcggcttttactgagagaaatgtgaagacattgcaaggctttaagagcagtgccatcacctgactcacattttagcaggattgctatggcatctatgttac

SEQ ID NO: 703272 - DNA, 685 bp, Homo sapiens
tcctcatccgcctccttgctcgccgcagccgcctccgccgcgcgcctcctccgccgccgcggactccggcagctttatcgccagagtccctgaactctcgctttctttttaatcccctgcatcggatcaccggcgtgccccaccatgtcagacgcagccgtagacaccagctccgaaatcaccaccaaggacttaaaggagaagaaggaagtggtggaagaggcagaaaatggaagagacgcccctgctaacgggaatgctaatgaggaaaatggggagcaggacggctgacaatgacggtagaccgaagaacgacggacagaacggtggggacggaacgaggacggacggaacgacacgacacggtgatggtgacggacacgaggactggacgatgaacgactgacggaacgctggagtcagctaccggggcaagcgggcagctgaagatgatgaggatgacgatgtcgataccaagaagcagaagaccgacgaggatgactagacagcaaaaaaggaaaagttaaactaaaaaaaaaaggcggcgggacctattcaccctccattccatctcagaatctaaacgtggtcaccttcgagtaaagaggccgcccgccaacgggggcagtgccaccgcagatgacagcgcttccacaccaaccaacatggaattgcacgggggaac

SEQ ID NO: 703273 - DNA, 863 bp, Homo sapiens
gatagcaaccatatccggtgggtaagtgtgcggtgcatttgtgatgtgtcgtcactctataatctgctgatgtaatgctactctaggaaccgttactttcttccatgctgtcttgtgactgttcaaaagtcttgttcgtgagatagctctatttgacacaccatgtctgacagggggaatcgtaggagccatagattctctaaaacaatattaagtgagtctccctggtatgctgcagtgtatggtgcaacgattgtgttagtgtgctgtatgctaactattcattactgagagtaccgatctcatgagcatgtgctgtacatccttgctgtcttcccgtgagtatagtaattgtgatgagaaagagcgcttgtacagggaaaagttgttagtgggaaatccttggtaagtcaatagagagacagacatattattttttacattacaaagtaccaaactcctaatggtaattaagttggtgccgaaatttatacccctactcaagtcacttgttggacctctgtcgctagctatctttataattggggctttgattgcttcaacatagcctgcgtagatcctgatcaagacgtagtaagaagtgacagtaggatctggccttcggagtacttgtgctagctatgtagtagatagtgtttcctagtcgttcggcttctaggatgtctcttccgatatactttcaaattgtcattcctggcattggtactcagtaacttaagctggcgtattcatacctcgagtgatgcttatcttaacaatgatttgatccctggggcacttatatttggttacacacttacttggggcgattggaactggttgtaatcgggagtgctgcaaca

SEQ ID NO: 703274 - DNA, 110 bp, Homo sapiens
atgagaggcaagagtgaagacagtggaggagactgactgatgaccatcacacagtgttaatgcggactggggcggcgccatgaaaatcccgttatttatacagatataca

SEQ ID NO: 703275 - DNA, 241 bp, Homo sapiens
  misc_feature (66)..(66): n is a, c, g, or t
  misc_feature (92)..(92): n is a, c, g, or t
  misc_feature (97)..(97): n is a, c, g, or t
  misc_feature (99)..(99): n is a, c, g, or t
  misc_feature (179)..(179): n is a, c, g, or t
gccgtctgcaagctgggttagagagaagccagtagtggctcagcctgatttcaaaaacctcaaaantggggaagctgacagtgcagccagcnttcantntgtggccaaaggccaagagcccctggcaaccaacccactggtgcaagtcctagattccaaaggctgaagaacctggagtntgatgtccaagagcaggaagagtggaagaaagccagaagactcagcaaacaaggtagacagt

SEQ ID NO: 703276 - DNA, 379 bp, Homo sapiens
tgttacctgcagtcgatctagaggaccccgtaggatcgtatgagagtctgcttgagtatttagccccacaatccttagggctggctcgccggttcttctgctcagcctatatcctccgcatctatagtattcccagctcgcaatatctcatctaccaatcgaataatcaccagccgtacatgactaatcagggtaacgtccgaaaatactgttatccagcacgaaactaaaggatgagtctgatctcttatacgaggtatccttaagtgactagttattgccacaagtaatctcctcggtactcctgcctcactcatttacaccaaccacccaactatctataaacctagccatgggcatccccttatgagcgggcgca

SEQ ID NO: 703277 - DNA, 140 bp, Homo sapiens
  misc_feature (4)..(4): n is a, c, g, or t
  misc_feature (8)..(8): n is a, c, g, or t
gtgnaacngcatttgcaatcggatacctttattaagtcaagaattcccttgcacgcagggtctgagaaagcgacagcgtagatgaggcgaggcgcaggacgctcgcctggtgccgggtgccggctgcccactgtgatccc

SEQ ID NO: 703278 - DNA, 167 bp, Homo sapiens
acacattggcttcatgtagaaacagtggaatatagaacatctgtttcacagatctgggactgtgggaggccaggacacgattcggcctctgtggcggcactacttccagaacactcagggcctcatctttgtggtggacagtaatgaccgggagctggtggagcaat

SEQ ID NO: 703279 - DNA, 148 bp, Homo sapiens
gttagagcattggcaagcgtacgggcaggcctcctagggagaggagggtggatggaattaagggtgttagtcatgttagcttgtttcaggtgcgagcgccattcaacgcctccgggccattcaacgcctccgggccattcaacgtccg

SEQ ID NO: 703280 - DNA, 184 bp, Homo sapiens
cagcgcgcaggtattatcgctacgcgatgtgtaatccctcgtgaacgtgttatccctcgccacacgtgttatccaacttatgtcttcctcagcgaccaaatatgatttaccatctcttggagtccaagactgcagtagagtggtattatacatttgtgcataaagaatcagtttaatttttcaa

SEQ ID NO: 703281 - DNA, 769 bp, Homo sapiens
  misc_feature (31)..(31): n is a, c, g, or t
  misc_feature (268)..(268): n is a, c, g, or t
  misc_feature (541)..(541): n is a, c, g, or t
  misc_feature (553)..(553): n is a, c, g, or t
  misc_feature (575)..(575): n is a, c, g, or t
  misc_feature (577)..(577): n is a, c, g, or t
cttcatgtcccgctgtgggaggggctctgcnacgccgggactgtgagatggccaatgacggtctgacccgttgggccgggccaggtcgcggacaacgtcgaccgtttgtttaagaagcgtggactcttgtcctgagtgcaccgaggctttcagcctgcgggacagtggtgcgatttgcattagagaaagggagatgccatgtgctggcccagcactccaacaggggcctgacctctaggaacgggacactggaggaagcctagacatntgaacaaatcaagtcatccagatccacggtcagctcctgccccgacttggccttcctcctgctgggctggcccacggacctcgggaacctgccctggctgtgggtgacctgcagcctatctcccaggactatggaagccccatgcaggaacatggttctgacactttggggattataccctaagcttaaaggactggaaaagcccctgaagtcccgagaccacaaccctccaccttctaaagataagacaagtcactgaaggtctcagaactntggcccattcancccttccctcaagacaagagtntngccaagcatcaatctcacccccagagaccagacggtgtccaggtcttgggcagacgaaacctgctccttggggatggtcttcctggctgtgcttccaaagggctggcctgcaatcagctggttttcacttgatcctttcggggtttgcattatatctgactgaaggaatgaactgggagagaacagcagagc

SEQ ID NO: 703282 - DNA, 408 bp, Homo sapiens
acaagtcctacaaaaattgacctgtcatggtggcgcatgcctgtggtggcatatgcctgtggtaacagctatatgggagtctcagttggaaggatcgcttgagcgcagaaggacaagcccacagttatccatgtccatgccagtgtattcaggcatgggtgtcagcaaaccgtgtcataacactgattaaggaagtaagtccgatctaattaagctagctattcggagacaaatgcattgagacctttgtggctcagtgtatacctgtcgctaattccaagtagattacagggttaactatgtataataataatattcgcaacgccacaatagagaaaaagattgacaagtgcatatctcaccgttgcatatgattcctttgtctaagcaaaagagtatcagaagaat

SEQ ID NO: 703283 - DNA, 807 bp, Homo sapiens
ctgttcacatgttcagagtcacctgacccacagcatatatgcgttatgactcaaccctccactcctgattctcaagagtgtatcacctgtcagccaaatgaacttgggatatgtgtgggccattctctaaactgtgaatatgttgtgcctctattaatgcttaatatcaaagactatatcaatgcttttcttgttgcccacctctaaccctaggataacagagaaacatacctatgcaaaggaagttcaagacttaagtctttccttaaggatcagcccaacaatgacttctcagtcaaatggattaaactggaaaatgatttctatgttatcatgttcgtaacacgagatcatcctaggcgaaagttttttttgtttccgtttgcttttaaattagtttatttctaaatcttagtcttccacatttctagaggccacctgacacaagtcccctgtatctgaagtctagcatctcaaggactgatctggatagtgtgctagtactgctccctagtggataacttaatcttttaatacagttcacgtcattcccctcttgttttcagaagagaaggtggctacagccaggcataacatatccactgtgtgcatagagggtctcttcacgcttgatgcttgtgcattccatcagctttctctcaagtctttgatcaagttcaaccttaagaggatgatgttagacaacaggtcccagtgcagttccctctattttcacccattttgcctcacagccataattggcccgattagtgtacctgtcgatcacgcggtgatcctataagtacg

SEQ ID NO: 703284 - DNA, 572 bp, Homo sapiens
  misc_feature (31)..(31): n is a, c, g, or t
  misc_feature (344)..(344): n is a, c, g, or t
  misc_feature (356)..(356): n is a, c, g, or t
  misc_feature (378)..(378): n is a, c, g, or t
  misc_feature (380)..(380): n is a, c, g, or t
cttcatgtcccgctgtgggaggggctctgcnacgccgggactgtgagatggccaatgacggtctgacccgttgggccgggccaggtcgcggacaacgtcgaccgtttgtttaagaagcgtggactcttgtcctgagtgcaccgaggctttcagcctgcgggacagtggtgcgatttgcattagagcctatctcccaggactatggaagccccatgcaggaacatggttctgacactttggggattataccctaagcttaaaggactggaaaagcccctgaagtcccgagaccacaaccctccaccttctaaagataagacaagtcactgaaggtctcagaactntggcccattcancccttccctcaagacaagagtntngccaagcatcaatctcacccccagagaccagacggtgtccaggtcttgggcagacgaaacctgctccttggggatggtcttcctggctgtgcttccaaagggctggcctgcaatcagctggttttcacttgatcctttcggggtttgcattatatctgactgaaggaatgaactgggagagaacagcagagc

SEQ ID NO: 703285 - DNA, 342 bp, Homo sapiens
gttggtttgcttttccttctatgtgggggggttaccccttcccaaaaaggggggtggggaaaaccccccttttggcccctttttttaatggaaaagggggggcccaactttaattttttttaaagggttgggaaattgttttgggggaaatttaaaaaaaaaggtttcctttgagggcccctttttttggttttgggggcatttcaattttccctgggtttttaaaaaatggaattttttgggatttttttttcccctgggaaaaaaaaggtccggtttttggggattttgggggggattttttccctcccttttttaatttcggcccttttttggccccca

SEQ ID NO: 703286 - DNA, 949 bp, Homo sapiens
  misc_feature (31)..(31): n is a, c, g, or t
  misc_feature (268)..(268): n is a, c, g, or t
cttcatgtcccgctgtgggaggggctctgcnacgccgggactgtgagatggccaatgacggtctgacccgttgggccgggccaggtcgcggacaacgtcgaccgtttgtttaagaagcgtggactcttgtcctgagtgcaccgaggctttcagcctgcgggacagtggtgcgatttgcattagagaaagggagatgccatgtgctggcccagcactccaacaggggcctgacctctaggaacgggacactggaggaagcctagacatntgaacaaatcaagtcatccagatccacggtcagctcctgccccgacttggccttcctcctgctgggctggcccacggacctcgggaacctgccctggctgtgggtgacctgcagcctatctcccaggactatggaagccccatgcaggaacatggttctgacactttggggattataccctaagcttaaaggactggaaaagcccctgaagtcccgagaccacaaccctccaccttctaaagataagacaagtcactgaaggtaaaatcagctcctcagtgtctccaaggacaggaatgccatgggctgggaggcgccatgggtgaacagacttccctacttcctgcctccccaagggtggggagcagtctaggggatggctgtactcctgggcccagtgtctaagtgaaaattaggaggaaatggagggagggtggcgagcgaggacagactggccaaggtcccccgcagccactcctgaagtcctcacgagggagaagcagcctctccttccagccttccccaagtcctccctaagagtgtattctactggtttctgtgcagatttttttcggctgcgaccaatagtagcttaaacatggattattttctttttaatttcttcctgcaaaattcttaggaaaccattaataaaagtaatatacatgtgaaataataaaa

SEQ ID NO: 703287 - DNA, 213 bp, Homo sapiens
cgggaggtggtgccttcctcatgagacgggcagcaaccccttcccacgcttctgtatggcacaccaattaggcctcatggcagatttttttttattctgctcccacctcccacccgggactactggcgggtgccttttttttttttttttttttttttttttttttttttttttttttttttttttttttttttttttttttttttttttttt

SEQ ID NO: 703288 - DNA, 194 bp, Homo sapiens
ccttggagctttgcaccctcaggaatctttgtgttgttagcaggagagcaccgtgcttggttggcctacctgatgccacagagggagtggattcgtgggtacataccgtggtgagcagtcacagggttactccttttacaacaccagctgtggtcattacctttctgctcttgccctagtaccaatacgcggtc

SEQ ID NO: 703289 - DNA, 230 bp, Homo sapiens
ggcagcctgggaacacctccgcttaataggcgttgttagagacgaagagtggactcgctggctgcagccccagcctgaccgctcggagtgtactttccttgacaggcgaggctgttggtcgggactcgcttgacatactcctcctgcgcagccttcagtgttctccttcttcccgccccaggccttcatggcagaggcctgcagggctcggccgcaggagaaggtcaggg

SEQ ID NO: 703290 - DNA, 445 bp, Homo sapiens
  misc_feature (329)..(329): n is a, c, g, or t
  misc_feature (339)..(339): n is a, c, g, or t
  misc_feature (366)..(366): n is a, c, g, or t
  misc_feature (392)..(392): n is a, c, g, or t
  misc_feature (401)..(401): n is a, c, g, or t
  misc_feature (421)..(421): n is a, c, g, or t
  misc_feature (437)..(437): n is a, c, g, or t
gttgttggagatgtgagtcttcccgaagctcctggccgaataaagcctttccttctttaactcagtgtctgaggggttttgtctgtggcttgtcctgctacatttcttggttccctgaccaggaagtgaggtgattaacagacggtcgaggcagccccttaggcggtttaggcctaccccatggagcatctctgtggggggactccggccagcttgagcaacgcagatcctgagagtgctcctggggtaggcaatttttcccagttggaacgccttcaccagagcagttgcttgggcaggcccctgttggaggatccaaacgcattggnctttaaacgncgggaaggaacttggcaattttggganttccagaaattttgaaacttttggtnaagatttantttttttgggaaatttgccnaatttccatttttganttggaatt

SEQ ID NO: 703291 - DNA, 390 bp, Homo sapiens
ccttccttccctatggaagctgcggaggaagcacctcctcactgtgggcacgctggaaccccagggagaggctgcctggtcacaccagagtgaagtaactgaccaaactcagcagggaagggcaacaggaagcccagaaccaacctgtgcctgccattcccgactccccgcggccctcacacagcttctccgcctctgagcccttgagggtcctcttgagcttcaggaccacagagttgctgagcctacacttctactgtctccagcttttggaatctagccaaagtggctgtctattctcccagggccctggtccctcctgcccgcttgtattaagcaaccaactgtcgaacattttaatttggtgaataaaaatctcttgaccctgga

SEQ ID NO: 703292 - DNA, 227 bp, Homo sapiens
  misc_feature (130)..(130): n is a, c, g, or t
ctaggctggttttgtttgagtccggcttgcaatggcggggttctgagttgctggagagaggaggaggactgagaaaggtgagtctctagcttaagatttttgggggggggcttgggagttcgggatcctngaatttttcgtttggggtcaaagacgtggtgttggtggcatataagaggggaagaaaatgtgagatagggtggttttatatggtatagatgaaggtg

SEQ ID NO: 703293 - DNA, 120 bp, Homo sapiens
gtgaattctctgaatactgtcaacactctaatctaagtttgcctttatgatgcagtggcagcattttgaattcctttaaaagaatactgttaatataattgtttttgtgttaaacctaaa

SEQ ID NO: 703294 - DNA, 542 bp, Homo sapiens
  misc_feature (195)..(195): n is a, c, g, or t
  misc_feature (197)..(197): n is a, c, g, or t
aaaaagggggggggggggaaaaaaaaaaaaaaagggggggggggtcccctccccccccccccggagaaaaaaaaaattttttttgtggtttccccccccccccctttttttttttctccccccaaaaaaaaaaaacccccccctgtgggggaaaaaaaaaaaaaattttttttcgccccccccccccccctaggngngggggggagaaaaaatattttttggggggaaaaaaaaaagctttttttttgccccccccctctttttttttttgggggcgaccaagttgtttttcccccgggctcccccccccccgggagaaggcgcctttctaaataatatttctctcccccccaaaagaatgggcccccccccgtgtgtaaaaaaaaaagagggggccccctccctctggtgggccccccccctttaaaaaggaagaaaaaaaaaatgttgggccggggggcccttaatcccccaagcccccagggggccctttttttaaggaaggataaaggcccgggggttaacggaaccttcccgccatg

SEQ ID NO: 703295 - DNA, 757 bp, Homo sapiens
  misc_feature (181)..(181): n is a, c, g, or t
  misc_feature (658)..(658): n is a, c, g, or t
cttggcgcgaggaaccccctcttgtgtaaatgtcctcctctgttccgccccgcgcgcttgtggtgggagcaccttcccgctctcgttccctgatgctcccccccccttggggtcaaccgaaattccattatggggcccgcacacaaggtatgttcgtcgtggaagatttggatctcgcccnaagaccccgcggtgttattcacacccgcgttatgtgtgatggcggtggtgaaagaaatagagagcgagaaataggagacgtgctaacacatatataccgttacataaaatacatttagttggtataccccccctgtgagattcatctgtccaacacccttctattggcccccccctccccccatgtagtgggacacccacccgcgccaattactcgcgggataccattcagatttactcagctgccacgcaaactcctttcttgtaaataacccgcggagtatttaagcccctctttacgttacagccccactgttttcccactctctcacgccgttataatactagtaccaagacctatgtttttacccgcagttatagcccgtagatacaggcctttctacgtttcgtctgttattctaaactccttttacatcccctcgtcttcttcttgtttgggtagatccaaccacctggnttatactttttattcgtgtgcggtgtttcccccgcacatatcatccaacaacaatagaaagaaagatcctaataatttttaaaaacactcatcataaca

SEQ ID NO: 703296 - DNA, 889 bp, Homo sapiens
  misc_feature (250)..(250): n is a, c, g, or t
atcaaatcaggcgacaggtgcccttctcatctgtgataccctcctggctactctgttccttcatcatcctgtcctgctagtgcaaatgagcatgaaaggccacgcacaattcgctgacacctgtggactagcagaagtcgatagtttgtactctaacctcagaaacatcagtatactctgacgggcatccatgcatctgtgacctggcaggtcaaaaattgaaagtgcatatctctgcaacgagtgggtntcacaagtgagaaacatccagatacacccaaagtatcaggaccgagcaatgagggtcctttgggaaaggagaagttaagcaacatctagcaaatgttatgcataacagtcagtgcccaactggttataggtgttggactaaatcagtggttattagggaactgcttgacgtaggaaccgtgtaaatttctgtgcggagaagttcttacatgttttctttgcttaagtgtaactggcagttttccatttggtttacctgtgaaatagttcaaagccaagtttatatacattatatcaggtcctttttccaaatggtagccatcatggatccggtagggggaaaatgtgtcatttgcattaccatcttttcaccattgggctattttaaagacaaagacaaattcctgtttgcttgagaagaacgaatatgagttactggtgtggtatggcttaaatgacctagctgaatatcactaaaaaggcgtcctttccaacttccacagtgtgtgtgcaattccacagtgagacattccgcggtcaaactgggcctacaattttgtaaccgtcccacggggtgggattaacaacaccttcaattgggtacaactttgtgcccaaaaaactttcagggcccgcctgg

SEQ ID NO: 703297 - DNA, 685 bp, Homo sapiens
  misc_feature (231)..(231): n is a, c, g, or t
  misc_feature (335)..(335): n is a, c, g, or t
ttctgcagcgatttaagttggtacgcagggttctcccagtcatgacgtttatatcgacggccagtgatttgtatccgactcactatagtcgcagttgggtacgggctctgcttagagttcagaggtttaataaattgatgatatgttggtttaaattgaaaagtaccgatgatgcacatggtttggactgtcagcagcttaagtagcacagtgtcttacagagatacctanagctaaggctggtgacacctacctggcgtggttgacctggtatcagtcgcagtccctatgggtcagcatagctgtcatatcagatcccaatgatgtcggctganaatcaagccagactgctgtgcggtcagcttgccgccgtggaatgccctgtgtcttggccatgtccagccaagggtacaacgtgcttgttgccgatcacgcaggtttgccattggaagtcaaaggcagaatcgcttcatggcactacagatgtggaataataataatctcagctagaggtgctgataggagggtgccccaacttcaggaggatcatgtgccgcctgtggttgttttcagggtcacttgcagcacacgcagcgtccccttgatgctcgatgtggaccgcagacgggcctgcagacctaacccctggctgtggacaggagagtctgctccaggcttctttcct

SEQ ID NO: 703298 - DNA, 278 bp, Homo sapiens
gaagacacctgcagcaatgcggatttcagtttcggggaaggggacgccaacggaacctgctttacggagtgccggatccatggggttgccggcgataatgggagacgtctctgtaagcccatatccttcggtaatgatgccaccggtggcgttttcccactcttcaacaagttccatgggaagagacatagcgccggagaaagcgaggcggacacctttaatggagatcttccgctttttagattcgcgcaatatacgctggtaaatgggtgtcatca

SEQ ID NO: 703299 - DNA, 142 bp, Homo sapiens
ctggttgtacgtagtgcatgcctgctacaatatagccctatagatagaccttgaaagcagtatgctaagtgaaagaaccccactcaaaaggctacatactgtatgattccctttatttcaaagtatcttgaacaggagaatc

SEQ ID NO: 703300 - DNA, 319 bp, Homo sapiens
ggacggcgtacagagtgttgtagatcaccccctccccaataaagctaaaactcactgagttgtaaaaactccgttgaccagaatagactacgaaaatgggtttagctattctgaacacacaatagctaagacccaaactgtgattagataccccactatgcttaggcctaaaactcaacagttaaatcaagcaaaatagctcgcccgaaacactacgagccacaaggttaaaagtcacaggacctggcggtgctacatatacctctagaggagcctgttcttgtcatcgatagatcccgctcgatctacctcacctctt

SEQ ID NO: 703301 - DNA, 342 bp, Homo sapiens
  misc_feature (262)..(262): n is a, c, g, or t
gaggaactctatgatggaagatgcctaacctgtgatcagaacctccaaatactgccatgagaaacgagagggcaggtcttcataaaagccctttgaaccccgcatcctgccctgatgttagagagatacgggatatctggcccctacactgtcagactgccagacactgtggtcatgtcactactcagccgatagcagctttgttcacgtgtcctgtgtcagaagcactgacgctccacccattttcgtgagagttattacnacccagaacagtgtgcggctgaagactggttggctttcacacttgtggcgcggcggactcctctagacgtcgaccctgca

SEQ ID NO: 703302 - DNA, 414 bp, Homo sapiens
tgagacggagtctcgttctgttgcccaggctggagtgcagtggggcagtctcagctcgctgcagcctcgcctcccgggttcaggcgattctcctgcctcagcctccctagtagctgggattgcaggcgcccgccaccacgctcggctaatttttgtatttttagcagagaccgggtttcactgtgttggccaggctggtctcgaactcctgacctcaggcgatctgcccacctcagcatctcaaagtgctgggattacaggtgtgagccaccacacccagcctcatcgaaattttaataggcattgcattgaatctgtaagtcacgtgcagtggcatcttaacaatatttagtcttccgacccatgaatataggatgtctttccatttttctaggtcttctcccatttctttca

SEQ ID NO: 703303 - DNA, 977 bp, Homo sapiens
attaaacttttttaaacatattatgatcattgtgcatgcggacgatgcgttgtgatgccactaagtttaacctatctaccgtactcaagaatgtagttaaaagatggttacagtgtgcaggttggtaacataatgaactaacatctcttttgccagtggctttaaactgcaaataggttaaagaatattgttcttgtaggttaaatttttattctttttttcttatatgaacttatttttaaaaattttgtgagtacatagtatgtgtatatatttataccatatatagaatattttgatacaggcatataatatgtaacaatcacatcagggtaagtgaagtatccatcacctccagcattaccctttgtattacaaacctattctacacatttagttcttttgaaatgtgcaattgttattggttacagtaaccaatttgcatggaatgtctatttccatctggccactttggcaagtggcaagattttggtcatgatttgttttatggtcataaataagaattgtatagaagtattaataaaatccatacatttctgaattctgaattgtatagaagtattaaataaaaatccatacatttctgaattctgaataaacatttaaaaatttgtaatattttcctttaaacatgtggtcttactgcctgcaaagacatacagacgtcttattttaattaccgtaaatgtagtatcagatatttactctagagaataacgttagggtaagaaagtataaagaagggtggtaggatgtgaattgtgcatattcaaaagaaagagaaagtgagaaaaaaacttaaagtaaagggtgtaagagataaagacaacaaatggagaggagtacgaggtagatgaaagggaaaggaaacaagaaaaaaaaagggggcataggtgagaaaagaacagggaggggagaggagaaaaaagaagaagagttataatgtatatataggg

SEQ ID NO: 703304 - DNA, 905 bp, Homo sapiens
gcagatacaggctgacagcctctgtacatcgtaggtccacacctctcctctcctccacagagagggtgccgtcagaatcccctgtcgctttctgtgatctgcaagtggggggcagacaggcgcatcagagagccatcttcacacagagctttccagagaaacgtattaattcagaagcaagccaaagacccctggagcctcaccacaaacaggccttttggagtgtgaattggagtcgaagatacacagatcggagaatgatttttctggtcttaactaatcctcgctcttcatgtgtgatctattaagaagtcatcactccacttgattgtcagctcttctgcgtgtacattcgtggaagaggttaagagagacatctcagccactttaggacgcgccgaggcgcggtggatcaccttgacggtagaggaggttgtgagactatgcctggccaagtagtgtgttaaagaagccccctagtctctactagaaagactatcaaaaggaattagcgcggcgcatggtggccactgtgtctgtacgtcccaggctactcgcgtgaggctgacgggcagggagaatcgcttgaaacccaaggaaacgggaggtcacagtgacgccaaagaatcatgccatctgcatcttccaggctttgggtgcaattcacaaggcgaaggacctcgttgttctacacttcagatgggggagacataccccgctcgagggccacatttgttctccggcgtgggggacaccgagggggcatgagaaatttggggccccctggggcatattaggttgtttcccttgaccccagtttttttgggccccctcttgggtaagacttcttgcccggagtccgcaatggttcgggtcggatggttccggtggcccgggtaactggt

SEQ ID NO: 703305 - DNA, 176 bp, Homo sapiens
ggcagtgcaccgcttggtttacctgcaaggtcggactactatgaggactacccctttaccaagcagctggagatgcttgtaccacgtggccaggcacacaggaacgtcctagacgctgattcgacgttctatcgagggaggatgtgaccgtcttctacctgtgtgttttgcagaag

SEQ ID NO: 703306 - DNA, 637 bp, Homo sapiens
aaaaaaaaaaaaaaaaaaaaacccaaaaaaaaaaaaaaaaaaaaaaaaaaaaaaaaaaaaaaaaaaaaaaaaaaaaccttttcggcccctttggcccaatcgtttttaaaattggcccagcttttgctttgggccccaatttgggccaatttggccaatttccccttatggggggcgttttaacaatacatggcccgggttttaaaaccttcggctgggaaaaaccctggggttaccccatttaactctttttgaaaaaaacccctttttgcccagggggctaaatcccaaagggcccccaccggatgccttttccaaacttttgcccacctgaaaggccaatggaaaatttaaagccgtaaattttgggtaaaaatccgcgtaaaattttgtaaaaaaagcgcctttttttaaccaaatggtccaaattgtgaaaaacccttttaaattcaaagaatttccccgaaatgggctgaagtttttccaatttggaccacagggtcccctttaaaagaaggggcttccaattttaaagggggacccgttttagaggcaagggcccatttggagaccttacccttatggttttggggttaaggtcgccaagaccctttaatgggccctctgggcccccctt

SEQ ID NO: 703307 - DNA, 146 bp, Homo sapiens
ccccccccattgctttccagagcgaactgtgctgggtgctggccctggcgttttgcagctttccggcgtccggaaggcagtgagctcttgtcgctggatcccgtcctgccgtttccatgccccctgttctcagtagcggagcctca

SEQ ID NO: 703308 - DNA, 125 bp, Homo sapiens
taaagaaaaaaaaatcgaccataaaagtaaagatagtaataaggtctggtctgtatgtctcttcttatgccagtgcaatgtttggattgtggtcgcgtgaaaagtaagtgtgggggataacatca

SEQ ID NO: 703309 - DNA, 603 bp, Homo sapiens
gataactttgagggaaattttgagtcactggtaccttgcggtagatttgctaagaagcagccatggtggcgtaagcatgttcggagcaggtagatctggaccttcagcagaaaagtatatgcgtggcgaagcccagctgttctattggaggtgtcactggatggtgcacatggtttcatattccagaaggttggacagttggctgcgaacagctgtgggaggtggattacctctccttcagcgttgcaatagcatactgggtactatcaaagtagactggcaacgagtggagcaaggacatgaagaagagccgaagagcagctgaagatccgtaagagcaatcagatacctactgaggtcaggagcaagagctgaggaggtggtgtcatttgtgacagacagaatgtcctagtaactgcgtggattcttcggaggctttctgcttgggccttggcatcgctaaggaagcatgacctcatgtgcatggtgtcctgggttatcccaagcctagccagcttctacatccatcataggacatcgagttcctccctcctcttctcgcgatgcctttcttccgtggccattggcccacacatctggctg

SEQ ID NO: 703310 - DNA, 216 bp, Homo sapiens
tcaccagctggcaggtgctggcatgcctctgttacggcacgggctgtggacagccctcacacttgttctgggacggtggtgtccaacttctcccgtggcctcacagggacaccagtggctatcctggcgtgtggctcgttgtgggcaggcacctttgggttctgaccaggctgctggcccagagagctccactgtctactacctgcgtgatcaaca

SEQ ID NO: 703311 - DNA, 134 bp, Homo sapiens
tttgtctgcggtatgaactgcagaggggcaccttcagcagaaagtaggccgtcttgaaggcgtcaccaactggtccacatgagcaccatcttgatgctcaatgccctccgtgggaactggctgcgcggctggtt

SEQ ID NO: 703312 - DNA, 771 bp, Homo sapiens
ggtcttcactttaccccagcactctgagccttgtgcgtcagctcatcgcaagagtagtagcagcattggagacccatcctctgacccccttggctctccaaccctcctggctttgtgaggcgccttgagccctactccgtgcagatgccacccctagccaatgtctcctcccgttccacccaaccggtccagaatggccctggacagtagtcccacatccgaactccagcaacttcttcttccatcccatctaactgagactgaccattagttgctgcgttcacagtagagccagcgttggggaccaccaaagcgtgccaccacgtgtcttctcttgagacatggcctctctagcacaatcttgcacgtaaatacagagacaaaatagtttccacatcttgtgccagaggaatcctggcagcccagagactttgtagatccttagaggtcatctggagccctaaccccttgccagatcactgccacactcgtccatcaccctcttcctgtgagtccacccaaccctatctcctgacagaagggccacttacccacgtagtacactaactcaccagccccactgccagcagcagcaggtgattggaccaggccattctgccgccccctcctgaaccgcacagctcaggaggcgccttggcttctgtgatgagctgatctgctgatctcagctttgagaagcatttcagctccagggaatcgaagcctcacaccagcgaggacaataacagccatgttactgaagacgaacgg

SEQ ID NO: 703313 - DNA, 170 bp, Homo sapiens
tgggattacaggcatgaaccactggccctggcccaggcctactcttaaaacctcatttagcacacgttttaacacaatggctccactcctaaaggctgacagaaatttctaaaaaattgcaaataaaacccaattccatttaaaaaccccaaatcccctctaaattaaac

SEQ ID NO: 703314 - DNA, 406 bp, Homo sapiens
gtttccactccctaggcaagttttttaaggcaaaagggggttccctgttcccaaagtttgcagccatcagcaaggaggaccaggaacccggcgattgaggtgtttccaggtggggacaagccccttttggtttcagccacagcaccccttattccaggtgccctgcccaacctgttcaccccaaaatacctttttgtgtattcagcaaacactcattaggtgacagcggcccccaggttttgtgttgggggacgaaattggccctggcctcgaccagtttaaaggtttttcacacctttgttcccagggccccgctcagggcccagcaaaaagtccgtaggcttgaacatgtgttgagggcatgaaaaataaatgctgttcatgtgtgtagctcaaaaaaaaaaaa

SEQ ID NO: 703315 - DNA, 211 bp, Homo sapiens
tgaccgtagacgctgtgtatgtggtgttgtgccggagttcccttagtggtgagatgagttggcgaggatcacttaagttcaggagttcgaggctgcagcgagctatgactgtaccactatactccagcttgagcaacagagcaagatctatctaaaaaaaacaaaaaaggactctaaaataaaactgatgttcacatagttcagcgtctga

SEQ ID NO: 703316 - DNA, 839 bp, Homo sapiens
ggcgcgctgtacagccgcgccgcgtgttgccgcggttgtatcttaaaatggcgccgtagacctggacaagtatgtggaaatagcgcggtgtgcaagtacctgccagagaacgactgaagcggtatgtgactagtgtgtgacctcctcttagaagagtcaactgtccggccagtatccaacaccagtaaccagtgtgtggagatatccagtggacaagttttatgaccctttgtgaactgtccaagaactgaggtcaggttcctgaacaaaatacatatcatgggtgatttggtcacgacggaggtaactataagtgtgagacctacaacttaaccttctgtgcattaaaaggctaagtggcctgatccgtataccatttgtgcgaggaaatcatgagagtaggacagataaccacaggtcctatgggatttaatgatgaggtggcagaacaaattttggaaatgctaattgctgaagatactgaaccaaaagttttgacatgctccacagtaggcagttaatagatgagcagatttgtgtgttccattgggtggtttatcctcctgatatcaaacagttggattcaaatttcgaaccatcgaggggaatcaggaagtcctcataaggcggcatttggtgaccggtgggcagatctgagattgattcctgcgtatcagtcccgagaaacggtgttttggagcaggcaacaagcgttggtcacttcacactaaattctggggagcaatcataggacaagcaaatttttggagaactggaaatgtcgccaacggacggggaatagcggtgtcaaattatacaaaaattcggcaaaggtccaa

SEQ ID NO: 703317 - DNA, 131 bp, Homo sapiens
aaattaaaaggggggtttttttttccccctgggatttttgtttgggcccaaaattgcccccctttttgggggtgaaagggggtttttttacaagcccaaacccccaaaaaaagggttttttccctggggga

SEQ ID NO: 703318 - DNA, 279 bp, Homo sapiens
gtccatggacgtgacagaacggataaacaatgtgtcatatgtatgccgtggagtattactcaggaataaaaagagtgccgtctggagccgggcgcggtggctcaaaactgtaatccccagactttggcaagcagaggctagacaactgcttcatcccaggcatttgagaacagctttgggccatgtggtgagaacctgtctctctttctaaaaaaaaaaataataaaacactcaaactagatggggggtagggggaaaccaaatgaggttgatatttgg

SEQ ID NO: 703319 - DNA, 124 bp, Homo sapiens
tttgtttacgttccgagaagacctagcggttggcttctccgactcagacgccaagatggggaagtcattcgccaatttcatgtgtaagaaggacttccatcctgcgtccaaatccaacatcaaa

SEQ ID NO: 703320 - DNA, 778 bp, Homo sapiens
gtttaagatgagcattccctaaagcggtcatctcttgatctctctcccccactctggcccagtatgaccccacagcagtgcctcagtggttgtgacagggcatgcctgcacgtctgtcagctctggagggttcttgagagcccgatttccctctaacccagatcgtcaggtatgggatgccgccaagaatatggtaagcaggaggaggccgagagcgcccatcagctataggatcgtgtaagcttgtgataggaccacagccggagcttcagcttacgtagagatgctggtgatgcccattagactttccgtcttgtatcccaaatatggccatggtagtaggattctttaaaggtaacctaggtttaataatagtttcccttggttaagtgtcctctttgcgctatgaggtgcttggttactttcaagcttcttattctttgcctgtctcttcatgcaaatattaaatgcctacgcaggtgcactgttctagctatgtccgggaacaaaagcaaaggtcccttgtaaatctgtgctttctaaagtgactgggagtaggggggattagtgggagagcagacaggagaaataagctcatatcttatggaatcgaggcaagtggttaggtaaactatatgccaagtatcatatggattacagaataagaggcatcctggccctgtgctcaaaatcaatttaggagaaacaaattataaattgggtgtagaatagggtgggtcaaattttttccaatcaggtggagacaggttagagaatt

SEQ ID NO: 703321 - DNA, 1578 bp, Homo sapiens
  misc_feature (1535)..(1535): n is a, c, g, or t
agcatataggcagtgggcttgacgtacctgcatggtggtcggtcatccggtacagcacccagtgtgggaaaacgaagagcaccgttatcaatcgacgagtgatcaagttctggtacgccgtaagacagtagttcactgggtctggtaccgtagagcatggcgaatcgtgggagagggcgagcatacttaacccggtggcctgcgtagcagcgcctagcttctggtcgctgtgagagagctttacgcccttggcaactggtactcgaggaccggtgacaggtcagtcgcgtgaggcaaattcacatgtggtgccatgggctcggcgaaggcgtcacgactgtggtaccagcagagtcctgtcccatggcagcagcacgaatgttagtccatccggcgatgtctgggaacattggcgaggccatagatagtgaggctagcatgtctagtctttgtgctaccgcaatagccactttcctagtcactcgcgaaggaccctggggagcatagttcattattcacgcctgctcatggtcgcaggaaatggtcactcactctaccatgctcggttcaggtattcaccattcccactctttggcacaccatctgaacatatccaagggaacaaaggacgctcttggccttgatgagcgaaggtcctaaaagtgctggggcactggtaggaaacaagtggcagatcggagtagcagatacgcgtcataagaatggttgtcccattccattgtttccttccctcagtgccgaggcaaggtgagtgacctcggggaatgggattgtgcaggaacagaatgtcccccgcaggggtgcagttctaaggaaggcaacacttggaagaacaccatttcctgtatactgggagacgacggatacacggggagctctacactggtgccaggcgtggtaccttgtgatgactgcggcgtcgtcacatctcagaaggcccttttcccaaagaaacccccctatggaccggaccaaggcgtggaagcgcgcacggcaggcgagaagatcaaacgtgccgacagactaagcagacgggggtcaaagcgggaaggaaatacatcaccggccacttatgaagcgcccctgcaaccaggcacccgggtgggcaacgcccagcgcgatgggccgacgaccagggactctacaacctcagtacactgagaccacagcatcggagactctccacccacgatggcaccaaagtggagccgtcacgaacagcgaaaaagggaccaaggagcaacagggcagggagaaacaaggacgcacggcacaccaacacaaacgaggagaccccacgaggagcaatactcccgcggagcaaaacagaggcgagacagacaagcagacacacccaagcgaacgacaacaggccaaacccaaggcgcacacgaccacacacgcccggacagcacaagaacatccgcacacgacgaatcacacgacacacacaaacccaaagcatggaacacgacagcaagagacggcgacgcacagcgacacgacatcgacgngaccggaaaagcactagcaacccacaccacaacaactccacgc

SEQ ID NO: 703322 - DNA, 232 bp, Homo sapiens
  misc_feature (72)..(72): n is a, c, g, or t
  misc_feature (102)..(102): n is a, c, g, or t
  misc_feature (107)..(107): n is a, c, g, or t
  misc_feature (125)..(125): n is a, c, g, or t
  misc_feature (151)..(152): n is a, c, g, or t
  misc_feature (167)..(167): n is a, c, g, or t
  misc_feature (173)..(173): n is a, c, g, or t
  misc_feature (179)..(179): n is a, c, g, or t
  misc_feature (194)..(194): n is a, c, g, or t
agatggtgagaaaaggtccaagtggattctaaaattagatatagcataatagctaacgcttggcttcagggntggccaaccagacttaaatgaaagattcanttganaagctcatgaaagttgtntgttaaaacatttgttacactccacnnaccactgcaaaaaantctgantatcangcaagataaactcanctcagaaaaatgtcatatctggggctctatcttttggt

SEQ ID NO: 703323 - DNA, 876 bp, Homo sapiens
tggaaatggattctcctctctttgtggcccagggttgagatggtaccagtgcgactgggccggggtgacaaaccaaaactctgtctcaaaaaacaaaaaaacaaacaaacttttggaaatggattggcaatatgtctgctacttgggctggggcgggacagtttatctaataagcagaggccagctcctgggttgtgctagggtaataagccccttcttaacgaaggctaagctcccctcataaaaacgtggtgggtgttcctctttttattatttttgtggtaatgggtatctggatggggattctcgggttgtgtttggattctggtattctataaattcagcttctccaagtgtgcttttaataaggggggccaaggggtttaaccttttggcaccatattcccctgtgctgcgcgtataacggcgcccagcgtgaaattttcttcgcatacgagttgagacaaggggctacactgtgggcatgtgcgcttctgtgggcccccctttggtccctccactcctcgtcgtccctttccataaaccttcatcatatttaacccctatatatatcctctcccctcccctcctttttccgccctcttcttttttatttcccgcccccgacattatttgccggctcctgtgggagtgcgcccctcgactctactatctggacgccgcgtgccacgtgtccccccgcaagaacttgcgcgcacctctcgggctctgcgacgcgggggcacttctcccaagggccatctcaaaacaagtattgtggcgccccctaagaacctctcagcccggggcaacccccccggtgggcgtttgcccccgcgcacaccacctctgttgtggtgaatatctccccccctt

SEQ ID NO: 703324 - DNA, 719 bp, Homo sapiens
  misc_feature (3)..(3): n is a, c, g, or t
  misc_feature (6)..(6): n is a, c, g, or t
  misc_feature (82)..(82): n is a, c, g, or t
  misc_feature (210)..(210): n is a, c, g, or t
  misc_feature (235)..(235): n is a, c, g, or t
  misc_feature (247)..(247): n is a, c, g, or t
  misc_feature (273)..(273): n is a, c, g, or t
ggnctnttctttaaagatgtgtgtcatccatcccttggggccttctgctgaaaggaagaccaagtcccaaaaaagccttttnaatggtaccctcaagtaataatagatatagcccagtcctgtatcacacctcggtgaatgtaaaatatctggaccttgcttaataataggaagaagtgacggtgctttaacaagacctgttttaaatantgtaattcaagaatgtttcctttcnagataatgatcnagaagctaattttaaaaacgggtgcnaggtaccacacaagtacaagaactttgcaattttctggggttttgttttttacctttttccccccttttttttaaatggagtgtgctggatgtctctataattttattcagatgactgcagaacctggaaaagctgttgctgctattgatgcataacatactgctattggtctttttatataaatatatatatatatatacatatatatatataatttgaatttttggaaactttagctgtgctgtcaactttggaaaaagtatcccggtttactgtgttgagttggcattgtacagaaattaacagccatattggtctagaaacgttaaacttaatttttttccatttgtacaggggtaacgcactgtattaaatatgtaaggtcttatctacatgggtttgattacagaaactaataaagtattctctaaataatgaataaata

SEQ ID NO: 703325 - DNA, 258 bp, Homo sapiens
cagactgtggagccccaggccacaggccagtctcgccttggctctcatgactgtggtggtggagatagcgtggggagcctcgcccatggtctcacgtggcaagaagtgcctttagctctggaactaagacagaccgatgggcgcggctacttcggaggtcacaaggagaaaacaaaggaaggcttgcgaagcctgcaaccactagcgccacccacaagagccggcactaggagccacacaacgaggtaccgagctcga

SEQ ID NO: 703326 - DNA, 715 bp, Homo sapiens
  misc_feature (18)..(18): n is a, c, g, or t
  misc_feature (22)..(22): n is a, c, g, or t
  misc_feature (28)..(28): n is a, c, g, or t
  misc_feature (36)..(37): n is a, c, g, or t
  misc_feature (41)..(42): n is a, c, g, or t
  misc_feature (78)..(78): n is a, c, g, or t
  misc_feature (206)..(206): n is a, c, g, or t
  misc_feature (231)..(231): n is a, c, g, or t
  misc_feature (243)..(243): n is a, c, g, or t
  misc_feature (269)..(269): n is a, c, g, or t
atgattccttcacaaagntgtncatccntctttggnncttnnctgaaaaggaagaccaagtcccaaaaaagccttttnaatggtaccctcaagtaataatagatatagcccagtcctgtatcacacctcggtgaatgtaaaatatctggaccttgcttaataataggaagaagtgacggtgctttaacaagacctgttttaaatantgtaattcaagaatgtttcctttcnagataatgatcnagaagctaattttaaaaacgggtgcnaggtaccacacaagtacaagaactttgcaattttctggggttttgttttttacctttttccccccttttttttaaatggagtgtgctggatgtctctataattttattcagatgactgcagaacctggaaaagctgttgctgctattgatgcataacatactgctattggtctttttatataaatatatatatatatatacatatatatatataatttgaatttttggaaactttagctgtgctgtcaactttggaaaaagtatcccggtttactgtgttgagttggcattgtacagaaattaacagccatattggtctagaaacgttaaacttaatttttttccatttgtacaggggtaacgcactgtattaaatatgtaaggtcttatctacatgggtttgattacagaaactaataaagtattctctaaataatgaataaata

SEQ ID NO: 703327 - DNA, 196 bp, Homo sapiens
gacagggaatgagctagtggaagaagctaagctggtcttcagaatctcagcttcatagattctcatctgtctggataaagcagtctgcaagccataagggcaggaaggttccaatcctaggtcactgtgacctttcctttctttctttcccaagactccgggctggaacaaggaactttcctctctttcacctctc

SEQ ID NO: 703328 - DNA, 163 bp, Homo sapiens
tgtctcagtttcgggacgtcatgattccaaccacatatcctccagcagcagcagtttgccgagggtgaaaagcgaagcctattgcctgtcgcttcttccaggaagtacgagagcggtcccttgtgcccgtgtacgcgctgtcgtacctctagagttcctcgct

SEQ ID NO: 703329 - DNA, 111 bp, Homo sapiens
tgtacggttggcactagagtgtaccaactattcaactgcatccaatgaaaataccctgacagcttgcagcctgtggcacaccatgtacctcagatgtagagctgatgggag

SEQ ID NO: 703330 - DNA, 658 bp, Homo sapiens
atattcacactcttgttatactttttttctccgtgtccgggaggcccctctcagaggggggccgagaacccggcgagagccgaaacagcgggggcgagggcccccctatccccctcacccccccgtccaaaagagcgcgagccgccccccccccccaaagccctgtaccacaaaaaaaaaaaaccaccccccgaaaaaatatccggctccacgggcgaaatggtccccaccgtacaacacaaggacatccttgcccccgcccaggcgacgcagccaaagaaccccacaaatcacgtgcccccatatccaccccccaaaaaccccccctaaatcaactccccgctgctccccccggccaataatcccctaccacgatcaaacctccatccacaccatccgctccccaaaacaaaccatgctctgcgcgccccccacccgcgtcccccacaccaaagctcccgcccacgcaattgctccatcttaaacccaaacgactcagcggctcaaacctcacaccagaggccacctccacagacaaacggcaaccacactcccaaaaaccaccacaccaccacccatcagcgacacaccacgcgacacccccgcggctatctaaacgagccccacccaaccccacataacgctccgatgactcccc

SEQ ID NO: 703331 - DNA, 104 bp, Homo sapiens
gcggccgcctactactactactactgctcgaattcaagcttctaacgatgtacggggacatgatcagtatgtgtttccatataaaacttttctcaacggaaaaa

SEQ ID NO: 703332 - DNA, 166 bp, Homo sapiens
ttcttgcggaatgaatttgtgcccttgaggcgctccacctggagccgtgtgctcatataagatagtgcacacattctggtctttgtcggggctaagtaaaacacaccgcgcatgtgtctcttaatttatagaggagtcactctacagggcgggtgctaccacacag

SEQ ID NO: 703333 - DNA, 334 bp, Homo sapiens
ccttttgccctctgcccaaatgtgtccagcacgttttcaaagtttccccattagccccccctaaggacgctgggaccctgccagtttatgatttggcctaggcccccccttttttttgtcccctgggtttaagtcaggatttttccagagggagctgtttccagccagctccatcaggaaccaagcaaaggccaaataccctgccaaataggctagtggtattgtgtaaatgggcgggacgggggggtcattattatttgagttaagctgttgtttaggggtaaatacccgtaaataattaataataataataataaaggagctgccgttttta

SEQ ID NO: 703334 - DNA, 103 bp, Homo sapiens
aattcaagcttctaacgatgtacggggacatggtggggtggtgattacacctgtgaatagccactgcactccagacttggtgacagagcaagaccccatctca

SEQ ID NO: 703335 - DNA, 176 bp, Homo sapiens
gtggtgtacctgctggatctatccagatgttgggaccaaataaccacatacctggaccaaccagacttctcccgtgagccaggcaaaggaaattgtcatctgccaactgtcctactcattatcctctcagtccttcttgggggtaagctgattacctgaacgacagctgaacccct

SEQ ID NO: 703336 - DNA, 417 bp, Homo sapiens
  misc_feature (12)..(12): n is a, c, g, or t
  misc_feature (70)..(70): n is a, c, g, or t
aaaattgccagnattaaaagggtttgcaaaaatgaaaccttttttttttaattttgaaaacgaagccctnaactctgtcaccccaggctggagtgcagtggcgcgctctcggctcggtgcaatctcccacctcccgggttcacgcagttgtcttgcctcagcactttgagaggcccaaggggtggatcgcctgaggtcaggagttcatgaccagcctggccaacatggagaaaccctgtctctactaaaaatacaaaaattagccgagcgtggtggttcatacctgtaatcccagctactcgggtggctgaggcagaataattgctagaaccagggaggcagaggttgcagtgagccgagatcctgccattgtactccagcctgggtgacaagagcaaaactctgtctcaaaaaaaa

SEQ ID NO: 703337 - DNA, 706 bp, Homo sapiens
ttacagccaggctacacagccccaccgcctccacctccaccaccacctgcctacaactcggctgtgtagggcggttactgcctcgagggtggtgtgtgctggtattggcgcttgaccagggatgtgctgtcttatgtagtgctgcccctgcggttccgaacgaggggattgctaagtcggtggatggaggcacccttaccgaggtaggtttcaagccgcagcgtgatatgtggtgggcttatctgccagaaccgctgggtttaactaacaacacggggataacagacaaaatccaacgaacagaggcagcgtactacctgggctccccagacaacaggccgccatgcactgcagactccgttcaccacagcacaaccaacctccgagcaagcccaccggcccaacgacccaagctacaaggcccatgctcgagaaccaccaccaggaagcgataagcaccctatcaaataagaaacaagcaaacatcccctgagctctatgagccacataacaaaggaccacaccacaaccagtcgccgcaggcatacacgcgtcttaccacagcacgaaatatagaaaccatatagccaaacaagaataacccaagcagacgtgtatacattcaatgggtatcaacactactcttctagacgacacaagacccacacagaaattggactacacacattaagacagatacagatat

SEQ ID NO: 703338 - DNA, 933 bp, Homo sapiens
  misc_feature (262)..(262): n is a, c, g, or t
  misc_feature (266)..(266): n is a, c, g, or t
gtggggacaatattcttccagatctctaaaaggggtcccaaaaagcgttgctgccccaccttgggacccggaaaattttcccccgagacgcctttctcgggcttttatacaccagtcggggtccccgacgcactctccgtggtgggtccgcccgctataagactttggggcccctccgtcctacataggggggctcactcccctcttccacccgtcgcatttctccgctgttctatcccttcgcggggcttatctcggcgancatnggtctcgacaattcctcaacgatgcaccggttgtgccttatgtcccccacccgagcgtccgtattggatatccccacaaggcccgtcgcgtctccccccccaaagggccttttgttgccagaaagacctccttgtgagtcccttaagatcagccaaaaagctatgcacgcaagttttggtggcgccacacgctcggaagaaaccccccgggggtgattaacccccaagggcaggggacattatagagcgcggcatctatcttgttcataagttgcccactcaccgcaggccctgtcttagcaataatgtcaatcaccgcaccaggtcgcttccgggtgcaaatccctggggtaccgccgcggaacgtatgggggcaccaaggagggggcacaacaaatcgaagaggccaaggcaggatgggtagcccccgcggacaacacgcaagagatctcggggtctgaccagctaagagccgcccactattccccaggaggcagtctcaacgcccgcggggatgcccacagggatgagggagaacgaccacggggggcacactagagacgcccccaaagggccctagagcgacgcccattgcggcccgctggatactcacgcccccgcccccatcccccgtggaccctaacctcctttcgtcaaacatagaaca

SEQ ID NO: 703339 - DNA, 636 bp, Homo sapiens
  misc_feature (177)..(177): n is a, c, g, or t
acccttgcttccctttcgaattagcttagcacattcttatcatgcttttgtttctctttgtgaaagactccaaacatcgaaactacgttaagaccagttagagcttctttcattataatccagttaggagacaattcatccaacttgtcttgattatgccacagaagctaagtgatnaaatcagaatctgaaaagaagaaacgaaagcattaagtgcatccaaaaataaacttgttgaacctggggatagtgtaagagtaggagactttctgaaagccactttggaaatatgattttaatgagattcattattgtcctttaaggtcaaagttgaaagagtagtctatctggctaatatcaaagaggtttaatttttgttgatttggagataaagcaagtataagcttttcattataaatatgtttttatacttggaaaataagaaatagaagcaatcagtagtcacatatgtgccctgtgatctggttcctgtgaacattttctataaatttaaattatacgtaatcatttatagtccagaagcaggtgcaatgtggatatgcaaagctgttgaaatgctatttttccaaagttggctggaaataataccatacacaggaggatgggtaccgtggt

SEQ ID NO: 703340 - DNA, 1379 bp, Homo sapiens
gggagaactagtctcgattttatttatatctgttctagggataaagctcttttatggtatgctttgaaaccttacaggggcagccttcgggtccgggggaatctgcgtgtccctgcgggtttttcttctagggtatgggaattattaaacggggatattaggggccccgggggtccaaaatctggccaagtgaagagaagggccccgtgtgtgtctggtgtccctcagatagcaaaaagtgaaaggcgggtaaagggtgaatagctccaggcgggaaagggtgacgggtgggcaggcgtgcagcccgtgggcgtggggggtggttcccgccccatccctcggtaccatgtcaaagcccaggccgcgggtggtacccaccgtggagttcagctgggagtgggttttgccgtggtgaatctgtgggtaaagctcgtgggtgacatcagaaaagaggatgtgcaggtaacatctccgtgcaaaggggaacattgtgggtgaattttcgccctgtttcgcgtaaagcctccacgctttacaagacttgtgggggacccaggtgagtgaaccgctcgtgacacgggaggctaatacaggtcacatgcggagcatagtgtctcaatcgcagatgtgaaaccctgcggagagagacagaagagactcactccaatcgatattcaaagggggccaaacagattcctggggggctacacccttgttcacaagagggggccaagggaaaacggacaaccgactgagagataacctacaagatgagcataacccccgggctaccaaacgcgggccaaagcatcgtggggggacacacacttcctgtgcaccacgtcgttggaagagaacttccgtgggagaactccccaagagggccccaaattaagcgcgggtatacaacaacaccacggcgcccttctacggagggaaccccggaagaacatccagctgggggagcaacccctctacagcggcggagcccaccgctatctaagccaagtatccccaaagggagctaggagaaaacattacgcatccagcgaagggaggggaaaaaggagctcatacgaccagatgcgggagagggcatcacatcaagaacgcatctgtcgggtggtagaaccccccccaatgtgaaggccgccccccgagtttgagaaaagatcgatgtgggtgcgcacaccaacacaaccgcggcgagaaaaacaggcggaccacaacaacggcggctcgagcaaacactagcacacaccaggggggaaaagaaatctacaccccctatgggaggttcgtgagacacccgctggtgcgagacacgagctattcaccccccgtctgaacaacatcatggtggcgcacctagaccaccc

SEQ ID NO: 703341 - DNA, 169 bp, Homo sapiens
caggatcgtctctgcacggctcaggactctcaaagcccgcagctgtggacagcccggggctctctgcgtcctcctctgtgctgtccacctcctctgtgctgtccacctcctctgtgctgtccaatgctgtccacctcctctgtgctgtccacctcctctgtgctgtcca

SEQ ID NO: 703342 - DNA, 124 bp, Homo sapiens
tttgagctcggtacccgctgaatcgtccccccaatggccgaatgaagccctaataaaagcaccaacgtgatcgtcgacgtggggccacttccgcgatgagaaagtaaaggctttagcgtgaagt

SEQ ID NO: 703343 - DNA, 123 bp, Homo sapiens
  misc_feature (91)..(91): n is a, c, g, or t
cctgcaaactttttctgtaaagaccagatagtaagtattttatgctttgtgagccatacagtttttgttgcaactagtcaactctcaactnacgtggacagcatgtaaagaacgagagtgact

SEQ ID NO: 703344 - DNA, 356 bp, Homo sapiens
gcggccggttgtatcccaacacatttattaatagggaatcttttcgcatgcttgttgtgtcaggtttgtcatacatcagatggttgtagatgtgtggtgtgtttctgaggcctttcttctgttccgtggtctatatacctgtttgggtaccagtaccatactgttttcgttactgtagccttgtagcatagtttgaagtcacatagtgtgatgcctttagcttagttcttcttgcccaggatggtcttggcaatacgggttctttttgggttccatatgaagtttaaagtagttttttccaattctatgaagaaagttagtggtagcgtgttgggcgataaatcacggggatcctc

SEQ ID NO: 703345 - DNA, 123 bp, Homo sapiens
ggtttgagatgccaagggaacctggtcttttgatttggggttcaacatacagaggtagcagtcaccatttttctcaaagcggtgatccttatttggggccctcaaaaggggacttgctttaaa

SEQ ID NO: 703346 - DNA, 172 bp, Homo sapiens
  misc_feature (9)..(9): n is a, c, g, or t
  misc_feature (21)..(21): n is a, c, g, or t
  misc_feature (41)..(41): n is a, c, g, or t
  misc_feature (64)..(64): n is a, c, g, or t
  misc_feature (70)..(70): n is a, c, g, or t
cttgggggnctggggcggganaatcgcttgggcccggtagncggaggtggcagtgggctgggantcgtgncgttgcactccagtctgggcaacagagcaaaaactctgtctcaaaaataaatgaataaataagtgcatcttaatctgtgcacagtgaaatctgcagaatttc

SEQ ID NO: 703347 - DNA, 421 bp, Homo sapiens
tccccaaggaacaatgctgggattgccactgtagggaaccccatttatccagtgggaggattcgatggcaatgaattttttaatacggtggaagtttataaccctgagtcaaatgaatggagcccctatacaaaaattttcccgttttaacaaatttaaaaccctctccaactaacaggcttagttatgtaattatggttagtaaagggcccctttttaataaaaagggtgggtgggtataaatttttctaacaccaacccaaagcttttgcatattgcaaactatttaacaacccggacaaaccttttgggtttttttggaaaagaaaccaaaaaaaaaggttttttttgtggacttttaaaactttggttttttttctttttggaaaaaaataaacccaaaattttttgggcccctcca

SEQ ID NO: 703348 - DNA, 399 bp, Homo sapiens
ccgttggccgttgttgttaaactggaaccgcgtctggttaagatcctcattaagtaatcaatcaagttccggccaagcaagttggttaccccgttaccggagtccatcccgattccaattgttcggccaaaagcgttcaaggataacccaacctggataaccacggacatggcttgggtgtttaaagtctccaacatgatttgggtcatcctcttgcggttggcccttgggttcaagggggcctcggtcaacaaccccgggttctccttgggaaccccaagcaactcaatggaaaaagttttggtccaaattttttccatgttggtccaatttgttaccattccgtgccccattggggtcttcaaggttaagaagcctttcctgctttgggcccccctg

SEQ ID NO: 703349 - DNA, 810 bp, Homo sapiens
acagctaaggcaatatatgtaacaatacactaagcataatgagcaaaacattggttatgcgccaaaaataaacgcaatgccaatgcttaaagtgtgcaccaaaagatttaactggcaggaagaataattagcacaataactgaggtagactaacacatgcgaagatctattagaatacacactgcacaaaggacaagatgtttatacatcacacatgagagacatatatcaatatgcaaacttataaggatccagtcgaacagtaacaaattatgtaataaaggatggaatagctacaacggaataactatgttacgaacagaaagcttcgacgaaggtagttggaccaaatctaaattgatgatagcgctggaacaagtaataccaagttgtcctacgaataaggaaatgccggtaataagtaaaatgcaaagtcaatgcggtttcgaaacaccgatggccagttaaattagggagacacattaaacctggaaaagtcatgaacaggggaatatgcggaattagacgaactttccacgtaagtgaactgaataggtatcacaagaatagagcaatacctttcgagttaaattgatacttaaataaaataagtaaaggtatacctttcaaaaaaccacattaaatgcacagctggggaaacaaaggtatccaagttgcataggggcacaccacacaaagcggaaaaaaaaagttaaagtggcttgggacaaaagaaaaatttacaaaaaaaacacataaagtttaacactcaaaagggagaaaaaagccaaggcaaacgcacaaagagca

SEQ ID NO: 703350 - DNA, 1108 bp, Homo sapiens
gcctgaacctgcgcggacgaaccctccggtgtccctgaccaggctaggcttgagcattggctgatgcaggagctccacagccgatcagctggcccagattgcaggcggagaactgaggagtgatgagtcacctcggtcaacatagcaaggtcctcctcgtgtctcgatgaagagctagtccatgcgagatccacggagctggattgaggacgacgacgagcctgcgaacagtacagaggaggctcctgctgggccagggttggccgtttcctgcagaatcctcaaacagtcgcccaacgtcgttggtgactggcactgaacccatgagatgtgcagctcgggcgccggggccccgtggcagctgggacctagacggggcgcacctcggagaatgcttccaacgaagcaagtcggtctttgtcgctttggaacgggagcggttgttggatgtcacctgtgatcatacaaatcctcgtttgcccgcgagttcataccccgcacggagatacggtgatcccggggacactcgcaaagggtaccgagttcctacgcctagtaacccgggtcaccatgggcccacatgtgccggtccagcggaagtcttgaccaacccgagcgtagaaccttagccacttcgggtaaggcgcaccgcattacgtagggggccccccccgcatggcgccgggatgcgcaggataactcgcaagctgtcacctgggagcccccgcccgcttgcgacactcgtatatgccccctcccacagggcggtaacttgccactgctgccccctcctggggtgcgacccttagccagtggtcattccaccgttttcccctgtcttgtcacccagcaccgaaaccagcaccaaccgccaccccgaatcccgagccgatggtctccatgcacgcccgcttgtcacactccctcaaccccagtctcacactcacacggcctgacccttgccgcacacgggcccattggcacgcccccgacagcccgacgacacgcgccctgcgcgccgtgcgtgcccatggaccttgcacccggtcaaaacagcacccccaaacgcgtcaccccgcggcccgacaacacagcctcatgcaccgcg

SEQ ID NO: 703351 - DNA, 221 bp, Homo sapiens
  misc_feature (100)..(100): n is a, c, g, or t
cacattgtgctggcccctcttaatactcaccaataaattctacttcctgtccaaaaaaaaaaaaaaaaaaaaaaaaaaaaaaaaaaaaaaaaaaaaaaanaaaaaagaccccctcttttttttttttgtggggggggggtggggagggggtgtgttgtgaccaaaagggtgggcccggggggcgcggggaaacaggtggggggaggggcgcgcgccggccc

SEQ ID NO: 703352 - DNA, 299 bp, Homo sapiens
ccctggacctttgggacattctaagggctacctgagtccacatatacaaggactcagctgaatctttggtaagactgtgtcccagttcagcttctctctctgcatgtttccttcccatcagcatgcctgatgctgatcctatgagcctgtcctaaaacactcttttacgataatgtccctctcagagtctgtttcctgggacctgaactgtaacaggggcctttgcttctcggagtactgacctagccgaattttttttttttaatgttttggactctggaaaacatttccttagtgaa

SEQ ID NO: 703353 - DNA, 97 bp, Homo sapiens
ttttcagtattgcattgaagtgggaaatgagcttaaaactaattattattattattattattattattgttatttttacaaaatggaatacggtagc

SEQ ID NO: 703354 - DNA, 162 bp, Homo sapiens
gacggaaccgcgacactacttgcatgaagggcgcacgtctgccaggtgcccgagtcctgcttcctgctccgttgctgcctctcccgcagagagtccagctgcttcttgtgggcctagcatagagctccacgttgtccgacatcctagtactacccagacctt

SEQ ID NO: 703355 - DNA, 172 bp, Homo sapiens
gtctggacgcttcgactggcacgcatctcagcaaatgttcttgtatgactctcactgcaaacctgatataatgtgcatgactctgtcggtgctctacccaggagggcccatggacaccagtacaggccggatggcaccctgattctcccatgcacaccccgagaggtccaga

SEQ ID NO: 703356 - DNA, 296 bp, Homo sapiens
aatgagtggctggaggatgctacatgcccatcataggctttgtcgtagggaaataggatattacaaggatatggcaagatgttatcaagaagggtactcctctatagatcggtgggcaagtgtgtgagcatagttcccggtcgtacgtccatacacacgtgtacagttcagtggaattaagtccattcacattgtggtacaaccgtgaccaccacccatctccagaatgtattcacctttccaaactgatcctttgtgcccattaaacactaactctccattcccctctccctcca

SEQ ID NO: 703357 - DNA, 323 bp, Homo sapiens
ctgcagtgagctacgatggtgcccctgccactccagcctggcaacagaatgagaccctgtctgggtttgggggagaagtgatttacaatgttttgaaaatatcctttggcccaggcatggtggctcacacctgtaatcccagcactttgggaggccgaggcaggtggatcacttgaggtcagaagtttgagaccagcctggccaacatggcaaaaccccatctctactaaaaatacaaaaattagccaggcatagtgatacatgcctgtaatcccagctactggtgaacactccagcctggtgacaaaacaagactttgtctc

SEQ ID NO: 703358 - DNA, 960 bp, Homo sapiens
ggagaaataggaacacttttacactgttggtgggagggtaaattagttcaaccattgtggaagacagtgtggcaattcaccaaggatctggtactagaaataccatttgacccagcaatcccgttactgggtatatacccaaaggattataaatgaactcccgaccgcaggtgatctgcccgcctcagcgtccaaagtgctgggattacaggcgtgagccaccatgcctggcaattgctacaaagagaataaaatacctaggaatacaacttataaggacctcttcaaggagagctacaaaccactgctcaaggaaataaaagaggacacaaacaaatggaaaaacattgcatgctcatggataggaagaatcaatattgtgaaaatgaccatactgcccaaagtaatttatagattcagtgctatccccatgaagctaccattgactttcttcacagaattggaaaaagctactttaaagtttaaaaaactactataaagacacatgcacatgtatgtttattgcggcactgttcacaatagcaaagacttggaaccaacctaaatgcccatgaatcatagactggataaactgaaatgtggcacatatacaccatggaatagtatgcagctgtaaaaaaggatgaattcatgtcctttgcagggacatggatgaagctggaaaccatcattctcagcaaactaacacaagaagagaaaaaccaaacactgcatggttctcactcgtaagtgggagctgaacaatgagaacacattgaacatgcgggctggggggggcattcacaacactgggggcctgattggggaggtgggccgactgggggggaggagtaaccattaggagaaatacctaatgtccatgaatgggttgatgggtgcagcaaaaccacatggccgtaatatcctatgtaacaaacctcatgttctggccatttccca

SEQ ID NO: 703359 - DNA, 136 bp, Homo sapiens
tacggcaccctttgcgtaccacccaacccgccggcttaatcgccgctcaaggcccgcctgtagcggattttttctttaccattgtggggttttcaccggatgaacgatacccgtttggtccatttccagaggttaa

SEQ ID NO: 703360 - DNA, 380 bp, Homo sapiens
  misc_feature (17)..(17): n is a, c, g, or t
  misc_feature (61)..(61): n is a, c, g, or t
  misc_feature (74)..(74): n is a, c, g, or t
  misc_feature (108)..(108): n is a, c, g, or t
  misc_feature (180)..(180): n is a, c, g, or t
  misc_feature (210)..(210): n is a, c, g, or t
  misc_feature (244)..(244): n is a, c, g, or t
  misc_feature (275)..(275): n is a, c, g, or t
  misc_feature (302)..(302): n is a, c, g, or t
aagttgggaaatctgtnttggaagcccaagccaaactggaagatcaacgatgaacgggccntagtagaggaggncagcccaccttcgttggccgccccacagcccagncaggggcttgaagatgaaggggaaggacagcaggacgcagacggtgccgaccaggtgccaggccttgcgcgngccgtagcgggcgcagcagctggcggcgcngtcggcctcgtagcccacgagcggtgtgcacagnccgtcgccacctggcccagcagcagcaagcnatgcccgccgcgggagctgtaggcgcnaccgagtgcaggtagagcagcaggtaggtgaaccacatggacgcgcacaggtcgttgaggaagtgcccacggcgtagc

SEQ ID NO: 703361 - DNA, 543 bp, Homo sapiens
aggttgacctcagaacaagaactgcatacctgggagaattcaaatctctgtcagccccagaacactgggggggggtggctggaggccccagttgggagatccctcactgggcaggacctaaagacctccatgccagggagaactcaaatcactgtcagcctgagaacaccggtgggattggctggagaccccagctaaaaggaccctcattgggcgggactttgagaactaggtgccagggagaattcagatatctgtcagcccaagaacaccggtgggggtggctggaggccacggttgagaggtcccccactgggcaggacctcaagacctccatgccaggcagaattcaaatctctgtcagccccaaaacactggcaggggtggctggatgccgaggtccttcactgggccagaccccgagacatccataccagggagaattcaaatctctgtcagcccaagaacaccggcgggggtggctggaggcccgattgggaggtcactcacttggcaggacttaaagacctccatgccagggag

SEQ ID NO: 703362 - DNA, 551 bp, Homo sapiens
  misc_feature (459)..(459): n is a, c, g, or t
  misc_feature (469)..(469): n is a, c, g, or t
  misc_feature (508)..(508): n is a, c, g, or t
  misc_feature (527)..(527): n is a, c, g, or t
  misc_feature (540)..(540): n is a, c, g, or t
tgtctaactgctatggttagaacatccattactatgttgaacagaaatagcaaaaactgacatccttccattgttcctggtcttaaagaaaaagttttcagtctttcaccattgagtatgttgttcactccaagtctttcacatatagtagtcctctcacattccaggaccacagtgaatgactgaaatcatggataaaaccaaaccctacacacactatggtttttcctatatgtacacacctattataaagtttaatttataaattaggcaaggtcagagattacgaacaaaaattaacaataaaatacatcaattatgaccaagggtggtagctcatgcctgtaatcccagcactttgggaggccaaagtggccagactgcttgagcccaggagttcaagagaaacctgggcaacaaggtgaaaccccatctctataagaattttttttaaattancctggcatantggcacacacttgttgtctcagctacttgggaagctcangcagggaggatcacttgancctggggaagcanaggttgcagtg

SEQ ID NO: 703363 - DNA, 383 bp, Homo sapiens
gatgcatcgtgtcgatgatcagacgaagtattatagagatagctttgatagtagtttgtgcactgcgtcatcattctgcactctttggaatggattataatgagaagaagtaattgaaccacccccgttgttagatgtgataagtgtggtactgatctactggcgagcgatgatgatgttgcggggatagtcggcataggcatttgtcgctaatgatgctatgcttcagactggccatttatgaagatgaagaatacagtcagctttgtgaaatagtattgcaagcaagccccgtgggcaaatttgtattgagtccatctgtaatttgctcagtgatggcagacaagatggctgtctggttttgagacactttgcatcgagag

SEQ ID NO: 703364 - DNA, 250 bp, Homo sapiens
tagtagagacggggtttcaccgtgttagccaggatggtctcgatctcctgagctcatgatccacccgcctgagcctcccaaagtgctgggattacaggcgtgggccaccgctcccggcctatattttcgattttaaaataaatataataccttattacaaaaatagagatggggattcaccgtgttgcccaggctggtctcgaactcctgagctcaagcagtccaccagccgcagactctcaaagtgctg

SEQ ID NO: 703365 - DNA, 1017 bp, Homo sapiens
gggcataattatgtattagtatctctaagaaagaggtggcttttacctatacaaaattcgtctggtagatcagctggctctaacacttaatgtaccatgaataagaccgtgtggggtggcaagtgcgattcgctccgtacaaagtggcagatggtactgctgggtgagctcacatgatgactagtagatttaccggtattacttactagttattatgcagatatcctgtattgcgggaggcaggaaacgccaagagaacgcgaaggaaggattagttgcctattgtcacccgaaatcaccaatggtctagccagatgttgtcccgggatcctttcccgtcgcgatcgcctcgtattactctgaactgtctcttggtagatgtggtctgggaagcttgctggagctagggggttctggtaacatggccccatatggaagtggagcacgttcaggaatagaaatactcattgaattctaagcgatgtatatatgactttagtagagagatttgattgggatttcgctttttggaatgggttagggcaggattgggaagagtttctgggacctcggggaacggagactagtctggtgatgtggaagtcttctttcacccgaaggttgagaacaagaaatatgcgttatttttaagtggaagcacttttaagtaagaacaaatctgaggatacgatgggaaaagatctccatcaaaggttaggagatcgcctagtcaggggggggttcggggagaacggaggtattagagtggatttctattgtgccaggcgtttattgcaagaagaacctgttgtgttagggccctggccaaggggggtcgcgccagacattcatttacttcatgggcgacccaaattggactagcatcggcgtgggcggttggggttcggcctcggagtccgcttggcttgtaggggtccaccaaaatccttcgaggtgggacccaagaaaggtgggcaaagtggcttggacggaattgcacctggggatgccactcag

SEQ ID NO: 703366 - DNA, 508 bp, Homo sapiens
cccttttgcggcgactgactctgttcggatgatactacatccagagtgacagtagagaagttcttcctaagacgacaatgacatcgatttgcagtggatcgaaccttagaggtatactagggaatactgatgcactagtgtgattccggcacccgtcccctgaagttttcagtccggtttgacaagagaatttggtgaagccacaaagatcccccaatggctacatcctagctgactgggagaaactatggcttctcccatccagctgtcacttggaccccactccccttccctaagaaaatagggaggccgaaagggcaaactaacaaaaatgagaaggaaactgggtttgggcccccactgctcaccactgggaggtggaagtcagcccggtggcggtttttttccacctccttcctttgccggctggctgctccctaccacctctctcctgctggccaaaggttctgaaactctcacaacgggtgcccaactcaaggaaaactca

SEQ ID NO: 703367 - DNA, 128 bp, Homo sapiens
acacagaggcagcagagcactgactccccacgtgatggtgctcctggcccagcacctggcccggcaccggttgcgggacgccagcttctggaaccattgcccacttcctggtggtcaggaaacgcaac

SEQ ID NO: 703368 - DNA, 388 bp, Homo sapiens
  misc_feature (44)..(44): n is a, c, g, or t
  misc_feature (53)..(53): n is a, c, g, or t
  misc_feature (101)..(101): n is a, c, g, or t
  misc_feature (144)..(144): n is a, c, g, or t
aagggatccactgcctcggcctcccaagtgctaggataacggtntgagccacntgcccggctgagatcattgcaataatattccgctttctatgaaatgantttgtttaccgtaaagtatgcttttaaagactttcagatttangctttttacgtgaagctgctaaactaaaagtaatggaagaaaccaagtctagtaggttttttcttttttttgtgggggtgggatgggggaggttagttacacttaaaatatcttctccagagactgtatgctcctatactagactgtaagctctttgagggcagtctgtcagatttatctttgtatcttccccagcgcctagtgtagtgccttgcacataataggcgcccaataaatattgatg

SEQ ID NO: 703369 - DNA, 193 bp, Homo sapiens
gtggtcatgactacgtcttcctactacttacctgcatctcatgtggtggatcaaggatccttttttattctctctctgagacaggatcgtggctctacttgcctaagctggcagtgcatgtgctgcaactcatggctatactgcacgccttacccaactggatctcaagttgatccatcctgcttcagatctc

SEQ ID NO: 703370 - DNA, 423 bp, Homo sapiens
  misc_feature (210)..(210): n is a, c, g, or t
  misc_feature (253)..(253): n is a, c, g, or t
  misc_feature (374)..(374): n is a, c, g, or t
  misc_feature (406)..(407): n is a, c, g, or t
  misc_feature (421)..(421): n is a, c, g, or t
gttcagtggttctcaactccatagaaggtccctaaaatcacataagcataagcccctgcacccagaccctactgagtcaggaccctctgggtggtcagtaccctgactctgtggggccccaggcacagctattttttaaaagccacaggaggcccaggtgtgaatgtcacgcctgtaatcccagcactttgggtgcctgaggcaagaggntcacttgagccctggagttcaagaccagtctgggcaacatagnaaaacctcatctctataaaaaaattttaaaaattagcacatgcctgtaatcccagctactcgagaggctgaggcactagaatcacttgaacccaggaggtggaggttgcagcgagctgagntcgcaccactgcactccagcctgggcgacagnnaaagactctgaatnat

SEQ ID NO: 703371 - DNA, 301 bp, Homo sapiens
  misc_feature (41)..(41): n is a, c, g, or t
aaacagtatcattgttcaaacacagtaggcaaagatccagnaaattagcttaaaagcagtttagagggagccgggtacagtggctcatgcctgtcatgccagtttgggaggctgaggagggcgatcacttgagtccgggagtctgagaccagcctaagcaacatggcaaaacaccccatgtctaaaaacaaacaaacaaaaaatgcggtttagagacaggaggcagcgtggatctctagagctgtcctgctgccgtccaggagtgccttgtatgtaagttgaataaactcgtctactcatc

SEQ ID NO: 703372 - DNA, 476 bp, Homo sapiens
gtctaacgggtcctcctctcgttctcaccacaccacattgcttcacatataaaaagcaacaatccaatacacggcacaacctatactgaaatataaaatgcaaatatcccttgattcagcaattccaatccttggtatttatctccagatacacaggagatagatgatcgatagatagatagacagacagataggcagggcgcggtggttcacgcctgtaatcccagcactttggaaggccaaggcaagaggattccttgagtgcaggagtttgaggttaacctgggcaacaatagtaaaactgtgtctctacaaaaaatacaaaaattagctgggcatggtagcggccacttgtaattccagctactcagaaagctgaggcaggagaatcgcttgaacccagaagagggaaattgcagtgagctgagattgcgccactgcactctagcctgggcgacaagagcgcaactgttccc

SEQ ID NO: 703373 - DNA, 435 bp, Homo sapiens
ctccgataaatccatagcccgttgaattaaggtggcaccattactgacatctacgataccgctaccaaaattaccgacattgatacccacagtatcgaacgatgatgtcgcatccatcaggttcagtgtgccgataccgcttgctttatcgcccaaaaacgtaatatttcgcgatacgaacttaccgccatcgctaatattgaggtttccgacgcccgcaacaccaatggtggtatagacattcttattgacctcccacattccccccgtggtgatgctgacattcccgacgccggtttctccataaccgagtgaacttcctccgttgctgacaacaagcccctgattactgatattcatttcgccgtggccgtcataaccaagattagttccgagattagtgataacggagttcttatccttaacagtaatgtt

SEQ ID NO: 703374 - DNA, 101 bp, Homo sapiens
aggagaacatgcggggtgtgcgcttcgacgttcacgacgtcaccctgcacgcggacgccatccaccgcggagggggccagatcatccccacaacacggctt

SEQ ID NO: 703375 - DNA, 279 bp, Homo sapiens
aaatggggaaaaagtccccgaaatgggggcccccggcccccctccccaattcattccctaacctgcaaacctttccaatttttcacgtcaggcctttgaaaattttttccccctttcctggtttccccccctcaaacacgcccagttccccaaggcccttttgtagtcccatgaattgaaaaggaaaccctgctcccccggaggggagcaggaatgttgccctgtttaccccctgactgtgcttaaaaaccctttccctaataaatggttttaaatcca

SEQ ID NO: 703376 - DNA, 667 bp, Homo sapiens
tggggacgcggtggctcactgctggtaatccccgcactttgggaagctgaagcaggaagatcccttgagcccgggagttcagaaccagcctgggccacctggagagaacccatctctacaattcgccaggcgtggtggcgcccctgtagttctagctactgggacagctgaggtggcaggatcgcttgagccgtcgcggtcgaggctgcagtgagctgagatcgcgccactgcactccagcctgggcgacagaccaaagccctgtctcccactctctatctctcactcttcctccccttcccgttcctccctccgtcccgatcacaacttctcctacccctctccctccccttactctccacccccatccctgcctccaccacatcctttccggccccttgccccactccgctccgcacctctcccccttctccctctcccccccccccgtcccatctggcccactccgccaacatcgggcctcttccatctccctggccactccttcaaccccactcccccgacacccccccgccccccccccctctcactctcctcctcctcacctccccttcccccctctcctccccctcccccccccgcctctaccccccccctctcctcccctctccctcccgccgcatctccctctcactctctctccccc

SEQ ID NO: 703377 - DNA, 454 bp, Homo sapiens
  misc_feature (72)..(72): n is a, c, g, or t
gagacaggttctcactctgtcacccaggctgaagtgcagtggcatttgaggtcagtctcaccttgacctccncaggctcaaacaatcctcccgcctcagcctcctgagcagctgggactgcaggcatgtgccaccatccctggctgattttttaaatttgttgtagagatgaggtctcactatgttgcccaggctggtcttgaactcttgggcccaagcgatcctcccgcctcagtgctgagattgcagtggtaagccaccatgtccagccaactctttaataataggcagttctgactggtgtaagttctgactggtatctcactgtggttttaatttgcatctctgatgattagtgatgttgggcattttttcatgggttttttgtttgtttgttttgagacaaagtcttgttctgcagcctgggtgacagagcaagaccctacctcagaaa

SEQ ID NO: 703378 - DNA, 381 bp, Homo sapiens
gacaatcacgagtgtgtggtcctggcatgtcatcaatagcccgttttgtacatacctacaagggagctgaaggggccaactcagctgtcatctagaattcaaacatcgggcatcctgcggtgtgagcagactcaaatgatgtacatggtataagaacatgaccatgctgttggctaatttggtcctttgcttctaacttggctgtctttgccaagtacctggctccacacctttttcctgtgtggtcccacagctccaccaatgtctccttggaaaacatggtggcacttcccttcctcgcgcttctcttttaagttccgtactcccttcactcacatcctagcaggcctctatttgaagtgacctctgcttccaatggag

SEQ ID NO: 703379 - DNA, 432 bp, Homo sapiens
ggcctagttattcatttcactaccaagccatgaaggagaaatctgttttaatgcataaatcaataaaatggagctttaacatgtgagaagccaagtgataactctgatatactttcctaagctatgcgggctgaaagctgggttatttcattatttaaaaattctaggtaggggactgtggctcacacctgtaatctcagcactttgggaggcccatgtgggcggatcacttgagaccagcctgggcaacatggaaagaccctgtctctactaaaaaatacaaaaatttgccgggtgtggtgacgcattcctatcgtcccagctacttgaaaggctggggtgggaggatcatctgaaccctgccaggtcaaggctgcagtgagccatgattgtaccactgcctgtgtgaaaaagtgaaacactgtctccaaa

SEQ ID NO: 703380 - DNA, 524 bp, Homo sapiens
ggacattgagggcgcaagagaggacatcgtgggtcctgtctacctgcggcagcgcgtgccatgccctgtgaatacaacaactcctactacggactgatgcttttgggaacacccccgtccatggtatcagtgtccccgtgtgacctgcttcaactggtaagggcctgtatacacgtacctgatagtaccggactactcgacgcgtaacgtgaccaatagaccaacatcagactgatgacggagcgagtgggtgatgaagaagagacagatgacggaggaggcactaaacggatgacagttcccatgggaccgcgtcacactgtggcggcaagccatccgagcacccgtgagcccacgagcaggcgtggtgcccaggctctggacgctcacgaacagggtgcccgttcctcctggacaatgtgccttgcgcacatctcagtggcccccaaggcgacgacgcgagcagctgttcaccctgcagacggtgaactccagtgggaccagcgaccgcacaaactccacct

SEQ ID NO: 703381 - DNA, 166 bp, Homo sapiens
tgactacaagtccgatcccatcacctacctgtttaaaaatcccaaatatgggccagacgcagtggttcatgcctataatcccagcactctgggaggccgaggcgggcggatcacctgagttcgggagtccgaaaccagcccgaccaacatggtgaaaccccgtcgt

SEQ ID NO: 703382 - DNA, 336 bp, Homo sapiens
tgtggagacgggggtctcaccatgccggcccaggccgggtcctgaactccggggctcaagcaatccccccgccccgacctcccaaagcgctgggaccacaggcatgagccacagcaccgggctgtttttaagtaatgggaaatgttctatatctccgtggtaacaggattggcatgggtgaagacattggtcaaaactcatagaatggcacacttagaaggggttttctttatataaattattcatcagaaaattaaaagggaaaaaaggctaggggtaacaacaaaaataccctttgagatgaatataaaatattccttagagaagcagcgtctc

SEQ ID NO: 703383 - DNA, 859 bp, Homo sapiens
ttcgcccctttttcttcggggttacgccccctccttggccagtgcgggcgcctgtcccccggtggtattgtcctgggcctcctttttggccccagggcctcctccttcctctggggacccggccccctcctggtacaaagggtggggcccccgactgcgttgaattccgggtggctctgccctattgcacgagggtgtgtggtcgaatcctctacatttcgtggcctctgggggagttcccccttcgtcctcccgtccggggagcgcatcttgaagtccccccagaatttgtgttggccaatgtgcaggttttatcgagtgcgcccccttggggcggcaccctcatgcgggagtgtggtgcaccccccgatggtgttagcaccgcgggtagacccacggatggtctggtatttcatgttctgccccaccccgcctgctttatgtggcacgcgtccccccccgtcttgagtagttctggtcgcaggcacacacaggcaagtcttcggggcacctttgaatgccgccctcgcgcgatgtatttgtattctccccagcggcacgctgcgctgtggctaccaaaagcagcccgtcgcgggtttgtgaggggagtactcacatcccccacttgatgaccacgagcgagtggacatctttttggaataacatgcacgcacaccttactaatggtcacatcgcggctcccccggataccctagtagcttccaacccggccgcctcctttgttgaccccattgggaactaggaacacctttttgcacacttgaggcaagtagaatgagtccgattgataggtataactacatgagaagtgtctaacaaaaattcgcccaacaagacc

SEQ ID NO: 703384 - DNA, 363 bp, Homo sapiens
gatcccttgggtgcatgcatgtgtatgaccaagtccaggggtgactcttgatgatttcctggcttgccagtgttttacaggatggtctggccaacaaagaaccaggaccaatctataataattagctgggcgtgatgccgtatgtctgtaatcccagctactccggaggctgaggcaggagaatcgcttgaacctgggaggcggaggtttcagtgagctgagatcgtgccattgcactgcaacctgggcaacagactgagaccttgtctcaaaaaaaaaagggaagaaggaaggaaaggaaaaggaaggtaaaacttggtgtccacttcctttggtagtcttcacaccacattgcatgcaccc

SEQ ID NO: 703385 - DNA, 153 bp, Homo sapiens
tgaaggaaataaaaaacgtgtgtattagatgcgacaggacaggcagccaaagcagtcatcctcataaacaggcccatgatttctccagcgctgacaggattgaagctcttgagcttcctggttcttctcccagacacctccaaggaacatgct

SEQ ID NO: 703386 - DNA, 434 bp, Homo sapiens
ccgatcccacctactgctcctcttctagcacaaataaggtttggcaccacaccccggttacaagcaaggacggggcggggcgtttgccatcactgaggccacttacaggagtttcatagatgctaagcgtatccagggtcattctggcaaagaatttgccatcatggctccacctaagaaaaacaaaagtgccagggtattcccatgaaaagacaaaggctacagagctcgttacaatggtccacttacttaaaaataggccaatgggctgagctctcacaatgaaaacccctcttcttgtgccccgtaaggatgtcccagatgattatggcctgagggtcatcctgcgtgtccatcagggggctaaaggtcaccaggtacctttcacaaggtgagaagtcaataagctgaaccccttgggaggttattggcat

SEQ ID NO: 703387 - DNA, 1228 bp, Homo sapiens
agcggagcgttgacggcgttcgcagggaacatggagtataccgtgtcggtcactgttgcacgcctgtgtacggcgtgagcggtcgaggacttacaccttgaggtacgagagctcgcgtaaggcacgggccacggagccgcgacggagtttgcgcttggattcgtcgtagtaggtggctgccgccaggcgtgttgtgcgcaagcctgctgtaccggcgctgaccctacgtgcgagctgtggctatgtatgcagtgtacatgtggcatgccagcagttgatgcgcaggagaaaacacaagtgttttcgttcagcaaagagccatggtggtagacgcggttctcggctcgctgcacattagccttaatgtgcgtggaacgctactcacgaaaccacttgggacgagcgactgtcacgcgacggaggcgacagaaaacagaatgacgcaaacaagaagttgagatgtacgtagtaaccgttacggcaaaatacgcaatggggatacttgcgaggactagttaagccacggggtacctcagcggagagacatgcctaggacttccaggaagtcttgaacgatgttcgagcatgagacgtcaaatcgagctatgcacaaccttctgacctgtaccctgatcatgtatcagcaattactcgtattatccggtccctctgtgagtgaggcgcatttaccgaatcatagcctatgtgtggcaagtactcgaaggcggaacaacatgtaatggtaatagactcgtggtagaattctaggcaaagttctcttaggataagaagtggtaagggataggacacttttgacaacgcaatggaaactttaggacgaaggattagtaatttaggagcacgcacgcaatcgaaagatttgggttggacaaggtcttaattgggtcccaacttgcccaacaacgtatttgcaatagcgggtaaggacccatgttgttactaattgggcgcatttaaatctggaacttatttttgtgtttgagaggccaaagtagaaatggggaggaatataaaaacatgcggaaggtaatcgaaaaaggccttacaacatggcgtatcagttggaggagcgttgctatgagagtgcgtggactgtggagtttcgcacatgctggacatggcttggcatggtgaacttttgtcacaagcatgtggttgacaatgtggggcataacccagcaatgaatggaaacctattgtttaagga

SEQ ID NO: 703388 - DNA, 360 bp, Homo sapiens
gagacagggtcttgctctgtcacccaggctggagtgcagtggcgcaatcatgggtcactgcaacctccgccttttgggctcaagcagttctccctcctcagcttcccgaatagctgggactatgggtacgggacactgcactcagctagttttttgtatttttttttttttggggggaaacagggattggccatgttgcccaggctggtattgactgaactcctgggcttattcactaccctttggctgccaaagggctggaaattcaaggtactaccaccgtgcccaaccaaaaataatccttttgctggcattcatggtgtttagaccaggtgcaccttggccagggtgggtttctgt

SEQ ID NO: 703389 - DNA, 485 bp, Homo sapiens
  misc_feature (60)..(60): n is a, c, g, or t
  misc_feature (206)..(207): n is a, c, g, or t
  misc_feature (228)..(228): n is a, c, g, or t
  misc_feature (230)..(230): n is a, c, g, or t
  misc_feature (250)..(250): n is a, c, g, or t
  misc_feature (256)..(256): n is a, c, g, or t
  misc_feature (268)..(269): n is a, c, g, or t
  misc_feature (298)..(299): n is a, c, g, or t
  misc_feature (305)..(305): n is a, c, g, or t
  misc_feature (330)..(330): n is a, c, g, or t
  misc_feature (335)..(335): n is a, c, g, or t
  misc_feature (338)..(338): n is a, c, g, or t
  misc_feature (340)..(340): n is a, c, g, or t
  misc_feature (343)..(343): n is a, c, g, or t
  misc_feature (377)..(377): n is a, c, g, or t
  misc_feature (399)..(399): n is a, c, g, or t
  misc_feature (454)..(454): n is a, c, g, or t
atttatttgtttaagtttgccttgttttctgtaaatacgagaaattcttggatgacgcantaagatacagagattgttatttgtatctagtgtgctactttgagaaagtttccttattgatagtgatgcttccactgttcggtttatcctgttgttttttcttttaaggaaaaaatagaaatatttagttttttggtgcttaccgnngttgtgttataacaatatcgntnacatcgtcaggactttgttnctgatnataaaaagcatnnatagaagccgggaccttcctttctttcannttttgncagtaatacctgggcacaggacttnaaagnaancncanattccctcccccttaaattttagggattaaaagnttgttgggaataaggccaaagnccagggggggcagtcgttacacagcatgaatcggggttggctatcaacttctccntttgctttttttgggggacccgttcattttc

SEQ ID NO: 703390 - DNA, 204 bp, Homo sapiens
gcctggttccgctgatcctggtgtgctgggcccgtcagcgccctcactcttgaagtccaggactgggtctgaccgtggtgggagcaccttgccagaggatgctcttccccaggacggatgggccctgtgtctcaggagtggggttgggggacagccttcagctgcagctcacaccctaccttccccagacttgcacaggggtgg

SEQ ID NO: 703391 - DNA, 970 bp, Homo sapiens
cttgtatactgaaaactggcacctcgatgattcccaaagacagctgtactcattgctgaatctacgcaaccgactacgccctcagcgagtattatgtcttgctcgacgaaactagctgactgaccatgacgctacgctggtgactgcttaaggcttgatgtgcatacaacagcactgtgaacatcgctactcctcggcgcccgggcaaccttcactgctacgactgacttccgccacctggcaactgactggctgcaggcgcaattggaatgcctcgacagcgcacacacatacttacccagcctagctccgggccaacgcgcgcatgccactgctcccgcacgccgtggccagccactcgccccccagcgaaccaaccgcagcatccagcccaacgcagcacacgcacaccctgcttcctacgaccaaacaaaactacacggaacttccctcttaccacgttacctccaccgcacaagccccaccaccagtaattcgtcattcacccacccaacaactcataactcactcacgcccctggcacccactagcggaccacacacagcccacgcgcacccacaaacccaaaccggcccgcaccggccgcaactccccaaccgcagcctcccgggccgcaccctaacgacaacccccggagctgcgcacggcccatgccttcctggataccacccacacgctctccgaaacaagtacacaaccctggcaccaccaccaaatccacccttaactcccaccgcacaccccagactggaccacagagccaatcgcgctccttccacacaccttaaccagatttaccacgcccaatcatcggtccacacctcggggcacccgaaacactataacttaaaactccctcccacaacaactttaacccaactctacccctcccaccctggaaccctctactctataaaccatcacatcaccttcaacccacaactccccg

SEQ ID NO: 703392 - DNA, 354 bp, Homo sapiens
acgaaccgagcttgtacccacgatatcggtcactcacagataacgctgtgcctgtgatctaccaggtgctccctgtgctgtggtgctggtattttcacaatgatgcctgtgtgacattgtgctccaacacaaacgagcagctcacatcccctgtcaccatcattaggggctatttgagagagttcaagaactcacactctgaagtgccctctctgatggtgctctcatccccctctccctccaccacgccaccgccactgtgggagcgttctgcgtcctcagcatgcaggaaccccagcgctccccattcaggattcttctcccagcctattcccctcctctgtttccctccac

SEQ ID NO: 703393 - DNA, 917 bp, Homo sapiens
  misc_feature (85)..(85): n is a, c, g, or t
  misc_feature (263)..(263): n is a, c, g, or t
  misc_feature (272)..(274): n is a, c, g, or t
  misc_feature (370)..(371): n is a, c, g, or t
  misc_feature (381)..(382): n is a, c, g, or t
  misc_feature (427)..(427): n is a, c, g, or t
  misc_feature (491)..(491): n is a, c, g, or t
  misc_feature (865)..(865): n is a, c, g, or t
cgacttcgatgatcgtgtgtcggatgaggagaaggtacgcatagctgctaaattcatcactcatgcacccccaggggaatttaantgaagtattcaatgacgttcggctactacttaataatgacaatctcctcagggaaggggcagcacatgcatttgcccagtattaacatggatcagttcacgcctgtgaagatagaaggatatgaagatcaggtcttaattacagagcacggtgacctgtgtaatagcagatttttacnattccaagnnnaaacaaaattttccttttaaaattttgaccccactttacggaacagaaagcaaagtagactcccccagacccagaaagaacgcagactggacggtnnctgaagtctnntggagagaatttcctgtgtgcttcttgggtactgtttattgcttnaaaactatcgattgtggcaacagggactattatttgcattgtattgacaagccacccagtttcnagcctaagaaacttctggcaatggtcgttggagatcagagtggaagttcaccatcacaccacctacagcccaggtggttggcgtgcttaagattcaggttcctattatgaagatggcaagttcagtgggtaggcataagatgtaccgattcctaacgtttcaatgagccaaatggcagggttatacctctagagagcgaatggttcgacggcttgggaacttcactgcattccttaggcttgcgggtcagtccggaatgagagaattgtaaatgggaatgactagggagagtccatggaaagacgcggcagtaagaacagattgggaacgtcaatagaagattgattatatttttttgtggtttatatctttgntgcacagtaagatatattagaagataagactataataacatgcagacgggtg

SEQ ID NO: 703394 - DNA, 244 bp, Homo sapiens
ttcccgaggtgctgataaaacaggaggagctcacccggagggctgaggagttggaccgaagggagcgatgagctgcagcattgctgccctgtggggggccggttactcgacagaacaatttggccccctctaccttcttttggtccagttcagccctgcttttcccaggacatctccatggagatcccccaagattttcagaagactgtttccaccatgtactacctctggatgttggctggat

SEQ ID NO: 703395 - DNA, 206 bp, Homo sapiens
tcccaggttcaaggtgattctcctggcctcagcctcccgagtagctgggattacaggcacccaccaccaggcccagctaattttggtatttctgggtgggagacagggtttcaccaggtgggctaggctgggtgtcaaactccttgacctgcaggtgatccaccttggtctcgggcctcccaagagtggctggggattccagggca

SEQ ID NO: 703396 - DNA, 243 bp, Homo sapiens
tactgagtggaggtctgagatccagtgcctctggttgcagatgttgtctatgacgggtgtggccccggaggcaggaattgctggtgtaggcctgcctcatgatgccctcggcgggtgcctaatactgggaaggtgccaggttccgtctcgtctcggccggagatctgattggtgtccatctgtctcccgtgtgtaaaatgtcgtatccgaggatgcctgtcatgctgccggtgccgtaggtga

SEQ ID NO: 703397 - DNA, 1149 bp, Homo sapiens
cttctggtgcggcttatgggttatgcgctccccacaatgtcctggaatcgctttgtggggttcaaaaccgcgggataaacccataatcgtgctttgtgggaccttgggccaccatccttggactagtgcaatctggcaaggggcttccccggggaaatcatcatcttgggaagttccgcaaactttggtggacccttggtcgatgcatccaaaggtgctctgggcacctttgttggctcccaggtcccgatctaatgaacaatcagactggactatagtcctgtgtgctctcctaaaccagcctagggcactggtagggggcctcaggcctccctagaaagcggtaccctttattcgcctctttgacactccaatcccaaggtagaaaactgttggagctgacgcacgaggcactgaccctgcctacctctcgtacggctattaactctcagccacggactcatccgtcctctgcgcttccagtgataagggtacctgtccatatgctttggcttctcaaggatacccgcctcaaccgccgctctcgcgctcggcttcgcgtgggcaaggtggggcctattcgattgggcagtacgtggactctcagtggacgcactaggcgtagcttcactgtgcctgtcctgagtcagcgttgcatctgcgccattcggtcgcaagtacttcacaagaacgtctaactctgtcagttgcccatctgcgatagagtgggacccttcctacaaatagtgtcttcactcctcgatggaaacttgctaacagagaggctattcgacgtgtaccttgacatttgtgatgatgtatgacttttaaggaccctggggcctgtgtctagggacctgcagtggcagaactgcagagctgagccttggcattggcgcgtgcttggaagccacttagccagcaagcattaatggggctggtgcccactttccactcagcagagtctatgtctaaatcaagagctcacttccctccagcacttcattgatgactgtgtgcccaaagggccaggcacagagacaccaggaaggcagcgacccacttgggatccagtaacctggaggaaattgcaagggacacagagggagtgccctaatccaacctgtaactcccaggagcatcatagga

SEQ ID NO: 703398 - DNA, 512 bp, Homo sapiens
tgagttcacagcaggctctgggcatcatctccgtgtcatcctaaggccacgggcggggttcccaccaaacaggagagcagctctcccgagatgaagccttctgatagccctagaaccaagaggaaccgtgtggggttgggtggggtgtttactgtgcactcctgatgttccctcccagtgaaggacacccacctgggacactgtggcccctggccctccctccctcccctcggtggcagagagaacttcctggtgggtgacagcccatggtccacccttgccaggtggattcaggcaaaatacgccaggctgtgtgctgaaggcatcccatctcttcctcgtcccctctcggctggatcggggtggggcagcgggtggtgagtgtgtctgtcctgccagttcagcctccaactggtctgctgtggggcaggagcccacctggctctcctgcagagctgcatggcctgccttgcctcacccgtgacaacaccgactttggttctccatctgca

SEQ ID NO: 703399 - DNA, 536 bp, Homo sapiens
agaagcttttcttattcttttattcttaagatcagtatctttttacagtattctttctacatgatccttttttgtacatttaagaatattttgattatattaaacaagactgcgtgattttgcgtactttttttaaagggggtctctcaagctaagctcaacacatacactcgctagactagcaacgaacaacatgtacccttaaactttgcgactcttcccctcgtcattatcccacagtctgctacaacacacttgagaactacttcttgtgctttgaaaagtccaccttgcggtttcataatacaatggcgttactgttggtgttttacagatccttgttattctagtctagaacttcttcgtcttcgtagaactttttaaaagagtgccgtgttttgaacttattgaaatacgttttttggaagggaaggaggaaggtgctgcttccatgaaatcttttaggatcgggggagttttttgggtattgggcgcgttaattgcggtggttgctacctgttagttgtttcttctct

SEQ ID NO: 703400 - DNA, 156 bp, Homo sapiens
  misc_feature (83)..(83): n is a, c, g, or t
ccgtgatgctttccaagaacatccaacacgagctattataattaaaatgcacaagctctttgatccaactcttccactgtcangaatttgcccatgggaatatacccctatgcattattcattattactgtgcaccagaatgttatttgtattagc

SEQ ID NO: 703401 - DNA, 429 bp, Homo sapiens
ttttttgttcacactgagatactgtgtatgtagactgccttgattattgattagcccccgtgttatgataccgatatgtgttttagcaaagtacagccgaccatgcttttggcatcatagcatcacgggatggaatcagggggttccattttcgtagagtgctcgtgtcacactctctgcaccatttttcagcaggagaatattttctagtatctctgatatgtttagccataatcatcatgtcatgtaggaatgtgtcatctcccatgtatgggggaaggtgaatatgttgtcggacgaacccccgctcgccgaggtccatgggttgggctagtttatatggcctttttcctggagataaattttccagggctttcagtctggaatcattgcaccttccttcgcctggggcccttccctaaatatttc

SEQ ID NO: 703402 - DNA, 473 bp, Homo sapiens
ggccggcggggcattgtggggtatacaccagaccacgtggctcctagggattggcagctggctctctgtgaccaaactcagaaccaggctgccaccctttactggcccgggacttgttaaagtgacttccctctctgtgccttggtagcttcatctgtaaaatgggggtgatggtggcgctgccatcgtggccatggcaccccattggctgtggtatgctgtctcttcctgtggggtctgatgtccaaagacagggcccccagggcgcagcagcgttcccctctggttcccgcagcttgccctcattccagccatccccagtgaaccataacttccagccatagaagtttaaacattacctaagaccataaccaccaggaagtttggtggcccatgagtgaaccctgccctcactgggaagcagccccgtaaactctgagtgcctgggactgttcctgtgtggaatgtgcaca

SEQ ID NO: 703403 - DNA, 107 bp, Homo sapiens
gtgcatacaaatccacctagaagcatttctgactcgccaagtgctctaaaaaagcagcgcaactcacagcctacatcgcaccgtcactgccaccaggctcatacaag

SEQ ID NO: 703404 - DNA, 536 bp, Homo sapiens
aacatcaagaacaattttgcgctcatatatgagctgccggaagagagtctagactttggctacccagagaattgctagacaggcgcgctgaaaaccttcatcactcagcagtggatcatgagtcagcatcagacaaaagaagagcagtcacagatgaccagccaggtaactgggcagattggctggcggcgagagggtatcaagtatcgtcggaatgagctcttcctggatgtgctggagagtgtgaacctgctcatgtccccacaagggcaggtgctgagtgcccatgtgtcgggccgggtggtgatgaagagctacctgagtggcatgcctgaatgcaagtttgggatgaatgacaagattgttattgaaaagcagggcaaaggcacagctgatgaaacaagcaagagcgggaagcaatcaattgccattgatgactgcaccttccaccagtgtgtgcgactcagcaagtttgactctgaacgcagcatcagctttatcccgccagatggagagtttgagcttatgaggtatcg

SEQ ID NO: 703405 - DNA, 250 bp, Homo sapiens
acttgttaaccagtcctgttttctttcgtctttttttgtggtaataaaagtcaactgaccaagtgaccataaaaagggggctgtcttgggctcctgttttttaggctcgcttgttacttaagctccaacaaaagtttgctgtgtgattatctcaattggttttaaattgggaggcaaaaactttaagctctaccaatgaactgttttggaaacaagacacactttggtattaaaaattgcttgcagtaac

SEQ ID NO: 703406 - DNA, 996 bp, Homo sapiens
  misc_feature (410)..(410): n is a, c, g, or t
atatctacggttctgtgggctgtgtaactctattactttggctggtacatttggtatcagtcacacctccgatctaacatatatgtgcgagagattcgtccttctgactctatgcactgaatgaagcaactcgaagatgtaacaacagggattgaatctacaatgtatgaccatacataggactaaagggcgtcctcactaaatagccgtttcttcacttagcaagatgaagatgattcacagtttgccactccggtagtggattccgtagagataacaggggaggataggatgcagggatacttgtggtctaaacatacatcactaagacaatgtgtgctctgattagagtactttaagattttaggagaatgaggtcacgatattaaggatgagactagagggacagnttctgttcgcgctgttggggcatcgtgtttaatttggacgggcggttgtaacataaatacgtacggctgatatgtttctataaagaattacgcacaatgaatgcgctgtggacagttgagactttacattgagtgatcagtactcgtttagggttgtcctagaaagttaggtatttccttagagaattagaagtcaagaactggtaaatgagttttcagtgcagtgatcaggtacgtcgtctgatggtaagagtacgtagtaatttttaaaattaattagccacatttatttaagaaagcgacaatgttatatataggttgtcctctgagtgctctcgtgggttgtcgcgacgcagatgagacactcttaagaattcatgattgtcattcgacactgggtagacgctgatgcattcgggatcgggaataattgccatgtaatgcggcttctcaaacggacttcatggggctattattggggacctttcacatcgtcactaatctggattcatccggccaaactaatagtgggccggttcgtacttcaaatatccccttagggtgccaagcctaacggctgccacgg

SEQ ID NO: 703407 - DNA, 999 bp, Homo sapiens
atggaggcgctgcacgctgctagccgagacaagtccggaccacggccgccaccgacggctgcttctgctgccgctactgcatgtacctgctgccggctggagctgtgcagggactgggagacagaggagaggccccggactcgcgaagcaggagtgccacttactacgcgggtggacaagtgtacccgggagaggcagtccttttttctcggtcgccgaccactcccatgcccctaagcaaagcgaagatttccaagccagcgccctactgggaaggaacagctgtgatcgatggacgacatctacggcacgctgacacggctcaacctgacctcatcgtcgggacaatacctatggctcccctttccttctcaccacacttgactcccccccctacagctcgctgctcccacaccctgacacactacctccgccctctctggcggccggacccacgaacccttgacagcacactgccgacctctagtacaccctaccttggcacgatgagacaacgcaatagaccgtctaggtccgcatagaccaccaggccacaacgccactacgccccctggaactatcacctacacccccctcgccacagaccaccacgaacgggcacgacggaggcccccacacctcaccggggcaatcggccccacctatacatacacaccacgaactctctggacccccgacatccacgcacgatccgccaaacacgcgggcaccgaaaccgccgaaggctcagtcacgcccaaaggacaagcgcacccttcacagcgccatccacccgcccacaccctatacacggcaagggcacacaccccactaaatacctacatcgtgcacgtagggaacccaaaaaacagcggcacacactccacagataacacgccaccgacacaacccattccacactaccatgtaacaaaactgtggcgagaccgtaaccccattggatcagccaggcattaaggaaattccacgagagagaga

SEQ ID NO: 703408 - DNA, 1369 bp, Homo sapiens
gcaacagcctgctgcgtgcgcaaactggacggaggcgctccgaggtggctgctggtgtggcgtgctccatgggacgagcagtgctgcgcagtgctcatctcccccaacctgggggatcgtgttcttcaacagcctgcgaggccagcgtcgcgggctggcgcgctggcgaggatgagtgcggagcatggcgctgagcctcctggcgcagactgggcatcacgcctctgccactcagcctgcgtgccccaggtgaccaagccaaacccacgcgtggtcttctcgagcaagatgggccgtgaggcaggactggaccatgttatgtgcatgcacccgccactccgtctggcgccgaagcgcgagccatggccctcctagatgttgcagcccacttgcttggttgttgaaaactcacacggcgcgagtccccgagacgaaaaaaaggagtagagtagctgacgatgcgtggtcccccccgtgatttgcacccccgggcacctgcacttaccgttcctttggcacaggtgacgctggtgatcccggcagcagtgaccaagcaacgcttgtgacacgggcttccccttgcctgtggacattcccatcagttgggcgtgcacaggccaccgcacgtgggacaccttacaagtgttgatccagggggtcctggaggcccggtacgaagccaacggcgagtacgcggttggggcaatccacagaagcgcacaagtgcctccgacacagtaggcaggacggggcccatacacatgcgatacacacgcgaccacgcaattcgaacccttgggtccaacgggaagcgcggccctctggggagatgaggccccatgcgacaggtgaagagcccaagaacaaggtgggccttgaagcgcaacaccaagccccaatgaccgtgcactgaaagagtaacgtctcacaggtagacaccccgggggcgaggttttgacagcaaagagaacccctaaaccggacacatgatatcccggaaaccctgtgactagggaataggtgtgtcgcctgggggcgtgccattctactgtgacccaggtcgtcacgaaagacggacctgtcccacggtcggtatgccaaggtccgcggcagacgggcccacgcggtcccacatcagagttatcccaccggtggccaactgtcccccgacagactggcaacgcattcgtcttttgcacgtctcaccccagcatatacacagttagtctcgtggccccgctgtagggccacccaaacagtactgggtccactaaagaggacgctactcctcagcttcggtagggaccatcaagtgaattcccgcagttacaggcatccacgcgtgatggctaacacgtccatcgcggcc

SEQ ID NO: 703409 - DNA, 425 bp, Homo sapiens
  misc_feature (366)..(366): n is a, c, g, or t
cacatgagcgggctgctatttcatttggctagtcatgtctttctaattgattgcaagacctgacagcacgtgatttctctaattacttgtttgcttgcacaatcgtgtgtctgctgatatctgccacatagactgtcagattctatctagcccagggtccattccatacattgttgctgctcatatctccacctaagatggtgcacacaggcccccatggatgtctgtcgctgacgctgattccatgcagaattaagttttcacgtatggcgtgagagaacaagggctaatcaactgctccagaataatttgctgacttggccctcactccctcctaatcgtaatgccacctttttcacatacganaatttttgttctttgcattctaccctgctctgcccatctgtcttgttatagcaccatac

SEQ ID NO: 703410 - DNA, 426 bp, Homo sapiens
  misc_feature (10)..(11): n is a, c, g, or t
  misc_feature (13)..(13): n is a, c, g, or t
ggagacggannancttctttgttgcccaggctggagtgcagtggcgagatctcagctcactgcaacctccgcctcctgggttcaagcgattctcctgcctcagcctccccagtagctgggattacaggtgcctgccaccatgcccagatattttttgtatttttagttgagacggggttttgctgtgttatccaggctgttcttgaactcctgacctcaggtgatccgcccgcctcagcctcccaaagcgctgggattacagatgtgagccatcacgcccggcctcattttaaaattttttggcaaagatgggggtcttgttatgggtgtccagggctgatctcgaacacctggggcttcaaggaaagcctcccgctgggggccttcgcaaagttgttagggatttacagggcgttaaattcacca

SEQ ID NO: 703411 - DNA, 704 bp, Homo sapiens
taagagcatcccaccctgctcacggaggcacccctgaaccccaaggccaatccgggagaaaatgagtcacattatgtttagagactttcaatgtcccagccatgtatgtggctatccaggcggtgctgtctctctatgccttctggacgcacaatctggcatcgtgcatggacatctggagcatggtgtcgacccactaatgtccctcatcttatgagggctatgccgtgccccatgccagtcactgcgatctggatctggcatggtccgaagaatctcacttgactacctcatgaagatcctgactgagacgtggcatatatccattcgttagctactgcttgagcgtgagaattgtccgggacatcagggagaaactgtgtaatgtagctcctggactttgacagtgagatggccagctgccgcatcctcatcctcccttgagacgagttactgagttgcctgatgggctagtgatcgccatcggaaggtgaacgtttccgctgcccagagtaccctgcttccaggcagtccttcatcggggatggagtctgctggcgatccagtgaaaccacctacaacagcatcatgaagtgtgatattgacctcaggaaggacctctatgctaacaatgtcctatcagggggcacactatgtaccctggcattgccgacgaatgcgaagagatcacgggcctgcaccag

SEQ ID NO: 703412 - DNA, 137 bp, Homo sapiens
catcattcttctttctttctttctttctttctttctttctttctttttttctctctttccttccttccttccctccttccttccttcctttctttctgtttgtaatagtttatgctgtaataatttatgaaggagag

SEQ ID NO: 703413 - DNA, 433 bp, Homo sapiens
acatgtggtacccaccgtttgtggtgggaggactggtgtactctgtgatagccttttgctaaccaggaaaagatttacaagtcaagttcgtccttgattcacaccactttataggtgacctcgtgtactaaatctcttagcaggccaccaagtagttatttgtaggggaacactataccgtgggccttggcaactagtcttgggtgaaacatttgtgccagcgtttgccaaaaggagtcaaataggtgcccttgaaagtgaaagcagagttgcacttagctcaggttaatgtagtctgcgtcaaggcttataaataagcagactaataacactgaggtgtccgccctggaaagcagttagagttgccctaagttgtctaacttgtcttccagcatcttgcccaggtgcacctgcagttgcaggtcctcccacc

SEQ ID NO: 703414 - DNA, 574 bp, Homo sapiens
atcccattgtcagttaagcatgacattgtcttgagcaccagaacataaaatccatagtgattaatcaaaacctatctcgaaagactagtggaggctgtattttacgtggcaaaagagatttgtgggaggagtcctcagccaaagttctaccagaatcaccgttaattgaaagaagtctatataatcaagcacacgcaggttggaatatggggaatttgacagaaatgtttcttcaagtctgagtttactttcttcctgatcatgaccattgaccttgttatttctgggcttggctcaagaccaaggagagtggatgttgatgaacattccgggtgaataaaagtgcttaggttgtagtttatggctttgttagactggtgatgtcaatctgtgtagtgtaggtcctgtgatatagataagattcaactttctagatctagaaagatgctactttgcatagatttgtccgtcaaacataaattgcgtagaataaaaatatcacagagacacctgtactttgctactgaaagattgctcactaagaaggaaagttactctaccgttacaattcgtg

SEQ ID NO: 703415 - DNA, 688 bp, Homo sapiens
atgacccaccaatcacatgcctatcatatagtaaaaccctagtcccatggacccctaacaggggcccctctcagccctccataatgacctccggcctagtccatgtgatttcacttccaaatccataacgctcctcatactaggcctactaaccaatcacactaaccatataccaatgatggcgcgatgtagacagcggagaaagctgcataccagaggccacctagacaccacctgtccaaaaaggccttcgatacgggataggtcctatttattagctcagaagtatatatcattcgccgggatttatctgcgcctattgcacactcgcagccctagctccgcctgaagcgcccccaataaagagggcactggcagacaccaaacaggctatcacgcccgcattacaatccctattagaaaagtcccaactcccttaaaacacactccgatatcacatcgccactaaggaggttatcaagtcatcgctggagactcactcgagtagctcataaaataagaacaaagcagcgcgaatgaccacggtaatctccctacgcacagaattacattacactctcgcgtgaagtcacctaatacacgcctcctacacgcctaagatgtaccccgagatatcacgtaagcataccgacggcttctacggatcaacattagagtcgcccggcag

SEQ ID NO: 703416 - DNA, 137 bp, Homo sapiens
agtaacgacagatactccaaggatgaggacttccctccggtcttcgcggaaacgtgagggtacatgtccaccagcgctgtcgggctagtcggggctgtcgggctagtcggggatctccactgtcgggctagtcgggg

SEQ ID NO: 703417 - DNA, 824 bp, Homo sapiens
  misc_feature (279)..(279): n is a, c, g, or t
  misc_feature (322)..(322): n is a, c, g, or t
  misc_feature (340)..(340): n is a, c, g, or t
  misc_feature (345)..(345): n is a, c, g, or t
  misc_feature (349)..(349): n is a, c, g, or t
  misc_feature (355)..(355): n is a, c, g, or t
  misc_feature (475)..(475): n is a, c, g, or t
  misc_feature (538)..(538): n is a, c, g, or t
  misc_feature (548)..(548): n is a, c, g, or t
  misc_feature (594)..(594): n is a, c, g, or t
  misc_feature (733)..(733): n is a, c, g, or t
agttttttgtgactggtttaactgggaaaatttgggtgttataaaagtctttcttttgtgccccccaattacctcttggaataatcgcaagataaaagagttccgggtaacaccgataatctttaaaatagaattttgaggaaatggaatagggtggaaagtactccggtacaccgttagtacccccaatagttgtcactccccacgaatttgttttttctcctggcacccgagttagatactctttgggaaaaaaataatgaaaatggatttaaggtntgactacccctatgttagccacatctggatgagaacagttacnaagagtttggtctctaanttganttgnacccantgggtaaatttcgccaaaattccgtaatggtgtattagtattagaatagtgaataaaatgggaaagttatacatgtatacttattatcttgctccagtattttatctcacttgttctagnattttctgtaaaccctgctactgggtttgaagagttttagtcatcctttaacaatttttaaanatttagcttntagattccatttggtaaggaaatcaatattggaagtattgctaaantcttataatatgaaaagagatccactaatgtagcttaaggttattagatttgggcttttaatcatggaataatcttatgtattggtgtaagagttgatgaatgactttagctgtgtgaatatataatagtcaaactgcnaacattttgcatcccttttgtgacctaatttacagacatttaaattgtgttgcagttctgctttgccgtttaataaaaagctatttccaga

SEQ ID NO: 703418 - DNA, 941 bp, Homo sapiens
  misc_feature (435)..(435): n is a, c, g, or t
  misc_feature (561)..(561): n is a, c, g, or t
ggagccgctgccggatggtcgttccaaagggcccgcgcgttgccgaccactcggacccgaccatgctgctatccgtgcctcgttgtctgcgtcagcccatctctcggcctgcgcgtccgcgaacctgaccgtctactttaaggagcagtgttctggcacggtagcactgttgtgcacttcccgtatgcgatcgaaatctaagagcagcgaacgctcgagattctgtggcgaccattccgggatctccacgatgtccgcgcgacatattgctaacggatggatccgcaggcaccgaaacgcataacaagggcttgtggcaaggacgacagccgaggcactgcagccgctctattgtactgcctgctcgttctgagccgcacgttctttcgcacgcccgttctgcgaggctagatcatagagcgaccgacggactgncttgcgttggctgcgacggtctctaaggcgggtggacaaaccagtggagccagggaactagtcggactcgctgggcggggcagcgtctagttggtgaaatgtccttgctgtctcgcgttaccagtnacggtctcagtgcaacacaaagcaccgaagatctactagcgaaccagcgaacgcacccgttcacgcaaattacagaacagtgctagtgattgtctggtaccgcagacctagtcattgtagcggcctttggcacaccaatgcaatgttacattagtctagtcgttctaacttgacagagaggcaaaagatacagagtttgattagagcaaggggactatgacggtatgctcaaagggttgactgaggttatagtacgacgcttgtgaggaggaactgtatagtacgggcgagatagagaggcatatgagcgtgaaagaatttggcacaccaggtcacgtggaaattccaggctccctttgtggaagaacgaatttggggaa

SEQ ID NO: 703419 - DNA, 508 bp, Homo sapiens
  misc_feature (48)..(48): n is a, c, g, or t
  misc_feature (50)..(50): n is a, c, g, or t
  misc_feature (159)..(159): n is a, c, g, or t
  misc_feature (222)..(222): n is a, c, g, or t
  misc_feature (232)..(232): n is a, c, g, or t
  misc_feature (278)..(278): n is a, c, g, or t
  misc_feature (417)..(417): n is a, c, g, or t
ggcaccggtgggacgtacaaggttggtcctagtgattgtccccggggncnactcgcaaatccgtaatggtgtattagtattagaatagtgaataaaatgggaaagttatacatgtatacttattatcttgctccagtattttatctcacttgttctagnattttctgtaaaccctgctactgggtttgaagagttttagtcatcctttaacaatttttaaanatttagcttntagattccatttggtaaggaaatcaatattggaagtattgctaaantcttataatatgaaaagagatccactaatgtagcttaaggttattagatttgggcttttaatcatggaataatcttatgtattggtgtaagagttgatgaatgactttagctgtgtgaatatataatagtcaaactgcnaacattttgcatcccttttgtgacctaatttacagacatttaaattgtgttgcagttctgctttgccgtttaataaaaagctatttccaga

SEQ ID NO: 703420 - DNA, 237 bp, Homo sapiens
  misc_feature (10)..(10): n is a, c, g, or t
  misc_feature (31)..(31): n is a, c, g, or t
atctgttatncttcacaggtgttgatgaggngacctaacctcctggctttttcccaaagccagtttgcaggtcctgatggtcgattttggactactggtgaggctgcagcaaagggcctggcccagagagatgctcaagagtaggatgaaaagaccgtgggtttcttcctctgcaaaaggaaaggtttgggactgatggatgctgaaaagtctcattccctccaatccacaacagct

SEQ ID NO: 703421 - DNA, 140 bp, Homo sapiens
ctcacagagcgcccgggaggacgggctgtttgtggggtatgggctcagaacctagtgggcgctggttagggcacgtggaagtgtggactcccgtgcgtagatgacagtggagcccctacgtgatacacagagctcgcgct

SEQ ID NO: 703422 - DNA, 240 bp, Homo sapiens
gaagttgccagacatgtcactaggtgttaatgcccagaagagtcaggccttgaagcaaagtcaaggccatttcacggagacccatgtaggagttgtgctttgtcatgtgttatttaaggtgttaagaaaaattatctaaaacttaaccacaaggcaaaaaatgtcactgatacccttttaggagcatgtgagagcaccatccatgcagctgtttgacttacaattccctattaattaagt

SEQ ID NO: 703423 - DNA, 284 bp, Homo sapiens
ttcctagaagctctggcgagtgctctgactggctgtcttcaccacatttcttctgaaagcctgttgaatgctgtgcattcgttttgcatgatgaattatttccctctggcccctattaaccagcttatcaaagagaatatcatcaacgaactgctgacttcgggtgacacagagaagaatattcataagcttcatgttttgaatacttgtctgaaacttgatgaaagtacttacaaatctgtgcacataccgttgccacagctgccactgtcagcatcacagcc

SEQ ID NO: 703424 - DNA, 778 bp, Homo sapiens
  misc_feature (293)..(293): n is a, c, g, or t
  misc_feature (295)..(295): n is a, c, g, or t
  misc_feature (316)..(316): n is a, c, g, or t
  misc_feature (427)..(427): n is a, c, g, or t
  misc_feature (462)..(462): n is a, c, g, or t
  misc_feature (464)..(464): n is a, c, g, or t
  misc_feature (470)..(470): n is a, c, g, or t
  misc_feature (474)..(474): n is a, c, g, or t
  misc_feature (479)..(479): n is a, c, g, or t
  misc_feature (482)..(482): n is a, c, g, or t
  misc_feature (514)..(514): n is a, c, g, or t
  misc_feature (531)..(531): n is a, c, g, or t
  misc_feature (538)..(538): n is a, c, g, or t
  misc_feature (669)..(670): n is a, c, g, or t
  misc_feature (674)..(674): n is a, c, g, or t
  misc_feature (691)..(691): n is a, c, g, or t
  misc_feature (700)..(700): n is a, c, g, or t
  misc_feature (703)..(703): n is a, c, g, or t
  misc_feature (708)..(710): n is a, c, g, or t
  misc_feature (712)..(712): n is a, c, g, or t
  misc_feature (723)..(723): n is a, c, g, or t
  misc_feature (729)..(729): n is a, c, g, or t
  misc_feature (753)..(753): n is a, c, g, or t
gttccgagggaccactcccagtaaaaaggaggaccaccaccaagaagtgggggtcctcctcctaagagatctgcaccttcaggaccagttcgcatgtagcagtggaatgggacggaatgagctcctgtatcacgtggaagagatacgttatggaggtcgacctcgaagggaacgcgctgccctctcgtagcagatgtctatttgtccccaagagatgatgggtatctacgtaacagacagctattcaagcagagatgacccaagtgctcgtgatactagagattatgcaccancnccacgagattatacttaccgngattatggtcattccagttcacgtgatgactatccatcaagaggatatagcgatagagatggatatggtcgtgatcgtgactattcagatcatccaagtggaggttcctanagagattcatatgagagttatggtaactcacgtanangctccnaccntacangangggcccccgcatcttatggtggaagcagtcgntatgatgattacagcanctcacgntgacggatatggtggaagtcgagacaagttactcaagcaagcccgaagtgatctctacttcaagtggtccgtgattcgggttggccagccccgaaagagggcttcccccttctatggaaagggggtacccnncctncacgtgattcctacagnagttcaagncgnggagnnncnagaggtggtgngccgtngaggaagccgatctgatagagggnggaggcagaagcagatactagacaa

SEQ ID NO: 703425 - DNA, 198 bp, Homo sapiens
ggggccccttttttcccttttccgccagggcccgggcctgggcccaaggggggggggtgggtcctcccaggttttttggggggggccccctcctgcctgttttgggtcctttggtccccccctaggggtcccttttttttttttggggggtcccccccccccttatttaggttttttttttcccctttgggggggcca

SEQ ID NO: 703426 - DNA, 749 bp, Homo sapiens
ccgcacagcgcggtgagttatatttaaactccacggggcagggcgccatcacagcagtccgcggtcacaggggccagaaccgaggatgccccccaaccctatgaactcaacacagccatcaactgcagggatgaagtgtgtgtctccccttccatctgctctgcagaggtccctcaggctccctatcagccaccgtccagcatgcctcagttatctcatgcacccccatctatcctcctcccgacatcgcaaacgtcgcaggacttccagcaagtcggaggcagtgagcataggggtggaggccacgggttccaaggcaaaatgggccgagggagcttggggaggccgcacacacacacaacaacacaccactgccctgcagcaggcttcacaaaaagcaacagacgcaagttccagtatgggaattattgcaaatactatgggtaccgcaatccattcctgtgaggatgggcagcacttcggatgttgaagcctgagtggtatcggaggcccgggacgtcctagatcatgggctgacaaaagtgaggcccattcttgaccccttgaagcactttggccattgcaaaagatgcggggaccacgatacaccggccaatgggtgcgggacctaggaactcatcagaatacccacgggcatccaatcccacttcatgccccagcctcaaaaagaaatccggaaaacgatagcctattccggaaggaacaatgcgataatccaaaaacccaaa

SEQ ID NO: 703427 - DNA, 1255 bp, Homo sapiens
taatggctaagaatgttaaagaacaaaaaggtactgggaaatctgacaaaggacagaattcagggtgaatatttccaataccggtgatttttaaaatataagtaagtggtggagtatcgtgagaattacccctcacttctcagtgtgacagtgaagtttcatcattatattaggaaaaagttatcaccgttcaacgttaaaaaaagttaagaggttaaagagggtggccaccactttattaaaactactggggtggccaagggaagaggtactatagttaacaagtgtgtaaaccagtggtgtagtgtctcctcattaacttttaaagtggtgaggcgcccattgaaagaaacgggtaccactcgtggtataaatctcttattaacagtgtggttacaaagccacaaaagacgggaagaggttgtcaagcaaccccattccccataaatattttgggagatatttacaaagccacgaggcgtgaacatattgaggaatttgtgacaatcgtggatacgtggcccagtggtccacgataaagatagatttgtggtgaccatttttataatccaggcgtggtggagaaactctcgtggcagcgtggtcaactcagggtaccaaccaaaagaattcaaacccctgtgtgtcccgatgtgtataacttgttataacttacaaagaagtgcgcgagaaaacccagaattcaacactttccgagttacagagcggtccacaaagggccacccaataggggcagtcagactcgtgccagatcttatttgacaatagtagttaaccacaatacacagctcttataagctggttcatattacttcccccattaaacaccaagtcagagaaccacgggtggccctttcacaggtgggtagaacttattccaaaggagggagggccggataaaccttctggcgacaggatggtggtcaaagaacgtgaacacatcagagctgcgaccccaattagggccaaagatgggcaacgggtggaaccccggggggggcgacagtccgggtataacaaggggcggaaaacccatttatacagaccaaaaaagagagataataaaggagtttgagcggtaaaagcgccaatggggtgggatcacacgaaagacgcgggggcactttacgcaaacatagtaggaaagaccacggaaaaagacgaggaacagaacgatgtacactcacgagggagacactgcacgacaaacagcagtatacatcacgagcaaatg

SEQ ID NO: 703428 - DNA, 143 bp, Homo sapiens
tatgcatgctcgcccctgaggttatgcagctcgcccctgagttatgcagctcgcccctgagttatgcagctcgcccctgagttatgcagctcgcccctgagttatgcagctcgcccctgagttatgcagctcgcccctgagtt

SEQ ID NO: 703429 - DNA, 577 bp, Homo sapiens
atcgaggagatggaggagcgcagggagaagcgggagctgcggcaggtgcgggcggccctcctgtccagggagctggcaggcggcctggaggatggggagcctcagcagaagcagggcccagcagcaggagggacgcgcacaaggcgcaaaggagacggtacaggaggcaccaaggtgatagaatcattggagaagaccctaggaacgtcagtaagcgctgtcgtgtcttctgccccacagcacgcacccgtatactgccctccttgctggtagaagctgaagagcacggtcccccaggaggcagctcaggataggtggtatggagctgtgccgaggcttgggctcccacataagcactagtctatagatgcctcttaggactggtgcctggcacagccgcgggccaggaggctgccacacggaagcaagcagagtgaactaatttcatttcaaggcagtttttaaagaagtcatggaaacagacggcggcacctttcctctaatccagcaaagtgattcctgcacaccagagacaagcagagtaacaggatcagtaggtctaagtgtccgagactta

SEQ ID NO: 703430 - DNA, 489 bp, Homo sapiens
tttgcccttttttcccccaggttgaaatttccccccccaaaaggggaaaaaaggggggggtccccccggggggggggcgttttaaaaaaagggggttccccgggggggggggatttgggcgggggttaaattttgttggatttttcccggttttccccaaggaattggttggtttaaaaaactcaattttgggggcaaattttaatttttttaaaggggttttgggggtaaatttttggggggaaaacctggggaaatttttaaaaaaagggggaaaacccttttaaaaggggcgtttttttaaaaagccaaaaaaggcttttttttttaaaaaaattagcagggggttaaaactttaaaggagggttggttgggtttttaaatggggatttttggttttttgtttaaaaaaccccccccccttgtttggaaaaaaaatttggtttggggaaggttacaggaaaaaaaatttttaaaatttttttccca

SEQ ID NO: 703431 - DNA, 162 bp, Homo sapiens
tgctcgcccctgacatctaggtatcgggaggactcatgaccacagcttctgggtggcaggatggcatggactgagtcatgagtccttccacgatacggaagttgtcatggatgaccttggccaggggtgctaagcagttggtgatgcaggaggtgctgacgg

SEQ ID NO: 703432 - DNA, 675 bp, Homo sapiens
tagacacattatcctctcccaagtatacttggcttgacggcagtaccaccaattaagaatgcaaatgctgtcctacactgcatttcttacttatctccagcatcaaaggaatttgaacaatttgactggcgggcacaagggaaggttatgcctcactgtatatataatcatttacacacttagtgctctcaaaaatgtgtcattctttcacaactcaaattttgcatgaagtatttataaaagataaagaaattgacatattttaagaaaatattgcaagaattacggatgtgagcatttgaagcatcattatacattaaaaatccataaagctttcagagatactgccattttggtgtagcatcaaatcattgatctaataaggaacacttttgaactatgaaacattattgttctctagagtttcgtgcagattatacaactcaaatggttatatatgatcatttcaagaataaagaatgcaaatgcttaatttaatgacaagtattctgtttcatggcagacttttttttaaacaaatgggacactgaatccttctaatttttgcataaatccatcattctaagatgtccagagatctggccttttgagggtaggttctatttagaagtaaagcaactggttcggacacttgacttcaccttagggttgcct

SEQ ID NO: 703433 - DNA, 380 bp, Homo sapiens
tcatagatttttttgttgtttagagatggagtctgttcactggtacacccaggtctggagtgcagtggcgcgatctatgggtcactgcaacctcttgcctccgtagattcaagtcaattctacggcctcatccgtgcctctgcactcagccgtcctcaagtggtctgggagttacagactgtgcaccaccgatgcccggtgtaatttaatgtgcttatttgtatgtgaaaattagttgtccgtgaattcgaggttttgaagatttatatgttctattatattatttttacagagacgaggttctcgtctgttattgaccctagcagtggatgtgactcatacgctcacatgcagtcctatcaacctcatggcgctcgact

SEQ ID NO: 703434 - DNA, 115 bp, Homo sapiens
aaaaaaattgcccccccttttcttttttaaaattttggggcatcttcgtagtaaagaaatgggtttttatgccagcttttttataaaaaaataaaataaaataaatggggccata

SEQ ID NO: 703435 - DNA, 232 bp, Homo sapiens
gtcaacatgcacctgcgcacacacacgggtgagaagcccttccagtgccacctcttttggaaggccttccggacccaaggcagccttgacaagcacaaccgcacccacaaccgggaaaggcccctcagttgcgaggtctgttaacagcgcttcactttagaagggggcccttctctaggcacgttgccagaccgccatatagagaggggccgcgccccacttctctccaaat

SEQ ID NO: 703436 - DNA, 187 bp, Homo sapiens
taacccctctttagtttttgtgcgcctcagaaaaccaaattaaaccccccccccgagtgttaaagggggggcgagggaacaaagagcaagaaagcgcaggaagagccgagcgcggggagcacctaccaggttcgcgtgcccccgcgacacattatatggcccggaaggggtatttgggttttcacat

SEQ ID NO: 703437 - DNA, 461 bp, Homo sapiens
  misc_feature (266)..(266): n is a, c, g, or t
  misc_feature (283)..(283): n is a, c, g, or t
ctccataatgtgtgcccaggaccagcctgggcaatatggcgagaccccccatcttttcaaaaaattaaaacaattagctgggttatggtgatgtgcacctgtattcccggctgcttggggggctgaggagggaggattctttgagcccaggagtttgaggctatggtgagctgtgattgcgccagtgttaatacaaaaagtgagctttgctaattcattttcaataacctacagcagcttttgaaatgttgtcattggaaggatcnaatgcacttggggctcntggacagctacagactcataatatgtgggcaaggtcagattggatgtatttgcacaatctggggactgtatgaggaccttgttttcattgtctttggaacacagcagccttagtttttagctctgtcaaagaatggaattatttcaagactgtttgctcagcaaaaatcaatcaaggg

SEQ ID NO: 703438 - DNA, 491 bp, Homo sapiens
  misc_feature (82)..(82): n is a, c, g, or t
  misc_feature (93)..(93): n is a, c, g, or t
ctaagatcctcacactagtcaagagtatacatgatgctagaattcaggcagtgctcctgattgagatgcagtgctctgcgtngagcaatgatncagactccagtatacgcgctcccgtggtgcatgcttcagtttctctctcccagcgtctcactaacagtgtggcagcttagccagtccctgtgcagcttcaacagctttgattaaatctggtctgcttccagtcctggagatgccagagaaatcacactgattaccctaacagactgtatgaaacactagacacatacattctgcacagcctcaacaacttcaggagagagagaacccagactctgggcaatgcctgtctgaatgactctttctgaatcacagatcagggatctgccatcagcccctcacagtgattgttctgcaagtctggcaggcctatactgattcctgcttattctaaaatacagtattgagcactgggctggcttcgtgagtgt

SEQ ID NO: 703439 - DNA, 294 bp, Homo sapiens
gcgctgctggccctgttcggtcagggcgacgaacacccggcgctggtcttcggcggatttgcgccggcgcacgatgccgtcacgctccagccggcccagtacgccggtcatgctcggcttgaggatgcacgcgaggtgcgccaattggtgactttcgagttcaccctgctgacgcaggatgcggatcacccgccattgctgttcggtcaggtcatgttcattgagcagtggccggaagaacgccatggtcgcttcgcgggcctggagcaaggtgagcgtaagggacggtctggg

SEQ ID NO: 703440 - DNA, 115 bp, Homo sapiens
tggtggttaactccccccaatctgaagtccgtaaatgaactactctacaagcgtggttatggcaaaatcaataggaagcgaattgctttgacagataactgctttgatattgctc

SEQ ID NO: 703441 - DNA, 247 bp, Homo sapiens
ctctttataaaaccatcagatctcatgagacttattcactatcatgagaacagcacaggaaagacccacccccatgattcgatcacttcccaccaggtccctctcatgacacatgggaattgtgggagctacaattcaagatgagatttgggtggggacacagccaaaccatatcaccttactttgaaactttaaaatgttttgtatatagttgataactttggagagatttgggttaaatgttggt

SEQ ID NO: 703442 - DNA, 85 bp, Homo sapiens
gctggatttcagcacggcgttagtggtttgtcctcttaatactgctttgacattggaggaatgaattcgcagaagtggcaggggg

SEQ ID NO: 703443 - DNA, 110 bp, Homo sapiens
cacgaggcccatctgtgccctgcaagcctgtatggatggatttcgactggtgaaattaaatgaggtcatccgttaagtggacattgttattacctgttcaggttataata

SEQ ID NO: 703444 - DNA, 989 bp, Homo sapiens
gaggagtttgtttacgaggacatggaggccctctgcagtgtcctgcgcactctggccactgacagtaacaagtaccgtgccaaggtcccgggcaagctcaaagagcagtgcaatggtttcaccggcagcgatccgaggttcacactttcactgctctttgagcttgcccgggacttgaggaggattgttcgatgacatggaggccctctgccagtgtcctgtgcactctggcgcactgacacgtaacaagtaccgtgaccaaggctgatcgtcggcaccagcgctctactttccgcgtccgtgctgcactccgtggagggcggagatgtgcctaagaaagagtatagtgcgcttacggcttggagagtgctctagcatggaacgctgggctcggaccggatctaagcggcctctcaaggaaggtgctgaagtacgcggcatgcacactaccagtcttatagaacaatgagtctactaccgagacatctttgcccctgggtcctgtgctgtagctggatgccactgccctgaaggtctgcaacgttccacgcttgagaagcgcctgtacgaggctgctgcttcagaaaccggaccaaggctcgacagccgtgtgcagaaggagcgcggcaccacattctggtgaaaggcaaggcacacggctgagagcgagactttgttactggcctaggggcgcggtgctcaacaacaagaacgaaccgccgaaaacgaacgggtagcccagccaagtgaggggcactcgacttcatttgagagtgccaaaaccataacaagacatgaggagccgatgcatggcggcccggacactggacctgaccttgactggcggcccgaggccctcacgaacgtcaaggcaggaagaggcccccaggtggggctgaaagggacccgcacttcaggggcccagaaccctgcggaggcgaacccaaggggaatcgaactgctgtataacaaaacggccaacaccagaa

SEQ ID NO: 703445 - DNA, 392 bp, Homo sapiens
ggtccccgttggatgagtaggaaaaatgatactaaaatgttatatctttctaaaagctacttactagggattatacattctatttttttaattatcaggattcctagtgcaacaccatgctgatggcaatattaagtaaatggtaaatgcttatggaatgaataaggagcattactagaccagttcagtgtaccacaatgaactggaaaagcagcaagcaggactcgacagacatgtaaaacaaaagaatctggttaactcagcccttgtgtattttaactttctgaaatgacttcatattcattctcttaccatttctggatgatagttgccagtgtaggtacaactactgacatccaatactcaggcagaaaggtgttgagggggccggg

SEQ ID NO: 703446 - DNA, 434 bp, Homo sapiens
tcactcactgcctgcccggaatcgccatcttgctcccgtgtccgctgaacgtgccgacgcctccgtggaccgtgacgccgatgtcgtcacgtaaactcctcgcgcggctttgggtggcccggatcctgcttgtcggttgaatcgctggtttgagtcacttctatggtactgggaatcggatccagtgacctctgttttgtttcggacccaccggctgcctcaaaatctgtaggagaaaggaatgacaacgttctaggccagttgttcgcagtgtgtggttctgggaccagcggcatcagcaacaccggagatactgttaaaatgacaaattctcgggccctaccccaaacctgcagaatcagaaactttggagtgaagcgagttatctgaattttaaccagcgggtaattctgataaagtttgaaaaccacaaa

SEQ ID NO: 703447 - DNA, 1113 bp, Homo sapiens
agcggaggtctttcgtaacgatctattattcactcgaagagttcggaaaccacagttattgtctctcattccatacactggggttgtattttgccaaggtcatcttatatcgaaattgactgcttgcaaaaccgctcggtattattagccaacagtaagagagtatcttagcaggggatcgagtcagattggcgcaggtgtggagagagattatgccttgctcgttgagcgtggtctttgaacacatacttgactgagccttaacgtattcccgtctaatgtggaatatattaaaggtaggccatcattgatgttactatagccaaaggttggagcacagtgcatgtagccagatgttcataggtctacttggcactatctatgatttccatacgtcacatagtgacaaccaaaagcgaagaaagggcgcactctctgtagagtgagtgctgctgcccactctgagagtgtcctgtgagactgacttgtcatgctgtggtcgatatcaagatcctgatccaggtcacagttgtgatacataagtggggaggccttgctgcacaagtgaaacagagaagtttagacaacatggactgcagaacataaaaagtttggaacaggttgaactacattccgtggaactgctcaaagagaacgtgatcgattcgtacagagttctctttcgtttggcgtgaactattatttgttaaacgtatccccataactctgtatccgaaaacaagctaatatggatgggcgggacctggattaggggtaaagatggcgttttacaccaagaggaaattggcgttggggttcccgtccaaggtgggaacttgtaaggggtccaacgaaaaggcgttccaatggtatttacattcggaactttacaggtttgccttattgcaatttgtgaattttacccacccaaaccacggggtcgggaaccgaaccccttggaaagacggcatgacacccacaggggccttggcgttttgcgattcggtcccacagccacaggcaaaattcctaaacaaaacgcccccctaaacacttatcaacaaggcttttgggcgccttcccaccaatttgctatggtaggggtattggtcg

SEQ ID NO: 703448 - DNA, 941 bp, Homo sapiens
gccttataatggaacatcagagcaaaagttaaatctctaaagaaaaaaagaaaaaaagtttgccccagtactaggacttgtggccccggaagttgacccttaaattaacggtcacggatctcttcagatgtgaaaaaggcccttaatcctggtagtggcccttataccaccgagttatgggcacaagaactgggtggctatctggcatgcggaagacaatgtcacaggtcggtaaaggtaggaatggtgtcccctcaagatcacagtggtggccacattgtgacagcatcaaagaggggggggtctaaacggagatccattaggccattaaagggatctcgcctaggactggcatgagcggcccataataaaaagagggttgcacggagcaatccgtgaaaggtgtgcgcttctggttttgtgcgaaaccccacgagagaaaagcgctagtcaagaaggtggcgaggtccgtaagattttttaaagtcccatccttcaagagttgtgaggagatacacttttctggtcccttacaagttaccccacgcgtccggtattcgtgtatagcacgccagaattgaagatacgataccgtagaaacgtggatgttcttccacgaggtgtcgatgactgggtaaattcgggcccgagaagtgttgggtactaaagaaatggcagacgggggggcagggcttggatgcccagttctgggtagacctctcacaagggcctaatgggtagaagtgatttaccaatcttggttctggaaagaacacccggtatataaggccagacaatgtttacacccttcagttgtggtcaacttgggttgccaaaacacaacaaaaataggggagccgtacaaatgtgtggggcaccaacaagagatcggccccggtggagagagcgctacaagcggggaaaaaacgccttggcacacc

SEQ ID NO: 703449 - DNA, 837 bp, Homo sapiens
cgggcctggcgggaaagtggaaaactatcggcggtggcccaggctcggtggctcacgtcctggaatcccagcactttgggaggccaaggtggggggatcacgaggtcaggtgatcgagaccatcctggctaacaggtgaaaccctgtctctactaaaaatacaaaaaaattagccaggcgtggtggaggcgcctgtagtcgcagctactcgggaggctgaggcaggagaatggcgtgaacccaggaggcggagcctgcagtgagccgagattgctgcactgcactccagcctgggcgacagaggaagactccgtctcaaaaaaaaaaaaaaaaaaggaaagaaaactacaggcggggacggatcccggggagtaaatgggagcagtgggtcgtagtctctcagaggccccggttccccttgggaccttaatctcttaagtccggggccagcggtacggagtaacttctctgggggcatccgagccccaagagccttggggctttcctcaatcgtggcccgtggagaagtgggaaataggtccccaaaaggggtaccttttcgtggacgctcggttaaaatgtggaggaaaatgtgagaaggggctttatacccttaacccccttttcccgagagtgaacattggttccaggggcagctcggccttcattctcacgagtctggtagggcgatacatcgggagaacgcccaaaaggggtatcgcgcacggtggtaaaaaggcgagaggacgtctggagaaccccggaaaagctccgtggactaacttgggagaaactgggggcctaagccccgggaaacgcctgggaggaaagaggcga

SEQ ID NO: 703450 - DNA, 402 bp, Homo sapiens
ctttggggttcatattttttcagttaatttcagtaaaaacataatttttaaaagggattgcccccattttcccctcctgggggggatccatcaagccagggggggctgctccaggggttcatagctcatcatgcgatatgtgcagggcatggtcacaaaaatttgcaaatggcaaacaatttaaaggaatatgccattctcatactgatatctgccaggatcaaaaaaatttcccaaaccaagctggcccaaacacaccccaaccaccattttggaaaatatttgcttataaatgataaaacatccccactgtccttttacctgtatttcaggggcaaggggacacaaattttgaaagctgacaaaaaatgtggaggaacaccccaagtccctaagccaagg

SEQ ID NO: 703451 - DNA, 906 bp, Homo sapiens
tggtggagagatgatgtgtggtggtagtgggggtgtgcgttgcgtgtgtgcggtgtgtgtgggtcgtgttgtagtgggtgtgtggcgggttgtgggtgtggtcagacaggatagctatcagtgggcaagcgctccccctgggggtactcgcccgattgttcaagcccccttgggcgtcttttttcgcccctctggcgcgcgtccccgtattcctggggggggagtcccccccaattttcgttgggcccccttcaagcaagtttcccctggcccggtccgggaaacatattcccgggttttggccctctcccgcgggttttctacagaccctgggggcgcccccacgacgggccagatccttgtgcttcgcttcctgccttgcgggcctcccgtttggtgccgccgggagaccccacatgggcctaggtgttaaccacgcttaagacggtcctctcttgggggccccccgcctctacagggcccacccctcttggaggggcctctttcctcaccaccaagaggctatcctctgctgcggccaaatttaaggggcgtggcaacccccccccccccactttgccctctctaagagatgcttgtcaagggtcaccctgctccaccattgcacaaacatattcccgcccgttgtatcccccatacgcttgtcacttactcttttgtaggagcaactgattcaaatttcgagtgtatccagcacattctcctccccaaatcccctcctattggtgaaaatcatcctgagccctcctccttataatgtgtcccaagacaccccatgttcttctgctctgtgtgccccccaacaacaacccaacaagagcaaaccccaggacaaaaaataatgggggacccccgggggaaaaaattttcaaagcccccaaaaaa

SEQ ID NO: 703452 - DNA, 462 bp, Homo sapiens
aaagggggagcccgagaaccacgggggttcccccttcccccctcccggggttggtttaccaaaaaccggttcgccctccctgtgtgtgttaagggtttttttccccacccatttcccttgggttgggggggctgtgggccgcgggggaaaaattccaaacccccccctcccggggggggttccgggggttttttttttttttaaacgaagttccccggggccaaaggcgggggggcgcgggggggttttttttttttttctttttgggttggggttttgccccccccctccccgcaaaaggccctttccctttttcgggggaaaaggggggggggggggggaacccccccttccccgggttttttggtttggaggggggggtttggggggcccccccttttatttttttcggggggcccggggtggaatttaagccccccggggtccctggggcccccccca

SEQ ID NO: 703453 - DNA, 197 bp, Homo sapiens
tgagacagagtctcactctgttgcccaggctggagtgcagtggcatggtctcagctcactgcaactccgcctcccaggctcaggcagttctcctgcctaagcctcctgaggaactgacaccacccagtgtgcctccacccctggctaatttccgaatttctagtggcgccccgccctttaccatggtggacaggttg

SEQ ID NO: 703454 - DNA, 138 bp, Homo sapiens
gctatgtttacctttttatcccagcaacaatcctattctagagtccatatcaacaagtagggtttacgacctcgatgttggatcaggacatcccgatagtgcagccgctatgaaaggttcgtttgtaccacgattaaa

SEQ ID NO: 703455 - DNA, 118 bp, Homo sapiens
cccggtacacagcagggcgctgatgtaacacaggaacacagcaagaaacacggtcacacgagtctaaacacgcggcaacgtaataacctaggtaggtcgtcagagactggaggaaagt

SEQ ID NO: 703456 - DNA, 794 bp, Homo sapiens
  misc_feature (794)..(794): n is a, c, g, or t
tagacgaagtgcggcgcagatggccggcgtgggatagtggggtctcgaagtactccgcgacctactgacccggagactgacagtgtctgtctacccgggactcagtattagccttcgcctcactggactcgtctgcacaagagtggggttccggagtagccctcgtgggaagctctcgaagaccaaagtgtatgcagtcccttcgtggtgacgtcgtgcgacagcaaacggtgttcgtgcatgtccagtctcgaaccgggcccaacaagaggaattgccatgaaacaaggtcttcgtggagagagatggatagagggcttaaaacaagatttcgaagagacgctgactgtcgggcgggtgagtgatctctggtggcacggaacacccatgttcactgcaggatatcggacctttgatttggaccatgggccttcgtgagctatccgtgccggcccaagaagggagattgactgtggtccggagtcacgtgtgggtacctccgtgagcaatcgatcaaatcgaatacctagggagacctttcacctgtcgtcgatgaggtgccccaaaggcccagtgataggtgccgtcctatgggggctgcatttgggcaggaggtggtggaccgttggtcaccggcctgtgaatccgggtactgtgcccagggatgctttgcttccagggtgaagtgagggtggaccgtgggcttgggtgccgatgtaggaacactggagggcttgccgaggctattgggaaacaagggcggggtaaacgagcatgggttcacggccgcaaan

SEQ ID NO: 703457 - DNA, 290 bp, Homo sapiens
aagcagttatacagactcaccaaatggaacaaatgatttttctctctttcttttttttcttttgagacaatctcgctctgtcacccaggctaaagtgcagtggcgggatctcacaaccccgcaacccctgcctcccgggtttaagtgattctcctgtctcaacctcttgagtagctaagattacaggcattcgccatcacactcagctcattttggtatttagtagagacagggtttcaccagtgttggccaagctgatctcgaactcctgggatcaagttatccgccca

SEQ ID NO: 703458 - DNA, 162 bp, Homo sapiens
tgcgaagacatttcacatcaccaatgatgcgccgatccctatctggacattcctgtcgcgcatgctgacaggcctcaattatgaggcccgcaagtaccacatacgctactgggcggcctactacctggccctcctgcgattcccgcacccgggaaacgcacg

SEQ ID NO: 703459 - DNA, 189 bp, Homo sapiens
tattaactgcaatagagatgggtatacaccatgttggccaggcgggacaggaacatctagacctcaggtgatctgcccgactgggccacccaaagtgctgagattacaggcatcagccactgtgtccaagtaataaatcttttatgtgtgggagaaattaccatggagaggttaaaacaaccatattag

SEQ ID NO: 703460 - DNA, 440 bp, Homo sapiens
  misc_feature (440)..(440): n is a, c, g, or t
ctctttaaagattactagagacagttttagccagcaaggtttgccttgaaaattcactcaggctggagtgcagtggcgtgatcttggctcactgcaacttcagcctcctgcaacctcagcctcctgggttcaagaaattctcctgcctcagcctcctgagtagctagctgggattacaggcacctgccaccatgcccggctaatttttgtatttttagaaaagataggcatctccatgttggccaggctggtcttgaactcctgatctcaagtgatctgcccacctcagcctcccaaagtgctgggattacaggtgtgagccaccatgtctgggctttttctttttcttttttttgagacaaggtctttctctgttgcccagggtgggagtggcagtgggtcctattcacaggttcactgcaggcctcagccttcccagn

SEQ ID NO: 703461 - DNA, 229 bp, Homo sapiens
caaggtgctgggattgcgggcgtgagccgcacactccgcctatattcaattttaaaaataaaaataggctgggcgtggtggctcacgcctgtggttccggcgctttgggaggccgaggcaggtggatcacaagaagaatcgcttgaacctgggcaacatagcaagaccttatctcttctaaaaatacaaaaattagctggtggcgtgcgcctgtagtcccagatactca

SEQ ID NO: 703462 - DNA, 1622 bp, Homo sapiens
gctccgggcgcctcctgctctgcacttacacgctcggcagctgcggggagcccggcagccacgctctccggcgcgccgcccgcggaccaccacggccgagggccgctgctgggcgccgcggtccccggcgggcgcgcccgagcagcaggcggcgatgcgggcgccgaccccggctggggggcgcccgagctgccgcggctgcgccccggctccaggaggggcggcgtagcccgcgggaggaccatggcgtccccggcgctggcggcggcgctggcggtggcggcagcggcgggccccaatgcgagcggcgcgggcgagaggggcagcggcggggttgccaatgcctcgggggcttcctgggggccgccgcgcggccagtactcggcgggcgcggtggcagggctggctgccgtggtgggcttcctcatcgtcttcaccgtggtgggcaacgtgctggtggtgatcgccgtgctgaccagccgggcgctgcgcgcgccacagaacctcttcctggtgtcgctggcctcggccgacatcctggtggccacgctggtcatgcccttctcgttggccaacgagctcatggcctactggtacttcgggcaggtgtggtgcggcgtgtacctggcgctcgatgtgctgttttgcacctcgtcgatcgtgcatctgtgtgccatcagcctggaccgctactggtcggtgacgcaggccgtcgagtacaacctgaagcgcacaccacgccgcgtcaaggccaccatcgtggccgtgtggctcatctcggccgtcatctccttcccgccgctggtctcgctctaccgccagcccgacggcgccgcctacccgcagtgcggcctcaacgacgagacctggtacatcctgtcctcctgcatcggctccttcttcgcgccctgcctcatcatgggcctggtctacgcgcgcatctaccgagtggccaagctgcgcacgcgcacgctcagcgagaagcgcgcccccgtgggccccgacggtgcgtccccgactaccgaaaacgggctgggcgcggcggcaggcgcaggcgagaacgggcactgcgcgcccccgcccgccgacgtggagccggacgagagcagcgcagcggccgagaggcggcgcgccggggccgttgcggcggggcgggcggcggcgagcgggcgcggaggggggcgcgggcggtgcggacgggcagggggcggggccgggggcggctcagtcgggggcgctgaccgcctccagggagtggggaggagagagggggagacccctttgccttcccccctcagcaaggggctgcttctggggctccctgcctggatccagctctgggagccctgccgaggtgtggctgtgaggtcagggttttagagagcagtggcagaggtagccccctaaatgggcaagcaaggagccccccaaagacactaccactccccatccccgtctgaccaagggctgacttctccaggacctagtcggggggtggctgccagggggcaaggagaaagcaccgacaatctttgattactgaaagtatttaaatgtttgccaaaaacaacagccaaaacaaccaaactattttctaaataaacctttgtaatctaaaaaaa

SEQ ID NO: 703463 - DNA, 364 bp, Homo sapiens
  misc_feature (27)..(27): n is a, c, g, or t
  misc_feature (176)..(176): n is a, c, g, or t
  misc_feature (203)..(203): n is a, c, g, or t
  misc_feature (209)..(209): n is a, c, g, or t
  misc_feature (263)..(263): n is a, c, g, or t
agttactcgtccagggtagcacccacncacaacaggcagtatgtgtcttcaagaaagttctcaaaacagggagacttccagatcaccctctagggaaaccaaggagctgcttcggaactaaaggagaacttcatccgttctccaaatttttgggcctccctgaaaaccacatggtnttccctgtcccaatcgaccagtgtatngacggntgagtgcacaggtgccgccagctgccgcaccagcccgaacaccattgagggagntgggagaccctccccacagtgccacccatgcagttgctccccaggccaccccggtgatggagcccccccttgtttggtaaataaacatgtgccctcaggca

SEQ ID NO: 703464 - DNA, 259 bp, Homo sapiens
gatcgtgccggatacagcaccacccctcaatgattactgggttcctatactgacggagatcgttggctactacttgattgcacacggttacttcagcgtctatggcatgatgtgtggacacgctgttgctctgcttgtaggaggacctggacaggaatgacagttcggccacgaggccttacttcatgtataacacccttaagaaactcttgatcaagaccaacacgaaggcatcggagtcctgaaggcccagtgctcc

SEQ ID NO: 703465 - DNA, 2166 bp, Homo sapiens
gctccgggcgcctcctgctctgcacttacacgctcggcagctgcggggagcccggcagccacgctctccggcgcgccgcccgcggaccaccacggccgagggccgctgctgggcgccgcggtccccggcgggcgcgcccgagcagcaggcggcgatgcgggcgccgaccccggctggggggcgcccgagctgccgcggctgcgccccggctccaggaggggcggcgtagcccgcgggaggaccatggcgtccccggcgctggcggcggcgctggcggtggcggcagcggcgggccccaatgcgagcggcgcgggcgagaggggcagcggcggggttgccaatgcctcgggggcttcctgggggccgccgcgcggccagtactcggcgggcgcggtggcagggctggctgccgtggtgggcttcctcatcgtcttcaccgtggtgggcaacgtgctggtggtgatcgccgtgctgaccagccgggcgctgcgcgcgccacagaacctcttcctggtgtcgctggcctcggccgacatcctggtggccacgctggtcatgcccttctcgttggccaacgagctcatggcctactggtacttcgggcaggtgtggtgcggcgtgtacctggcgctcgatgtgctgttttgcacctcgtcgatcgtgcatctgtgtgccatcagcctggaccgctactggtcggtgacgcaggccgtcgagtacaacctgaagcgcacaccacgccgcgtcaaggccaccatcgtggccgtgtggctcatctcggccgtcatctccttcccgccgctggtctcgctctaccgccagcccgacggcgccgcctacccgcagtgcggcctcaacgacgagacctggtacatcctgtcctcctgcatcggctccttcttcgcgccctgcctcatcatgggcctggtctacgcgcgcatctaccgagtggccaagctgcgcacgcgcacgctcagcgagaagcgcgcccccgtgggccccgacggtgcgtccccgactaccgaaaacgggctgggcgcggcggcaggcgcaggcgagaacgggcactgcgcgcccccgcccgccgacgtggagccggacgagagcagcgcagcggccgagaggcggcgcgccggggccgttgcggcggggcgggcggcggcgagcgggcgcggaggggggcgcgggcggtgcggacgggcagggggcggggccgggggcggctcagtcgggggcgctgaccgcctccaggtccccggggcccggtggccgcctctcgcgcgccagctcgcgctccgtcgagttcttcctgtcgcgccggcgccgggcgcgcagcagcgtgtgccgccgcaaggtggcccaggcgcgcgagaagcgcttcacctttgtgctggctgtggtcatgggcgtgttcgtgctctgctggttccccttcttcttcagctacagcctgtacggcatctgccgcgaggcctgccaggtgcccggcccgctcttcaagttcttcttctggatcggctactgcaacagctcgctcaacccggtcatctacacggtcttcaaccaggatttccggcgatcctttaagcacatcctcttccgacggaggagaaggggcttcaggcagtgactcgcacccgtctgggaatcctggacagctccgcgctcggggctgggcagaaggggcggcccggacgggggagctttcccagagacccggggatggattggcctccagggcgcaggggagggtgcggcagggcaggagcttggcagagagatagccgggctccagggagtggggaggagagagggggagacccctttgccttcccccctcagcaaggggctgcttctggggctccctgcctggatccagctctgggagccctgccgaggtgtggctgtgaggtcagggttttagagagcagtggcagaggtagccccctaaatgggcaagcaaggagccccccaaagacactaccactccccatccccgtctgaccaagggctgacttctccaggacctagtcggggggtggctgccagggggcaaggagaaagcaccgacaatctttgattactgaaagtatttaaatgtttgccaaaaacaacagccaaaacaaccaaactattttctaaataaacctttgtaatctaaaaaaa

SEQ ID NO: 703466 - DNA, 866 bp, Homo sapiens
catggtggcagcctgtaattccagaacttagggaggctgaggtgggcaagatcacttgaggccaggagtatgagaccagcctgggcaacatggtaaaatcccagcactacagaaaaatctaaaaattagccaggcatggtggcgtacacctgtaattttcagctacccaggagggctgagatgagagaatcacttgttcctgtgccaggtcacggtctgcagtgaacctgtgatggcacctcatttgcactgcggtcttgagagacagagcaaagccccatatcttagaaaacaacaacaacattgttcagtgacaccactgttgccagcgcacctttggcaaccgcacaaaacatttacctgccttgcggacaccactaaaacttgttgctacccatctctgggtctgggggtaactcactctcagcgtggggtccatcttctcaccctaggggatttcttaacaacaattcacgcacggggcggttagcaactaatacttggccccgaggctgggtctctctgcaattgcccgtgtgctcaaggccgatccttcctagacatgagcctcctgagtcagcctggtgcaattcccatgttgtgctgaacgcccattgggcatcccgcaaaactgggaattaggccaccgtttaagacaataaccatgttctggggcaagcttacttcacacaaagggactcacagttgggtccaggtccatccctagctaactaggcagcacggagtaacagctcctaggggccatattactccgcccggaaatccattacagattctcattgtccacacccagagcactggttcaaccagctatagtaggaacaacatttgccgcagggagccaa

SEQ ID NO: 703467 - DNA, 2187 bp, Homo sapiens
gctccgggcgcctcctgctctgcacttacacgctcggcagctgcggggagcccggcagccacgctctccggcgcgccgcccgcggaccaccacggccgagggccgctgctgggcgccgcggtccccggcgggcgcgcccgagcagcaggcggcgatgcgggcgccgaccccggctggggggcgcccgagctgccgcggctgcgccccggctccaggaggggcggcgtagcccgcgggaggaccatggcgtccccggcgctggcggcggcgctggcggtggcggcagcggcgggccccaatgcgagcggcgcgggcgagaggggcagcggcggggttgccaatgcctcgggggcttcctgggggccgccgcgcggccagtactcggcgggcgcggtggcagggctggctgccgtggtgggcttcctcatcgtcttcaccgtggtgggcaacgtgctggtggtgatcgccgtgctgaccagccgggcgctgcgcgcgccacagaacctcttcctggtgtcgctggcctcggccgacatcctggtggccacgctggtcatgcccttctcgttggccaacgagctcatggcctactggtacttcgggcaggtgtggtgcggcgtgtacctggcgctcgatgtgctgttttgcacctcgtcgatcgtgcatctgtgtgccatcagcctggaccgctactggtcggtgacgcaggccgtcgagtacaacctgaagcgcacaccacgccgcgtcaaggccaccatcgtggccgtgtggctcatctcggccgtcatctccttcccgccgctggtctcgctctaccgccagcccgacggcgccgcctacccgcagtgcggcctcaacgacgagacctggtacatcctgtcctcctgcatcggctccttcttcgcgccctgcctcatcatgggcctggtctacgcgcgcatctaccgagtggccaagctgcgcacgcgcacgctcagcgagaagcgcgcccccgtgggccccgacggtgcgtccccgactaccgaaaacgggctgggcgcggcggcaggcgcaggcgagaacgggcactgcgcgcccccgcccgccgacgtggagccggacgagagcagcgcagcggccgagaggcggcgcgccggggccgttgcggcggggcgggcggcggcgagcgggcgcggaggggggcgcgggcggtgcggacgggcagggggcggggccgggggcggctcagtcgggggcgctgaccgcctccaggtccccggggcccggtggccgcctctcgcgcgccagctcgcgctccgtcgagttcttcctgtcgcgccggcgccgggcgcgcagcagcgtgtgccgccgcaaggtggcccaggcgcgcgagaagcgcttcacctttgtgctggctgtggtcatgggcgtgttcgtgctctgctggttccccttcttcttcagctacagcctgtacggcatctgccgcgaggcctgccaggtgcccggcccgctcttcaagttcttcttctggatcggctactgcaacagctcgctcaacccggtcatctacacggtcttcaaccaggatttccggcgatcctttaagcacatcctcttccgacggaggagaaggggcttcaggcagtgactcgcacccgtctgggaatcctggacagctccgcgctcggggctgggcagaaggggcggcccggacgggggagctttcccagagacccggggagctttcccagagacccggggatggattggcctccagggcgcaggggagggtgcggcagggcaggagcttggcagagagatagccgggctccagggagtggggaggagagagggggagacccctttgccttcccccctcagcaaggggctgcttctggggctccctgcctggatccagctctgggagccctgccgaggtgtggctgtgaggtcagggttttagagagcagtggcagaggtagccccctaaatgggcaagcaaggagccccccaaagacactaccactccccatccccgtctgaccaagggctgacttctccaggacctagtcggggggtggctgccagggggcaaggagaaagcaccgacaatctttgattactgaaagtatttaaatgtttgccaaaaacaacagccaaaacaaccaaactattttctaaataaacctttgtaatctaaaaaaa

SEQ ID NO: 703468 - DNA, 169 bp, Homo sapiens
cgctataataagtgatggatattatagtatatgatgcttgcgaattattagtactaactcttaaatttgagaaatgttttctctaacaagtcactcatctccacctttcacacacattctagaataaagttttagagcaaaaggctccaggtctggggtctaggtccta

SEQ ID NO: 703469 - DNA, 1768 bp, Homo sapiens
gctccgggcgcctcctgctctgcacttacacgctcggcagctgcggggagcccggcagccacgctctccggcgcgccgcccgcggaccaccacggccgagggccgctgctgggcgccgcggtccccggcgggcgcgcccgagcagcaggcggcgatgcgggcgccgaccccggctggggggcgcccgagctgccgcggctgcgccccggctccaggaggggcggcgtagcccgcgggaggaccatggcgtccccggcgctggcggcggcgctggcggtggcggcagcggcgggccccaatgcgagcggcgcgggcgagaggggcagcggcggggttgccaatgcctcgggggcttcctgggggccgccgcgcggccagtactcggcgggcgcggtggcagggctggctgccgtggtgggcttcctcatcgtcttcaccgtggtgggcaacgtgctggtggtgatcgccgtgctgaccagccgggcgctgcgcgcgccacagaacctcttcctggtgtcgctggcctcggccgacatcctggtggccacgctggtcatgcccttctcgttggccaacgagctcatggcctactggtacttcgggcaggtgtggtgcggcgtgtacctggcgctcgatgtgctgttttgcacctcgtcgatcgtgcatctgtgtgccatcagcctggaccgctactggtcggtgacgcaggccgtcgagtacaacctgaagcgcacaccacgccgcgtcaaggccaccatcgtggccgtgtggctcatctcggccgtcatctccttcccgccgctggtctcgctctaccgccagcccgacggcgccgcctacccgcagtgcggcctcaacgacgagacctggtacatcctgtcctcctgcatcggctccttcttcgcgccctgcctcatcatgggcctggtctacgcgcgcatctaccgagcgagaagcgcttcacctttgtgctggctgtggtcatgggcgtgttcgtgctctgctggttccccttcttcttcagctacagcctgtacggcatctgccgcgaggcctgccaggtgcccggcccgctcttcaagttcttcttctggatcggctactgcaacagctcgctcaacccggtcatctacacggtcttcaaccaggatttccggcgatcctttaagcacatcctcttccgacggaggagaaggggcttcaggcagtgactcgcacccgtctgggaatcctggacagctccgcgctcggggctgggcagaaggggcggcccggacgggggagctttcccagagacccggggagctttcccagagacccggggatggattggcctccagggcgcaggggagggtgcggcagggcaggagcttggcagagagatagccgggctccagggagtggggaggagagagggggagacccctttgccttcccccctcagcaaggggctgcttctggggctccctgcctggatccagctctgggagccctgccgaggtgtggctgtgaggtcagggttttagagagcagtggcagaggtagccccctaaatgggcaagcaaggagccccccaaagacactaccactccccatccccgtctgaccaagggctgacttctccaggacctagtcggggggtggctgccagggggcaaggagaaagcaccgacaatctttgattactgaaagtatttaaatgtttgccaaaaacaacagccaaaacaaccaaactattttctaaataaacctttgtaatctaaaaaaa

SEQ ID NO: 703470 - DNA, 317 bp, Homo sapiens
gacatggtgtgatcttggcctttgtgatcaatgtaacctccgcctccgcctcctgggttcaagcgattctcctgcctcagcctgccaagtagctgggattacaggcacccaccatcacacctggctaattttttgtatttttagtagagatggggtttcactatgttggccaggctggtcttgaactcctgacctcaggtgatccacccaccttggcctcccaaagtgctgggattacaggcatgagacacggtgcctagcctaaagcttgtatttaagaatcgtgagtaaagatatcactctaactccatagttat

SEQ ID NO: 703471 - DNA, 357 bp, Homo sapiens
  misc_feature (80)..(80): n is a, c, g, or t
  misc_feature (128)..(128): n is a, c, g, or t
atcaccacatatggacaatagcccaatgtttcctgagttccctagagggttgaaagagaataggacctagagagatcacnaagttgggacaggcactcattaatttgatccaatgacaagagaccagnatgggaagaaggatgccttgagagatgtcagtgtgcacccatggatagaagcagctggtgactgggtacttgggaagccacatggacacacacaaagctcctggaagacgttttcaaggagttgggctgtgctgggatccagaactggctgaagaaaccatgagctgacataaaatttctgccacctagcagaatggaggctccatttggaaattaaattatatactta

SEQ ID NO: 703472 - DNA, 866 bp, Homo sapiens
ggttgactatgatagccacacaactttcttttggttcgtgttgacatggtgtgtcttacactatgcttttacttctttttctgtatccccatattataagatgtgtcctctgtaatcatgagtataatcggcgattggtcaacaatcgatttctgattaatctgtcttttacagaatttgagggtgttagttcaatcctatttaatgtacttacttacatattttgcgattaaatctgtcatctcgtgtgttgcttgtctatcgtgtctttgccttgtctttgcctgctcctgggtgattccattaatccatttttccccctcttagcatgtcggtgcgttatactgttgcttgcccataagttacccaagagattaccagatgcatgcctgagctttaaggtctaagagtaaatgagcatttcttgtctacttcctaatcaatgaaaggacttttacggacacttttatttcatttatgtatcctgcccctattatgtaactattactgttatgtattgtaacatttgaaatcccagcaaagtatattggttcagtcagtattcctttattcctttcggagttactcagtgaacgctctcaacctgtgcattgcacttcatcttttgtgcatatccaagctgtatatagcggtccttacgactttatactttgaaaagtcccttcaaatatttcctgataacagaactctgtgttggtttggccttaaaagttgactcctctattattgcctatcatttcaagaggatcttttttgagcagagggcaatgaaaggctcgtggggagggaattgcccaaaccgcttttgaaacaacccttgcaatggcctggttaatatctgggac

SEQ ID NO: 703473 - DNA, 429 bp, Homo sapiens
  misc_feature (41)..(41): n is a, c, g, or t
acattgtttactgcctccatcgaggatgcaccgtttcagtntcaatgactcaatattctggacaaaagtggacgaatgtaactaaggctgggaatgtcaatacaatcaaactagcaagggaaatgatcacaagtcagtcataatctggctaatatgctagcgtaactatttatgtagcaagttaaaaacacagagcctaactttagctagctaactgctaagaggatgtcatgtcattggaggagtgggtgagtgactgtctatttcccctcatcgtttttcagtggctacacacagctagagatgcaggagtctggtttggttagctagcaagaactttaatgactgttatacatttagcatagatcttacgttcacaaattccctctggctatctactccgatttcagagcactctccggtcgacgc

SEQ ID NO: 703474 - DNA, 258 bp, Homo sapiens
ggtcagacaataaaaatcccacccttaggcttgagtgttcctgtgctcaagcaattttcttgccttggcttcctgaatagctgggactataggcatgcaccaccacgcctggctagtttttgtatttttagtagagacggggtcttgctattttgcacaggctgatctctaagtcctggcctcaagtgatcttcctgtttcagtccccaaggtgttgggattatgggcatgaactgctgcacccagccctttatactc

SEQ ID NO: 703475 - DNA, 294 bp, Homo sapiens
cgtttgctctagacggatcccgatgtctctctggttttgtgctcctcctgtcgtggtgctcctcctgcgctccaagctcccccaaggggccagctatgctgccctgaggcagtggcttctgggcacaagcgtgtgtgctgcagcagcagcaggtgtggcaggtggtttgcttgcaggcccttgggtgtgcgcacgtgatgcagcatcctgggcagagccttggctcctggggtgtgtctctgcagccagggcgagcatggcatgtgtcttgtctctcttgggtggtgtgtgcat

SEQ ID NO: 703476 - DNA, 884 bp, Homo sapiens
  misc_feature (13)..(13): n is a, c, g, or t
  misc_feature (109)..(109): n is a, c, g, or t
  misc_feature (112)..(112): n is a, c, g, or t
  misc_feature (117)..(117): n is a, c, g, or t
  misc_feature (126)..(126): n is a, c, g, or t
  misc_feature (183)..(183): n is a, c, g, or t
  misc_feature (185)..(185): n is a, c, g, or t
  misc_feature (199)..(199): n is a, c, g, or t
  misc_feature (214)..(214): n is a, c, g, or t
  misc_feature (231)..(231): n is a, c, g, or t
  misc_feature (234)..(236): n is a, c, g, or t
  misc_feature (245)..(245): n is a, c, g, or t
  misc_feature (294)..(294): n is a, c, g, or t
  misc_feature (303)..(303): n is a, c, g, or t
  misc_feature (319)..(319): n is a, c, g, or t
  misc_feature (322)..(322): n is a, c, g, or t
  misc_feature (370)..(370): n is a, c, g, or t
  misc_feature (401)..(401): n is a, c, g, or t
  misc_feature (447)..(447): n is a, c, g, or t
  misc_feature (456)..(456): n is a, c, g, or t
  misc_feature (472)..(472): n is a, c, g, or t
  misc_feature (476)..(476): n is a, c, g, or t
  misc_feature (481)..(481): n is a, c, g, or t
  misc_feature (489)..(489): n is a, c, g, or t
  misc_feature (494)..(494): n is a, c, g, or t
  misc_feature (524)..(524): n is a, c, g, or t
  misc_feature (529)..(529): n is a, c, g, or t
  misc_feature (542)..(542): n is a, c, g, or t
  misc_feature (579)..(580): n is a, c, g, or t
  misc_feature (621)..(621): n is a, c, g, or t
  misc_feature (637)..(637): n is a, c, g, or t
  misc_feature (639)..(639): n is a, c, g, or t
  misc_feature (727)..(727): n is a, c, g, or t
  misc_feature (767)..(767): n is a, c, g, or t
  misc_feature (793)..(793): n is a, c, g, or t
  misc_feature (803)..(803): n is a, c, g, or t
  misc_feature (881)..(881): n is a, c, g, or t
aaaaaaggaacanaaggcaggctccggctccctccacccccgtgaggagcccttgtccatttcagccttgcactcagaaagaccccgggggtattgtagtacaacgtgnttnatgtntcgtggtanctgtcagagccttaaaacaggcccacccactactgtgaaatttcaaggaaataactnantcagtaaaaataanagttccaaggtaganctggtctcacaggtgancannngcttaaatncagagccttcttttctgtccaaagccactaaaatttgatctcctccttnacacattcncaggtcccaaatatgntanccaccttctgacaggtggctacaggtctacactaatggaagctctgcnaaaaacatctaaaaacaaccctcctgccaangaggtcagctggaaggaatatgctaagcccataaactggtcagagnaggtaatgngcgcattcagagaccnaaanaatantccagganttagnacctactcctcgagaggaaacggagagaantgctnttacttaaatatnaaaaataagggagaacaaaaaaataaaaacgtcccannctggaagaaaaatagggaagctgagggaaaatgaggctgtncataaacttttaaganancaaacttggctgtataactttcagacctagcttatggttggggaccacctgaactggccccagggttgcctctctctcaacacaaggngcatactgaacccttctgcagtatagtacacgttgctgcngcaagttcaaaggccacgagggaaanaccttttaancagagcaagggggaatctgaaatgacagaaggggggaaggtcggttcgcctgaagacctcttctggcctgtttggaanaga

SEQ ID NO: 703477 - DNA, 107 bp, Homo sapiens
cccccccccccccccccccccacatttcccggttttcccccagcccctggggcattttcgggccatcggtcggtttttattaaaaaagatttgttgttttgttccca

SEQ ID NO: 703478 - DNA, 900 bp, Homo sapiens
  misc_feature (896)..(896): n is a, c, g, or t
ccaggatgatgaggtcttaacaaaaaccagtgtggcaaaaaaaaaaaaaaaaaaaaaaaaaattttttaaaaaaaaaaaaaaaaattttttttcaaaaaatttttttaggggcggaatggggaaacattgtgggccactacaaaatatttggggacaactcccttaaatttgcgttttggacaggtttaaaattgttgtcgtgtggccaacaatattggtgttttctactgttgggcgagcacttttttattcaaaagggtatgtcgtgtcgcaaaagagaagtctaaagggagaattaagtagtcgtgtccccaacaattgtgtggggagagggggcaatatcccaacaaatttgtgagtcccggggagtggagccactttatttttttaaccctgtgggcggcgggggacaaagagttttaattgggcgacccagagggtcttccctttcgaggaaatcgttgtgaaacatttacctttttaatatggcgccttgggttctgggcccaatagagggcctatatttttgtacaaaagtgggggcccttacccggcggaggcacttttagcaaaaaactttgtgaggaaagacggggcagcgacacagtggacttagcgggctgccccctcaacacataattgcgagccggcgcacgggacagttaaaagtctcaccaacaaaaaacaacagaaccagcagacacaaacagatagttggccggcgcgcccgccgccaagaagagagattaccaccacactcttgtgggggccacgcgcgccaaagaggagtaatcaacccgcgccacaccgcgccacaaagacctcgggcaccaccaggggcgcgggccccccaaaaaacaacgcccgcggaccgccgctcggaccccccagggcnccag

SEQ ID NO: 703479 - DNA, 458 bp, Homo sapiens
actcttacatctgcactcctaggccagtactgcctgtggcaattgattatttgcccatacttatcatacaggtcctggaataacccatgtaggagaaaatcaatcatgactatgataacctaatttctcactctgagcttcaaggaaatgtcctcatgtcctcttctcttaccctcaaatgccgagattcccgtgaacaaaggatactgtactggcttccgatgctttgcattctccttcattctctgtaactgttgctggtgacatttcatgctccaagggttatagtgtttaagctgggaacttatattccccttcttctctacagtgtagtacaagacttcagatttctttagccactcaaattcttcttctaacttatggctataaagagataaggaccaataaatcagtatgtcttatcagaattcagaaggccgggcatggtggctcatgcc

SEQ ID NO: 703480 - DNA, 472 bp, Homo sapiens
  misc_feature (18)..(18): n is a, c, g, or t
  misc_feature (44)..(44): n is a, c, g, or t
caattaaaaaaatttatngttggatacagacattttcaaggacntatgtcatatatgttgggtggcacttctgccatgctctcctctccccattagtcccctttgtcccctagacactttccatgtccacctgtatgggcatgagtttaggtatctgactaagatctagaagccgcagattagagaagaaacacaatgtatatagttgttaaacattttcatgaacctcaatttttttataaatgtgtattttaaaacttgttaagcaaaaaaaaaactctttaatcattagctgtcattataaacttaggaggtcagaaatctgctttaaaatttttatttttatggctaataatgtgtgcttttatcacaaatgctttaattagaacatgaaaatttgtattttaaactatttttatcataaagtttgtattatatattacactttaaaataaatcagtatgtaaaacaa

SEQ ID NO: 703481 - DNA, 1032 bp, Homo sapiens
  misc_feature (375)..(376): n is a, c, g, or t
  misc_feature (522)..(522): n is a, c, g, or t
  misc_feature (526)..(526): n is a, c, g, or t
  misc_feature (536)..(536): n is a, c, g, or t
  misc_feature (545)..(545): n is a, c, g, or t
  misc_feature (566)..(566): n is a, c, g, or t
agcgggtgtctcccggggtcgggtgcgagtgtgcggcgcgctcttggcacctcccgcgcccctcgggtgtcagcgttccggcgcccctcccggccctttccccacggggacgcctcccgagccaccgggggagttacgccaagttggagggaaaaaggtggggcggggcctgcccgcctccgcagcccccaggcagcgccccaaagttggtgctgcaggtgcagcaaccctcctgccgccctcctccccggctggcccggccgtggcaggcgggaacccccaagggctcggttcgggggctcccgatgatctgccgcaacttggagggtgccttgctgcacagaagccacctgagctgggggcggccgggggcgnncgaggcccaggcggaagccgggctagccggctggccgtggggagagcttagcggccgtggcaccgagccggggtgcccatgtgactgcggtgtgcttgggaagaggaagctgcagaggtactgtctgatgagcgtgaaaggttgtntcancgacttccanatcgacttnggaggcacttccgtttggtancatgttttccggggtgggaagattttttggctgattcctccaacgctgcacaatttggcgctgtacgaggagtgggtgctgtcaggcaaacagagtgacatctttctgggagaccgtgtggaacgatgccaaagaattgagctgaagcagggctacacatttttcatcccttccggtttggatccatgccagtctacaccccctgtagactctatagggtgttcggcggaaacatcctgacacaggctttaacgtgcccatgcaagtgcggatctacgagatcgaggacaggaccgcgggagaaaaaccaaacttgtaggacactttccaccccactctcacaatttggaccttttcaagtccttgagaccgggcgttctagattccatccgggaaacctttggttgcatctcctgaggtccactcagttacaaagacattggcctccgaagaaggtgaggcagtc

SEQ ID NO: 703482 - DNA, 170 bp, Homo sapiens
cacgctggtcaccgatgaaggcctgggcggtccgcattgctcagcgtcagggaagtacgccggcgaagtacagcctcaagcccaatcttcgcaattcgatcccgccaaggctggagacactgcgaattggcggacgcctctgacgccacactcgcctccttcaggatttg

SEQ ID NO: 703483 - DNA, 554 bp, Homo sapiens
tgagacaaacccgtgggtgtagggaactgactgactaacacatgaaatcctcaccgagcgtggctatagtgttcaccaccacaggcgagacaggaaattgtgtgtgacatcaaagagaagctgtgctatgttgcccatggacttcgagcaggagatggccatggcagcctccagctcctccgtagagaagagctacgagctgcccgatggtcaggtcatcaccatcggcaacgagcggttccgctgccccgaggcgctcttccagccttgcttcctgggcatggaatcctgtggcatccacaaaactacctccaactccatagtgaagtctgatgtggacatccgcaaagacctgtacaccaacacagtgctgtctggcggcaccaccatgtaccctggcatcgcccacaggatgcagaaggagatcactgccctggcgcctagcacgatgaagatcaagatcattgctcctcccaagcgcaagtactccgtgtgggtcggtggctccatcctggcctcgctgtccaccttccagcagatgtggatcagcaagg

SEQ ID NO: 703484 - DNA, 360 bp, Homo sapiens
  misc_feature (1)..(1): n is a, c, g, or t
ncagtagggtttttggactgtacagtgtttatatgatctgaactccttatacataagaaggtgtgtatattaatcccaattatggacttaaatattttaaaagtatgaatacccttatttgctgcaaaggccagtgtgtagacatttgctttttagcaatatttttaagtgctccgttttcgtgctggagaagaagtctttggcacacagactggtcagtaataggtgatgcaggtatgtccaggttaagccaacaatgttttgcatttctatgcttcttttctgtcaacactaatgaaatcaacattgcctgaatgtctgaatactgaaacacagccctgtttaaaagtatgtaactga

SEQ ID NO: 703485 - DNA, 442 bp, Homo sapiens
gtatcatctctgaatccccgcgtagccgctgcctcctcctaccctcgcatgtatctaacccggtctgagatacgacaggggcttgaatactttttctcccgaagaaagattacttcaacgtggaatatgccattgtaggctatcacagcttggttctaccagccattgggatccagacatcagagggtgtgtgcctagctgtggagaagagcatatccttccccaactgatggagcccgaagtagcaattggagaaaatggtagagcattgatgctcacataggtggtgcccatgagtgggctaatggctgatgctaagactttaattgatcaacgccaggagtggagacacagaaccattggttcacctacaatgagacaatgacagtggagagtgtacccaagctgtgtccaatctggctttgcagttgggatacagaag

SEQ ID NO: 703486 - DNA, 137 bp, Homo sapiens
tgaggtcgacctaagactctcttttgataggcaataaacacagagcatgaactgtctgaacacaactattctactgtaatacttaatacagaagacatgatccagacaacataatgcagttacttgcaatgaagaaa

SEQ ID NO: 703487 - DNA, 411 bp, Homo sapiens
tgggcggatctcctgaggtcaggagttcaagaccagcctgaccaacatggagaaaccccgtctgtactaaaaatacaaaattagctgggcatagtggtgcatgcctgtaatcccagctacatgggaggcttaggcaggagaatcgcttgaacccaggaggcggaggttgcagtgagccgaaattgcaccgagctgagattgcgccattgcactccagcctgggcaataagagcaaaactccatctcaaaacaaaaaaaaaaaatggtgattaattttagacttagagatgaaaatagagatagagtagaaggaaagggcctcaagtcaaagggggatgttcaagatcattagtcataagggaattgcacttcaaaaccaccaagagatgccatttcacacccactaggata

SEQ ID NO: 703488 - DNA, 843 bp, Homo sapiens
  misc_feature (640)..(640): n is a, c, g, or t
ggggctgaggcgagcctgagcgcgctgttggccgtgagggaagccggaggagaccgggtcgactgggcagagcggcagagggtcgatggagcctgctctgcacgcccagtgaatttagaaggtgggcaggcagcagggtcacgtgagggagcgcgccgtgactgagcttgggtcctgacgtgatgctcaggctcgctgacccaagacgtggtgtgtgccaggcctccaaagccgggcttacacccaatccaatgtgaggacgggaccgggacacagagggactggagcgatgcaaaggagacatggcttcatcattcctgccctgctggggggccaatcaccgggcggacagctggtggatgagctgagctcagggggacgactccgggggaggtggatgttcccccatagccctgagatcgaggagaccagttgccttggcctgagcctgtttgaggagagggcttgccgcgcatccttgaagggcctgattcaggtggccagcagggagcagctcttgtacctgttattgccgtggttacaagcgggtcacccgttggacacttgtattactccttaaaccaagcttctttgattttgagggaacctgcacacaattgggaagctttggaaatgcacnttgggtgattcaatgccccaggccaagctattgccggaataatatcgcagtagtttacaaaaattcgatccaggttggaatcctcaggataccagagaagaacggaaacgaggcaaatcgggttttgggggccagtataagtctctatttatgaaaacccttgcgagcacgccccatattttgatactgcggacaaccacctt

SEQ ID NO: 703489 - DNA, 979 bp, Homo sapiens
  misc_feature (93)..(93): n is a, c, g, or t
ccgacaaggtgcccggcggctggacctcgtgtcgcgagctgccatggcccagtggaggaagaagaaagggctccggaagcgccgaggcgcggnctcccaggcccgcggagtgactcggaggacggcgagtttgagatccaggcggaagatgacgcccggtcccggaagctgggacctggaagacccctgtcctaccttccccactccggaatgcaccctcgtaatgtgtgagccggacacccaggggagatgggtgcgtgcccgagagaactaagaagcaaatcaatcacattctggaggcttccagtccatgtggcctgagctacccggttgttcaacggcctcatgaaggaaggcgtacaaggtgcctagacaccgcatccagatgaatgaccatcccggtgatcttgggatggcaaggacgtgttggccattggcccttggactgttgtgttggcgccagacagcgctgctttcgcgtctctcccgaattgttcgaggcgggcgtcaagaccctaccagtgctccctgacctggtggcccgcgccctctatccttctcgcctgacgtctgatgagcttggccctgcagaacccttggaatgttcggctacgcgagctaggcacagtttcactggcccttcatagatttgcctgatcctgggtgtacgacgcggcttgcatgaccatgttttgcagcccttgcactgaaataatctcgacgtcttcatttccttgcgcacagcccggacgggttgggtgcactgtttgcttgtggcatatgcagccttgaatctgcagcaggtgttggacaccgtgggtggttcgggtggacgcttaccgggctttcttgagctggggtttcgcagaaacacgcttccgggagattctatctgcgccgccgtcccggggggccccccacaggggtggttcccggcgggctgccaaaatggggggggcattgcccgggcggcctcgag

SEQ ID NO: 703490 - DNA, 711 bp, Homo sapiens
  misc_feature (93)..(93): n is a, c, g, or t
ccgacaaggtgcccggcggctggacctcgtgtcgcgagctgccatggcccagtggaggaagaagaaagggctccggaagcgccgaggcgcggnctccctagtgccctgctgtgcatgcatgactctgtgatgtgactgtgctgatgttttgatgatcctagtgctgtgatagatttgagctgccctgtgtgccctggatatgcattgtgtgatcctgtgtaatgaaccccgtgaccctaccgtttcccacagcctctgtgataattgcatccgtctgtgtatttgttgtgactgcctgtgatctacgcctgtgtgagtgaattgtgttgcgtgttgtccgcatgatgacagatgatagtgagacgatagacagtgtccttgtgatgtgtcgttccgatgttccgattggtgaccttgatcggctgtacctcgcgtgtgcttgtctctgcatgcttgttgcgtgttcgagttggagactcgcagactgtggtggtgtatctatcactgtgggtttgcctccacatccttccccctcctatgtacccgattggagtgtggatattgatccccatgttcgctccttgttgtttcgacgctccgttcttgctgcactttgtggcgcctactgggcaccgttgttgtgggtttgtggcccgagcttgtggcgcctccttgtggatcctcgtggggtccacggctgcgtggccgtcg

SEQ ID NO: 703491 - DNA, 222 bp, Homo sapiens
gcaattctcctactcagcctcccaagtagcggggcattacaagcgtgcaccaccacgcccagctaattttttggtacttttagtgggagacgaggttttaccacatgggcagggctgggtctcaaacttctgacctgaagtgatctgcccacttcagtctcccaaagtcctgagattacaggtgtgagccaccatgccgggcctcatcttatgtaaggatgc

SEQ ID NO: 703492 - DNA, 483 bp, Homo sapiens
  misc_feature (385)..(385): n is a, c, g, or t
agaataatatggcatatatataatggtgatagtgttaaatcttctgtattgtggttatccaatatagtgtaaccatctgtaccgtggttatcacttttaaaatttctactaaatcttgtaaatgatacccatatgtgtctttaaatactgctaacatagctccttgtatattgtttacttttaacaagttcttttaatagtgctatggtacattgtggatttacattttctatattgctattgttacttgtaccgtctgcactgctgttgttgccctctgtgcccccgttgtctatagcctccgtactgccgccactacatacattgccgccatgttcgccatttgtagttacctgaatctgtgtagcttccacttcagaacagncatagccactatctgatattgtaaacagccgccttattgcctttttctgcccactatttaaagatatttcttgtaaccgtggacttaactctggttac

SEQ ID NO: 703493 - DNA, 506 bp, Homo sapiens
acaacattttaagtaacaatatttttacacactacctctctctaatattttttattataaaagttaaaacatcagaacttttggggggaaaactactatcagggcttgacttttggtccaattttaacctgtaaaatacagatttatctatgtacgctatcatggaaatggaaatcaaagctgctatagctttttatttaaataatcctgtaaagggttatctatcaatggttatttcaagtaagatctctgtattcttaaatttatgggtgaaataatttgattactagatattattgtaaaaccaatagatcctggttataacgataaatttatcagtctacattggtaggctagaatcaatttatttcaagtgccccttattaaacaaaagttatcagtggatccaactataaaattttatagtaactaaattgtacaagcctaaaactgtgattttggtcctgtatcttaggtaaatttatgataatgttctcgagctatca

SEQ ID NO: 703494 - DNA, 156 bp, Homo sapiens
atcagctgttacctaccgttgctgtggttgaccgtggttatgtgttgctctctcggtcaagagtttgtctaagatcttcttaagcttggctggtcgtccttgtaagtgatcattagtgctaaagcacggtcaacccacaagccacggtcaacccac

SEQ ID NO: 703495 - DNA, 238 bp, Homo sapiens
ctccgcactggagagtcatgataattcgacaggtacaagtctagtgcgcacgcctccctggcaccgaggggagtgcacgccccacctgcaggctgtcaggcgttggagggagcagccccgtgcctcacaggcatgggcagctaccttactgctcatccccgggccatcctgcactgtgttcctcccatggtccagaagcctcctaggcttgggcagcgaaacacgtggtaacgcctcc

SEQ ID NO: 703496 - DNA, 633 bp, Homo sapiens
  misc_feature (172)..(172): n is a, c, g, or t
  misc_feature (348)..(348): n is a, c, g, or t
  misc_feature (561)..(561): n is a, c, g, or t
  misc_feature (625)..(625): n is a, c, g, or t
gtgaccacaggttctgggccagtccccatgtagagcaagaagggggtttcaatatcctgcaagccccacaaggtaaagtttttttgtccctttagccccagcctcccccccttctcccaccctgtacctcatcccatgagacccgggtgccggctcttttgtcacccttggncaagacaaaccaagtcggaacagcagataacaatgcagcaaggccctgctgcccaatctccatctgtcaacaggggcgtgaggtcccaggaagtggccaaaagctagacagatccccgttcctgacatcacagcagcctccaacacaaggctccaagacctaggctcatggccganatgggaaggcacagggagaagggataaccctacacccagaccccagggtggacatgttgactgtcctctcccctccagcctttggccttggcttttttagcctatttacctgcagggtgagccccttttttccctttccccagcatccctccccaaggaaaagccaatgttttccccccataatcctttttgccgacccctagttccctttgntcagccaagcttgttatcagctttcagggccatggttcccattaaaataaaaggtagtaattanaaaaaaaa

SEQ ID NO: 703497 - DNA, 990 bp, Homo sapiens
aatgatgcctttataaatctttctctcactgtctatttaagtgcaattaacatatgtcaccgaacttgaaagttgtctaaattcaataaggtaatgaccagttgttattttacagtcatctgtaagggctcccgttgcgtcaagttccttaaatcgaagatttatgtgacttgcaactaaagttattcagaatcagataatgacaatatatatatgtgatgatggatggatggtagaacgttgtggtgggcgcgttggcgtgaccatgatgataggagtttttaaagcaatttgtgttgggatgggggggcgcctctaggagataatggtactagagtggaccaataggtgttgacttgtaatggtaactacccttgggtgcgtcaaaatacaagggcggggagaggagattttttcactcaataatatcaaagacacggccggggtggggacgcacaagagatttttctggtaacaagcatgtcacaaagagcgaagggttcaaaggagtggcacatagcaaggggggtgttccatttgaaaacgtggagtgttggtaattgcggaagtactacatacaataatttcacgacccgggcggctatgtaggaacgagtgaaattacatttatcaatcaaagtagaacttactgtacagcgttcttattttccatgaccctgcctgtatatcaccctctaaacgaaattgaagctttcttaagaaatattccccaactatcgtgactctattaacccaatgtaccaagtggtgacttacaaatggtgtcgcgtggattgtactcattttatctcaagacctttctgcccccacaaatctggccccaaattctacgaagatcagcaaaatcgcaaatggatatggataagggccatgtcaaaaagacatcaattaaccctaaggtgggggtagacatccattgaaatcaatatctgacggcacacggagttcgcacactttattatttacata

SEQ ID NO: 703498 - DNA, 108 bp, Homo sapiens
  misc_feature (100)..(100): n is a, c, g, or t
ctgataacaagcttggctgagcagagggaactaggggtcggccaagcttgttatcagctttcagggccatggttccattaaaataaaaggtagtaattanaaaaaaaa

SEQ ID NO: 703499 - DNA, 219 bp, Homo sapiens
  misc_feature (18)..(18): n is a, c, g, or t
gaggcgggaggatcactntgatgcacgagttgagacagcgtggcaacgtagcaaaaccctgtctctacaaaaaattttaaaaattaaccagacatggtggcacatgcctgtaatcccagctacttgggaggctgaggtgaggggatagcttgagcccaggagttgcaggcttcagtgagccaagatcacaccactgaacttcatccagcctgggcacaa

SEQ ID NO: 703500 - DNA, 118 bp, Homo sapiens
  misc_feature (46)..(46): n is a, c, g, or t
  misc_feature (110)..(110): n is a, c, g, or t
tctaattactaccttttattctaatgtgaaccctagttccctttgntcagccaagcttgttatcagctttcagggccatggttcccattaaaataaaaggtagtaattanaaaaaaaa

SEQ ID NO: 703501 - DNA, 246 bp, Homo sapiens
ttttttaaccggtttttttttttggctccccaaatatttttttcccccaaagaaaagttttctccttttaaccaaaacccccccatagggggggggattttgggggggggggggggtttttttttaaaatttaaccccccatgttttttttttcgggtgtggttttgggaccggggaaaaccttttttttttcccccttgggggcccccaaaagggtttttttttaaattttttttaatccgggga

SEQ ID NO: 703502 - DNA, 169 bp, Homo sapiens
caggctggagcacccaggcttgcaagtcagcggtactcacccggcaaaatctgtcatagcgaacgtttgggggccaaggaagctcgacggcgtcgtcaaagccgttgccacaacggttcatgaacaccagcgcgcactcggctttcaagtagaccaggtctgcggcacc

SEQ ID NO: 703503 - DNA, 911 bp, Homo sapiens
gggtgatatggctcgatgttgtgtgacagcctacaatgtcagcatatcgacacctgttgttcagccggggtgtcgcagcgttagtgtgtgtgccgattcagcgcggcttggacagcccagtgatcgagcggtccgtccctcgccccccggtcttataggcgcgcccgaggtgtttacgcgcgctctttaaattctctacgtaggaagcccgttgcaacaatgatggggggttggccagaataaatgcagtggccgaatgtggtaaaattcgttaaggtattctcccgcggaaactgcttgtatatgcccgccgtagcgccgttgttcgtcacatgaggtcccttctcggtgctaattacccacggaggggcccgcctgccgtttttgacctccagtagaaatatatgtcccgttgtgactaatatagatacttgggaaagtcctcgccatacaggactctgacccgggcgtgccccaatcaggggtaaatatggtaggcggtacatggtgagggctggccacgcgcacacggcaagtaataattcagaacccctggtgtagaattacaaaccctacccttgtgtgtggagtaattgtacataattacttggaggcgtgatgttcctccaaagccggtgtgcaccgccaggtctctttttaatagtgaacacgcagcccatgttagtgcgaagccaacccttaatggtggatgtgcatttggatacaagacgccgtgacttggcgccggggtgccgtgaccacctaataagagtgcgcataaaagagacgcaccaatacaaagccccctcctgttaacggccactgaagaacaaataccccctgtgggtgtgggcaggaaaaaacttttcacacctctttcaaagcaaaaaattatattcgcccatcataac

SEQ ID NO: 703504 - DNA, 957 bp, Homo sapiens
atgcacttcctcctggattggtgttggacaaagataaagagaatgaagagaacgaaggtatgaaatatcattagaatgatctaatggagagagagcgtactgccctaggtccacaatgtgtagccatagaaatcactctatgaatcttgtgtctatgcctggagtgaaaaggaccaagacgagtaaaacgatgtatcataacttgagaactagagtagtatggacaagaaaggagacagactgagcttgcaaatgcagtgggaaaggcgaactcagtgattcagcttggtcggttgaaagtgttttgaactttctgtccgtagaatcctgtgtccagagtggtagttgatagattagatggggaaagcatgcatagagtgattcccggcttagcaacgctcaaggagtaaccaaggattgtggtgagtgcaggttatgaatgcatttcgaggtagagtgttacatagttgagcaggtatgatgttaagggacctggttacaatactccaaaagaagagtagtatgaattaagaacaagggtatgtacgtgtatgggctaagtctttgagaaaagaattcaagggagctagtagtaactttgcagattgaaagagtgagttagacatagattaatgtgaacgcttgcttggagggtaggggctgaataataggtgagaagaaggtgagttggatagaggacaactgatgagggcagggaagggaacaatggcgccaatgtgatgtctgttcgctgttgactgaaatatctgtttctactggggagaggattcggatgaactagaatgaagaattatatatacgcttgatttcatacctgaatgtgatcggaacgatcgtttgaaataaagtaagttcaagtcagtggagtggagttcgctacatttaggttctttgcacctagaatcaaagggtgtaatacgtatgctgaatgctggg

SEQ ID NO: 703505 - DNA, 813 bp, Homo sapiens
  misc_feature (216)..(216): n is a, c, g, or t
  misc_feature (518)..(518): n is a, c, g, or t
gggaaaatcactgacagaatcaagatgtaaattcacgtggtctgcatcagacatttatgaagtcccagacaagcagctaggaaaataacatggtcgaagtgaattaaatataatcatactgccattccagatagaactaagtagctatcaaggaactggagtaactaaaagcgttcaccaagacggctaaaagaacccgcaacaacagcttccgcnttagtctgagcgaacatgttaaatgttcatgccaaagatcaagtcttcacgaagaatcatggtcacgaagcaaagttgggaaaggactttactgaaggaaacgatgcagtcaaagtttaggaagcgaagagtgtctgtaccgatatgcactctatggacgtcccaggtatcgagagacacagtgacactacacttctcgcaagatgtagcatcgaagggatgctaaggaatacttgcgtggaacctttcctgggctagaaggcaacttagacaccagggaagagagtccacttcggagaagntcggcgtcgtggagacacctgttcgagtctcgcggctgtgccaaaatcaccaagcgcctctgtgggtgcaacctctcttaattgttccctaaccaatgtcggttccttccttgcgtgggggccaccttgcgggtcttttggagcttcaaggttaaggcaattagaagtgccggaaaagtgttcaaagtgtcccaattactctacgtatatgcggttagtttgaacactagaaagcaagcgacatatttataaggcgccaaacgaaaggtgtttagccccgaaatggcacaatttg

SEQ ID NO: 703506 - DNA, 920 bp, Homo sapiens
  misc_feature (281)..(281): n is a, c, g, or t
  misc_feature (390)..(390): n is a, c, g, or t
  misc_feature (403)..(403): n is a, c, g, or t
  misc_feature (444)..(444): n is a, c, g, or t
  misc_feature (448)..(448): n is a, c, g, or t
  misc_feature (469)..(470): n is a, c, g, or t
  misc_feature (574)..(574): n is a, c, g, or t
  misc_feature (618)..(618): n is a, c, g, or t
  misc_feature (631)..(632): n is a, c, g, or t
  misc_feature (657)..(657): n is a, c, g, or t
  misc_feature (665)..(665): n is a, c, g, or t
  misc_feature (676)..(677): n is a, c, g, or t
  misc_feature (682)..(682): n is a, c, g, or t
  misc_feature (689)..(689): n is a, c, g, or t
  misc_feature (691)..(691): n is a, c, g, or t
  misc_feature (697)..(697): n is a, c, g, or t
  misc_feature (707)..(707): n is a, c, g, or t
  misc_feature (709)..(709): n is a, c, g, or t
  misc_feature (716)..(716): n is a, c, g, or t
  misc_feature (725)..(725): n is a, c, g, or t
  misc_feature (733)..(733): n is a, c, g, or t
  misc_feature (736)..(736): n is a, c, g, or t
aaaaccaatgtccagctactcttttgacacttgaagaaatggagatcgatttgattgtttataagcagacacactgcaatttacaaagatctctttacggttttataaaattatcttccagttgtacatttatatggaatgttctttatcaagggtagctaatgacatgaaaataattgtgaaatatggaattatttctgacacatgaagcccactaaactatgctttcttataatgcatatttcttctcagtttattttttattttattttttttttttngagacggagtctcgctctgtcgcccaggctggagtgcagtggcgggatctcggctcactgcaagctccgcctcccgggttcacgccattctcctgcctcagcctcccangtagctgggactncaggcacccgccattacgcccggctaatttttggtattttnagtngagacggggtttcaccgtttnngccgggatggtctcgatctcctgacctcgtgatccgcccgcctcggctcccaaagtgctgggattacaggcgtgagccaccggcccggcctcagtttaattgtntgtaaatatcgaagctatatggtatgattataaagataatggcncaaagtgtacatnnagactggcagcatctatggtaacantgaaaccntgaccagaaanngtggnttgctgngnacaccnagctgccttngnttctgcnttaaaccanttttgatnccnatttgaccaggtagtcccattaaaaaggagacttcttaaaaagggttttaaacttcacggtgggactctaagggacgctggttaacgtgtcttaacaccgttgctcggtttcacatcttctcggggtgaaagcgttacggatataagctttcgccatgttggaacccaaaatcgattcgaatgt

SEQ ID NO: 703507 - DNA, 262 bp, Homo sapiens
ccccccggggggggggcccggttgggggccggttttttcccggggggaggggggggggaacccggtttcccaacccccccccggggccgggggggggtttgggggcccccccttgggggccgccccccccccctttgggtttttgccgttggccaaaaattttttcacgggtggggtttttggggggggggggggggggcccctttttttttagtttccccatttacccctttttcccccaaggttggttgggcccccccca

SEQ ID NO: 703508 - DNA, 280 bp, Homo sapiens
tgtggtgagacagacagagagaggaaagaggtccacagccttttaaactactagatctcatgagaactcactcactatcaggaggatggcataagggcttagggctttgccattggtgaaggatccactcccacccctttatgataaaagatttttccacctaggccccgactctaacatgagggagtgtactttcacatgagcttgggaaggggcatagagaagaaccgtattatcctgtccctgaccccacaaatctcatgtcctcattacatgccat

SEQ ID NO: 703509 - DNA, 119 bp, Homo sapiens
attttccaagcctccagtaagagaactatggcaatcatctttctttttcaccatatcccagcttacctgccctaggttgggccacagtcagatttctttgaaagcccctagggctgggg

SEQ ID NO: 703510 - DNA, 390 bp, Homo sapiens
tagacttactcaaacagagaatgctgtgaaccatagtgctcaccagtaaaagaaattcatctggcactttcatcgtgttaattagaagagttgatggtaattcagatataaaggtttacatgcacagagagcaggcatatcaggcagccatagttcacaatgtcgattctgatgacctcattagcatgggatccaacgacactgtacggctactaaagaaaagtgacataccatactggtctttactaggtgaatcatcagctaattctctgaaagatgtaacttcacactatgaaacagggggccaccccttatcttagcgccagcaattatagctcttcctttggaatactaccctaattccctatccttatcatagcgggcatcatg

SEQ ID NO: 703511 - DNA, 185 bp, Homo sapiens
  misc_feature (175)..(175): n is a, c, g, or t
attctagaggatccctccggtttgcgaacactgcttgcgcccggaggaggacgaggaagagctaggtgcttcccattggtcaaacctaacccgaagccagagggcaagggagcctgttgatgccatccacacagagtcacgcctaccagcggtacaagcgggtaccgacgctcgnaattcagtaa

SEQ ID NO: 703512 - DNA, 509 bp, Homo sapiens
atgagctcagctatctggttctggtagaccatgtggatcgccatgtttcctgtttcattttcagctcgcagaagggtaggtccaaatacaatccccaagctttgcgtggacatgaggttcttggaggctttggccactatcttagttagatgtccaaagaggactttcatggtgtcacgatttggcggaaggagtttttgtacaaagagattttacagcttcaattcttgtgttggtggcttgctttttgatcgctttcacaaacagctcaaaaaaactgttaaggaagaagggctcatgcaagctcccggaaaaacatctttagtgcttcgggggacaacaaggatgtccttcccctgggctggtcgtccaaattaaaattcttttttttgggtggcaaaaaaaattaacctcttgtttgttgcaaaaagccccctacctgaatttttccataacaactaaaacttttttttaacaggttaaggcattgttttccaaacacggacttt

SEQ ID NO: 703513 - DNA, 130 bp, Homo sapiens
catcgacccgctggccaccctgtcttgactgggataacctggcgcgtgggctatgcgcgtcttcgccatcatgctggtgggccttgcgatcctcatgccgtgcgcggcgagcatcactcagccccagaag

SEQ ID NO: 703514 - DNA, 828 bp, Homo sapiens
agttcaactgcaaatttgccgcagaaccctctaaatccccttgtatattaaactgtcagtccacccatgaggatagcagctctctctgtgcactactaggttaaacacttcttgtggtagccgtagtacctagattgaccactcccatagataggtctaaaagcagctaccatattaagaaagctgttcaaagctgcacaagccattacctacgacttgaacatatccatgccaagacaatacaatcctagtcgctcgatcgccgctcccatcccctactgcatccattaaacaatagtcaggacggagggtcgacccgatcccctcccgttaccatcgagatcaatgtggtccacccaagggtaacctggggctaacgagtagacgggagtactcggctgcgacataatacataaaagtcggtaggatacatatgccgcccattaattaccctaagaaacccaggggaccttggaagttccttgacggtgggacaaatacgagtagtacttccggatggaagccccacaatatcgtatacccgctttacggtgtcacaaagacgtctgtgcacctcattgagcttgtcccccacaattaggctttaacaaacagattgcaattccccggaggttctaaagccaaaaacattttcaccgtacaacgaccgggggtatactacgggtcaagtgttctggaatctgtggaggcaaacacagttcatgcccatggtcctagaattaattcccgtaaaaatctttgaaatagggccgtattaacctatagaccctttacccctctagagcggaaaaacaaaaaaacaaacaa

SEQ ID NO: 703515 - DNA, 905 bp, Homo sapiens
tctgtacaaggctgctcgtttgttatgccaaagtcaaataaacgggagatgtcatgctcatgctttgatagaatttagtcaaatacaaaatttggtcataggtacaggactttctctctctctctctctctctttcagatttatggacacaggttgcgccctgtggccggggtgggaattaaccgggtgttacagatctcgaactcatgggaatgatgccgccatgccagttttcaaggaggaggtcacccctgacgagggttgcccgggggattgaggttggcagtgtcgtggaacaccagattgactaacaaagggcaggccaataaatgtctcgatggggacttgggatgagatgttgtgtacagaacaagggcaacccattggcggaggttgaaataacgacaaaagtgtttcttacaggatagacagtgtgagacagggccagtgcataattagtggaccagcatttagtaagctgcgggaggaagatgcagagtcagaagatgaagaggaggaaagaatgtgacacgctaaaagtatgtctggaaagcggtattgcacatgaaggtgcgaaaccgaggttccacattaaaatagttaaaactgttggtggatggaagatgcgtgacatgatgctggagcagatgatgcatgaagaatgagactggagaatgacaattgtggttgatgaaacagaaggaaaaggggcgggtaacaaacacataagagatcttccaggcagtgtggaaagtcaataaaagtgacgactaacacttgtgacaggatgggagaacctcacaggggaaaattaacgcagggcagtttgtgagattgaaagtgagaataaaaggtaacttgtggaacagaaattttaaaaaaaatggggtggataaaaaatgtgg

SEQ ID NO: 703516 - DNA, 218 bp, Homo sapiens
cattcctaatctgctcctcagaccgagtacaggtattcgatgattattattggtctgtacttcatctagtgccagagtctccagcagtacagggacatcctcaacttctttcaggagagcgagttcgatgctcgttatcacagacctagccttaccctgtgtgatgattgttgattcagaatacagggcctaccagtctgtgtacctcttcaggggtt

SEQ ID NO: 703517 - DNA, 233 bp, Homo sapiens
ctcaacttagattacaagcttcttgcaaggcaaaggattcagactcctactaattttgacttctctttaaaccacgggtctaaagttggctcatttctccaatggtcatattaaccctgaaaatccctataggcaaggcatgccacgagtggatatcaacataccgttctctaagtgcaacacagctatttactttctctaggccgggcatagtggctcatgcctgtaatccc

SEQ ID NO: 703518 - DNA, 325 bp, Homo sapiens
ttctcagcctcttggaaggcagaggtaggaggatgcttgagcctgggaggtacaggctgcagtgagccctgattatgccactgcactccagcctggacaatagggtgagatcctgtctcaaaaaaaaaaaaaaaacaaaaccccaccataaagggtgacatttatggcttgtaatttaaaaaaaaaaattaccagtgtggtaaagtctatggataaggagaagcagcataaaacagtcttgtcacacagacaactctgtactggcaaattatttgcacacagaccttttgtgaccaacatccggagaccggtgtcacacaccaat

SEQ ID NO: 703519 - DNA, 314 bp, Homo sapiens
  misc_feature (19)..(19): n is a, c, g, or t
  misc_feature (101)..(101): n is a, c, g, or t
  misc_feature (105)..(105): n is a, c, g, or t
  misc_feature (314)..(314): n is a, c, g, or t
gccttagaaagaagacagnaggatgaaggaaagttttggagcttccctagagacttgttaaattgttgtgacccaaaatgctgatagtgatattgacaatnaagnccaggctgagatggtctcagatgaagatggggtgctttttgggaactggagcaaagatgtttgaggcattgtgcccctgcccttgggatctgtggaactttgaacttgagagtgatgatttggggcatctggcagaagaaatttctgtgcagcagtgttgaagatgtagcctgacctgcttctagcaacctcagctcatattcatgagn

SEQ ID NO: 703520 - DNA, 355 bp, Homo sapiens
ggttatcattaggaggtgatcattcaggaggtgctgtggcgttttcttaaaataagacaacaatgaagtttgcaacatcaatggattctcatgcaagatttctctctagcatgcaatgcttttagatagcattttttttttttataaaacaaggtctcattctctcacccaggttggaatgcagtggtgtaatcatggctcactgcaacctcaaactcctggcctcaagtgatcctcccaccttggtctcccaaatcactgggattacaggcatgagcccacacaccttgcctgatagcattttacccacattagaacttctctcaaaactggagtcaatcctctcaaatcctcc

SEQ ID NO: 703521 - DNA, 811 bp, Homo sapiens
gaggagactatggagatagtactcgcgtaggcgcggtcaatgcacatacactctgtagctcgagaggcggtcgcgttgcccgggcgcgttcgatgtgtcctagcagagcacagacctgtccgcgctcgcctggcttcactctgcccctgcagcgattacactggttcgattctcccgcgccgcccctcgcgccacagtcaaaccttgcgagggctgccatcgaaggaacgcgccgcatctaggcaacgtaaggggctctgcctctggcggctctgcgtgcgtcctgtgctatcggggcccgtcgcgctgtccgcaggaaccgtcctgcgtggcgcgtaggttcgtgcggcagcttcgtagcgcgcgagccggccgtctgcgtggcgggaaccaggcgcgggcgagtggcgccagctgtaggagcactcacgcggtggagcgactcgtcctgggcgcacacggtggcagcctcgcacggaagcttccaccctcacctcgtgaagggcattgcggacacgtccgttctcgtgaagaggtctctagtacgtggactcaggtacgtcgcggggaacgtacatcagttgaggtaccatgctcagttcacattttgtgcatgtgtttacacgaagagcatccgcagaggatgcgcattggggacgaatgcgctcatggggtcgtgtggcttcggtcagtgccgtccgcggggcccttgcagggaaaagcagcccccaggcttccctgggccgtcgaagggaatcccttaacctaggtccctgatcccacaatcatctacgcgaaagtcccgccgaga

SEQ ID NO: 703522 - DNA, 680 bp, Homo sapiens
  misc_feature (8)..(8): n is a, c, g, or t
  misc_feature (81)..(81): n is a, c, g, or t
  misc_feature (93)..(93): n is a, c, g, or t
  misc_feature (96)..(96): n is a, c, g, or t
  misc_feature (99)..(99): n is a, c, g, or t
  misc_feature (102)..(102): n is a, c, g, or t
  misc_feature (113)..(113): n is a, c, g, or t
  misc_feature (119)..(119): n is a, c, g, or t
  misc_feature (121)..(121): n is a, c, g, or t
  misc_feature (162)..(162): n is a, c, g, or t
  misc_feature (174)..(174): n is a, c, g, or t
  misc_feature (186)..(186): n is a, c, g, or t
  misc_feature (195)..(195): n is a, c, g, or t
  misc_feature (204)..(204): n is a, c, g, or t
  misc_feature (207)..(207): n is a, c, g, or t
  misc_feature (231)..(231): n is a, c, g, or t
  misc_feature (261)..(261): n is a, c, g, or t
  misc_feature (282)..(282): n is a, c, g, or t
  misc_feature (287)..(287): n is a, c, g, or t
  misc_feature (307)..(307): n is a, c, g, or t
  misc_feature (331)..(331): n is a, c, g, or t
  misc_feature (381)..(381): n is a, c, g, or t
  misc_feature (434)..(434): n is a, c, g, or t
  misc_feature (457)..(457): n is a, c, g, or t
  misc_feature (480)..(480): n is a, c, g, or t
  misc_feature (487)..(487): n is a, c, g, or t
  misc_feature (507)..(507): n is a, c, g, or t
  misc_feature (519)..(519): n is a, c, g, or t
  misc_feature (542)..(542): n is a, c, g, or t
  misc_feature (552)..(552): n is a, c, g, or t
  misc_feature (554)..(554): n is a, c, g, or t
  misc_feature (561)..(561): n is a, c, g, or t
  misc_feature (567)..(567): n is a, c, g, or t
  misc_feature (580)..(580): n is a, c, g, or t
  misc_feature (589)..(589): n is a, c, g, or t
  misc_feature (600)..(600): n is a, c, g, or t
  misc_feature (602)..(602): n is a, c, g, or t
  misc_feature (607)..(607): n is a, c, g, or t
  misc_feature (628)..(628): n is a, c, g, or t
  misc_feature (649)..(649): n is a, c, g, or t
  misc_feature (660)..(660): n is a, c, g, or t
  misc_feature (666)..(666): n is a, c, g, or t
  misc_feature (678)..(678): n is a, c, g, or t
ataatggntttcccattaaccttccgcattagcacaccaaaagtcccttcagcccggatatattgggcaccccggcctggntcattttccacnttnttnaanagggtccccanaggcananccccaaaaggatgcgcatccccttcccgagcagcaacttcnattcggcctatntggttaaagtanaaaattttntttccagcnttnatttttttttttgcgatgatccancttttccgcgcttcccccaccaaccaaaanaattttttctgacctaaaggnataanagcggacttggataaccttntcctcaaagggtcctgatttggtntcctcaggccggaaacgcagaaagtaaataattcgataacgttgcttgtngcccccgccaataccatgcacccggattcggcctgttttgtctcggcccccanatttcctcatcttcactggtgtnatggtgttcttggtacgactttnccagganaaaaagttggcattaagggncacaaaagtaanaactggggcggcaggggagcaanaacaaggcananggctgtnggaggnggccatttttcancatctgggnggggggggaananactcnggggcaggggcggcgacggtngggggcgccaagttcaaaaancccaaacccgnggttanttcccacagggncc

SEQ ID NO: 703523 - DNA, 679 bp, Homo sapiens
  misc_feature (73)..(73): n is a, c, g, or t
  misc_feature (92)..(92): n is a, c, g, or t
  misc_feature (114)..(114): n is a, c, g, or t
  misc_feature (123)..(123): n is a, c, g, or t
  misc_feature (128)..(128): n is a, c, g, or t
  misc_feature (135)..(135): n is a, c, g, or t
  misc_feature (145)..(145): n is a, c, g, or t
  misc_feature (148)..(148): n is a, c, g, or t
  misc_feature (178)..(178): n is a, c, g, or t
  misc_feature (263)..(263): n is a, c, g, or t
cttatatatatgttgaaagtcacccataaagtaaaatctgaaaatatcaagaaaaaaactcatcacatacaangaagctgcattaatacaantagtggcagattgtcatttganacaatgtangccanaaggcantgaagacatnaanagtgctgaaagaaaaaaaaaaatctgtcanctaacaattttatatccagcaaaatctgcttttaaaatggtgaaataaagtcctgtcttacaagaaatactgaagaaatttattnaggctaataggaaataacaccagatggtaactcaaaaagcagaaatggtaaatgtgtgagttaacataaaaagactttaatagttttcctaatttctcttttcaatgtctttaaaagatatagcattgtgaaaaagcaataattatgatgatatatagttgggtttaaaaaatatggatgtaataatgtgacaagaacagtacagagaagaaagaattccattatattggagcaaagttgctatattttaccagaaataagtattaatctaaagtaaatcatgatagttaagatatattataatacctggatcaccacaaagaaaataagtagtaaaaatagcaaaatattgagtatcaatccaatcatattaatacctatatttgatgccaatgatctagcaatccaaacaaaaa

SEQ ID NO: 703524 - DNA, 1027 bp, Homo sapiens
gcgccagtggtggcgcaacggctctcgtccccgccctcctgctacctgtagtcgcctgggcctgccccggcccagccctgaccttgctgccaacctgcgctgtaccagactgaggggtcaggcggagagccagggaccgcgcccttcgtgtcagcttctctccctttcaccctgcgcctcctcgctgagaccctggtggctggtgcctgtgcccgtacgccgctgcagcagtgactgggagcggatgccactggaataactgcctggaccggactggtagtggcttggctgtgccctgccatgtgtgcgctggagtgtgcggcgcgtgtgcaggtggccacctgctggaccttctctcagacttcactttctcgctcacgcacggactccaacagtcctggagccctggcggagccctggaccttggcgcgcggagacgctgcctccacggaccgggccacaccagaaacacacaccgtcggcagtcgaccaacacagactacagtccataccttggataccaggaaatgggctacgtatcctccagtgcacttgtaactgacttggacacggaattactaagaaactcacttcatgtcactcatcaccaagatcgacgccggacaggatgaccaatctcggctactatagggcttaactgccagctccttctggactctgtactgactattggggggcaccaatggaccacaagtgggaattggcacgacattcctgtgtgaccctcaatcattacaagcacgcgaagtcagacaaataccagttgacacaagactacttaaggctggcttcttgaaactgggaaccgagggcgaaacacgtcaacaaaagggcaatctaatcataaacggataaacccgtaagcaacaccagtgtgacgacaggcatccagcagattggggtattcacgggaaggcacatgcgtttccccgaatcaatcttgaagcttgacagcacattcttcagaaacaacaggatgaggtatcatcatgttcaaaccggaagg

SEQ ID NO: 703525 - DNA, 1224 bp, Homo sapiens
gagacgttcttcgccgagagtcgtcggggtttcctgcttcaacagtgcttggacggaacccggcgctcgttccccaccccggccggccgcccatagccagcacctccgatcacctcttcacacgcacccatcggactgcacccaaggacccccgaccgaccgatccagcgccgcgcagacaccgccgacgaccgaccgccctctccttagtcgccgcacatgacgaccgcagtccaccatcgcaggtgccgccagaactacacaccaggacctcaagacggccagccatcaacccgccagatcaccctggacgctctacgcctcactacgttatcccctagtccatgctctatacctactttcgcaccgcgactgaatgtggcactttgaacgaacttaggcacaaaatactgtacttcaccaatctccatgacggcagagggaacatgctgagaaaacctcgatgaagctgacagaacccaacggacgtggccggcactcttcctttcacggatactcaccacaccccagactgtgactgacctgggagacgcgggcctgactgcaactgcacagtgagcataacatttgcgacaacaccatgtgcacttcaagacactacttggaaacttggcaccaaactggaccactggacacacaaatgaccccacataaggtgtacccttccttgagcacacaatcaccttgacatgcagcaggcgtgaacagccaatccaagaatggcggtgacacgtagaacaaactggcagccaccgcaatgggcacgcgcccgacaattagtgatatggcaggaaaattacttcctatggaccaagcgcacacctggagaacaactagtggaattactggaaaggttaacattcagggcaatatcacacattagtcgtgggcagaattcccggtgaccccagggccggtcaggcaacggttggagggatcccgcaacgagctacacaaaaggggaacaaagacatcacgactaggtccaggcggatggaacacgccagaacaaagacacatggactccccgacactaggaacaaccaagagcggaagcagcgaccacacactacacaagggacgggcgacaagactgaagtaaggcagaagcgaagggctaacacacagggcggaaacagtggacacaacgaacgcgcaaacgaccgaagcagagcaagccgccgccactcagcacgcccaaag

SEQ ID NO: 703526 - DNA, 314 bp, Homo sapiens
gggcgaacgcgcgctatgggctgaacacaggagacgtgaacaccgtggtgcaggctgccttgtcgggctcgcaggccaccaccatcctggaaggtgatcggcagtttgccctgacggtgcggctggccccggagtaccgcgccactatcgatgcggtgcgcaacatccgcgtcgcctacacaaacgctaacggcggcaactcatacattccgctatcggccctggctgatatcacgctggatacgggtgcgtcgtacatctatcacgaaaagaatgcccgctatattccggtcaagttcagcgcacctccgcct

SEQ ID NO: 703527 - DNA, 169 bp, Homo sapiens
gtaggtgaagctggacagtccaatatttgccccacaaccattagcttatgcagctaggattaaaaggtgctcaggaacggatagatagcttcgtcgaactagggtgatccatgaaaaacagacagctgtgtcagtagaaacttcattgcagaattgctgcctgacaaat

SEQ ID NO: 703528 - DNA, 913 bp, Homo sapiens
agattgacctggacacgctggatggctgtcctgagagcgcgacacactgggtcatcgtgaggtgcggctgtacaatgccgttgtccagcgtggatccgaggccgagtgtagcggtagcagctgcaggtgacgccagagaacaggcggaaggttctagggcaaggccctgggcctcattcgcttcccggtcatgaccatcgagggagttcgctgcagtgtcccagctaacagagtacggagcataccctgggtagggaccgcgagggtggtcacgcgctctatcgctgcacgttcaccgtcagacctccaatgaccatcgacatggagttcattgaccggcgcccgctgccatggctgcgtgggaaggagtgcaggcatcaaaccggcttccagcaggtggagagtcgctggaggctacagcgggaccaggtgaccgcatcaggtgctcagtcaacaagcgcatcttcgtggtgggatttagggctgtaatggatccgtccacgggcccaccgactaccaagtgaacatccagatgattgcacaccgatagcaacagcgtcttgagccataacgagactggacttcagacttagcagacgtggtcaggccgaacaccttccggcgatcgatgcttcaaaggaggcccgtgtgcgagtgtgcttgcctccaaacgttcaatctatcatcggggcctgtggacacacccgccttcaaggtgctcgataaatcccacctacgggcacctagagggcactgtgacaagggtgacccacacggagtcggccgacacatggttggccaaagacactgcttcaaccttatgctacgcggctggaaccaacagtgggacattcgttcgaggacaggcagaatccccgaagatcatcttcataaccggaaggttgcccgaacc

SEQ ID NO: 703529 - DNA, 490 bp, Homo sapiens
  misc_feature (350)..(350): n is a, c, g, or t
  misc_feature (456)..(456): n is a, c, g, or t
ggcggggataacaggcgtgagccaccacgtcgggctcaagacactcttatcatttaatctgaaagacgggctcaggtcatgacgggaacatggggagtgggacatgccccattatacctctccagcattaacatcaacacggactttaagtctgaggagaaacattttacaccttattctctctcaggcctacaaccggaaggcttcctcggcaaataggaacttggatctccacagttctttctcctaaccccgccattcatttctatggatcccaggtctttagataaactcaaccaatggtcaaccagaaaaaatttaaatctacctataatctgggaagacccggntttgaggtgtcccacctttctgggaccaaaccgttatatttcctaaatgtatttgattgacgtctgatgcctccctgaaatgtgtaaaaccaaagtggacctcgancaacgtgggcacgtgttctcaggatctcatgagg

SEQ ID NO: 703530 - DNA, 478 bp, Homo sapiens
tgactgttttatttgctggactggtgccttttattagattcaggggttgtgcatgtctggttaccacaaaatattttgcattagacggtctggccggagggaggtggacaaactgagtttgaatgtcacctaacccctttggttgcagaggatccttgcacctcgcgcttacagtgagtgggagttactgggttgccttatagcccccttgtgaggaaagaattttttttcaaaaaccggctctctttttgttgcccaggcgggtctaaactgggtgggtgaaagcctttgtgcttgctgcacctccaaaagtggttgaatgtttgggggggacccccctgcgagcttggaaagtatattcttagggggaaaaaacctttggtgtcagctgaggagataacaccttatgcttttattccaacctgaaagagtttttggatacccaattttttttgcaaggggcaggggaagaaagtcc

SEQ ID NO: 703531 - DNA, 1086 bp, Homo sapiens
  misc_feature (1)..(1): n is a, c, g, or t
  misc_feature (108)..(108): n is a, c, g, or t
  misc_feature (171)..(171): n is a, c, g, or t
  misc_feature (274)..(274): n is a, c, g, or t
  misc_feature (277)..(277): n is a, c, g, or t
  misc_feature (310)..(310): n is a, c, g, or t
  misc_feature (637)..(637): n is a, c, g, or t
  misc_feature (700)..(700): n is a, c, g, or t
  misc_feature (716)..(716): n is a, c, g, or t
  misc_feature (749)..(749): n is a, c, g, or t
  misc_feature (827)..(827): n is a, c, g, or t
  misc_feature (837)..(837): n is a, c, g, or t
  misc_feature (842)..(842): n is a, c, g, or t
  misc_feature (866)..(866): n is a, c, g, or t
  misc_feature (908)..(908): n is a, c, g, or t
  misc_feature (915)..(915): n is a, c, g, or t
  misc_feature (925)..(925): n is a, c, g, or t
  misc_feature (929)..(929): n is a, c, g, or t
  misc_feature (932)..(932): n is a, c, g, or t
  misc_feature (964)..(964): n is a, c, g, or t
  misc_feature (969)..(969): n is a, c, g, or t
  misc_feature (973)..(973): n is a, c, g, or t
  misc_feature (986)..(986): n is a, c, g, or t
  misc_feature (991)..(991): n is a, c, g, or t
  misc_feature (996)..(996): n is a, c, g, or t
  misc_feature (1079)..(1079): n is a, c, g, or t
nggcctgccagtgtccccctccctcttggtgacccccccatctggagtgaaggctccaagcagctagtgacagaggagggtgcctggctccagcagcctgggcttggnggcgactcccccaaaaacacccctgcggggtgggtgcctgggggcctaggtgaggctggggtnggagcggctggtagcactgcctcgcttttgcaggcagcgcacagcactggggacctgcaggcctgtggtcacctggaagctgccacaccataccgtgaaagcnggnagcggcggctgtgtgaacctggtcttgaaagtntgcggcccttgtttggtgcgggcgttgtagagggacaggggggctgcggccaatggtggaggtgcaggcaccaggggggggccgttttgcccagtggctcgaagcggcccaggctgcggtaggccacgcccacgccgaacgcctggctgtccggctcgtagcgcacctcccagttatgctccccgccgtcgatcagcgtgtgctccagaactgtgtgggacttagcggtgaagcggtcccgtcccccacgacctgagggcatcctcttgggagagggagtccctctggctggggagtggatgggagaggccgtccgcgcctggccanctttctcgcgagccttgaaatcctgcaccttcccgcccatagcgtcccacttcacggagagancatccacccgcaggtnctggtgggatgtggacgcatccaggcggaacangaacgctggtgttttcagagttaccggctcagagaactcttctgcaactgccttgttacaggccttcacacggaagtncatgtatttnatgtnaaacttgagacctgtcagggtgtnctctgtttgccgggatgccctcgatgaccatccagggctggncctcctngaggcggggngggnccncgaagttggtccgccggtacttcagcccgtgngttcnaatnttgctgttctcanccggnatgcncaaaccagggtaaaaagttatttccaacagggactaagcaaggccgatcacgggtccccgggcacaggagggacttgagttcntgttgcc

SEQ ID NO: 703532 - DNA, 97 bp, Homo sapiens
aagaaataccctagacttgtaatttataaatacaagaaggttaattagctcacagttttgcaggctagcaggagcatagtgccgcatcttctcagct

SEQ ID NO: 703533 - DNA, 154 bp, Homo sapiens
tcagagcgttgcaacgaaatcctatatccggtttcctgtaatttaattgaagaaaaatacatccaggataaagagctttattattaacagaccagatagcatcagaaatcaggtgagctgttcctagttttagaagtgtcaatagcaggggtac

SEQ ID NO: 703534 - DNA, 1311 bp, Homo sapiens
  misc_feature (201)..(201): n is a, c, g, or t
  misc_feature (392)..(392): n is a, c, g, or t
  misc_feature (568)..(568): n is a, c, g, or t
  misc_feature (678)..(678): n is a, c, g, or t
cagcagcagctgccgagacggccacccggttgtggtcaacctcctcattgggaggacggacttccgcgagtggctccattgctgtactagggccttgtgggtcaggacgcttggctgccttcctgcccctggcactgtgtccatgcatggtttggagtctcatcattgctctgccctgggccgtatcccatgaggcccatntgacgtccgacgaaccgtccctgtagagtagggtgatggagagcggtcaaaatctctagaagaggcgtctccttgtgagctcttggaccctccttcttcacggacccagctggttgcctgtattggtaccgccgtcatctttatggagcactagaattaataccaccctctgggcccattgtcagtgcccnaagttactccatgcatacataatagacatacagacaatagattagatagaagccagatcatagataagtacacacgaggggagcgccggcgcaaaagctagatccgtcgcccagggatgcgcgccctagaagcccttgcgcacgaggccacgcacagttttgcttccttgacgtcnaggggatcgcgctcgccaaacgtggcggtgtgcgcgagtccttgtggccaaccaggagcccgaggaccgtctttgttctccaaacaaactggagagaggaggaggtgcancatgcaggggggtggctacacgtgggcgtgggacccttgttgagtggggcgggctgctggcaccaatttcggggggagcgggggggggcgtccctggttttatttggggctggcctattttccttctcaccccacggttaactttattggggacggcccgctctagggtgcgcacaccatttttcccatccctcttccactggtgggcctctctccgtgtgtgtgtaacccccacaacactgccacggtttataaatgcaacggcccttggtaagagcaggtggatcaaacactgctgcgcagccttcacagcgcaacaggggctcccatgggcaactcacatgggggacgataaccactttttccttaacggcccctggggcggtacacacacctgtcgtggtgtgtatatatcacaaggacgtcttcttcccccgtatatactgtgggccctcccagtcaagaacaccaaaaagagccaaggttaagtgtaaccccaacccccttgtgaggtaaaccacattttaatgtgaccccagggaacacacttttaagcccaacagggcttaccctccaacaaagtttatacattaaacgttcctggggttctgtaaccgttccacagggttccca

SEQ ID NO: 703535 - DNA, 1186 bp, Homo sapiens
ttacataatgtatacacccaaagatattttatgtactagactccagattaccctttcttaataaatatctccagggtcaaggcacaagaacagcaaactgtataagcatcatcatttacaacatcagcagcaatacttatccaagccaatacatgatcaacttttcctaaaagactctaaaagcaacacacagcattcttgtaaactctcttttcagcaccgaaaattatggtttcatctatgctggcatattttatatgaacagtgttaatttagatgcactaaagcaaaggtaggcaaactacaaccatgagtcaaacatggccacacccattcatgtgcatattgtctaagctggtttcgcactacaactgcagagttgcatcgatgcagcagatcctttacagaaaaagtatatcatgagctcaagttataaagtaattgtaagtagggagctggaggacatatactgattcgccttttatggtaaattaaataggagctaccaaaaggcaggcatttgcagaacatgggatgaaaggggataaatgctttaataaaaaataaaatgctataattattaaggaaaaataagaagaatattagaagagaccaaggttaaccaaaggtaaatatcagtgaaaaagcatggataagtgattaagtgccagcggagaattcattgaaatgtcaaaatgggataacaagacatgaacagtattataagaacgaaaaacgagattagcatgagaactcaactaggaagtacttacactaaaggcatcctgcacaacagggagccagaaataatagccaaatgtagatactcttgaatacacaaagaggatacacaatagtaatacaacaaaacagagtaggaaatacaggcatacatatgaaacaaaaaagccacaaacagtgacacacaactacaaaacataatacgacaatgaaacagaactgaacacaaaacacagaacaatcagcaaaggcaagaagcgcacaccaagaaacgacaggcagagcggagaagggacacacaaacgagagtagtaaccacaaagccaaacaacaagcagaatgaaccaaaacagaagagtgacgagaccaccaaagcgcacaacgaacacaaccagccacgaagcacaaaccaagatagccacagcagacaacagaaaaacacgag

SEQ ID NO: 703536 - DNA, 1316 bp, Homo sapiens
ccacgcgtcggctccccctcccaaagtcccctccccggaagcggagcgcacctagggtaccctacttccgtccccccaccccagctacccgttcagaccaagcagcactacggcgggagcacccccgcacgtacagccaagcctcccatacaccgcgtcgagaccctggcgagggttaaccgcgcgagaccgagtgaaatacgtactatccagaattgccatggcgaggaccatctacgccacctctctcgccaactcagtcgttgactaccttgcatcgcaaactcctggaagtgtcctcggtcgtcgatgtcgctccggaactttacacggcgaagagacgaggatccatagtatggcactgctgacgagcttcacctggccccggtactactcatgcgaccctatcatagcaaccaaatattacaaaattccctcaaccattcattactataccatcggggtgctagttgacaggcagtgcgaacataccgagtaagcccctggcatacgcatacaactccatccgagaacactggagctatccagttcacaattaacacgaaaacgagattcaaaacaaaggctaacgcctcgtacccgaagtaggccgcgaacacccaaaatacgaagaaagcggagtatccagagcactgttgggcaccgataccccataggggacgcgataaccaccctcgcaatgtacccaatatgctttggagcagtatcaccgtcaatgggaccccccaagcagtacgacgaggagaccagtgatccggccgcaccgccatccaatggcgaatcgacacccagatcaatggcgaaccccctaccatcccgaaacacgataccccggtggcacagctccaacgcatgagccacaacaaacatagggcccgaagaaggcatgcgctcccaacgaggttgcaaggcacaaggtacacggatgacgaaacgcaacagaaacacccccaagtacaaccccaagacacaaccaaaccattggcatataagcacagcagaagagcccagcaatacaaaaccaacaaaagcaaaccataacacatccaaacaaaccaaggcagatctgggaacgacttaacccacaaccccgcacgggtgcaacgcacgctcgaacacataccaatacccagacaaaggacaaccaaacgcaccggcagatccaacaaaacacgcacatgagaagactagcgacatatatcaacaataacgccaataaaaaatacagccctcaaagttcgccaaaaaacgggacgaacaaagacacagcagacaaagcacaggataagagcact

SEQ ID NO: 703537 - DNA, 1503 bp, Homo sapiens
  misc_feature (259)..(259): n is a, c, g, or t
  misc_feature (403)..(403): n is a, c, g, or t
  misc_feature (631)..(631): n is a, c, g, or t
  misc_feature (719)..(719): n is a, c, g, or t
  misc_feature (1261)..(1261): n is a, c, g, or t
gctcgagtcttagcttgtgggggcactcgtagatctgcgtgacccgtgtgtctgctcctgtctgaccttcgtgctcctatttctctagccctactatgccgttagtgcatctccagtccaccgttaggccagggtctgagtgtccagcattttggtcaagtgcctgcttgggagactctagctgacctgggaacagctggattccacgcccgatttgccaggactgccaatgtgatcataggacctcactgtggggganggatgagtgagctccgttcagcaggcttcttcagtttgacgcaggcgcgccgcatgagccatgcatggttgccccctgggacttgctggtaaggtacaatctgttgggaaccctcaatatgtctagtcgaatggaagagtctcngcgatcttgggaggaccccataactcggcgctatgacgtaccattcgcaaccccattgatgccgattgtattcaatccaacaagcgccaccaggaatatggaatgcgtcgcactacattgaactgatatcgcacggagtggcgaatttacaaacgcatatgtccgggcgaaggcatgctactgatccgcacactttggtatgtttggcgaccctgtagattacggttnaaggctggcgcattgcattcgagtagcagccccaggttctgttccaagccgggttgtactatagggtgtttctccaagcgagggcctnatttggtttgacggcgggacatcctagcgctctacctggggggtctatcaacgcattcacctcattggctgtcaaggttgtggaccccagatccgtcgtcaattcgatgtgaccctccaagtgggctgagagatagaggtccgcaagggccaatagggaacggtatcctttcccaaactctttacccccgaaggggaaaccccaccaaggagggtttttcccagcgaaagccgtaggtagaggtattggagagcccggcctaattggaattttcccaggttccttttcaacacgatcaccaattagggctaggccttcgttgtggagagccccaacttcccttggtagtctctgtgtggcccctttttctagtagggggttaagaaacgcaccttggaagagggccgagtcctttgttggaccctattcctttggttcccgttaagggaatagccctttcggaggtaatcccggaatggccgggcgcgaccgaagacccttagtcgaaagttaaaagcccttgttacacgccaggccgcttntatgttagggcgccacgaatgtagagtggtgcctttcccaagttggaccttgcggtatatcccgcctttgtaccgaatgttgtggagtagagcaagggcccttggcaaaatggtcttggagccctctgagacaagagaacatcacacaaggaagcaaagacccttgggtttggcccctacattgcgcgccgggaatttccactctgtgtcctgcgtctttgggggccagcataatatatacc

SEQ ID NO: 703538 - DNA, 383 bp, Homo sapiens
aagctttgctcagcagatgatcctacaactgcgacactatcatgcgcgctcgctactagataagtcactcgacagtgctatattgactgacgtacgatcgacatcgttggactatccagagtcattgaagatatgtatggagtgatttcatctgaagaatgacatatcttttatggatcggacacattggtacagagactaccggatacgacgacagactgataattaggagccttcgatactactacgacgtatcgataccagtcagtcatcaggacaacgagctgcgacgttggtcgcttgcatgtctgcctatgtgtctcatcaaggcaccggtacggcaccgcagtatcaccgatattggagtacaggacttaatcacg

SEQ ID NO: 703539 - DNA, 133 bp, Homo sapiens
gtctggaacaggtgtctcgtggctctgcgctcgcggcggcggcaggaacagagggagaaccacagcagtggaggacgcctggggatctggggtgctagagagtgtgggacggggggtacaacagagaagagag

SEQ ID NO: 703540 - DNA, 148 bp, Homo sapiens
gctcgacttaacataatggcctccactcctatcgatgttaagtgaaataacccaggcacagaaaggcaaatatcacatgtttttactcatgtgtgggagctaaaaaagtggatcccatggaggtagagaatagcatgagaggtcgacg

SEQ ID NO: 703541 - DNA, 1072 bp, Homo sapiens
  misc_feature (1072)..(1072): n is a, c, g, or t
ggggtctgtctctttgagggtcctgctagtcgcgggggcggggggcgtctgcgggctgcgaggttaacccagcgaggatgccccggttctgcaggaagctgaagtgagagcgcccgcgagatgtggcccagcgcctgaccgtgggcacggagtgaccaattgcccgtgcatgttccggttgttggctggtgcaaggggatctggcagttgcatgaatcctgctgatcatcgtagtactggggacaggcgcaggggccagctgcatattactagctatgcaacaaagatccatttctcttatgtgcgcgcgggcactgtgtggctcggagtgctttgacacaccagcctccgggggggccctgaggatcaagcgtgaccatgcggaaggactcaacgaggccgggacctacgtgagtgtccggaccgaggtttactggacaccgaagtgtattctccacggtagcattggtcgttgaaatgccatgagacggacacttatacggcgatggaaacatcgggacgaaccggggaaggcaatgagccctggcactttggcgcctcggagggacagaggcacttagtgcagggcatgaaggtcaggtggaagaaagggccttaacaggaacgtttgagttccgccatcgcgcggccgaaacagggccccggggtgcccggtcaagcacccaaagaaacacaagtggggcccggtgctacagcatagcgccaggacatgccggaacgcaggaagtgccagtttgacattagagtagagggcggacatttgacgtaaggccagccccagaagacgttaccgccaaagtcacttggagcgccatttcgccccaactaaccaagaggggaatcgccgggcggctatgtttcaggaggagaaaaacgattcaccccggcgaagagttttcaggcagagcggacactaggaaagacaccgacaggtccgtagaaaatcctggttggaggcaaccgagaagcctagtgatcaatcactgagaggacacacacattcatgtacactgtagcatatcactggtaggcagaccaacaggtgtttggn

SEQ ID NO: 703542 - DNA, 389 bp, Homo sapiens
tgtgcgcgtgcgtagctgtatccagcatttagaagcgagccgttggatcactgagtcagagttcaagaacaactggcaacatggcaaaaccccgtctctactaaaaatacaaaaattagggcagatgcgctggctctcaactttcccgacactttgggaggtcaaaacggtcggatcaattgaggtcaggagtttgagaacagcctggccagcatggtgaaaccctggttgtctctactaaaaatacaaaaattagctggacatagtggggatgcctataattccagctatttgggatgctgaggctggagaatcgcttgaaccctggaggcagaggtagcagtgagccgagaccatgccattgcactccagcctgggtgacaagagag

SEQ ID NO: 703543 - DNA, 124 bp, Homo sapiens
cacaggttgacatggctggtagatgcggagaaatggccgacatcctcctttagactcaaagttggggatgccgtccaagagcgagtgaccggacaagagcgagtgacagggggtaccgagctcg

SEQ ID NO: 703544 - DNA, 176 bp, Homo sapiens
  misc_feature (158)..(158): n is a, c, g, or t
gccaagaagctagaaagaattagaagacagatgagtcagaatggaagagacggggttttgccatgtttcccaggctggtcttgaactcctgggctcaagtgatccaccagcctcagcctcccaaagtgctgaaattacaggcatgagcaccctcaccntggcctgagtgctgaaaa

SEQ ID NO: 703545 - DNA, 333 bp, Homo sapiens
gagaaggagtttcgctcttgtcacccaggctggagtgcaatggtgcgggctcggctcactgcaacctctgcctcccccgggttcaagggattctcctgcctcagcctcctgaggagctgggattacaggcacccgccacacacccagctaattttctatttccagtagagatggggtttcaccatgttggccaggctggttttgaactcctgacctcagttgatctgcctgcctcggcctcccaaagtgctgggattacaggcgtgagccattggcacacagccttatctgcattttcaaacgggccagtatggatgggttttacacttatac

SEQ ID NO: 703546 - DNA, 155 bp, Homo sapiens
taataggcgggtgcaagagaggggagggtgatcaggacaccagcacaggcttcagcatggcagagagcgaggtttcatgacattgaatccaggattgcagccctgagggccgcaggggatcaacggtgaagccctacgggaaagccccggaggaa

SEQ ID NO: 703547 - DNA, 314 bp, Homo sapiens
agatagtatgaaagtagcaaagcccagcaaaggttaaagctgaaagtgcgaaaagccctgcttgggaggtttctgcaaggattccccatgaaacatagtcagttaacaacttgtccaaggcccaatgctgtctcggagacaagtgtatgtgctgcactccacaccattctgggataggtcggtcctgaagaaatgctgagatatgagcaggtctgaccactggagttcgaagcaccagagctcgggctcctagggcacctgaaacggcactcagcctcgagagaaccgccatctcgtacccagcttgttcagat

SEQ ID NO: 703548 - DNA, 322 bp, Homo sapiens
tgacctacttgtaaattactgttctcctgtttgtttactgtgtgcaccgaggtcggatcctgcctcttttgctggaggctgcctctgtcctctgctgtgttggtcaggaagctcggaacgtctcagggccatattcatgttagtcatagtgagtacgctctgtgcatgcctcggtgtgcagcgctgatctgcaagtcagactccccacccctcctttgtgcgagctgggcgggggctctgccgggactggtggtgttcatggagagggcttctgtgtgatgaagagatgacagtgacctgctggggccgaaggctgtgagtg

SEQ ID NO: 703549 - DNA, 326 bp, Homo sapiens
tagcctgggcaacagagtgagactctatctcaaaaaaataaataaaataaaataaaatcagtgtagagccatatacatctccccaccaagtgtcctccagaagcagtagcctagataggatgggaacccggatgtgtccacatctgggtcttgtgggtctcacaaagagaagcccgtgttacgggcttgaacatccttcagggggccaggggccatatgatatcccgcgtgtaatagggtcccatcttcatgcgcggagtaaagtcagggtatatattccatccaaggaccaattaaaagaacaccagtgtgttcaagacacagaa

SEQ ID NO: 703550 - DNA, 643 bp, Homo sapiens
caataaaaggtttctccaacttgaaaaaaaaaaaaaaaaaaaaaaaaaaaaaaagaaaaaaaaaaaaaaaaaaaaaaaaaaaaaccaaaaaaaaaaaaaaaaaaaaaaaaaaaaaccttgtggcccgcttggcccaagcggattttagattgggccaggtttaggcttggggccgaatttggggttaattgggcaatttccccttatggggggccgtttaacatttaatggcccgcggtttaacaccgtgggaatgggaaaaccctgggggttcccaatttaaatcgcttggaagaaaatccccttttcccaagtgggggaaataccaaaggggccggaccggatggcctttccaaacggtggccaaccctaaagggcaaaggaaattggaaggcggaaatatttggtaaaaattcgggtaaaattttggtaaaatcggttattttttaacccaatgggccaaattgggaaaaaccctttataattaaaaggattcccccgaaaagggtttgagggtggtcccagttggaaccaggagccccttttaaaagacggggacttcaaaggtaagaggccgcccgtttttaagggcaagggccaattagggggacctttccccttggtttttggggttcgggcccct

SEQ ID NO: 703551 - DNA, 835 bp, Homo sapiens
tgtgagttggggattgttgcgtcccatatctggagccagaagggacttccctgctcggtggctctcggttctctgctttcctccggagaaataacaggtcttccgtgcgcgcatggagcctcccggccgccgagagtgtcccttgccttcctgcggctttcctgggtgggcttctggcggccatggtgtagctgctgtactccttctccgatgcctgtggaggagccaccaaaatttggaagctatggagctcatttggtaaaaccaaaaccttattatgagattgggtgaaccgaggtagatccatacgtgtcacacacaaggattcacttctatataccttcttcttgtgcaccgcatacaatttgtagatcggactcatcacatggttaccgtgtctcagatgacggccttgttataagagaaacatgtccaatatatacgggcatcctttaaagtgggcaagcagtccctgcaaatggacttaccagagttgggttatcagattgcccttaattgtactggaggggtcatcacatcaatggtcgaagacaatcctataatgtgtggacctttaagcgcaatcaagacagcaatttgaggcggaaagcccccattatagtgcacacggttggtgtaccaccacttcaaacattcaacaatggaaccacacctttagtggaagtaaaaggatgggcactctggggcaggaccttatagtgtggatccgtgaactggacagatcatttgcattcatggagagaggcgcatcacgcggggccaaccaggggagcggcggccaagatgaagggcacaggcatccgaacgggaagga

SEQ ID NO: 703552 - DNA, 305 bp, Homo sapiens
  misc_feature (24)..(24): n is a, c, g, or t
cctcgcatttggacacgaggttgnaatttcgtaactcctgggcaccctggctactgccctctcctaggccctgcattaccctcttcctccatttagcacttggcccatgtctcttacatctccttacccagtttttacagggccgtgttagagccttcacccatggaacagtacaagacatgatgctactccgagaataccgacagctccagggaacagcagtccctacttacccagccttcttccccccaaccattcgcccctattccagcaagaaggcagccagagggacaacgggcggcccc

SEQ ID NO: 703553 - DNA, 1021 bp, Homo sapiens
cattgttgactcatgtgctatccattttctttcatgagatctcgagatgctcatacaccgattcacttaaaatagtgagggactacacagtgggtgagccaacagtctctagttagtctccgtctgcttagttctaaaattgttgcggtgtgtggtatgcgatcgatgctcttcgatgttcctgaaactcacgtgactctgactttctatggggttcccatatggactgcgagattagatgcgccgctcgagcaacctatgccacgcgtactggtaatactctttctatgagagcgcgcgagtactactgaattaatggcgcttgagttatcttaattagtaatagtctttcgatgcatatatactacgtaggtctaatgtctagaatgacgagttctgcccaaggtaccatcggctttgttttactatgtggcaagcccaattggtttccctgcttttcctgcattctagcctacagtctttgtcggtcggtgtcccgtctcccgcgtaaactacatctcgtcgccttcggatgcttgacctgtcctcagcttttcttcgatgtgggctgcctgatgtctcctttttagtagacggttcccttatatgctatcttgtggacaggtctggtggtcttgactgtgattgctggccttctggctgcgctgctctgttcgcacgagcccggagactgtctacccctggtgtgcacggtgactcccagtctctggtccaattcaacaatactagttcccaattcttgtgttccatccctcggtagaaagagagtgaaaaaacggttgtagggggccgacagaacatcaatttgttcaatataaccgaggcgcgtttgggactgtgaccacaaaaatgccgcgtcccaagagtgaaacatcttggggcgcaggaaaagagccagctaaatgacgtatgtgtgtcacaccatgggcgtgagccacactctagcaacgacgcacacagtagccaggagactatagttcactactcactccttcattta

SEQ ID NO: 703554 - DNA, 265 bp, Homo sapiens
actcgctaacaagctgcccagcgtttgaggaaatctgaaataggagtatctatgctagtgttggctagaggcggtgtccatcactacaggggcactacagtatgaactgggcacagcatgcggtaaaatactacagagatgtgcacactgggctatcattgatccaggtgactctgacatcattagaagcatgccagaacagactggtgaaaagtaaaccttttcacctacaaaatttcatctgcaacaatctgtcgatcataat

SEQ ID NO: 703555 - DNA, 167 bp, Homo sapiens
ctttttcgtccttttccccggttgctgcttgctgtgagtgtctctagggtgatacgtgggtgagaaaggtcctggtccgcgccagagcccagcgcgcctcgtcgccatgtccccgtacatcgttagaagcttgaattcgagcagtagtagtagtagtaggcggccgc

SEQ ID NO: 703556 - DNA, 370 bp, Homo sapiens
ctttttcgtccttttccccggttgctgcttgctgtgagtgtctctagggtgatacgtgggtgagaaaggtcctggtccgcgccagagcccagcgcgcctcgtcgccatgcctcggaaaattgaggaaatcaaggacttcctgctcacagcccgacgaaaggatgccaaatctgtcaagatcaagaaaaataaggacaacgtgaagtttaaagttcgatgcagcagatacctttacaccctggtcatcactgacaaagagaaggcagagaaactgaagcagtccctgccccccggtttggcagtgaaggaactgaaatgaaccagacacactgattggaactgtattatattaaaatactaaaaatcctaa

SEQ ID NO: 703557 - DNA, 422 bp, Homo sapiens
ctcctttccgacggggtggccagaggccactgggaccgaggccagtgcttctttgagattgctcctagcgataggcggcctagaatgtgagtgcaattgattggttccttagagccccgcagaagacacttcgtgactgtgtctgggctgccaatgacgcagtgtccctgtgatcatttctagggcaatgtgaagaaaacaagacaccaaaggcaccacatgaaagccacacaagcattccagagcctgccagcaatttctcaaacaatgtcagctaagaagctttgctctgcctttgtaggagctctgagcgcccactcttccaattaaacattctcagccaagaagacagtgagcacacctaccagacactcttcttctcccacctcactctcccactgtacccaccccgtcgggtggag

SEQ ID NO: 703558 - DNA, 967 bp, Homo sapiens
  misc_feature (487)..(487): n is a, c, g, or t
  misc_feature (500)..(500): n is a, c, g, or t
  misc_feature (509)..(509): n is a, c, g, or t
  misc_feature (552)..(552): n is a, c, g, or t
  misc_feature (574)..(574): n is a, c, g, or t
  misc_feature (582)..(582): n is a, c, g, or t
  misc_feature (588)..(588): n is a, c, g, or t
  misc_feature (590)..(590): n is a, c, g, or t
  misc_feature (609)..(609): n is a, c, g, or t
ctttttcgtccttttccccggttgctgcttgctgtgagtgtctctagggtgatacgtgggtgagaaaggtcctggtccgcgccagagcccagcgcgcctcgtcgccatgcctcggaaaattgaggaaatcaaggacttcctgctcacagcccgacgaaaggatgccaaatctgtcaagatcaagaaaaataaggacaacgtgaagtttaaagttcgatgcagcagatacctttacaccctggtcatcactgacaaagagaaggcagagaaactgaagcagtccctgccccccggtttggcagtgaaggaactgaaatgaaccagacacactgattggaactgtattatattaaaatactaaaaatcctaagtgtctttcgtctttgcggatgggaaagggaaaaatgctacctcgtagtggcttctgatgggaacaggacgcgggttctgttgctgccttcctgtgtcttttttttttttttttttncttccttggaganggagtctgnctcgggggctcatccgggagccaggggggcgatatcagctcantaccacctccgcctccggggtncaagcganggtccngnctcagcctcccgaggggcngggattacgggcccacttcaccacgccgggccaattttcggctttgtcgtcagagccggggttccctgcctgcctcagcctcccatagggctgggataacgggcatgagcctccgtgccggtgcatccctaatcttggagcatgatctcagcgggaaatgaggccatctgtttcaccctgttggaaactagcaggtcggggcgccaggtggcaatgccggggggtaacctcctggcggttgggcgcgggggcttccctcaaggccccacggtgcccggttcgttccctcgctgcgtgcggacgcacttgcctcccaggaaacttacccttgtccgcgtcgaggcgcgccgcggcccgc

SEQ ID NO: 703559 - DNA, 1515 bp, Homo sapiens
ctttttcgtccttttccccggttgctgcttgctgtgagtgtctctagggtgatacgtgggtgagaaaggtcctggtccgcgccagagcccagcgcgcctcgtcgccatgcctcggaaaattgaggaaatcaaggacttcctgctcacagcccgacgaaaggatgccaaatctgtcaagatcaagaaaaataaggacaacgtgaagtttaaagttcgatgcagcagatacctttacaccctggtcatcactgacaaagagaaggcagagaaactgaagcagtccctgccccccggtttggcagtgaaggaactgaaatgaaccagacacactgattggaactgtattatattaaaatactaaaaatcctaaaaaaaaaaaaaaaaaaaaaaaaaaaaaaaaaaaaaaaaaaaaaaaaaaaaaaaaaaaaacaaagaacaaaaaaaaaaaaaaaaaaaaaacaaacaaaaaagaaaaaaacaacaacaaaaaaagaaacagagaggcggaggcgcggagggcaacgcacaaacgacacaaaaacgaggcagccgaagccatatcgaagacaccaacgaacaaagtaagaacagagaggaagggcagacatacaacaagagagagaaggcagaaaagagcagaaaggaaagaacaccgaaagaagagaagagaaaacaaccagggaaaaagagaaaaaagggacagagagcgccgacgagaagcaaaaacaacacaaagaagaaacaagaacacaacaacgtacagagcaagagacacaagagcaaagacgagaagagagcacgcgacagaaagaaacaaaaaccaacagggacaaaaaagaaagagaaaaagacagaaagcgcgaaagaaacaagaaacaacgaaacagaaggagaagacagaaaaaacaaggccgaaggagagaacgaaagaagagagaaacagaaacaagaaacaacaagaagaccgccacgcgagcagaacacgcaaggcgacgaatcaagagagcaccagagagagaagagaaaaacaaaggaagaaggcaagatagagcaacacacgaaagaagcaagcgaggacagagaaacagacaagagaaaaaaacgaagaccgaaaggcaaggacgcacgcgggggaaaaggggaagatgcaacagaggaagagggaagaacgaacaaaggagacccgagacacgcgaagcggagggaagagcagagaccacagccggacagggcaaagggcacagcagagaggaccgcggagagagaacggagggaaacggacgagagcgaaaagaaagggggacgggaagaacaacagaaacggagaaaaagaaaagaaaaaaaaacgaaaagaacaagaggaaaaaagaaggaaaaaaacaacgagagaaaaaaagagaaaaaaacaagaaagaaggacaacaaagagaaaggaaaacagaagcagaaagaacaagagagacaagaacaagaaccacgacagacaagagagaagaacgaaacacaagggaaagg

SEQ ID NO: 703560 - DNA, 1415 bp, Homo sapiens
aaaaagggtggggggggggtaaaaatttatggggcccccccccaaaaaaaggaatttttttcttttgtgcagagtatacaagaaagaaataaggacaacgtgaagtttaaagttcgatgcagcagatacctttacaccctggtcatcactgacaaagagaaggcagagaaactgaagcagtccctgccccccggtttggcagtgaaggaactgaaatgaaccagacacactgattggaactgtattatattaaaatactaaaaatcctaaaaaaaaaaaaaaaaaaaaaaaaaaaaaaaaaaaaaaaaaaaaaaaaaaaaaaaaaaaaacaaagaacaaaaaaaaaaaaaaaaaaaaaacaaacaaaaaagaaaaaaacaacaacaaaaaaagaaacagagaggcggaggcgcggagggcaacgcacaaacgacacaaaaacgaggcagccgaagccatatcgaagacaccaacgaacaaagtaagaacagagaggaagggcagacatacaacaagagagagaaggcagaaaagagcagaaaggaaagaacaccgaaagaagagaagagaaaacaaccagggaaaaagagaaaaaagggacagagagcgccgacgagaagcaaaaacaacacaaagaagaaacaagaacacaacaacgtacagagcaagagacacaagagcaaagacgagaagagagcacgcgacagaaagaaacaaaaaccaacagggacaaaaaagaaagagaaaaagacagaaagcgcgaaagaaacaagaaacaacgaaacagaaggagaagacagaaaaaacaaggccgaaggagagaacgaaagaagagagaaacagaaacaagaaacaacaagaagaccgccacgcgagcagaacacgcaaggcgacgaatcaagagagcaccagagagagaagagaaaaacaaaggaagaaggcaagatagagcaacacacgaaagaagcaagcgaggacagagaaacagacaagagaaaaaaacgaagaccgaaaggcaaggacgcacgcgggggaaaaggggaagatgcaacagaggaagagggaagaacgaacaaaggagacccgagacacgcgaagcggagggaagagcagagaccacagccggacagggcaaagggcacagcagagaggaccgcggagagagaacggagggaaacggacgagagcgaaaagaaagggggacgggaagaacaacagaaacggagaaaaagaaaagaaaaaaaaacgaaaagaacaagaggaaaaaagaaggaaaaaaacaacgagagaaaaaaagagaaaaaaacaagaaagaaggacaacaaagagaaaggaaaacagaagcagaaagaacaagagagacaagaacaagaaccacgacagacaagagagaagaacgaaacacaagggaaagg

SEQ ID NO: 703561 - DNA, 851 bp, Homo sapiens
  misc_feature (176)..(176): n is a, c, g, or t
  misc_feature (307)..(307): n is a, c, g, or t
  misc_feature (311)..(311): n is a, c, g, or t
  misc_feature (321)..(321): n is a, c, g, or t
  misc_feature (339)..(339): n is a, c, g, or t
  misc_feature (358)..(358): n is a, c, g, or t
  misc_feature (361)..(361): n is a, c, g, or t
  misc_feature (407)..(407): n is a, c, g, or t
  misc_feature (413)..(413): n is a, c, g, or t
  misc_feature (423)..(423): n is a, c, g, or t
  misc_feature (470)..(470): n is a, c, g, or t
  misc_feature (497)..(497): n is a, c, g, or t
  misc_feature (507)..(507): n is a, c, g, or t
  misc_feature (520)..(520): n is a, c, g, or t
  misc_feature (524)..(524): n is a, c, g, or t
  misc_feature (535)..(536): n is a, c, g, or t
  misc_feature (540)..(540): n is a, c, g, or t
  misc_feature (544)..(544): n is a, c, g, or t
  misc_feature (560)..(560): n is a, c, g, or t
  misc_feature (563)..(564): n is a, c, g, or t
  misc_feature (566)..(566): n is a, c, g, or t
  misc_feature (570)..(570): n is a, c, g, or t
  misc_feature (583)..(583): n is a, c, g, or t
  misc_feature (605)..(605): n is a, c, g, or t
gggatcggcgccagcggagtaggggctgcgcttggggtttgctgaagctggctgcctctcccactccccttttgggtgcaaagcgccgctagcgggaagacgggggccgggcggggacaggggcacctgcgtagctggactgagagcctgcgcccagcttacatcgaccccacccnggccccggcccgagccgacgcgacccgatccgatccgatcccattccatccgttcctcgtctcctcccgtctgacccgttgcccggccgtggttcgacacaccaggcatccaaagctgaggtcgctcctanggcntgggctcgcnttcgctttagagatgttnggcctcttccctcccaaanagnccatcttcaaaacctggactcttggactggcacctggcacctttcnctctancaagatccanttccgtcttacccacttcttcctcagattcttggtaccccctgggtnggagactgctcattttccttccaaatnaatcccagancccctaaaatatngacnaccttgacaanncccncaancgaggagccagacttngtnntnggantaacttccatagncctatcatggaggcagtgtacntggtagtgaatgggtaggagccatggtgctggacgtgctgaacatgagagataggacctacaacttcctgaaggagtactacactcacagagacattcccctgcgccatgtgcatcctgagacaacagacataacaaacatgacagcaacaaaagaaatgaataaacacatatttgcactatgggcagcgagagaaattgctaaaatagatggacctatgaagaaagacagagaacaaacaacaag

SEQ ID NO: 703562 - DNA, 411 bp, Homo sapiens
agctgcggaggtagaaaacaggctccctcctcccccgccaggagtggtatgtccccatcatcctcgttgttggactccagctcaacgtagaactcggagaagttggcgatggaggcgaacattagcgccatacactcacaggactgatagtagagctcatcattgcgccgctcgagggccaggaagtgagcggacacgtacttagaaaggatgttgtgcagcaagccggcggttgtaggcatgcaggatcctccatctcctctttctcctctgtggcctgagagaaaagcgactgcaagtcacccagatgccaatgtgagcccaagatatcggaccctccagctcctcctctccgtggcctggagaaaaagcaccagcatgaattcccttagaaccagcgcgaattccctt

SEQ ID NO: 703563 - DNA, 423 bp, Homo sapiens
  misc_feature (1)..(1): n is a, c, g, or t
  misc_feature (11)..(11): n is a, c, g, or t
  misc_feature (61)..(62): n is a, c, g, or t
  misc_feature (91)..(91): n is a, c, g, or t
  misc_feature (294)..(294): n is a, c, g, or t
  misc_feature (321)..(321): n is a, c, g, or t
  misc_feature (372)..(372): n is a, c, g, or t
  misc_feature (379)..(379): n is a, c, g, or t
  misc_feature (411)..(411): n is a, c, g, or t
nctcctgatantgtgtttactcgacctgccccgaatagttccacgcagaatcacaccatcnngttttaggttccatcaaaaatgaatgacngagaggccaggtgcagtggctcatgccagttaatcccagcacgttaggaggctgaggtaggagaattgcttgagcccaggaggcaaaggttgcagtgagctgagaatcaggcccctgcactccagcctgggtgacacagtgagacactgcctcaaacaatgaggagagtaaatggttacatgcatgctattgttatatgtacntgcccttatgttatcccataagggatnaatggcaacaggatctgttgcattattggaacagaatggaatattaagtgngggtaanacattgtttcagttattgaaacatttcctttntcataaatggta

SEQ ID NO: 703564 - DNA, 652 bp, Homo sapiens
gtgacgcgtgggtcgacccacgcgttcggtggcgtagacgaggttaagtcctggtctgcgtggaggtcgacgacgtccgtcgcacgactacggacctgtctgggtctcagccgccaaagaccccgatccggtaggtgagtaggctcactttgagggcgaagccttctcggactcgaggcttcttcatggccgcctcagatcgtgagactggcccggggcatgctctcatttgcggacggattggcgtctaatgacgcgcagttgattcgacgcgaagtactagccggacatcatgacgctggctgtcgggctattcatcgggagactaacatccagacggccaagggcacgaacggcccgctggacaccgaattctatcaagggactatgcgacggcatacacgcagactactcgactcttgacaaacgcacggccctttggccactcacgtggcacactccgagggactccaacgggaatcgccagcatgatcgctgcgacgtatcgacgctctgcacggcaaacagacactctgctagctgacaacgggtatacctatcggaacacaatcgctagtggctatcggtcacacgagcgtggacacgcaggttccacgcgaccgatcctctgacccgttttcacgtagtcgca

SEQ ID NO: 703565 - DNA, 394 bp, Homo sapiens
  misc_feature (18)..(18): n is a, c, g, or t
  misc_feature (109)..(109): n is a, c, g, or t
  misc_feature (130)..(130): n is a, c, g, or t
  misc_feature (210)..(210): n is a, c, g, or t
  misc_feature (319)..(319): n is a, c, g, or t
  misc_feature (387)..(387): n is a, c, g, or t
caagcaactcaactttgncttatagcatccatggcttttttctgccttccttggaacccacttcccagaatcactctgtgtggaccctgtggtgttattcaaggtttantagggctgggcgcggtggctnatgcctgtaatcccagcactttgggaggccaaggtgggcagatcacttgaggccaggagttcaagaccagcctagccaanaagatgaaacctcgtccctactaaaaatacaaaaattagctgggtgtggtggcacaagcacctgtaatcccagctactcaggaggttgaggaacgagaatcacttcagnccaggaggcagagctagtgagccaagatcatgccactgtattccagcctgggcaacagaccacctacnccatctc

SEQ ID NO: 703566 - DNA, 317 bp, Homo sapiens
cttttggggcctttgctcttttggagtttgctcaaattcgcgtaaaaaaaaattttcccacgaactggccatgtactatttctcgaggacttggaagcctgccctcaaatgctccagccaagacacaggggtataggcctgaaaaagagagacttacaacacccggaaatcggccaacggcccaatataaatccctttacacgtcagtacgaaactcccccattatattggaaaataaataaaggctttccataagtaagttcaagaaaacaaacatattgccagcctaacggagttttaccaaccagtcgctttcc

SEQ ID NO: 703567 - DNA, 435 bp, Homo sapiens
  misc_feature (27)..(27): n is a, c, g, or t
  misc_feature (421)..(421): n is a, c, g, or t
attgccatccatggctgggagtctgtnagggacagatagaaggggagttttgaggaagaatcacgtgatttggccattgatggccctgggtggccaggaaatgggaggagctggagatgtcaccacccgtgcctggtagaatggtgggtcaatgaacagccaaggaaaccacaggatgagagggctctggggaaagatgaagaatctcgatttgaacatctgagttgaagcccacagcttccttcagggacccttccaggtcactccccagcgtggggccttcatcttccctggactcacccacccaggacaaaactcagcgtttcaaagttcaaccccgcagaaagaccgagaatagaatgggaagccaactttctttcctcccccactccccatttctttctgttcatgattccagttnaaaattccaaggtc

SEQ ID NO: 703568 - DNA, 315 bp, Homo sapiens
gaactttgactaccataaaaaatttaaaacatacttaaaacaaacttattagggagaaaaaacacaagtagagagattaaggtttgcaagtactgaaagcacggcattccaggaggcagagtggacacagctctttatctgaggcatgtttagctgaaaaaaagtcattttttcctctttctactccttctctggaaattcacttcagatgagattctccggacaaattacacctggatctggagaatatgcctttaaaggtgtcagcaccacatgttcacaaactaccacctacctccctcaccaaagcccata

SEQ ID NO: 703569 - DNA, 439 bp, Homo sapiens
  misc_feature (273)..(273): n is a, c, g, or t
  misc_feature (291)..(291): n is a, c, g, or t
  misc_feature (349)..(349): n is a, c, g, or t
gaattctggatcctcagatggaagatcaaatgaatgaaatgaagcaagaagagaagtttagaaaaaaaagcataaaaagaaatgaacaaatcctccaagaaatataggactatgtgaaaagaccaaatctacgtctcattggtgtacctgaaagtgacagggagaatggaaccaagttggaaaacactctgaaggatactatccaggagaacttcccccagtcctagccaaggcaggccaacattccagattcaggagatacagagaatgccnccaaagatctccctcccnagaaagagccaactccccaagacacataattcctcccgattccacccaaagttttganaatgaaaaggaaaaatgttttaagggccgccccagaaaaaaaggttccaggtttgccccccccaagggaacccctcccgactaacactga

SEQ ID NO: 703570 - DNA, 331 bp, Homo sapiens
  misc_feature (11)..(11): n is a, c, g, or t
  misc_feature (13)..(13): n is a, c, g, or t
  misc_feature (21)..(22): n is a, c, g, or t
  misc_feature (207)..(208): n is a, c, g, or t
ccgggcggagnanaggatctnncggaactttctagaccataaactgaaatgcttccggtttagtgacgttatgaacagtgcacctcgacctttcagttgtgacgatttgtaagaatcacccaacagacaagggtggttttccaagtctgagtggtagatattgtatcgaaagcttaccgactggatcttttagagtcggttcgactnncctcaaacagtgttagttacacgttaaactgaagagtgacattctcttttggagtctgagaaacgattttattttccctaagacggtgtctcacctatttctcattgttccagacgactactt

SEQ ID NO: 703571 - DNA, 602 bp, Homo sapiens
ttccaaattcaaccaacgtctccatcatctgttccatactttgcaatgtcctaggtgtactgtcccctacagtagattatcccgtttgcatggactgcataacatcatttatccaccatccagctccgtcttctttagaccactgtatcatgggctctgatgttactcaaccgtcattgtctctgtcatacgtgctgaagatcatgcagttgtacatggtcatggtcctgtagtctcccatcagctgacatgctccatccatgagggcattacgaactgttcctctatcgttattcactcagatctggtatctgtcggcttcaatatgtacagtgaatcctccatagtgagcctttactttgtctccttgccagtcctccatttctatccaaagttctgtgggtcccatcctggttagctggctaattggatcatttccaatgcaatactcacctggtagtccacagtaattcgtcccatctgtgtgagctcatcatttccaaatcactgaatcactgtccatcctacatcttctgtaatcatgtcacagtatactcgatacggtttgacatgtctgtcaggttgaataagatacatctcag

SEQ ID NO: 703572 - DNA, 356 bp, Homo sapiens
aacgccgccagggagtccctttgtctctgtttgcgggggtcctgagtggtataactagcaaaccccatcgtctcagcccaaaatttccttaagctgagaagcaacttcagaaaagtctcaggatacaaaatcaatgtgcaaaaatcacaagcattcttatacaccaataacagacaaacagtgagccaaatcatgagtgaactcccattcacaattgcttcaaagagaataaaatacctaggaatccaacttataagggacgtgaaggacctcttcaaggagaactacaagccactgctcaatgaaataaaagaggatacaaacaaatagaagaacattccatgcgggtaccgagc

SEQ ID NO: 703573 - DNA, 113 bp, Homo sapiens
cgtatacagagccggtggtgggacttatgaatgattttctcctttcgctgtttgtatttctatattcctaaaattaacacacattattattgctagaataataaaagttttat

SEQ ID NO: 703574 - DNA, 416 bp, Homo sapiens
aagcttttaccgcagatagatgcacttcacgccttaagtcagagcgccgatcgtcgctggaatcgcgttttacatcattttcaaacggtgatgttttggggtgcattgattggacttgctttgatcggcgcggttttgagtacatccgaaatgccttgggtatggattgtgcaactggccataatcgcaatgtccgttatcgtcgttgctttaggcggtcgtacctatctgatctggcctgatttcaagggccatcacgacgactacaagtaggtcggaatgagttagttgattactggtgtagtttggagagacttcttgcctgtgccttagcctactatgttgcccctgccgcgctctacgcggctgcggcactgaaagtgtccgcacagtgcccggccaaaaaaaaaagctta

SEQ ID NO: 703575 - DNA, 235 bp, Homo sapiens
ggagtagagaattgacgtaaatagaaatcgaactggatttactccgagtctgaactcagaattcacgtaagactttaactcgttgaacaaactaacctttaatagcggctgaccatcgggatgtcctgcatccaacatcgagcgtcgtgaatcgtatagacgctgtcggactctagaataggattgcgctgttatccctagggtaacttgttccgttggtcaagttattggatca

SEQ ID NO: 703576 - DNA, 289 bp, Homo sapiens
ggtcctggagtcgaaaccagacagctgtcggaactggacgaccgtgtcagatgcacgccaggcgggtgtgccccccagtttgaaccaagcgcagccacgctcaagcgcaaatcactgatgcaaaacactcaagatgatgatcatcttgggcagtgctcagcgccatcatcctcactcatcatcataggtgagtagggtgagcactggccgcggcccttaccctggagaggtaaccccagtggatcctaggtaaagaaggtcattaatctagtctttactcttcagccaa

SEQ ID NO: 703577 - DNA, 157 bp, Homo sapiens
ccagccattccatgggccagcagcccttggcagcacagtcagtctattttcgggctattcccatctgtgcccgtacgtatcgggtaagcagggagtgggcaaggctatgcccaggccagggcagctctttagtcactgctcagggaggcaagggcct

SEQ ID NO: 703578 - DNA, 152 bp, Homo sapiens
gttttttgaagggttttttttgggcttttaacccgcttatttttgtttttgtttagtttttttattcttattttattttggaaaaatatgattgttttttgtgcccccccgttgcttcccttataaccccaaaatatttttgggttcctgga

SEQ ID NO: 703579 - DNA, 135 bp, Homo sapiens
atctagaggatcccttcgattggcgggcacttacaaccgcatcatttcctgttgctccaagaagaataaaggtgattctcatctaaatgttcaagttagcaactttaaatctggaaaaaggagattctaacactt

SEQ ID NO: 703580 - DNA, 1022 bp, Homo sapiens
ctggcgacaaaatgtgctgcccgagtggagacgggcggagcctcagtgaccgggatgtgctccgtggccccgcggtctggtggctggtggcgggagctgttgggctgagtcgggatcggggacgtcgcccgagagcggggacgaggaggtgtcgggcgcgggtgttcgatgccctggtgtctgtggctggctgtgaacttgttctgccaacgacgtgcagcttcctggtagctgttcaatgctggaagatggatggaggagcagctggcagctggcagtgagtgagcctgcccactgtgtgtcctgcagctgaccctgaccgagtctggctctgccgcctgctggccccggggatccgaagaggaagggctggtccgggctccacacttagcttacgtgggcaaacagcagaggcgggaacaaactagccctcaagacggggaatagtaggccaagaagcacgaagacgggaggatgaggtagttaacaagtaaaggtgacagcgtgggccaaggtacatggcagaagtgaaaaagtacaaagcgtcacacagtgcggtgacgattgagtgaaacgtcgggaccatgggtgaaatgacggcccgctcgcgccaacctgcccagtgggcctgggactctctgcgatgtacgagtcagctatgtacatgcagcggcagcgtgagaccagcctaccctgcagaggacttacaagcagagaggagagccgacgaatgcgttcccaggaaggccgatggaacgcagttcgtccagagactcgtattagtgatagcccgagtgggaggcagcgtttggcgctagcgggtggggaaaggtactattaatgaaaccacgggggggttgaagcgtatgtacggcaacggggatttggagaaaagcgaacacttagagtccaaccgttccaggggcctacgagttacgcgtggaggttcgagatcgtatgcattgaagcccgcgtacgttgccgagttacgcgcgttaaagcgccagtcgaggagcactggg

SEQ ID NO: 703581 - DNA, 1362 bp, Homo sapiens
  misc_feature (535)..(535): n is a, c, g, or t
  misc_feature (707)..(707): n is a, c, g, or t
actctattctttcttttcctcccccataatcatctgcttgttgttaatgctcttcacagtatactttcgctgtgtctcatccaatagccctgctcgtctcatttatattcacccctgctttcgtcatcaccatatttttccccgtcctatttatttctgactcttcctacacatcactcgttctttgtttttccccctcgttctcttgtttcactcccctctaacaacacggcacatgatctcataaaaaaaggataaggcggtttcataaacaataatttgtataaagggatcatccccgcgcgcaccatattctgtttacccccccccccccctgttgtgcccaccccgaatatccctactccaccccttggttagccattccccccccccttatttttaagaggggcccccccgcccttgtgccccccgggtgaccacacacgtggtgtaaacccggctcccccgtgtcgtccccttacgcccgggcgccaaaaaggttaaggcactaatgaccaccgtgggtctccgcctnataaaaatagggggaccacctgtgtattgaattgggctccccacagaaaggggtttcacgcctgtgccgtttgaccacttgttaacccccggtgaagagttgacccctgcccccgtgaaagaggcccgggccatgaccacccacgccgatgtaccgtatgagagcacccctnatgtgtgagcctttagagtgtgtagttaaatgccacaccgagttacctgttcaccgaaccccacccaggtctctctataacattcacccgaacaccgtgcgcactttacaatattttccggtttgtgggcggaccctcggagcgccagagaacacccatacactctccgtacgccagtaccaatgcgtcaagactctcgcacccaagtcccaaacgcgcgaacattacttataacatcccacatatgtgataccccaatagacacattgtgagcccacaccgggcaccaagtgtcacacctctaggggatatacaccagcgcgccaatccctgatatttatagagtgcccataatccacaccaattagggtttacagacctccgatagttggatccaggacaatccccgatggtgccacgcccgcttattaaaggttctcgtttgttccacacacgatataaagtcctacacgtggatctgagttcagaccggagtaatcccaggtcggtttcttatctacattccaaattcctccctgtacgaaaggaccagagaaataaggcctacttccaccaaagcgcccttccccccgtaaatgataaccatctcaacttagtattatacccacacccaccccagaaccgggtttgttta

SEQ ID NO: 703582 - DNA, 466 bp, Homo sapiens
ctccagtactattttaaccccatcatatacaccctcgcgtgactctaatatgaacgcgggatccttcatcattgtcatagctatgtcctgaaacaccttgttcaatgagtgcttcacatatcaatctgtgcccttcaacagctgccatgtgcaaaggtgtccatccagcatcatctctgtgatttacatctaaccctctatccagtaaagcacgtaccacctcaacatatccttgttctgaagctatactgaggactgtcctaacttcactatcaatactatccacagccgcaccccaaaacaaaagtgtatttccaactgatgcatgacccatagacgctgctgctaagaggcgtgtatggccatcgttatctgtgtgatctacatccggtcccccttctagaagcaagtcaaccacatcaacatgtccctcataggcaggtaccagcagtggagtcatgccatc

SEQ ID NO: 703583 - DNA, 132 bp, Homo sapiens
gttgaggtcttggcgcgtgttctagtggggttagcgatggcggtaggcttgggagctgtgggtgaaagcgtatgatggggtggtggttgtggtaccctttaatagtgtcggcagctgcctcgtttctgctgt

SEQ ID NO: 703584 - DNA, 301 bp, Homo sapiens
tggagctgcgcacccaagtcttgcctcttacttcatgtgccctatctcggtgggggtctgtcttctcctactgtgtctgaccttctcttctgcgtctgacttctcttctgtgtctgtcttctcctctgtgtgtctctgatatctcttaaaaagacacttgtcattggatttcgggcccaaccagataatccatgatggtcttgactcgagatccttaacttcatcggaaaagaccatttttccaaatacggtcacattcacaggtcccaggcattaggacatggacttatcttttcaatgc

SEQ ID NO: 703585 - DNA, 303 bp, Homo sapiens
ggcactctacggcactcatcgtaagctctggtactcctcatggggcttgccattatcacacaggtgggcgcttggagctgcaggtgaccaggtccgtcttagaggggatatagacttagggcacgtttcggtcctcacacatgactgggagatggcagtatacctcactgggcagtgtgtctcctgccaaaagcatgatccctttttctcctttgttgacaaatatctgaacctctatcaccccgcgccgaatctgctactgcatcaccgctttcttgatgcagttaccacggtcgaattcga

SEQ ID NO: 703586 - DNA, 502 bp, Homo sapiens
  misc_feature (4)..(4): n is a, c, g, or t
  misc_feature (58)..(58): n is a, c, g, or t
  misc_feature (63)..(63): n is a, c, g, or t
  misc_feature (111)..(111): n is a, c, g, or t
tatncaaatatttccccaggtaaattaattttttttccaaatttccgatgatgtgttnggatngatttatgactagctaattgagggaactttaaaaatgttagtcctgcnttacgggtctgaatccagtgctactcaaaagtgtggtttgccccacttatctcccaaactatgtgtttgtgtttgttataccattaagttcaaaaaatgagtaattggccgggcgcaagttgcacgcctgtaatccccacactctaagaggctgaggtgggtggatcacctgaggtcaggagttcaagaccagcctggccaacatggtgcaaccccatctctgctaaaaatacaaaaattagccaggtatggtgacgcacacctgtaattccagctactcaggaggctgaggcaggagagttgctccaacccaggaggcagaggttgcagtgagccaagattgcgccactgcactgctccagtctgggtgacagagtgagactctgtctcc

SEQ ID NO: 703587 - DNA, 173 bp, Homo sapiens
ggcttcttctgccgccccccctccctctgcggtgctggccgccgccgcgtctgtggcgcgccgcgacggctccgtgccccccaccgacgcgacccgtggcgctttgcccgcggcacgcaccacccctgttcctcctgactgtgtcgtggacgcacccttgtggcatgctgtgt

SEQ ID NO: 703588 - DNA, 140 bp, Homo sapiens
tacatgaaatcactcacagggacacttgaagaacagagaccagaaagagtaacaacttatatgacaggggctagaagaacaacatcaagcacatccttgcttacttacaaacaactaccagatacaatataaggatgaaa

SEQ ID NO: 703589 - DNA, 144 bp, Homo sapiens
tagaggatccccgcgcctggggtcaggtgtcagacccgcccgccaggggggagttccttaaatcagccccagcgccttgaaaacaaatgcatattcgagtgctacgtcacgtaatccctgataacgcccactcatgccgccgtg

SEQ ID NO: 703590 - DNA, 989 bp, Homo sapiens
  misc_feature (141)..(141): n is a, c, g, or t
  misc_feature (147)..(147): n is a, c, g, or t
  misc_feature (206)..(206): n is a, c, g, or t
  misc_feature (267)..(267): n is a, c, g, or t
  misc_feature (280)..(280): n is a, c, g, or t
  misc_feature (528)..(528): n is a, c, g, or t
  misc_feature (735)..(735): n is a, c, g, or t
tctgagaaaaataagatggaatcttggaattgggttttggtttttgggtgcatactggtgaggatgtctgaggataatatgatagatatggtgacttatatgcttgattgctataagattgtggagacactgatctagcanttagantggttctttagtgatgaagaggataagggagagagaacccttgtgggtgacaaggagcntcaggcagtgcccaacattgagtacctcttgcccaacattggcaggacagtgccccctggngaccggggtcagnggacctgttggagatttaaaggattctaccacctgtagttcagccaagtccaagggttcgtgggcccccaagaaggagccgtacgcccgggagatgctggcgatctccttcatctcggccgtcaaccgcaagcgcaagaagcggcgggaggcgcgggggctgggcagcagcaccgacgacgactcggagcaggaggcgcacaagcctggggcgggggccacagcgccggggactcaggagcggccgcnggggccgctgcctggcgccgtcgcccccgaggcccccggacgcctcagtcccccggcggcgccggaggagcggccggccgcggacacgcgctccattgtgtcgggctactccaccctgtccaccatggaccgcagcgtgtgctcgggcgctagcggtcggcgggcaggggcgggggacgaggcggacgacgagcgtagcgagctganccacgtggagacggacactgagggcgcggcgggcgcggggcctggggggcgcctgacacgccggccgtccttcagctcgcaccacctcatgccctgcgacactctggcgcgccgccgcctggcccggggccgcccagacggcgagggcgcgggccggggcggtccccgcgccccggagccgcccggctcggcgtcgtccagcagccaggagtcgctgcggcccccggcggcggcgctggcctcccggccctcgc

SEQ ID NO: 703591 - DNA, 196 bp, Homo sapiens
cttatctagaggatcccgaccgcaactactcggcaatcacatagctagttcatatcaccagggcaaagcacgctttacccaaatgtcaccaacaagacattgggagcgtcgtggttgcaacttatattcaactcagtgaaaagacacgagcccaaatgcatctatgctcagtaaagcaacccttgcctcccccccc

SEQ ID NO: 703592 - DNA, 369 bp, Homo sapiens
atcagctcggtaccctggtacgggagtggaaaacgcctgatgaacttcgcgatacgcattgaaaatgaaagctgcagatgttcgtgacatcagtattggtttaaaaggtttttttgatggcaaaaaagttgaagactacgtaaatcagcaagtaaataacttgccgctcgaaaaaatgaaaattccgatgtatgtagtggcaacagagctaaagcatggcaccaaaaccgtatttaattatggcaatacgggacaggcggtgagagcatcagcctcaataccagcatgtttgtaccgactaaaattggtaaatctgaatatgtagatggccggtttactcacgtccggtacctccactcccgtaccatg

SEQ ID NO: 703593 - DNA, 153 bp, Homo sapiens
cccggcaacagcgcgttacttcctgacagaccgttcagccaggcggtaagcgagttattgatccaggcgacaggactgcgggcacctgcacgacgacgagaccgacgggcggcacaccgaatacgaccatgaaagcatgcactgacaattatt

SEQ ID NO: 703594 - DNA, 196 bp, Homo sapiens
tgagtgagtcggtacctcataggtcgcaggcacgactttggcttttacgattttttcataaatcaatctccacaaaacccggtgccctgaccagattcaaaattgtcttctgccccacaacatcgtgccgggcacgtgcaatcacataaacaccgcgctgaatgatcagccctggcaataccctgcgaacctatga

SEQ ID NO: 703595 - DNA, 228 bp, Homo sapiens
aataaattttttttgggtaaacccccccccccccaaataaaaatggccgggagggcccctttttagggaaaactttttttaccttttgggggcaaggggccaagggagggaaagggtttttttttttttaaaaaggggggggttcaaccaaactttttgaaacccggttttttaaatttattttggggccaagggggccccctttaataaatccaattttttttctta

SEQ ID NO: 703596 - DNA, 105 bp, Homo sapiens
ttttctgtgtggtcactgtcctcatctctttgggctctgtgtttcctgccttttctctgtgtctctgtccccgtctctcttggtctctgtctctgtctctctagg

SEQ ID NO: 703597 - DNA, 132 bp, Homo sapiens
agaattgcacatcagccccacagccccatgacactctaggttgttaccccttctacaaaactgacccgttcatcattcccagagtgcccgcatgtctacttttgtggcaaaaacccaagagcccacaatgcg

SEQ ID NO: 703598 - DNA, 85 bp, Homo sapiens
gtccaggcgggtggtgctcatttgaggtcaggagtcagacagcttgccacatggtacaaccctgtctctactaaaaatacataag

SEQ ID NO: 703599 - DNA, 240 bp, Homo sapiens
gcaagaaagtttgtacccatccaaggaaaaaatgggtgcaaaaatacatttttttactgaaaactccgaaacaattgtgaatcagttgaattttcatccgaggaggcttggaccccgcttttgggtttgcagccctttggggagcctgcggaattttttttgaagggtacaaggacccgctggggaggaaagggtgtttcctcccaaagttactttaaaaaaggttgttcataaagttga

SEQ ID NO: 703600 - DNA, 244 bp, Homo sapiens
atagctcggaccgctagcaagtgggcacctcgctctgttgcccaggctggagtgcagtggtgcagtcacaactcacctcagcctcctgagtggctggggccacgggcatgcaccaccatgcccaggtaattttttgtagagacaaggtttcacagtgtttcccagtctggtatcgaactcctgagctcaagccatctacctaccccagcctctcaaagtgctaggattacaggcgtgagccctt

SEQ ID NO: 703601 - DNA, 257 bp, Homo sapiens
  misc_feature (16)..(16): n is a, c, g, or t
  misc_feature (220)..(220): n is a, c, g, or t
  misc_feature (222)..(222): n is a, c, g, or t
tcacgggcctatgccntgacacttgaccaaggcgcctgtggacctgctcggtgttgcccacaacaacctcatggcaatggcccaggagactggagataacctgtactggggctcagtcactggttctcagagcaatgccgtgtcgcccaccccggctcctcgcaacccatccgaccccatgccccagggcccagccctgtggattgaaaccacagcctangncctgctgcacctcctgcttcacgagggcaaagcag

SEQ ID NO: 703602 - DNA, 295 bp, Homo sapiens
  misc_feature (42)..(42): n is a, c, g, or t
ggctttacaacgcctgggaagctttgaggtttgcaataaatntaaatacttgtctgtttcggtctgcactgcctttatgggcggtaacactcacggggtaggtttgcagcctcactcctgaagccagtaggacaacgaacccactgggagaaacaaacaactccagacgagccgacttaagagctataatactcgctgtgacggtctgcagcttcatttttttgccagcgagaccacgaacccaccagtaagggaggaaactccgaacacatctgaacatcaggaaggagcagac

SEQ ID NO: 703603 - DNA, 232 bp, Homo sapiens
  misc_feature (22)..(23): n is a, c, g, or t
ccaaaatgcatttctatatttnntctggcctctgggtccctaccactttaatttcatacccaagtcggctggtcaggtagaggactcttgtggcatgaaagtggtttctggcactgcccattgtgacgtcatggaaaccggaaaggaagaaggtgttggttttcctgcttcttttcccatggcttcgagagttacactgtgtgatccagcagtctgactccatgattgaaat

SEQ ID NO: 703604 - DNA, 598 bp, Homo sapiens
  misc_feature (145)..(145): n is a, c, g, or t
  misc_feature (493)..(493): n is a, c, g, or t
agaagcttgctacaccattcgttcggcgctgcggctccagataggtaagtgaactctggtcatagtctgtttcctaggatgatctctggtccatgactagtgctagtgattctccacccaatatgaaataggcccaggatggaanaacggagcggttctggagaagaatatcctaatattggcagcttgctggagcgtcattacgggcatcttatctagcaggtaggtccgcagtcgagctcagcattatcaaaatgacgccgccgagcgctgtatgtcatatctaaggaactgggctcatccacaaatgccttgagacagcttacaagggatttccattttatggtaaaccaatgcgaatacagtatgcaaaaacagattcggatatatatcaaaaatgcgtggaacttttgctgacaaagaacaagaacaaagcaacaagaaaaaagccaaaactgtggaacagactgcaaaacacaaacaaaaagcctgngcagggaactccaaattcagctaatacccaaggaaattcaacacaaatcctcaggtccctgatttaccctccaaactatattttattccttaataacttaccaga

SEQ ID NO: 703605 - DNA, 246 bp, Homo sapiens
ggtcgactcattccattccattccattgcattccattccattccattccattccattccattccgttgcattccattccattacattcggattgattctattcaactcccttactctccattacattccattccattcgggttgttccattccattccattccattccactccattgcattgcactcgggttgattccattccattccattccattccattccattccggatgattccagtcgacg

SEQ ID NO: 703606 - DNA, 375 bp, Homo sapiens
attattctcaagcgtcatctgcttacataccctgaggtcacttgtgggcctctacactcagctcatctaaggatctgtagattactcaggttatgctcatctatctcattcctatatcaaactgttaccctcaattgaatcaccagcttcaggataccaaagtgctaggatatctcttgatactcacaatactgtgtctgcattgtggcatgactgtactaagcagatactaccttatgatattactatattcttacataactgttaccctgtctattgtctactctatacagctctcctacctgatattacgtacttcccttcactcacgtgtcttcacataccagagatcctcatacaggttggcatgccgtt

SEQ ID NO: 703607 - DNA, 394 bp, Homo sapiens
cgaatgtaaccccccgtgcgtactttccacttgtgagaagtttctttcagcagaggcacaagtgcaatgctattgctcagtggggaagtcttgcagctctatcccaacagtcagacagccctgaggctcatgagtgagaactggcagaagtgagacttcttacccctgcacgtcaccacttgcagcacacagcttggtggttctccctacaggtaaccttatcattgggtgcatcttgtagaccagactttcagacatgcattcttttcagaacggagtgccccacaggtttaatgcttgtgacaagaggtagcagtgacaataccctgttctccggtgcaaacatacagcattaccatgcagcatgaaaagaggtgcctgtactgatctgaat

SEQ ID NO: 703608 - DNA, 730 bp, Homo sapiens
tcatgtcctgaatacaagcccactcgccagttcttaccaatacaatgaagacgtatgagaagagtaaaggacattaacacagacataacacgataatctggagcagttaatattaataaagaggcccgcgagaattacaagagatatatgtgagaatacttaagataggtatgaaataggagcgagtgaaaatctgatgtatgtgaatttgaatacaacatggtagagtcagtgggaaacgaagtgttaagagatgcgaagtgggaagaggaatatcaggagaagatgatgaagagtcgattacgggtatgtacccagaatggtgggaaaggtcagagatctaggtgacatgtcaaatgtgcgagtgagattacgtgggcgagaaagattaaaggtagagatctaagatggaaagtatgcgtgggaagggtcttatggcccacttggtcgagttaactgggaatgttaagagaggaagaaggtctctgaaatgttaagagaagagaacgagtatagggagtacctggatattggaagtatagggaagagtgctgaattgcagtggataatgaaaagctgcggatctcatgagggcctagcatggtacatgcgatgctaagacatgtgacggcttaagccgtcggggcagtggtgacacgctaatgacgaacggggtgggatcgtgaatgatcatgcctctcagggaaactggcagcaagaaacgttaagg

SEQ ID NO: 703609 - DNA, 173 bp, Homo sapiens
gggacccagaccgtcaattatgtgcccagcctgataagggccctaacagcatctcagtactgtctggacgatgaagcaggtaccccggagccccttcaaggtcaaggtgctgcctactcatgatgccagcaggcgcgcaaattacccactcccgacccggggaggtagtgacg

SEQ ID NO: 703610 - DNA, 821 bp, Homo sapiens
  misc_feature (10)..(10): n is a, c, g, or t
  misc_feature (12)..(12): n is a, c, g, or t
  misc_feature (17)..(17): n is a, c, g, or t
  misc_feature (36)..(36): n is a, c, g, or t
  misc_feature (42)..(42): n is a, c, g, or t
  misc_feature (50)..(50): n is a, c, g, or t
  misc_feature (58)..(58): n is a, c, g, or t
  misc_feature (66)..(66): n is a, c, g, or t
  misc_feature (69)..(69): n is a, c, g, or t
  misc_feature (81)..(81): n is a, c, g, or t
  misc_feature (83)..(83): n is a, c, g, or t
  misc_feature (96)..(96): n is a, c, g, or t
tgggaaacanantttantcttgttccccaggcggangtgcangggcaaantctgggcncagggcanccnccgcctccgggntncaggcaatttccntgcctcagcctcccaagtagcggggattacgggcacccaccaccagtgcccagctaattttggtatttttaactagagagctaataatggtatatttaataaagagcgggttccaccagttgtgggccaggcgggttctgaactccggacctcaggtgatcctccggcatgggcctcccaaagtgcgggaattccaggcatgagccatggggcccagtctacacactatttctggtttagcccaacagctggttctggttctatcatacccctcatttcacgctcagggaagtcatacctagaatagttaccccaagagggaaccttggaaggccaacattggtacagtttggtgtagaagtcccctcccttactccttttatttaccattgagtggctgcatgtgttgtggcaaaatgaagcctttttcacttgtaaggcctgtatgggacatagggatataccctgggaagagaacagtaacccaggtttttatgcagggctacatactctatagggtctcgaaaaatggtggcactggctttgctgtggaacccactcattctttgtaacatgtaattgctgtgcccaggatatccacagggcgctgtgtaacctatatgacaccgagagggggtacacactttatatatttcccagagggtgcaagacgtggggacaaccacttctgggttgtgaccacccactccgtgagagggtatcac

SEQ ID NO: 703611 - DNA, 408 bp, Homo sapiens
ttaaataaccaaaccatggggaaagaaaacaaagccctcccatccaaaaaaataaatttagcaaaaaacagtgttaaactcaatggtgccggcaggccacaataaaataaaagatatttagaaaatcacaattttgaattcggatgattttaaattttaacaaatgacggaattggttaaataaaaatagtttaaatgctttccgcaataaactaaccatcaatctttgagggttctttaattaactcaaaaacttttatcagtccaaaggattcccaatttggaaatattcatcccctaaaaaaaaaacttaaaaataactaacaaaactctgaatgatcttaacgttaaaacctattttttgctaagataaaaaaatttcatatacttttataaaatgttatgact

SEQ ID NO: 703612 - DNA, 849 bp, Homo sapiens
aacagaacagacccccatccctgggctggaggacccgcctcttgggcagccagctgagaaggcgccccggggtagggggaaactgacatcccatctagagccgtccctcctcttcctcccctcccgactctctgctcctttccgcgccccagtaagttcaagggcccccgggctcctgcgctcctgccggtccagggacgcctcgcaactcacatcaagagcaggccggctggcacggctccacgggagagatggctgaggacgcgagccgcacacacggctcgtcccgtccatgcttggctgcttgcgcatacgcttggatggtctgcgcctgggcctatcgatagaggccgtatgtggttttctcgccccaaaaagaatcaactagagtagtctacgagcagtagagtaacaagaggctatattttagcctgaaaaatcgcaaagaagatcgtgtttcctcgcagattatgagtggaagaaactgggatcggaggtgtctccttggtctactatcaacagactcttcaagggtgatgttatgaaagtcgagctgagatgatagatttcaagtatccggatcaaaatgtgtgacaagaagtgaatgcgggggaaaagtatcgtgtgttgaatgtgagtgcctgcgatactgtagcaaggtgcaaaagctggaagaggatacagtcactctggaagtattagtggtgcagtagttccatcatgtgaagtacgctgcttctgtctgagtggaaactgtgggtagagctacgatgtcagcacaaagaaggggattcaggttctgaatttactggtttaaggtggctcgtttggtagaaaattccagattgg

SEQ ID NO: 703613 - DNA, 498 bp, Homo sapiens
  misc_feature (39)..(39): n is a, c, g, or t
cgggcggagaagagcgcgcgccaagcccttcctgggtantcagtattctcccttcctgggaacagcctgccctctgaggcctgggcacccgggttcccgagcgccgggtcccagccccgcgggggcgcctccgcaccccatctccgcgcccggcgcagagccgccagtctccgccgcggggccccgtgccccgcagcgccacctaggggccgggcgccgcctcccgccctcaggggcaccccccttactccgcaaggactccgggtctccccagttctcccggcagccggaccctcccagcctcggccgccgggccgccctccgcatcccaagcccgcctcccgtgcctccccgggggcgcaccggcagcgaggagcggctcggcgagggcgcgcagcggcggcccaggcccaggccttggggctggggctgagggggtgagagcaggcgcggccggcgggcaaggggaaccgggcgatggcagcggcgggcggccgc

SEQ ID NO: 703614 - DNA, 163 bp, Homo sapiens
gctctacgaggatcccccgttattgacacttcaacacaccacaatactatcggggttggtgtacaataggctgtaaatagaagtagagcttaatggagggctgatgcgtggctgtgatcagtggggtttgtaagggctaccgacgctcgaacttccgtaatca

SEQ ID NO: 703615 - DNA, 1289 bp, Homo sapiens
gttctgtgttgagcttctttggcgtgaggtccgccgttttctatgatgcgctccgctgtcccttggttgcgcggggtgcatttatttccgagcttgctacctcgtgtcgttttgggaggctctatcatactgttgtccactatacgtcgggtgttgcccgctctcgctgtttccgtgtgttgtttttgtacgcacgtcgtccgcgcggtggctgcttctattgttgtgcttccggccataattttttgtggtgcatttttactcctcttgcatcaatgggccccgacgcggtgtttgggcccccgtctgggggtgtttaccccccctgttggctccccatgagttttgttcctctaggctccccttttatccccgccacgtgtgtccttcactcgtgttgtacagtcacctcgctccttgccgtttgtgtgctttgactccccgtccgtgttgtttcgtgcgttttgggccccccccttgcccgatgtgcctcgtaactaccgccctgggtcaaaccgctgcaaacgcttttggtctcttccctatgttagtctgacccacctgttaggccttaccccgtttactccaatccttctgattcagggtgagcaatcaaactcccaattacgcccctgatcggccgcaactgcgagcatgttggccccgacccatctcatatgaagtcacccctagcccatcaattcgtactattcaacacttactaataagtggctcctttaaccttgtccaccccttagtcccacacacccaggacaccctttgagttactcctgccatcatgacccttggccactaaatatgatttatctccaccacctagccacgagagccctaccgaatcccccttcgacccttgccgaaggggagtccgaagctagttctcacggcttctaacactcgaattaacgcccccacggcccctttcgccctatttcttcactattgccgcgatatcacccaacacttatatttataataattaaacacccctctccacccctaaccaattctttccctagggaccacaccactatgaacgccaccttctcccctgaaactttaacaccacaacaataatttttgtcacccagaccctactttctaacctccctgtttttatgaattcgaacagcatacccccgattccgctacgaccacactcatacaccctcctatgaaaaaacttcctaccacctcaccctagcacttacttatatgatatgtctccatacccccttaccatttccagcattccccctcaaacctta

SEQ ID NO: 703616 - DNA, 918 bp, Homo sapiens
  misc_feature (918)..(918): n is a, c, g, or t
tataatcagaatctttatgacaatttagttcaacaaggtcagaagagatgagtttgctaaaaccagctgtgatacctcagcttggaaagggaattcaacggtatgctttgtagaacagaaccgctctagtttcccaaaatgaactttaatcattttctgtgtacccccccccgtcagtacaaaagtgcgtctaatttttacaaacagtagaacttcctccttttctaactgtaaatcttcccactgactttactgcacaggtatgaaatactagtgtattggatcttcaggtaacctttttatttcctagatgattgaaatatagtgtattatacgtccatttaaaccaaggtgataagatgatgtaaatactcagggagggtattaacttgtaactttaagctcgtaagagggtgtaacgtgcattgactgaataatcttcaattcatgattctagagtaacgtttaatttggaaaaaggggcttcacacattgatggtggttgaaacattgaatactttaatacattaacaagatgaaatgtttgtgcacatgatacatataatctttactggatatcactcggtatatgtatctctaggtcaaatacctttgggcaagtcaggaagaaacagggtcagtacaccaataggcaattagaaacacaggaatttaatcccgtaggagggaagtggacagaatatacatgggggggaaccaatttaaacagaagaagaaagggtgtgaccgagacaaaacaggaagtgaggggacaaatgaaatggaagatgaggagagagagtgttgaaaggagcagtgtgagaagaagaaaaaaagaagtgttaatgcgaaagatgtgaatatgagaagagaaatagatcgattaaacgatggaaatagaggacgtactaattgttn

SEQ ID NO: 703617 - DNA, 1114 bp, Homo sapiens
  misc_feature (155)..(155): n is a, c, g, or t
  misc_feature (170)..(171): n is a, c, g, or t
  misc_feature (178)..(179): n is a, c, g, or t
  misc_feature (219)..(220): n is a, c, g, or t
  misc_feature (227)..(227): n is a, c, g, or t
  misc_feature (250)..(250): n is a, c, g, or t
  misc_feature (260)..(260): n is a, c, g, or t
  misc_feature (318)..(318): n is a, c, g, or t
  misc_feature (321)..(322): n is a, c, g, or t
  misc_feature (335)..(335): n is a, c, g, or t
gatcgactttgtgtggatcaccatcatcaagctggtggccttggccaagagcctacggcagcggcgagcccaagccagctacgctggcccaccgcccaccgtggccgagctggtggaggcccacaccaactttggcttccagcctgacacggcgncgccgcgggcccganntctgggnncctgcgcgccagtgaggcaggggcctgcccatgcgcaggnngccccgncgccccgacgtatgactccctgngtctgcagcngctggacgtcatcgagtctgacagtgacgggtgatgccatctaaccctgcccctgccnacnnccgggcggctganactcactgagcagccaagactgttgcccagggcctcactgtatggtgccctctccaaagggtcgggagggtagctctccaggccagagcttgtgtccttcaacagagaggccagcggcaactggtccgttactggccaagggctctgtagaatcacggtgctggtacaggatgcaggaataaattgtatcttcacctggttcctaccctcgtccctacctgtcctgatcctggtcctgaagacccctcggaacaccctctcctggtggcaggacaactgaccactcccaagtgacacagtctgcaaatcacaaccccccaagacgacggcgaacacagcgccgaggattgcggccaatcgttgcgtacacaatcacacttacccatagctcccctcagcacctaggacacctcacttgaaacagcaacgaagcgcatggacggacacagaagacatgtcgacacaggagccactacaacagatcgcaacagcgaaaccaccatggcaaccaagcatgcggccaccgcctggacgtctcagcttcgtgcgccaacgagaaccacagaggtcacgacaagaaccacagcgagcaagcaaacaagaaaaacaaagaacactagaccacacacgccaccgggagacactcacccacaccccgcttcgcgcgtcatcatcggaacacacgcagacgtcgcaccagcacacagcggcaagcacggcgaacacacaccccagcagcacaccgcgggcccccgcacgccacccaccgcccgacacgc

SEQ ID NO: 703618 - DNA, 261 bp, Homo sapiens
gtggtcccccctaacaccccagtgcactgtagggtgggtacaccagtcgggattgttgggtgcagccgtacctcagagcccctgatgaagttggcaggctcgtacatgtcaatccacatgcctgtcgaagggcacctgtgtcatggcactcagccaccatgtcctcccaccaggccatgtactgtggtgtgttggtgatttctgggcaacggacgaggaccctgggcccataacattcccaaatcagatgtgctggcctgg

SEQ ID NO: 703619 - DNA, 194 bp, Homo sapiens
gttcgccaaagtagctgcgattgcacggcctgagccaccactccaggccgaatttttgtattgcttaattgagacgggggttcaccatgctacccagcttggtgtcaaactcctgacctaaggagagacaccagccttgatctcccataatgctaggattacaggtgtgagccactgcacgacacctcagccaa

SEQ ID NO: 703620 - DNA, 353 bp, Homo sapiens
tacaaattgtaggtttatggccattttaccaatggcatgtacttgctttatgtctctgtgtcacattttggtaattcttgcaatattttaaatttcattgttattggatctgtcattgtgatctgtgatcggtcatctttgactttactattgtaattggtggtgccatgaactgcacccatataagacggtgaacttaatcaataaatgttttatgtgttgactgctctatcaacaggtccttcctctgtctctcttcctctccctgagcctgcctattcctggagacatggcagtgttgaaattaggccaattaataaccttatgatgacctgtaagtgttcaagtgaaag

SEQ ID NO: 703621 - DNA, 316 bp, Homo sapiens
tgtcttagcacacctaggtcacttttgcagttgtaagccatttaccaagatagttgtaggtaaagaagggcagatttattagagaaattgtgacaatatgttgcagtgggcagctcagcagagaaggggctacctgcaaagaggcaagggctggaggaaagtttaatagggtcctgctgaagggtgctgcgtgtggaatgaggtcattgtgcccgcaggttgtttgtgattagctgtctctaacaattgttcatacaataattgttcattattgttctcaacttggggctctccccaacctggggacccttcctta

SEQ ID NO: 703622 - DNA, 1095 bp, Homo sapiens
tgatgaagaggaggatgatgacagtgaggaggatgaggaggatgacgaggacgaggatgaggatgacgatgacacttgaaccagcagcgatgaaagcagcagctgctgcccctgcctcagaggatgaggacgactgaggatgacgaagatgatgaggatgacgatgacgatgaggacgcatgactctgcaagacgaagctatggcagactacaccagccaccggcaaagaacgctgcaaacgcttgttcctgtgaaagccaagcaacgtggctcgagcgcatgcaagatgacgaagcaggatgcacgaggacgaggatgacgacgaacgacgaagcatgatgaagatgatgcatgatgaagatgcatgcacgcgacggagcgaagacgcagcgaggcaggacagcagccctgtcacacagcacgcacctgcgaccacgaacgcacacggaaatggtcaccacacgacaagccagcctccctgcaagccaaagcaccccacacacctgcgcaggcacagacaccgactcacggcctttcaatctcttacgctcgcccaacctaaacctctcaccccaaatctgctcctggaatcacacacactgggtatcagcgcatgatcctcgcctaccaccatgcatcctgctgccagcgcgactgtcccgacatgggcactcgactacggacacctcccggccaatcagaggataccgcgacctcctggctgacaaccctcggacagaccaccaacagcgaacctcccctggcccagccacaccctcggcccacttgcaacctacacctccccgccccaccacaaacgcgacacacaagccaaagcaacccgaccccggacacgcccccccaccaccccagcggcctttaactgacctttcccctcacccacgcaccaattcaggaaagacaacttgacacggcaccgtgtcagacgcatgagccacgccaacccagcttatccccgccccgagcccggccaagctcccaggcagctctataggcgacttcgccccgcagcgcactaaaacacatactgcaaccaacagagacgaacacccactggacatcccccagccatg

SEQ ID NO: 703623 - DNA, 473 bp, Homo sapiens
ggcaggcgcggtgtgaagtctagtcgaagtgggagtgggtgatatggttaggatgtttgcctctcacaagatcgttatgttgaagtataatgcctaggtgccggaggtgggcccgtgcgggaggtaactgggtcatgagggtggatccctcatggcttggtgctgtcctggtgacagtgagtgagttcttgagagatctggctgtttaaaagtatgtggcacctccctaccactctctcttgctcctgcttggccatgtgagacgccggctcccccttcaccttctgccatgagtaaaagctccctcaggtctccccagaatccgagcaaatgctggcaccatgctttctgtacaccctgcagaactgtgagtcaattaaacctcttttctttataagttactcagtctcaggtattttttttttcttttaaatttggtttatttttctagtttttctttttttttcaaattc

SEQ ID NO: 703624 - DNA, 461 bp, Homo sapiens
aaataaagaggagagagttaaagagaccagaataggccaggcatggtggctaatgcctgtaattccagcactttgggagccaaggggcgagtggatcacctgaggtcaagagttggataccagcctcgccaacatggtgaaaacctgtctctactaaaaatgcaaaaatcagctgggtgtggtggcacatgcctataattccaactactcgcgaggctgatgcaagagaattgcctgaacccgggtggcggaggttgcactgagctgagatcgcaccattgtactccagcctgtgcaacaagagcaaaacttcatctcgaaaaaatacaaaaattaacaagtaaagagaccagattagaagagagcccaggactgagtccttggggaccagcccagagatcagagagaggagaagactttgaaataggggaaactgaaaaaaatggccctagacggagaaa

SEQ ID NO: 703625 - DNA, 110 bp, Homo sapiens
  misc_feature (70)..(70): n is a, c, g, or t
gatgcgccttcatcatactaccagattaggaattattcctcgggaaggagcatttaaactgaacctggtnaaacaaaaagggtaggtatgatgaaggacgggtaccgagc

SEQ ID NO: 703626 - DNA, 334 bp, Homo sapiens
  misc_feature (148)..(148): n is a, c, g, or t
  misc_feature (208)..(208): n is a, c, g, or t
  misc_feature (234)..(234): n is a, c, g, or t
  misc_feature (265)..(265): n is a, c, g, or t
  misc_feature (289)..(289): n is a, c, g, or t
  misc_feature (312)..(312): n is a, c, g, or t
  misc_feature (325)..(325): n is a, c, g, or t
cccctccaggtgcccatccccgagcccctccctctccagatgcccatccccgagcccctccccctcatttctgtgccccaacctcttatctctgtgccccaaccccttttcccacttttctggaaggtgagagagtagagaaacggangggaggggttcgggggttcttttttctctaggcttgcttccttcactataggcaaccttncaccctctattcctccttctactccnttggcctgtgttctcaaaaacttaaaacctnatcaactcttacctgacctaaaanctaaatgccttatttttttctgnagtgcctcttgancccaataca

SEQ ID NO: 703627 - DNA, 1364 bp, Homo sapiens
gatcaggtacttagtgagtttagtcctgcagttccagcttaccatgaagtccctgatgctaaggagtgcatggcgtatgatgtggtcccactgctgccagatgtgactagtctacctggtccagccaaggcgcgggtgcctacgctcccggaatggtgctgcagtgctggctcctccagtgcccctggcatggatgtgtgcctcgaacgtgacactgcgtcctgccttaccatctgccgctggagttgcccatgcctgcatgcctcaatcgtacgttcctaggccatgttcatccccatgtgcgccttgcacgtgagcgcaatgagagccacgtctatgacatctgtgcgatgtgctctcttggcgccttggccccctgatgctactcaagtgtgtgtcttcctctgtcctggctttgtcctttgcatcacattctttaaccctcttgggaaccgggcgcccagtttctgcaatcccctttgggccttgcatcctcttgcacttcgaattgtgctcttggtacgggccctatgtcgaatctggtcctttggctcggcgcactctggcaacgttactccgatccgcctgtggaatcgatattctcccctgataccgtgggttggcagcgttgcgttggccgtatgtacctcggtaatctgcgtttattttgcccccctggatatcgctgcatccctgctacttttcgtgtgctcattctttttgatgtgctccttctaggcctctgataatatctaaattcctatacctctaaccctgatggcctgtctcctcctcggtactcctcagtatcggtgacattttcccccctttggcctttttggttccgttgtcatgcctcgtcatcatccgtgctttttgcctttaacgcagtttatacgcgccgcccatatcacttccacatccaatgataccccttctgtttaatacccttttatcctgttgcttctttctctccctccataatgtggggtcacctctaacgtcggcttcagtggtcttctgtcggtcacagtcttgcttttcggcgcttccctcccatccgttctttggtcctcagtggatagtactgcaatgtccctactgtcgcttaagtgttcttcaacgtggtgtccctgcgcgtgtagttttccctcttttttactctagtcgggacacttcggcggtatctcctcgatgcgggtgacctccccctttcaattgtccactatccctcgagcgttcggctctaatgtgctcgctctctttggtccgccacttgtgctctgtccctccggtggggtaacggccctcgttgtgcgatctgtgtgcatacgtgttacgtctctcgtctcgtgtcgttgtac

SEQ ID NO: 703628 - DNA, 172 bp, Homo sapiens
cggaggaccacgctccttgaccagctttcatgctggacattttgatttgcttgcagcttagggggctcctgaattcccatggcttggttgagtgtggtcgaatggcacctagaccttgtcatacaagttcaggacttggcctgctcctagctgatgaatgccagtgtgtgga

SEQ ID NO: 703629 - DNA, 162 bp, Homo sapiens
tcccgactagccgacaggcccccgactagcccgacaggtgatggggacggcggcacaaagggctgtcagcagctagggtgccgtgagaggtaggaccacctcaggcattggcagagctggcaggacagcaagaaatctagacggctgtcgggctagtcgggg

SEQ ID NO: 703630 - DNA, 145 bp, Homo sapiens
gtttaacttaatcatctttctgttcgaacagcactccggcaggcttgcattgactaaggcacatgactattacataactggcatttttattccctgccccttctctttagaaagagaagccagtaaatttcattttcccttaaag

SEQ ID NO: 703631 - DNA, 971 bp, Homo sapiens
ctaagtgatgtgaggaccaggggtggtgttaactcgctgttaccaccccccccgtggttgtttcaagggcccaaaaagtgtagaatagggggtttttgataggaagcatattttatcgggagttagacaggaatcttcaatgcgagaaccacatcttggggaggacacaccgtttgtttttaccaaacaatcgtccagagtcccccattccttgaaaaaataggtggtgcagcgcgcattatttgaatgattcgcccccacctgtgaaaatttgggtgtgttcctagccggtgttttttttaaaaaaacatgtgtcccccatgtttcccaggtgtgtcgcccgcgaacaatataaccaagcggttagtgataaaccatgggcggtaacatttaaaccttgtattggggacaaacaaagggaggccccccaaaagcaccaacccacgggttgtttctgaaagacgtctgccccgtgccgacagtccgcaggacgatggaggtctctgcgccttaaagcaacgcccggggaattccagcgcccggaaagacgcagcgccacgcacacccctcttgcccaccaaagggacgcccacacagactgggtcaagggacagttaaccacacggtggcccttttagagcgccagaaacaacattgtccgcatttgcatctggcgttcacacgtggtgagccataattccttccatgccagggtcctagcccccaccacgttgaagacttcccagaggacaacgtagggaggccagaaacgatgtttagcggcaccacggtatttgtgccatgggtccttaactgccgttaaagaaattacgcccttttggaaaatttgtttaacgtgaattttgtaagtgtaaaagaagtttaaaaatttttggggcctcaacagcttttttaaattatacttggggaaaaaatcagcatcttttccaataaactttttggaagaacca

SEQ ID NO: 703632 - DNA, 164 bp, Homo sapiens
agaacctattgtgtgtccccgtccagagagtttacttattggaggcgaaggagaacaggctgcctcctcacccaagaaaagaccctgcacaaccaacctgtgagtgctctggaggccccgggcatccacgaaccccatccccagagaagtcttctgaaggaagg

SEQ ID NO: 703633 - DNA, 341 bp, Homo sapiens
  misc_feature (52)..(53): n is a, c, g, or t
  misc_feature (80)..(80): n is a, c, g, or t
  misc_feature (208)..(208): n is a, c, g, or t
  misc_feature (324)..(324): n is a, c, g, or t
  misc_feature (332)..(332): n is a, c, g, or t
  misc_feature (334)..(334): n is a, c, g, or t
  misc_feature (336)..(336): n is a, c, g, or t
aaagtctcaagttatggtggggcacggtgctcatgcctgtaatcccaccacnnggggaggctgaggtgggaagattgttngagcccaggagtttgagaccagcctaggcaacgtgatgagaccctgcctctacaaaaaaagtttaaaattagctggcttggagaaaacgggagcattaaaaaaaaaaaaaaaaaaaggctggccatgntggcatgcacctgtggtcccaactactcaggaggctgaggcaggaggatcagttgagcctaggaggttaagactacagtgagccttttgttgccactgcactctagcctgggcaanagagatantntntctat

SEQ ID NO: 703634 - DNA, 912 bp, Homo sapiens
  misc_feature (637)..(637): n is a, c, g, or t
  misc_feature (712)..(712): n is a, c, g, or t
  misc_feature (724)..(724): n is a, c, g, or t
ggcacgaggcttggacctggggatgagatggtgacagatcaagccttcgaggatagactataggaagcagaggagggaagttatggacctccttcgtgaggcccaggatgtcaaagatgttgaccgaagaatttgagtggatcgcctacaggagagtgaataacactctgtccagccaaaagttagccgtttacagaatatccggaataccatggaagagacgtggaaacttggctgaagccaagcgcgtgcccatgtagagaacacagagcggttgattgagagatcgcatccagagaacttgagaaagcagaagagtcgctgctgccaagtgtgtcgagtcgactcagccagaatctacgaaggggacccagacaagccatgactctttgggcagaagaggctcgaaagcttgctgaacgtcataaacaggaagctgatgacatgttcgagtggcaaagacagccagatgatgacgtcaactgaggcatacaacctgcgtgtcgtgaggacacggcaggagaaaatcaaacagcattgagattgaagagcttaataggaagtatgaacaagcgaagaacatctcacaggatctggaaaaacaagctgccgagtacatgaggaggccaaaagggcnggtgacaagctgggagatctatgccaggcgtgggcacagctgagcccgttgggactctgagacacggagaatgangcaaataacatnaagatggagctggcaatcggaacaacgatgaccagaattaaaggattctgaggacctcagagaagaattgagaggggagggactggagtccaagaacctctgggaaaggccagaatgaacagagaccgggaccactctagccgagtggtgtgccaggcccgctgagaagggaagagggggggacttcg

SEQ ID NO: 703635 - DNA, 343 bp, Homo sapiens
ggtcaagagggcgaggggctgttagatgaagactcctaggttgccaaaggcttcagaagtcaagacatgtacaaacacaacgcaaccgagaccagttccaaacggcagcgtctgaacctgtcacggaccccagtcgataccatgcatgctggcggccttctatccttaaccaacctaagatgctaaatactactccagggaactagagttgttactcctgtaacaactgaaataacatgacacgatacacagaatatatatgaccatgtacagacggactgtgcaactaatgaggaagctgacagagaggttaacgaagcgacctgatgaccatgtctgcttg

SEQ ID NO: 703636 - DNA, 991 bp, Homo sapiens
  misc_feature (5)..(5): n is a, c, g, or t
  misc_feature (607)..(607): n is a, c, g, or t
  misc_feature (656)..(656): n is a, c, g, or t
  misc_feature (688)..(688): n is a, c, g, or t
  misc_feature (729)..(729): n is a, c, g, or t
gaganaacagcaggaggatagtcttgaggaggagcgtggcgtgctagatgtgtaactacgtcccgaactggttcctgtgtttttctagggcatgtggactagggatgggtacttgagtagaagcctgcaacttgaagagtttgtgcaggagttagctgcagtgtcggaaattagtgtcctgtatgctcaacaaggtattcggactgggtgtgcacaccacagctctcaggactggaaggtggaaatttaatctacgaagttcccttaaactgcataagcttcgggacctcttgattcactgatattttctggtggacccagggcttattcatgttaaaacctggttttcattaccatcagaataaactgacagctccattaatgaaatgcagcatttggtaaataatgttaagtggaatgatagaaacctatctttaacctaccggataaatcatttctaccattaccaagagtattgtagattcttaaagccaaacataccgtctgattcagttgctggatatttgaaaagggtttggcttctggcttttgaggagaggcgcttggtcgctttatagtcaaaatggctaatttgacttatcggctntgctggtcatttgtattgaatggacctttctcattacctacttgccaantgcttgtatgtttgggttctgactctgcaggnaatacgtgagtcttattaaaagttgggtcttctactttaangagcatatgtttgtggatgatatctacattagaacttgaatttaatacttttaattagcaacatttaaagtgaatccactatttcgtgcttgtaggtgaattggcttaataactaatctgatgctaactatgaaggtggcgtaaagccctcttgttaaacgccccttgaaaacataattctggtttttctttttggggagttttggatggctataaacaggggctataacaaatggtggtagacaaattttaatcttgagtt

SEQ ID NO: 703637 - DNA, 422 bp, Homo sapiens
gaggtgaattcaattcaatgaagtagcaaaaatactgtttttattataaaatactaatatcagtcaagtttcacccaaaggatcttgtatttcagaaaattttatgatgctacttatagctttttttctcatctgaatgtttttaatctcaaaatgttaaaacaaaataaatcatgagattttgcagtattcccaagaatatctgactgaatataagatatgaaagttactatataagaaaaaacattaagagcaatttttaagtatctaaatacaaaatgattataattattttgaatttgggttttttttgttaaaatttctcaaatgcattttcatccatttatgattttttaaaacgctaataaaaggacattacaaaatctaccttatggtataaataaacactgattattctccta

SEQ ID NO: 703638 - DNA, 226 bp, Homo sapiens
attcttgttggtcgtctctagcaggatcccccattgatgcccccttatgctgtgttggtctgccactttgtgtgacgtcatgcctcagtcatgactctgtaccatgggggacgctgggccgtgatctgctgtggattggggtcatagcaccagtgtcaggtgtaggtagtgtcagaacatctattttattacgctctttcttgtgcccttctaattttataaacgc

SEQ ID NO: 703639 - DNA, 676 bp, Homo sapiens
  misc_feature (124)..(124): n is a, c, g, or t
  misc_feature (126)..(126): n is a, c, g, or t
  misc_feature (129)..(129): n is a, c, g, or t
  misc_feature (138)..(138): n is a, c, g, or t
  misc_feature (141)..(142): n is a, c, g, or t
  misc_feature (144)..(144): n is a, c, g, or t
  misc_feature (148)..(148): n is a, c, g, or t
  misc_feature (150)..(150): n is a, c, g, or t
  misc_feature (170)..(170): n is a, c, g, or t
  misc_feature (204)..(205): n is a, c, g, or t
  misc_feature (284)..(284): n is a, c, g, or t
  misc_feature (298)..(298): n is a, c, g, or t
  misc_feature (304)..(304): n is a, c, g, or t
  misc_feature (329)..(329): n is a, c, g, or t
  misc_feature (338)..(338): n is a, c, g, or t
  misc_feature (343)..(343): n is a, c, g, or t
  misc_feature (349)..(349): n is a, c, g, or t
  misc_feature (676)..(676): n is a, c, g, or t
caaagacttcgactcccctgagaacggtgcggacagcttccagagctcagactccctccttcagtcctggaacagccagtcgtccttgctggatgtgcaacgggttccttccttcgagagcttngnagntgactgcanccnnantctntncctcaataagccaacatgtntttcaaggattacatccaagagaggagtgacccnntggagcaaggcaaaccagttatacctgcagctgtgctggccggcttcacaggaagtggacctattcagctgtggcagtntctcctggagctgntatcanacaaatcctgccagtcattcatcanctggactgnagacngatggnagtttaagctcgccgaccccgatgaggtggcccgccagtggggaaagaggcttagcccacgatgaactacgagaagctgaaccggggcttacgctactattacgactagaacatcatgcacaagacgtcggagaaagcgctacgtgttctcgattaaatgtgcggacctcagaaacttgcttggggtttcaacgccccgagggaactgtaacgcgcataacctgggcagtaacaaccccgtacaccggaaggtacttgacgttccgcccggggacccaccccttgaacccggctccccaaggcttcgtggtacctgttgggtgcccn

SEQ ID NO: 703640 - DNA, 203 bp, Homo sapiens
  misc_feature (50)..(50): n is a, c, g, or t
  misc_feature (73)..(73): n is a, c, g, or t
  misc_feature (92)..(92): n is a, c, g, or t
gagagtcactgctggtgggcgtcggcgtgcacaatggtgtcgaccaggcngaagtggtggaagaagccgtcgncgggttaccagcgcgttgntcgaggcggtgatcatcgtgctggtggtgagctttatcagcctcggtatgcgcgccgggttggtggtggcgtgctcgattccgttggtgctgtgactctctgaatattcac

SEQ ID NO: 703641 - DNA, 189 bp, Homo sapiens
cacgaggcggcgctggatcgattgtatcgcagccatgtcgggccgggcgaccgctatgcgttgctcgattttcccgaccacgccaatgtcggcgacagcgcgatctggctcggcgagctggcgatgctgcgcgcgatcaccgggcgcgaacccgactatgtttgcacttggcacgatttcgatgagcgg

SEQ ID NO: 703642 - DNA, 206 bp, Homo sapiens
gagatctatctaggagtggaatagagtcatatggtacctcagtgtttaactttagaggaactgccaaatgattttccaaagtagctgcattattttacattgctaccagcagtgaatgagagtttgaatttctgtacatcttcacccaacacttgatattgtctgtctttctagacaaatttggataaatccctccttttctaaac

SEQ ID NO: 703643 - DNA, 326 bp, Homo sapiens
gcgtgaacccgggaggtggagcttgcaagtgagccaagatggcgccactgcactcttggcctgggtgacagagggagactccgtctcaaaaaaaaaaaaaaaaaaaagcatgtgatcatccacattttatctcaggctccttaaaaagaggaaaaggaacttatgtctactaaaaattattgtgtgtgaatgtcctacaagagttctaggagttactctactatcaagatgtttaggaatttgtccatattgaacaacattccttccttaaaatgtctggctatcattccatatcattgttgatttcagattatttaaactccatc

SEQ ID NO: 703644 - DNA, 861 bp, Homo sapiens
caacttttaaaaataaaagtggtagaatttttttttttcttttggagacagggtctggctctgtcactcaggctggagtgcagtggtggggtctcagctcactgcagcctccgcctcccgggcttaagggatcctccctcctcggctcccgggtgtctgggaccacaggctgcaccaccagccttggtaattttggtatttttggtagagatgggtgtctccccatgtggctcaggctgttcttgaacttctgagctcgggtgatctatctgcctcggcttccaaagtgctgggattacggcttgatgagccatgacctggccaaaaggtggcagaaatttggatatggttttataatcagtttctatggtgggggaagatgggccattttaatgaatgattatttctatgtgctaaactaccgagtcacgactgacaaatacacttgaagctttaatcacatgcagtttatatacttctcacaaatcatcaaattatttatctggtcttcacacctaagggatttacttagatagcatcgatgatctcagtgtcaacgtgtggtttttcacacagcatttattcagtgcatcctgatttatttcaacactggaacattgtgaccctttttttcgtgagtaattaagttactttagtgccaggctaagtatacagggtggcccgggtactaaaatcggcaagaggctgtaattttcaaagccctgtttgtggtccatgtgaataaggcggaattgcgttagaccttggtctggacccaccagggccgcaaagctcaccgggggcgtcaccgggggttcgcccccgggaatttttcccaaaagtgcacgcccaaaatattag

SEQ ID NO: 703645 - DNA, 843 bp, Homo sapiens
gtgcaagctccggggtaatagatatctgcagtgcatgatgaagctgtcgcaatcgatcagatccgatgggatgccagaagataaacatttctttgctgccatgggctgatgatgctgctattagatcaagttgtagctgtggcaccaacttcacagtcattgtatcatagaaaagagattgactatgtattgccttaattgtagaaggttatgagctttgggtctggtttcgatgggattgatttagaattgtcggataaaagtaaaagctgggagtcataaagggatgcattgtgttgggtaaatgtgcaatatatgcattgtgagatctgggtaccattgtggattgggtgatactcgggtgttgtgcacacaggcgtcgctgtgaatcgtcgtcgagagagtatgctgccattgtgctaccgtagtagttagaaacttgtatggacataatgcttgacccttcggagagtgacgcctaagaattgccacgaattgggtatgggtgacagggaacaggtccttgcggaattttttgtaaccaggtaataaagacttgagggttgtcccatggggttatccccaaaggtgcggcgaacccaacggggggaccaattggaaatcccggagtaaagtttggtcttaggatcccttgtttgacgctaggatcgaggattgcgcacgaagaggatctcgaggaaagggtcacccattgggcgacaatagtcttgcggtgcgcaacggctccaattgacttaagtttgctatccgaggggctagggtacaccccgggtggggcccggaaaaggcagaggaacaatagtgtttaccattgtgccaatg

SEQ ID NO: 703646 - DNA, 358 bp, Homo sapiens
gatgcaaaggatgctgttgacttgatgaaggctctacagttcaagcaggtctccctcctgggctggagtgatggcggcataactgcgctcatcgctgctgcaaagtacccatcttatatccgcaagatggtgatctggggagcaaatgcctatgtcaccgaggaagacagcaggatttaccagggtatccgagatgtttctaaatggagtgagaaggcaaggaaacccctggaagccctggtatggatatgactaccttgccaaaacctgtgaggactcgggtggatggcataagccagtttaaacaactggccagagggtaacatctgccggcacttgctgcccctggtccagtgcc

SEQ ID NO: 703647 - DNA, 125 bp, Homo sapiens
ggtgtgtctagaggatcccagcgctgcgcaatacatacacggagtagttcttcaacaagggacacttccctctaattcgcaagggtatcccaccattccggagaataccggtggggaatgattta

SEQ ID NO: 703648 - DNA, 254 bp, Homo sapiens
cctcccaggctcaagtaatcctccaacctcagcctcccaggcagctgggactacaagcatgcaccaccatgcccagctaatttctgtaatttggcagagacagggcctcactttgttgcccaggctggtctcaaactcctgacctcaagtgatccgcccacctcggcctcccaaagtgctgggattgcaggtgtgagctaccatgcccagtcagaccttgtcattttgtgctggtaccagcaaagcatagggac

SEQ ID NO: 703649 - DNA, 624 bp, Homo sapiens
  misc_feature (469)..(469): n is a, c, g, or t
  misc_feature (564)..(564): n is a, c, g, or t
cctgttctctctatcacttagagtttgttgtatttaatacctttgctatcattttattgtggttttggttgggagaggaaataaaatggcaatccactacctcgaaaataaattagtacatttatttgcctatcttcatctcctaactagtctgtgagctccttaagggtagggaaggttattattcatttttatatacccaaagtacatcagtcacagcccagccagaaaaatagaaaccacaagaaagatttcaccagagggaatttactagaggaattagtttacacatgtattagaggatagaaaggacaaaagggagcactgggctcacctggagatattactgaggaagctgctaccaacctagccctgggggaaccaaacaggggaaactgggattgtcaaaagctctagaacctcagagtaggggacctatgtagtgggagctcaggccactgaggggtgnttatgaccaggttgtagttggacctctagggcccagtgttgatgtcgtagggatctctgagggccagtgatgaggctagatgtgagttgcaaaantgtcaagcagaagccagctgttgcagctggggctaagtgccactgacaggaacactaagc

SEQ ID NO: 703650 - DNA, 918 bp, Homo sapiens
  misc_feature (265)..(265): n is a, c, g, or t
agcggcttcttttccgacaaaacaccaaatggcggatgactgccggtgcagctgggggtggcccgggggccctggtggccctgcggatgggtgaaccgcggtggtcttccgcggagtgtttcggcagtggcatccggggtccggggtcgctggtcctgtggacggggccgtggtgccgaggtccgctggatgctctgcggatgtgctaggccgaggatagaggagtgtgatgcccgtcagccacagtgtgggccgcttggtctanaggacatagaagatcgatagtccctaggcaggagatcttatgctcgttctccgctgcccgattaacggacatcagacgatcgattagatgtatctatcgctggagggccttcatcgtaccaaggcattgacggtctttgaacgattgattgccagtgccatgaagcaagaccctgtggccggcgcagacgcaccaggttcaatagggcacttctgttgcttatcgggggcactacaataatggccatcgtctggtactgggatgttaacgtgctcctaatggtaggttggcctaccgtctcagtccgtgaggtcgccatctatccgtggccaagcgtcaccatcgtaccccagtgcgcagtaggctactagggggaacatagatcggcaagccccgatcactggtcccttgcataggtgacaggcctgctgcggctctgtgctggtacgcctcatccctgcacccaggggacactggtatcgtcgtccgcagctgtgcctaagaagctgcgtcatgatggctggtattcgatgactggctacagctcagtccggggctgtgattgccacctgggcaacttcgccaaggccacctttgatggcatttctaaagacctacagctacttgaaccccgaactctggaacggaggacg

SEQ ID NO: 703651 - DNA, 711 bp, Homo sapiens
cgccgtggctcatgcctgtaatcccagctgcttgggaggctgaggcgggagagttccttgaacccgggagtcagaggttgcagtgagctgggcaacacagcaagactccatctcaaaaaaataaaataggggaaagataagtcatttatattaaattatgagaaaataatggcaactgttaaacttttaaagtattatttccaactaaattaggaagaactaaatttcacttttacatatgcatgacaatgatgagcagggctcctaaaacagttgtggcttgactaggaaacaaataataatttttttatatcaataagaattacttgcaactttagggggcatttagaattatatttgccttatttgagatttggatttaaactttattttagagcattttttaaaaaataaatagaagtgaggctaatattgctaattattctctttacaaatacagcatttgcttgggctaaaattttctgccccaacatcattatcacgagtcagccatatacaacgataaacttagccattactgtgtgcaggcattgctctaaatactctattcgctatcaccagcgaaccttatgaggaactatcttatccttagctggcagacgatgaacctggcgaccaaggagctaatcaacttgctcataactcggaagctgtagcttaacatcaatttccttgcattcaggccttgat

SEQ ID NO: 703652 - DNA, 1366 bp, Homo sapiens
  misc_feature (885)..(885): n is a, c, g, or t
  misc_feature (1059)..(1059): n is a, c, g, or t
ttttcgcgtgcgctcgtgttgtggccgacttccttgtagcgaagctctgctgggagtgtcttttctcgagtccgaccactctgttcgtctttatggtcatgcgctcgctccctctctgtctatcctcccacttggctccccgtcttttcgcgcggggtgtctcccgtctcttttccagcggcgccgctgtggccccctgtgtgatccacaggggggggggtccccccgagtacaccaaagcgcttttttgtttgggggggatggggtgtttttccgcccagcgagctcacgccgccggtgggttgtttcctcgctgtgtagaagatggtgttgtgttgtgataacgggcgaacaaaaagcatcttggggccgttggcccccgctgtatgacgcccagggccttctgggttcccccaccagagtcgcgttggcggctgttgggggcgttaaggggtcccccgcatggcccccattattgggccgcctctttgttgatttgtagctcttcgcatttgccgccctgtgcgagcgcaccgccctgggtcatccatatgcacacaaacgccctttccaggtaggggggccccctctccagccgcgttcttgccctgggaagcccccctttcttttgtggggccccaagaaactctgttggggaccccatagccccggatgtccccgctctttcggtgtgtcccccataccgcccacccgcttgcccccagaggacttgtaggactctggacctctccctctcttggtggcaccccatgggccctataggggccctcgagcacacttctcgctataagagaggtgtcttttacgccaaagcgcccccccatatatatagcgtcccacagggcggcgccctctggcgccgcnccactcacattggttataattctttgtgcccagcacaagacacacacaccaccgggtataggatttctgtgcctctttgtataggtggtatagggagacaccacgagtgagccgagcctggtcacactcctccctgcgcacacacattcacactttgtgtaatgttcgagaggncctggcgtgtataagcacacgaaactccctcggagagtctaccacgcggaaccagggagagccacttcactttcctcgcctcgaggaatacctcggaagactttcctcgcacggaggtcacgcgtttcacattcttgaacctctgaagatgggaaaggatgtttctttttacgtgacccatttcttttgttcttttgatatttaaaagaagtaacattttccttggtagagaaatttgggaactgttagaagagatatccagaagaaaaatttaaaatcagctgttgttatcttgcctagcccaata

SEQ ID NO: 703653 - DNA, 849 bp, Homo sapiens
  misc_feature (188)..(189): n is a, c, g, or t
  misc_feature (199)..(199): n is a, c, g, or t
  misc_feature (202)..(202): n is a, c, g, or t
  misc_feature (207)..(207): n is a, c, g, or t
  misc_feature (209)..(209): n is a, c, g, or t
  misc_feature (214)..(214): n is a, c, g, or t
  misc_feature (219)..(220): n is a, c, g, or t
  misc_feature (226)..(226): n is a, c, g, or t
  misc_feature (238)..(238): n is a, c, g, or t
  misc_feature (241)..(243): n is a, c, g, or t
  misc_feature (247)..(247): n is a, c, g, or t
  misc_feature (251)..(251): n is a, c, g, or t
  misc_feature (255)..(255): n is a, c, g, or t
  misc_feature (260)..(261): n is a, c, g, or t
  misc_feature (263)..(263): n is a, c, g, or t
  misc_feature (271)..(272): n is a, c, g, or t
  misc_feature (279)..(280): n is a, c, g, or t
  misc_feature (288)..(288): n is a, c, g, or t
  misc_feature (293)..(293): n is a, c, g, or t
  misc_feature (295)..(295): n is a, c, g, or t
  misc_feature (297)..(298): n is a, c, g, or t
  misc_feature (303)..(303): n is a, c, g, or t
  misc_feature (337)..(338): n is a, c, g, or t
  misc_feature (362)..(362): n is a, c, g, or t
  misc_feature (366)..(368): n is a, c, g, or t
  misc_feature (396)..(396): n is a, c, g, or t
  misc_feature (408)..(408): n is a, c, g, or t
  misc_feature (428)..(428): n is a, c, g, or t
  misc_feature (433)..(433): n is a, c, g, or t
  misc_feature (518)..(519): n is a, c, g, or t
  misc_feature (537)..(537): n is a, c, g, or t
  misc_feature (561)..(561): n is a, c, g, or t
gagtcttcatacacgcggcagcagcagacagaggactctcattaaggaaggtgtcctgtgccctgaccctacaagatgccaagagaagatgctcacttcatctatggttaccccaagaaggggcacggcactcttacaccacggctgaagaggccgctgggatcggcatcctgacagtgatcctgggnngtcttactgntcntcggntngtggnattgnngaagangaaatggatacnaannncctntgantggnataannangttcttcnntgtgtgnncactcaangtgtngncnntaacnagaagatgcccacaagaagggtggatcatcgggnnacgcaaagtgtctcttcaagaganaaannngtgaacctgtggttcccaatgctccagntgcttatgaganactctctgcagaacagtcancacancttattcaccttaagagccagcgagacacctgagacatgctgaacattatttctctcacacttttgcttgcatttaatacagacnntctaatgttctcctttgnaatggtgtaggaaaaaatgcaagncatctctaataattaagttcagtgttaaacaatttagtaaggtcacgctaagagtactaatcatgtgaggactgatgagaaattattacattgggaaaatccatcattaatgttgccatgcttataaaaaaaaataaagataagaacaaagtaaaaatataaagagaaaaagtaaaaaaagagaaaagaaattaaagcaaacaaagaaaaaaaaaaaagtgaagagagacaaacaaaagaagagatgaaaaaaaaaaaataagagaaaaacagaagaaaagacgaaaa

SEQ ID NO: 703654 - DNA, 147 bp, Homo sapiens
  misc_feature (23)..(23): n is a, c, g, or t
aaggaggctcgggctcagaagcntgcactctggcgggcataccagcgggccctggccgctcacccgtggaaagtacaggtcctgacagctgggtctctgtatggacctgggttcacattatctcacagcagctggtggacacgtgcg

SEQ ID NO: 703655 - DNA, 366 bp, Homo sapiens
accaggtgctcaccagtacacgcaatcccactccaccgtgagaccaggcgctcgccaatacacgcaatcccactccaccgggagaccaggcgctcgccaatacactcaatcccactccaccgggagaccaggcgctcgccaatacactcaatcccactccaccgggagaccaggcgctagtcaatacacgcaatcccactccaccgggagaccgggcgctcgccaatacacgcaatcccactccaccgggagaccgggcgctcgccaatacacgcaatcccactccaccgggagaccaggcgctcgccaatacacgcaatcccactccaccgggagaccgtgcactcgccaatacacgcaatcccg

SEQ ID NO: 703656 - DNA, 1137 bp, Homo sapiens
tttgtttggttcatttacctataagtgttctttgttggttgtatggtcgctgctggtttgtttatgctctgctgtgtgtttagttctcgttcttcgtgtcctgcgctaccattttgtgttgtgtctggtcggtgtgaacccctcttctgccggtcttgttctttgtgttttaggagcagtttgctccccccgtgggtttgtgtgccagccccgttgtgctccccccccccccaggggccccttgagcgttcaatgttggggcacccctccgcgcctgggattccggggctggagggcgctttgttttcccacccgtggcgcggcggtgagggttggatgtaacatcggggggtttcttctcaggaatgtgcctacctggcaataagagatcttggtaccgacgtggtgtgaaaccagtccccccctgtgtgtgtgttggccacccaaggtggatattaaggacccggaaagtgaaggcgaaatcccttgtcttcccccgaagaagaatcttcagtatctacgacatgttctgcccaaagtaactaccactttgaaaagcccttcctctggcttgctaggaagctcccttggagacccctaacgttggaatttgttgccctgcctgctcctcgcccccacccacgagagttgtcctggagccccgcctttggcacgcccccgtattgagcccgacttagaggttgctccacgaccacctggcttcttcccgcgatgaggatgatgaccctcgtgagaatgaagcctggagccccgcgtcacgaagttctagttttataggcacgctgtcctcgtgatgtcacccggtgcacgcgtgtgtgccaccctcacttatttatctagctataccggaaccactgtgcttcactctgtgggatgcctgaaggagatgagtgggcttcggagtgaaatgtgccacgtttaaaaaataacttcacttgtttggacccgcactatttagctgttttggaacccacgttgagttccttgagtttcaataatataagactgctgcacgtcagcactcccacatattcacgtggtgaaatcttgtttgttactgtcattccccttccttttcgtttagaatccagaataaagttgtatttccaatatcta

SEQ ID NO: 703657 - DNA, 282 bp, Homo sapiens
  misc_feature (17)..(17): n is a, c, g, or t
  misc_feature (29)..(29): n is a, c, g, or t
  misc_feature (45)..(45): n is a, c, g, or t
taatatcactttataangcatgctggtanacttgtgtgtgtgagnccccatggtggctgaaggatgattagaaaaagatttgctaagccaagttcttgtggttcttaacctattctaagaagcggggcaatgcgaaaaatataaaggaaaaacaagagcccacacctgtaaagatactttactttcatatgtgtccttactgtttttaacctataaaggaattttagttgtgccttcttatctctgtgataaggcatttatttgtttctaaatgttgacagt

SEQ ID NO: 703658 - DNA, 257 bp, Homo sapiens
  misc_feature (11)..(11): n is a, c, g, or t
  misc_feature (18)..(18): n is a, c, g, or t
  misc_feature (20)..(24): n is a, c, g, or t
  misc_feature (78)..(78): n is a, c, g, or t
  misc_feature (93)..(93): n is a, c, g, or t
  misc_feature (115)..(115): n is a, c, g, or t
  misc_feature (118)..(119): n is a, c, g, or t
  misc_feature (121)..(121): n is a, c, g, or t
  misc_feature (161)..(161): n is a, c, g, or t
  misc_feature (163)..(163): n is a, c, g, or t
  misc_feature (167)..(167): n is a, c, g, or t
  misc_feature (174)..(175): n is a, c, g, or t
  misc_feature (194)..(195): n is a, c, g, or t
  misc_feature (197)..(197): n is a, c, g, or t
  misc_feature (234)..(235): n is a, c, g, or t
  misc_feature (252)..(253): n is a, c, g, or t
  misc_feature (256)..(256): n is a, c, g, or t
ggacgagaacnttgcaangnnnnnaaaagctaagacccccgaaaccaagacgagctccctaagaacagctaaaagagnacacccgtctatgtncaaaatagtgggaagatttatnggnngnggcgagaaacctaccgagcctggtgataactggttgtccnanatanaatcttnnttcaactttaaatttcccnnanaaccctctaaatccccttgtaaattaactgttagtcnnaggggaacagctcttgnnctng

SEQ ID NO: 703659 - DNA, 359 bp, Homo sapiens
agagtcaaacagtgcccggctggcgtgcacatattggtccttcaggcctgggcgagacggagcaagacttgtgcctagttgggggctcccctggagcttcaatctccagttctactcacccggggttggggctccttaacgctcatcgtgaggtctcttcgagtcaagaatgctgtctactgtgcagtcattttccctgaattttctcatgggagttggctgccatctcccaggctcatgccgtcacctcgcctttcttgttggagacttcagaggaaggatctggccctctcatctcaggctgtgggcccctcaatccttaactttcttccatggacaatcagggccatgggtggccc

SEQ ID NO: 703660 - DNA, 576 bp, Homo sapiens
  misc_feature (11)..(11): n is a, c, g, or t
  misc_feature (77)..(77): n is a, c, g, or t
  misc_feature (101)..(101): n is a, c, g, or t
  misc_feature (128)..(128): n is a, c, g, or t
  misc_feature (130)..(130): n is a, c, g, or t
  misc_feature (200)..(200): n is a, c, g, or t
  misc_feature (222)..(222): n is a, c, g, or t
  misc_feature (397)..(397): n is a, c, g, or t
  misc_feature (427)..(428): n is a, c, g, or t
  misc_feature (457)..(457): n is a, c, g, or t
  misc_feature (498)..(498): n is a, c, g, or t
  misc_feature (524)..(524): n is a, c, g, or t
caagaggtgantagccagtcaagagctaggtttaatcccagtatcagcatgattaagaagtgtattgaagttctaanagacaaacaaaacatagaacgcanccaggcgccggcagatgaaaacagccncnccgcgcgctgccgcccccccccagcgtggtgtgagaagatcattgccatcaccatttggtgtgtccctgngggaaaaagcaggactgtgccnccataatttggtcatttggcagcccctgttttctgctgttaacaacatcaccagtgccacgtcatgagcgtcaaagaaaatgcctagagatatttcaagcccatgccattatgacatttcttaaaactttattaaaagaatgagtgaagtattgctgaaaagtggaaattcggtngggtaccatgctttatctcccccccacgtnngcagttgatgtgtcttttttttttttttnaatgtatcttaaaggacataaaatttaaaaacttaaatatngtaatatgacagataacctaataatngtatcttacatttaaaagtgacaaacattgatacgtgcgtgcttgtcaaatt

SEQ ID NO: 703661 - DNA, 353 bp, Homo sapiens
  misc_feature (21)..(21): n is a, c, g, or t
  misc_feature (23)..(23): n is a, c, g, or t
actccgggggggcccccgggncncccccccccccctctttttttacataatgggtgaagcccaacctgttttgccgatgtagaaattggtgctttgttttttttataaaactgggttttgcccaaaaattggggggggtccccctttgcccccgctaatgtttctaaagaaaaagccctttttttttttttttttgtggaaccttaaatgggggaaagccatttttgtgttaatcctgccagcgcttttattccctttaattcgaaaccccggaagattccatccctgttttgaatgggtaaaaaccccccccttttttttttccttttgtttaattaactgggggcccccga

SEQ ID NO: 703662 - DNA, 257 bp, Homo sapiens
  misc_feature (36)..(36): n is a, c, g, or t
ccgactcaagcactgggggaaaatggttatgctaanaacatttaaaagagaataagcacaataaatctaaaggttgaatgaaatatttaatttagcaattaactttttttttttttggaaatggattcttgctctgtcgcccaggctggagaagtcctccccagttgctttcggattcctccccaagtgctttcaaagtcctcggggaactcctcttaaattcgaccgtgcaggacttgcaagccttggcacgtggc

SEQ ID NO: 703663 - DNA, 190 bp, Homo sapiens
  misc_feature (109)..(109): n is a, c, g, or t
  misc_feature (156)..(156): n is a, c, g, or t
  misc_feature (167)..(167): n is a, c, g, or t
cctcttcctcatcaaagagaagagccagctggtgcggcccctgcagcccgccgaatacctcaacacgcgtggtagtggaccaaggacgtgagccttgcacagccggcgntccacttgggagaccccactgcacttcgataactcacctacatcagnaacccactacnggcaaggtgctgtggggactacc

SEQ ID NO: 703664 - DNA, 1020 bp, Homo sapiens
  misc_feature (239)..(239): n is a, c, g, or t
agcggagtcgtccgtgggtttccctgccagacgcagtgttggaccataatcatggtggacatgatggacttgcccaggctcgcgcactcgaacgccgggcatgctagtctcaattgtcattcgacgaggcctggtctgcttcgctagggaggctggaataagattcagtcccaccggataaaagtgtttagttgctttgcaggatgggagaagggaaaagaactggaaaccactcgagnttgactggagacctccgttggagtgaacgaataatctgcctgggagatgtgtgggacagatggtgtgggagaagagataagccgatctaagtgccacgcatgcgttgtgatagcaatcttttactgttcccacggtgttgacacagaacagcataggccagtgccctttgtgtagtgctgtgggagcttctagcagagtggacacgcgtgtgagacagattgactccaatgaacttgtccacctcgaggttgtgtgatcgctgttacggggattgttgctacacagtgcattgggatctttgatggcgagttttcattaccgagttgctaaactcgagcgtcatattacagagtcctatgtgagaagggacaagccgcttcggttgttctgaagggcaagagaatgtgtcctgtgactcgttctgcactactgctaatgtgtggctgattctcgtaaggaatacttcgcaacgctaagaggtttgtatgactgggaactggactatgattggacaggtgtcgtcaccataaggtccgttgtcaatagaagaaattggcgtacgtccagtagtatgcgtcagacttgagatgcaaggaactaaaagcaggtgagtccgaagtcgtaagttgctatgggattaatcacaaagtaagaatggtacgtacgtatcggtcatatcgatttttcatgcttcttgaagtcatgtattcacggccgaaactttgaagatttcatagggccataagggtcaggaacttgaggccctagccaaataaaagc

SEQ ID NO: 703665 - DNA, 191 bp, Homo sapiens
ttgttggtcgatctctagcaggatccccgcaactcgcgtagtccagagagcgactcgggtgccatgaaggcgggcgtgcccacagatgtagagagaggatgccacgtacacatgcccttacacattcattgcatcacacccagagtcagcgcatctctaatgctgcccagtcttgctctcgaccaggaagg

SEQ ID NO: 703666 - DNA, 974 bp, Homo sapiens
ggatgccaggactgagttgtgggggagggaggcggtttagcgggctttcgcgccttttctggcggcggtagatttgaagcgcttcagaggaccggacccagaggagaggaaaactctcaaccggttgcagagagcagagggaattcaggtgtgccctttggtgatattggggacttgaactatcagtgaagaatgatcatcggtagttgccgccgatgggacatcaaggtttcaacgttccatcgaatgtctttgctggacatttgccaatgaacgaagtcaacctggttgaaagagtggtcttagaggatgaattttcttgattgtgtgccccaagaagaatgctgagaacttacgtttgtcgtttgtaccatggtgacatacgggcaccgggaaatcaaatctcaggaaaccatttacgattaataggagtggtctctgtacacagagttgtcgacgattttattgctcacaaggtggtgacttcagtgaaggacacctggacgacggagtgggacctctatctatggagcgatcgaagaggacgagagtctcgcgtgtatgaaacacacaaggcaagaattactcttgtcatcggccatcagagggaaggataccaatgggttcaccagttctttcattaaccaacggaaaccaatccctcagtttagaatgggcatcatgttgtttttggccagtaacctctggtcagaagtgtaagagagattgcgacgcagacacacgatgcagtaggaaccgggaggaggacgggtaccagtgtggaagctgttccaattaagtagaacgagacggaggattaacatcataatgcgccctagttagtgcacaaatgcagggtcaggccttggtccgtatccagggtccggacaacagaaaaagactggattcaggaaaaaaaaatgccgcagaataattgcgcaaagaatgttgagaggtgtacaacggggacattc

SEQ ID NO: 703667 - DNA, 673 bp, Homo sapiens
gctcactacatgtgtcgccgcctacagactgcgtagccccggacatggctctgtagcctcgacccctttgtgcccccggcccgtacctccgacgctcaccacgcctgcgctctccgcatcccacactatactatatactatacagcacgaggccgccgccgacctctccttgctgcagccatggagtctatccacttatacgcctatggttgcctgtcttcgcccaactgagcatcctacagaaccatacgtgaccagcatgcgtgagtgcacagctcttctctcgtgtgctgacatcatgttgcaccagcatgctgtgcctacacgactcgatatgtatactgcgatggacagatgcgtgcggggcatgggagcatggcacagggtctcattgcatcccagagtagtggggcctgggactgggcctcgtaagcactcatggcgaaactacccccccggcccccttagccccacctaggaactccctaataggagcgtcctctggggcgaagacccctagggaagggacgggcgcttacacaagtaggcgggcggacagagacccactgggaaacggatgacaggcctatcatactgcacttgccgaccgacctgcaacacgacagtcggatatcaccaagctactacctaaccctacatggaaggcactaga

SEQ ID NO: 703668 - DNA, 118 bp, Homo sapiens
gggtaacctaatgtggggcccgctcatgagtagcaagacgtcttgtgatagtaattattatacgaatgtgaggctacagggggggagtactaggacgattgtccacgtcacggcgtcg

SEQ ID NO: 703669 - DNA, 339 bp, Homo sapiens
gtcttgatcagatgactattgatgaagataaattgatagcacaaaatctagaacttaatgaaccataaaattggtttgactaagcttaattgctttctggaacaggatctgaactggatatccaacaggtacgacaccacagaggaaagttatttatacccatcaacactggtaagactgaaccacgtgaccatctccttgatcagctgaaaggaacagcctgagctgttatgatgctaactgttcagagacacaagagagcaattccggatgtgatgtagagagcagtctgggcagtatactgagacctctagtcagagcatcttagatctgtttgat

SEQ ID NO: 703670 - DNA, 641 bp, Homo sapiens
  misc_feature (405)..(405): n is a, c, g, or t
taacaaacccggtcctggggggggtgtgggtataatactaagtggagatgataatcatttacgggggaaggcgcttggtgaagtaggcctttatttcctcttgttccattctcgtacgaggggaggaaattgtgaagttaaatagaaacaccgcaccgctggtttacctccggctcgtgacacctcagaactccacgttaggaacttttaactcgtgtgacacaaacggacacctttataatataagcggggtgtgcgccacatgtgtggagatgtgtctcctgtgtatctccacacacatctcagaggtgtctcagtataaaaccccccactatgtgtgtgtgtgatatatgtggacctctctataagacatataggagatatgtgtggcctgtgtgttatctncccatagggtgtaaatctgtggtgtcccccggtttggggtccaaatgttttatgtggggtatccacattggatgtattaagtatgtccgtctttggactgggtagaatgttcttaagcatggtatctggctccgagaaggttgggtgttctggctcccagaggtgtcgcccacaaccgaaatttttaatggcagggttgggtagtttaaggacctgtggggttggtaacggtacgg

SEQ ID NO: 703671 - DNA, 546 bp, Homo sapiens
gaagtaatactcgcttacatgttaaagaaaataaaatgtagcagttcaaatgaggttataatgaaaacaatagtgctcttccattcctaccccaagtattagtccccagaggaaataattttacctgttaattctagttgttatcactaattaatatgcttttgctcctatttttaaaactgtggctaaaagcataatatttatcattatagtcatttttaagtatacagttcagctagtgttaaggtacacttagctacttttttttttttttggaaaaggaagtctgggtcgtgtcacccaggctgttggggttgccgggggccccacattctcggctcacgtggcacgccctctggcctcccggggttcaaacgcgatcctccctgcctcagcctcccaagttagctgaacatccacacggccacccaaactccgaccaactggcgctacatcccaccctacactactccgactctatcaaccacctcctcacgaccttactccttccgaaccccctcggtccaataccacgcgcatcaccct

SEQ ID NO: 703672 - DNA, 416 bp, Homo sapiens
tatagagaatccccggcgacatggggtctgtagagcctggtgcagggagagacggcgggcagcgctgaggagagaggacacaggtaggcagggcttgcggcatgacagggagggcctaggcaggaatccctgtgcgttcccctactttttggattttgaaagtggagaggcgcggcatgtgctctgtgctgctgttttatcatatactacaccgtgtggtatgctgctcacatcatctctagcttttagaatgagctgaacacatcagtgcatttgaggggctccgtggggaacggagattctgccagggcatacgagtgcatgtttgccactgcatgggttctagagcccctgcttgaaggtttgagacaattaagaatggatcgatgtgttctcaggttcacacaggcagaaga

SEQ ID NO: 703673 - DNA, 157 bp, Homo sapiens
ggcagagatgtttttaaattttttttagagacacggtcacactctgtcacccaggctgcagtacagtggcaaaatcatggttaacggcagctccgaactcctgggctcaaggaattctcaatcctcagcctcccaggtcactccaggcccgaactct

SEQ ID NO: 703674 - DNA, 413 bp, Homo sapiens
  misc_feature (86)..(88): n is a, c, g, or t
  misc_feature (91)..(91): n is a, c, g, or t
  misc_feature (96)..(96): n is a, c, g, or t
  misc_feature (101)..(101): n is a, c, g, or t
  misc_feature (108)..(110): n is a, c, g, or t
  misc_feature (234)..(234): n is a, c, g, or t
  misc_feature (301)..(301): n is a, c, g, or t
  misc_feature (341)..(341): n is a, c, g, or t
attaaattgggaaagaaaaccccaggggtttttatcatttccttttcccccttaaggttcccctgaaattttaaaaatcaggggtnnnttnatcgnggggntcttttnnnttttcggggccccttttttaaaagtttaaaaaaatgttgccaggggggttccgtttttacccaaagacttggggataagccaccaattcccgtggttgggatttaaagggtattagtccccccngtatggggaagtagttttcgggtatcctgttgtgaaattgaacctgtaaaagaaaagggttgaaagncctggtatgttgctctgtatgggaaaaactaattttgttncgtcagggacaaaattactaatccctttttttcccccttccagcccaaaaaaagtttgggtttttaacccca

SEQ ID NO: 703675 - DNA, 1134 bp, Homo sapiens
gaagcagtgctgaaagagaagagatccttaggcaaagactgttgaaacccatgctgccaggaaaacttacctattgaagctgttctatcacagatatatggtacactttgctggagcttggctgtgactctcattgagacgattacgaaacccaccttgaacacaattagcaacatattcctcatcttagcctgcaaactctaacacgcacaaactgcaaccaggctcttagccaacagcactggcactactacttgcgtgactgcagccacagcaagcaactggccagagcaactactacctcaacgtggccgtaccaccaatcaacacaccgcaccagctttcgcctcctctgactactacccccacacaatcatcacgcctgcacccgcaacgcttactcctcttactaaacccactgcatacttatcaactgccctcctctataagccctctctttacccttcctaccaagcttcactgctcccacagaccctcactttcacatgcccaaagctacgctcactccacaaccttctcccatctctcctcggcctcttccactctcactcgttgcttacgctccacttacctgcacacgctcctcatctccccttaagttccgaacctggtcaaaccatcggggcgtcaacctacacaactaacgggtccctactactggccgctcggcctctggcggcttccgatttcaccctcggaaaacaactgcaacaggcccctttgccctctcccaacctaccttccggcgacacgctacattccacaagggaaccttcgttaccaaggcggctatccaactttcacacagacggaaagcgctcaatgaataccgcccctgggaaagcccttcttagtatccccacctcattctcaggcacctgcccctcgtagagccacagcttgacgtctacttttccgtcgtgcgcgtgaaacgttcgtcccctctgaagcccccctttcatcatccccagggcttaatggaccgtcatccgcttaaagagcaaagtgtacacagccctcgttcacacagagacatcaccaagcaaaagtatccgccagatgtgacatacccgataagttgttcgccaatatgttcagattttatctttatca

SEQ ID NO: 703676 - DNA, 327 bp, Homo sapiens
  misc_feature (310)..(310): n is a, c, g, or t
gtcctattgccaccctgattcctgccagaattagttttattgcttacttatttctgatattgttgggtcctaggcgttatagattgtgacccctggaggggtaagagtggccaacgttcattcatgtcagttccaagttttttagatacaagggaaagctattccttaaagaagaggtgactccttagggagttggagtggttacagggtgtgacttcttcccattcatagtcacaaacaaaaatgaacccaactagggcaccaagagaagccctgcggagtgcgatgtttatacttcattgccaggtgngtctatagagatatttt

SEQ ID NO: 703677 - DNA, 1263 bp, Homo sapiens
  misc_feature (660)..(660): n is a, c, g, or t
agcggggctgcgcgccagcggacggtgagacgctggcgcagcgcgatttgtaggctccgagccccgtgcgttccaaaccctcgacgcctgtgttgccaccatgacgtgcggctagcactggtctactccggggctcttcgtgcctcttctgcgtcctgcgcgctggccgtggtgagtctgctacggacctagtttgttgactttgtggcttccgctttgatgtggcatggtttcctgacggccgacttcgtcccttcatgtggtccagcctgggtcacttgggcctagcgtatcttccctgttcctgctgggttgcgagcgcgatgcctgaggtgctatcatattattactctggtctcctcacatcattgtgtaggagtgactgtaagtgcccccaggtatcaagacctaaagtaacctggttcagagtactcattgctttcttggtgaatggccttgttgggctccaattctgatcgtgggcagtactaattctattggggcaagttcgttcatttgacgtcaacaacttggccattgaaggctcgttatcaaggtaggcgcaacatggacccccgaatagaggcctattccgaggcccaatccgggatacgttagccccacttgccttggggccttaccgttcgcgaatgttgtttnggcgagggcctttggctctcttacactcggttatgggccctttgttccgttaaagccttcgttcctgttggtggcagggttcctggcgcgttgcgccgcccatttccggttggtggccccggttgggggtggcattgcgctccttggccccgcattgcttcgagtgaaaacctcccgatggcccatcgtttttggctaaagagcaattccgtcaattcgggttgggcagggaatccttctttgggggcaatgcggcgccaaatttgggaccctttccgtttagggggggcggttcaatcccggagaccgcgcaaaattgcgttttcacgagaaacccttctcgaggaaagtttgcagcacggaccttgcggggctggaaccctaagcaattgtcgctacgctcgttcgttgtcgccctttgtgtgggcccaacgctgtgtcctttgacccttttaaatttttataagttggccgctggcgcttttgttcccgtggcggacccactggttgttgcaaccagtggtgggtgcctccttttagcggctctcctgcggagggcccctgcggggttcaccggcgctccctccctgttgtttctcccct

SEQ ID NO: 703678 - DNA, 110 bp, Homo sapiens
ctcggtacgccatgggcggactgtccgccgatgctgctgatgcagctgggcgaagtggtctacggcggggctcggttccggcctctacggcatgctggcgttcgccaggc

SEQ ID NO: 703679 - DNA, 414 bp, Homo sapiens
ggtgcgcagtgcggagcatggtgctatggtgtcgatggaagccgagctgaactatgtcgtcagcacccgtctagattcagactctgcagggactaaccgacttcgccgtcggagacccgatcggcctgcacatgactatcatgctgacagtgaatatagatgtcagatccttagtaattagcgttgggatgactaaggtgctcaggctacagcgtctctcacacacgcgaaccacggagatagctatgaagatgaacatggacatcagagttatgagctgagagctgtcgtatatcggctgacggtttgagagtgtgaacggcatcagccagtggttactacagggcacgagtaccccccttattcgcatgctagttatcatcgacgacaggactactggactagccgatggcc

SEQ ID NO: 703680 - DNA, 495 bp, Homo sapiens
tgtatatttaacatgggtaaattatgtggtaaagaaattataactcaataaagatgctttaaaaaaaaatgcacatggatgcatggggaagacattgtcaccagggagatgcccagagaaaaacaaaactgggcttataggatagagactggcagtgagggagactgacccgggttcaggctggaactgagacccagatggcgtgaggaagtactcttaaagaccggggcaggccgggcgcggtggctcatgcctgtaatcccagcactttgggaggccgagatgggcagatcacctgaggttgagagttcaagaccagcctgaccaacatggagacaagcatggtggcgcatgcctgtaatcccagctacttgggaggctgaggcaggagaatcgcttgaacccaggaggcagaagttgtggtaagccgagatcgcgccattgcactccagcccgggcaagaagagaagcagagagaaactgtgtctcaaaaaa

SEQ ID NO: 703681 - DNA, 527 bp, Homo sapiens
aacacttacttcatgtatctaaatcacacttcctttctgaatactatatgctttcaaagttgaaatatagtttttcatttatgctgatcaggaatttaagttcaaaagggtcagactggaagcaatctagcttttctaaaaaaaaaaaaaagtattagattttaaattatatgcatacacccaactgactttccttcaactgcctccactctcaaaaaaaacttcaacttgtggcagatctaatggcaaatgaatacaacctggctgacctgctctgcatgttattaaaatacacagtagctctagttccttacaagtcagggattctacttccaaacacaggacaaatgtggaaacttctctcttacaaattgggttgtggtgatcatttaagtatcaataaagacaggaattgccttaaatttatccagataaatgaaatcttattattggctaacgggtgctgattctgacgtctacataatcccacagctgtatcctttatgtgattaaactatgtagaaatt

SEQ ID NO: 703682 - DNA, 481 bp, Homo sapiens
gtccccgtaaaaattaaagttgaagaaaaacccgttataaaatacttcagggtttgtcatgttttaaaagattttttttttagaaaaggggggtttttccggtttttttttttttcaagactgaccttttttaaaaggaccccccagtttctttgccaatttccccccaaatgaatttatttggggttttatcaagaattgattcaaatttgatttttatgtaggaaaaccccccaaaggatgggcttttcaagcttgtcaggaggccccttatgtttatttgtttccaaacctggaaagttaactcaacccccttagttaaggggggatttgctgggttgggtgttttcccaattaattaaaaagttaataaaaattagggaaagatttttttagaccgtaaaaatttttagtttaggatttagggtttaaacctccccgaaaaatttattaaaaaaaaagccttaatttgggttttgga

SEQ ID NO: 703683 - DNA, 1534 bp, Homo sapiens
  misc_feature (446)..(446): n is a, c, g, or t
  misc_feature (564)..(564): n is a, c, g, or t
  misc_feature (675)..(675): n is a, c, g, or t
  misc_feature (748)..(748): n is a, c, g, or t
gtatcccaggctaatgtcagccgaagctgcaaatgctcgtgcgagagattgtgagagccgctggcgggctcccatgagtctaggtgccagtgtctgggactagtagatagctacgtggtagggcagagctgttagttatcccgagaggatgtcaggccgccgtcatgacactatagggagctatctcaagtatcacctgaatcctcagatatctgttgcgagaagcagtttataccattattagcgcctggagatcacctgagggaactgtgacgcgtagagaaattaggctttgaaagacactggacgactgtacatattcgtacactatgactccgtgcagagaggatgcaataagggtaacgagatatcagcccctgtacacggacagatggtgtggtggtatgagtgcatgtacctatacatctgcacagaagtgcgacaantcaatgtatgggtacccaattctgtctcaaatctgtagacgcacagcccattaacacacacaatcagtccaagtctgctacttcgcttcaattttcactgtgaattgacgtctcacanacacaaactgcagacaggccagtcactgtgtgttgccacagactgttatttccaataacaccaactttcctagaaagcagtgcgtgactgaaattgggtctctaaccccantctccattctttgtttcacgagggaaccgcggggacgattctcccacacaattttatccaacatattccaagnggaaggaactggaagttcatacaaaggcggacaacctttaaccatgaacacacttggttaacctttccccgcggagagggcttactttcacttcactggaattacttgcacttgcactacttgtctaaaaggttgggggattacccgcaatcttaaattgggacgaaatataaccagaccctgtgaaacgtggaaagtaagactatggcaactctttcacaaaagagcaattcaggtagaattgggggcttctatttgtcccatttggccagatttgtaaaattaccctccgaggatcttccccttgtgtcgaccaaagctaacctgtggggttccagggaaacagcttttcaattggggagaggttcataaattgttcgttgcgcgggcggggaaaaccaattcgggggctaccatattggtgccaaaccaccctcccatctgtgtgttctggaacgttgcggatataacgaagcgtgcatttgcactccttgcaagaagtattggcgcgggtaattccaactgcgactccaacaccggtgtaccgcacaccagtgggaaatacccctttttaccaacagcggcccccccagttttgtcgacgacaaccattggggctcattggtgttgctcatataccccaagacaaggatctacagaagcggctaacattatttattcccagagggagataacaggcgtactcaccagggcgaggtcaggtaatgtgtttcccataacacaacgagccatcgagtatctccaaagtatacaattattgtaacc

SEQ ID NO: 703684 - DNA, 717 bp, Homo sapiens
  misc_feature (571)..(571): n is a, c, g, or t
  misc_feature (633)..(633): n is a, c, g, or t
ggcagcgggctgaggcaccttcgggcaacacccaatactcggggctccgctcggcttcttcgcgccgaagatgcctaagaaggctggtgcgacgaccaagggtaaaagccagagcaaggaatccagagtagaccacttgcctctccttaggtcctgtggcagttgatcctaacaggatgctgtcaccatagctccatcgctatgcgagaatctggactccaaacaaaatgtctgtaacagattggagcagcagatggctgtaaatgtagctattgcatgcacctccatcatgagggaagaggcgtaatgctgagctctgtcgtgtagtctttccaaggtcctagaactcaggaagagtgatgtggtttgggactaagggtggtaaatctcgtgaaaaggtggtgaagcttttgggttctacaactccagaagagatcttggagaagatttaaaagaaggaagcctaaaaaaaacataaaagcaatgatagatgaggccgggccgcaggtggctcatgcctgtaaatcccagcatcgtttgtggaggccgtggtggagcggatcacctgagngtcaggagtgcgagaccaggcctgagcaatacggttgaaaccccatctctagaaaaatacgnaagattagccaggatgtgatggggcatgcctgtaatcccagttactcaggaggctgaggcaggagaatcactttgaacctgggg

SEQ ID NO: 703685 - DNA, 435 bp, Homo sapiens
cacgatgacgagtcctgggtgaagatctgtgggagagtgttgtggaataccacatatacccacagactggaagggaagagggtcttggctgtgtctggtttcactcataaagtcttctcattccccttttccttaagacacgaagctggaatgcttcttccttgggtgaaaagaaagggctcaggaccagctccctctcccctttgctatgtgggtcagctcgattctctggcccactgtagcggtccaaggatcagctaactctcaaaataggctcagcagccgtgctttgtcacctccagccaagccctgggctggcatgtctgctggctgctggaggggccctaattatatctgtgttgcccccccaggtagaagcagctgggacagagcacggctcctggcaatctgtggtgggctggaaggagtgcctca

SEQ ID NO: 703686 - DNA, 304 bp, Homo sapiens
gccggtttaagtgggttgtaaattttgggggcttaacccttttttgccccctttccgatttttttgactttgccccattttggcttttttgtaaggttgggcccactttttttttacaaacagccccttccccccccccgtttttccaccatccggaagggccctgggttttttgggtttttttttttttccaaggttccctttgtccaagggccctttccggtttttccccttgtttccgtttttttttggaaggggttcctttttgtcctttccggaaattaaaccccacccttttttttga

SEQ ID NO: 703687 - DNA, 602 bp, Homo sapiens
aggttacggcagaatacactcaacacggggtagtttcagcccaactgtaaacatcagtgcacatgtattgatggcgccgtgggctgattcctctgtgttcccaagaactatctctccccaacttgggctgtccaagcctcgggtggtcaaagttaccgggcagtgctgcgaggagtgggtctgtgacgaggatagtatcaaggagcccatggaggaccaggacggcctccttggcaaggagctgggattcgatggctccgaggtggagttgacgagaaacaaatgaattgattgcagttggaaaaggcagctcactgaagcggctccctgtttttggaatggagcctcgcattctatacaaacctttacaaagggcagaaatgtattgttcaaacaacttcatggtcccagtgctcaaagacctgtgggaactggtatcttcacacgagttaccaatgacaaccctgagtggcgccttgtgaaagaaacccggatttgtgaggtgcggccttgtggacaggcagtgtacagcaggctgaaaaagggcacgaaatgcagggagagcaagaaatccgcgaaacagtcaggttacttacgctggg

SEQ ID NO: 703688 - DNA, 406 bp, Homo sapiens
  misc_feature (5)..(5): n is a, c, g, or t
  misc_feature (49)..(49): n is a, c, g, or t
  misc_feature (92)..(92): n is a, c, g, or t
  misc_feature (99)..(99): n is a, c, g, or t
  misc_feature (326)..(326): n is a, c, g, or t
  misc_feature (354)..(354): n is a, c, g, or t
  misc_feature (369)..(369): n is a, c, g, or t
  misc_feature (376)..(376): n is a, c, g, or t
  misc_feature (385)..(385): n is a, c, g, or t
  misc_feature (396)..(396): n is a, c, g, or t
caccnagcatggcacacgtatacatatgtaactaaccctgacattgtgnaaagttaccttactgcataagccagtggttctcagcaaggagnaatgttncccaccaaatttgacaatgtctagagatcttccttgactgtcgtgactaaggagatgctactgacatcgagcaggtagaggccacagatgctgctaaacatcctaccatgcacaggacagcccccacacaaagaattacacacctaaatgtcaacagtccactgctgagaaagcctctataagctaacataagagaagagcttctctggttaagcaagtcaaggtgncggagagaatggagtgccttatgagagnaatacaccttgcagncacatgngcttccatnccatgtggagnccaccacctc

SEQ ID NO: 703689 - DNA, 1400 bp, Homo sapiens
  misc_feature (399)..(399): n is a, c, g, or t
  misc_feature (948)..(948): n is a, c, g, or t
  misc_feature (1108)..(1108): n is a, c, g, or t
gcaaatgaaggagagaagtataaacagatttctcaagcttactgaagttctctcatgatgcaatagaaaagggaattatatgacaataggaggagcaacaggcaagttaaacgacgggatggagcagggtggcgcgttttggcctcccccaatgggacatcttctgatactgtttggactgcgagcgacgcgacggaaggactgcaggaggagaacaggagacggtacaaatgcttgtacatcagctctcagtaaccctagaagacttatataatggatgctagcaagatagaactggcctctgcaatagagaactgttgcactttgctgaccaaaatgctgtaatggtacgaggaaggctacagtagaagcgagccacgtagacgttgtctgctcggncagactgggccgatgggtacctcggcatagtgccaaaattagagcaactttcatcgaagattaacggaccagtggtaattgggtttcaagtcgaacaagtacaggatcctggtgttagctgagtgagaagtgtgctcaagggacactaggctgtgggagcacgccggtattccaagggtcgctatacacaggaccttacgaatgttgatagagagagacgcttgctaaacggggaaaaggaggacagtaactaagaatttccggaatggaagcaagaaggcacaaaccaattttgctaaggaaacgcttatcaagtaacttgggcaacaagacgatgcgtctattggaacaaaaggcattggggactctgcacgaacacgaaattgagagccaattctcctcgattgctgcgttggacacaggggaagcaacgcgaaaagaaataccccctattggcgaactgtgcgcgaaggcccgcgaggggacggttgttaattgtacattccattctggggttggttatgagaaattccaagagagaaggggaancctcaagttgacggtggatccccgtttacctattcctgtaaagcggaacgtgggaagcgaaataggtaaacaaccctctatatgtgcccactgtgacatggtctaatttgggggacccacttaacgtagggctttccgtgtgtttggaacagagcgcacncttggttgggtaggtgccctttgtcccccatgtaccaagcgcccatatagactattgtgccgtaaaggcttgcgtcttggaaaaccagaaaggcccggtagaaacagcgcaattgggttcaaaggtgcgagcgctcttttccaaagtccccaccgcggcataccagcgcaacatttgggtgcccacgaggccattgtgcgcaggaattatgtcgaaaggcggtgtgtgttacctaagatgagtgaacacgggcgagtgtgcgccacaggtgtaatccgtgtataggaaccca

SEQ ID NO: 703690 - DNA, 384 bp, Homo sapiens
tgccctgctgcatgagagcagacctgtctccaaaagcaaaaacacaacaaaaactaaacactgatttgcacctaggcttaagttagtactatatccagttcggccaggccttggaatgagctgcaataacgacgttgtatggtctccttaatacagagctagttcttaaaaaaaaaatagtaatgcagacattcattctatcaagaaatcctggagtagctcttattgcccaggctggagtagctcttattgcccaggcgggagtagctcttattgcccaggctggagtagctcttattgcccaggctgaagtagctcttattgcccaggctgaagtagctcttattgcccaggctgaagtagatcttattgcccaggctggag

SEQ ID NO: 703691 - DNA, 306 bp, Homo sapiens
gcccgggggggacgtgggaggggctgcggtgggtgatgggtcggtgatgggaatgggtatcaggttgccggggagtttccactcttctctggtgatgttccttccgctcccgttcctctcccagccatgctgatgagcactcctttcaggccagctgtctgcagagccttcagttaccagttttgggtttctagagctgcctatcgtgtgctcgtttccgtccctgctgcgtggacttctacttgcgtcttaggagccgtcaccgttcacccaattaccgcatcgcagagtcgctttctcgcccat

SEQ ID NO: 703692 - DNA, 1444 bp, Homo sapiens
gctgccgcccagctgcgcagacagagcccatgtgtgagcaatgagaactggtgctgtgtgctggtgtggtgctcacgtgcctaggtgagtgcgctggagtgcatcttggcagatgtgctgggtctgtggcttggtgcccagctgtgtgtgctgctgtgagcatgtcatgtggctgcagtgtgtgtgcatgctgctgcactgtgcctgccatgccctgcctgcatgccttggagctttccttgctgaacctctgtgtggctgcccagtgatctgtgctgtgctggctgacgtgctacctgtgcttcaatggatggtgctgttgcttggatgaatgctgcatgctgtggctgtgtgctttgctttgcatgctttgttggacagctggaatgctggctgctgtctctcaacctgagactgcgtgtgcttgcatgcttcgttctgatgtgccaatgtgtgcactgtgtgctggcctgtgctccaatgtgatgctcacgcctttctgcgcctgccactcaactgggccctgttggcatgttgctggttgcgcagcgatgcaacactgtgtgtctgtgccggcatacttactttacaactgactttgtgttgaacccggacagtgcgcgtgctgtgcctgcagcgatacgggacatatcacggcttagccgccaccacttgggaacaggaattaccctgtgtctttgggaagacctgccccacggagttcacccgcgtaagggccctttgggtacaaatggttacagaatgataaccactgcaatgtgtcccaattcccaaggaaccatgtagcctgtgtggcgcccggtggcatgaatgccctacgagagaaccagggggagccccgttacggatgttcccttaaaaagcacagcctggggtggcggcaacacaaattcgttattcactttacatttgcccttaacgcgcgaaacaagccattcgatgttagcttgaagggtccaaggggacgaggacgttacggattagataaccccttaccttgggccttagattgaggaggagccacccggcgccttcggttagcctacaccaactagtttggcgaccaaaggtgctttggtgtacaaatgctgtgcccatttgtgggaacaccaggatttgtttgtgggcatcgggaacaagcggacgtgtcatgtgggtcacaggcccgttggtaacacgtgtacacacactttgcgcaaccgcggaaaaggtcccccattgtgggcgtacaatggtgcacaggtggctgcggcaccgagacaaacgcaggtgctatttactcgagcacaagcgatggggcactcctttgaacgccgacaattgtacacacgcacattctcagcagaggagccccaccatgtgtggcaacatttgtcgttccccccacggaacgatcacctccaagcgtgacaaccagttgtgc

SEQ ID NO: 703693 - DNA, 165 bp, Homo sapiens
atgctccgtgtgcaggcctgaggatgcactgagctggcctgcttcccaggacacttagggcacagaggcaggcagcgcctacagttcaggctcagtgagtgttgggagtcgccaaggcacatcccacctgcctgagccccgccctccagcagcgactgacagcgc

SEQ ID NO: 703694 - DNA, 146 bp, Homo sapiens
aggctcggctctccgactctctcctctgaaacctcctccacagctgcagccatcctcccggctcctctagtctggtccggcgtctcggtccccgggtttcagagacaacttcccaaagcacaaagcagtttttccccctaggggtg

SEQ ID NO: 703695 - DNA, 348 bp, Homo sapiens
cgacgacttcccctcccctgcaagccatcgcccgtgatcatcacgtagctcccgcctatgcgtgcccctgagctgtcgcaccgtgcgcgtccttcctccttcctctcccggctgccatgctgcccggtgaggcctggtgaggccacttagcctcttggttggccaggcccaccaggaagtcaccatgacatgctccacccgccctgttggcacactcaagcgggagtccacccctgcctcagtggtggcccagtctcggtttgcattcttttgcttttgggacgtgccctgggaggcaagggctgcgatgctgggacctgttgttgcttgcaaagccagaggtcccag

SEQ ID NO: 703696 - DNA, 149 bp, Homo sapiens
  misc_feature (99)..(99): n is a, c, g, or t
gtagcaagggtagcgatgagccgagtcttcactccggggcaccacctgcagaaatattggcccgacgatccttcgccggaatgaggtcacgtgccggtngcaatagtcagtcgacgcggccgccgaatttagtagtagtaggcggccgc

SEQ ID NO: 703697 - DNA, 614 bp, Homo sapiens
  misc_feature (340)..(340): n is a, c, g, or t
  misc_feature (350)..(350): n is a, c, g, or t
  misc_feature (510)..(510): n is a, c, g, or t
cagcggaacaagcaatcgtcctaccttggcctcccaaagtgccggggttgcaggtgtgaaccaccatgcctggccacctctatgtcttgttccttgcttttcttcttcctagaatgttctgctccaacttagtctcagatcaaagttaacctccttagagaacctccaaggttaaattagcaacccctcccatcattcttcatctcaccactctcttttactttctttttttcctgtttaaaattttctaattaataccaacatttgaaatgatcttgttcatatattaatatgattggattcttcctcagtaaaatgtttgttttttgagtgcagagantttactgtcntgttccctgctgtctctctagtgcctagaatagaagactcaatagacacttgttcagtgaacaaatggactttgcagggagaagattccaatggaattctttagatggtgggcagctttaaaagagtaaagaagtgtaggctctgtccccagggtctctngccaggaaaggatgggggacccctgtggaaagctgggtgagagctgcccctcagggcttatgtgtttcctgggcatttgggtttttaatggtttgcttggtttt

SEQ ID NO: 703698 - DNA, 665 bp, Homo sapiens
ggagagagaactagtctcgagtttttggtgttttttttttggagcctgtgcccaggctggagtgcaatctcagctcactgcaagcgccatctcccgggttcaaaccattctcctgccttcagcctcccaagttagcttgggactacaggcgcccaccaccacgccgtggctaagttgtcttggtattttactagtaaagacggggtttccactggtgtttgtgttagctcaggatggctcttgatctccgtggcctcgcacacgactcaggtgtcctaatacaccacatatttccgaggccgaagccaaatgttgggtgactcaggctaacatgtgacgacctcttaagtgggcgctggcagttgatgttgcaggacaccacggggagatgacgtgtagtgtgtcctgactccatccgtgacttccctggaaaaggatgggcagcaagatacaggacgaagggtctcgtccctccaagaaacagagcgccagacagctccagcagcccacagggggcctctagcccacagccacgcacacacggggttcttcattctacacacaatcataaagggtttgggcgcccctcgtgcctcccagccttgagcacaagccgtgggtaagccttggtacaaggaacccagacgctgagccggaaggggggt

SEQ ID NO: 703699 - DNA, 361 bp, Homo sapiens
tatttcaattcttaaaatagaacagaggaaatgaagtatatctataggctaggggagattgtcacgctcaagtttcacagagtatagatgtatcgacagttatggtccaaggcatatttgtctaagcttttacaaaaatgttctatttagtacaaatacatgtgtctttcactcatgttcttatgttgttaatctacatttcccatttgaagtcaccagatttttgggaattgtgtaccagatatggttctaaaacctttacattattttacatctgatcacaaatgtggtttagattctgttgcctataactagaaataacttcaacttgaacccttttgttatcagattaaaatcatgt

SEQ ID NO: 703700 - DNA, 277 bp, Homo sapiens
gacccttcctgaaaaggccaaaaatagccaagttactggtgcagaacaatgaagtgagtgatttgacctatcataattatgatagagacatgataattaagatggtgtgatatgagtattagaatattccaattcatcaatggaacaaaatggaaagcctagaaataaattcacacatctatagatggctggaataggacacaggttgcactctaggttcagtgggtgaaacatgggctttttaatcaatggtattaaaacaattaggtagccaaat

SEQ ID NO: 703701 - DNA, 128 bp, Homo sapiens
gcatttgagagagtttttgttagggaaaagagagagaaatgtgtagacttgagtttgagacaaatgtggccacttaacagctaaacaaatcagttaacctatttgagtttcccttctgtcgtcttctc

SEQ ID NO: 703702 - DNA, 711 bp, Homo sapiens
agcgggcggaactttccagaaagctcggtgagaggcggaggagcggtaactaccccggctgcgcagcagctcggcagctgattcccggtccctcacactacgcgggctcagctccgcaccggccagtcagaacgctggtgaaacgaaacaacgttaactacgatgtcctcgggcggtcataacccaagtgcgtactacaggacagcaattgacacaaagggctgtatagagaaactggccttgcaagtggaccagtcctggagtaagaacgcaaatgacaggagagaacgtttacatcagactttctctacagctgactgaacgtcctcgtctgatgcaaaagaaacagggacatcactactgacgacaaggacggagcaagcaggcaagttaaacgagggtggagcaggtggcggattcgggctcccccagtggacatcttagatactgtttagtcgggaggagagaggaacggatgcagagagaaaggacgaggtacacaactgttggtacaatcagtgtctgagtaaccctagaagacttactataactggtgcatacaaggacgacctggctctgcaacgagaagtgtgattcgtgagcacactgttgacggtagaggaggtaacgaacaggacgcggtagagttgctgatcccaacttggccgaggtacttggccatgcacataagcaattgcttcacaataggcc

SEQ ID NO: 703703 - DNA, 86 bp, Homo sapiens
gcttggttccgagcgtcccgggagccgggaagggaaggattgtctgcagggattggagcaaatatccagtggggggaactcctcct

SEQ ID NO: 703704 - DNA, 822 bp, Homo sapiens
tgcgacaaggccgacgagtcggtgtccatccgggagttcccccctatgggccccacgtcgagcgggtttcagtaaggccattgagtggcgttgaccacatccccgggtgtcgggaccccagcgaggggtttctggacagccactgtcccgtgttctggccataagtgattatggcgaccacgtgggcagccccagaaagtgctctgaaccctattctggttcttaaggggtgcgctgagtcataacttgatgttttgctccattaaactctgttaaaattagtttttcttttcgttaactattctattcatagcttttttttcttttttcagagaccagtctcactctgttgccccggctggagtaccatggcacgatcatagatccactaccaaccctggactccccggctcaagctagcctccccgcctcagcctctgagtagcaaggactgttgcccatcatgcctgggtaatttttgtatttttttgtagagataagggtctcactttgttgccccgggtggagagccatggctattcagaagtatgatcattgcacagtacagcctggaactcctagcctcaagggatctttcctccttggcctccccaagtcctgagattttaggtgtgagctaccacacgcggccctattcatagcttttactttcgtttgtaattgtgcatttgaacagtgcgttattgaatgactgactttcacactagtctggaagttcctttatggcagacaccttgttttcctagggtttagcaccctgactgtcaccaagaaaacatgccataaatatttaatgaacca

SEQ ID NO: 703705 - DNA, 885 bp, Homo sapiens
gccgtcacgatggggcgtctgtattaaacaccgtgctgaggggttcctatgctatctctcttccgaggttctcacagagttcaggttcccctccagatcttgcaccaaaagctccctctgaggaagcttcttgtcctcagttcccatttctccttataaggatgagccctggcaatctctggaatcagaagcataccaggcgcgatatggttctcgccccgtctgggctgactaccgccgcaccacaagggtggtgtacccccacagcggactcggaagcacatgtattcgtcggactacagttgtgcgaatccctgcccatctgtcgagatcccacgtcgcatgttgactttaggaacgtgaagctctgtggagcaattgtctggcccaaagggtatcatcttctatgctccatacaccggcgtctgtgtgccgcagcacacgcggttgaccaaggccatccagaacgccaggctcatggtctcctcatttaccaaatccccaggttgcccacggccaccttgattcagtacctctcatggggctgtgcgtgctaatccgccacgccccacctgctctcagttgacccgtgtaccatgtaccccctgaccagcaccgccgagacgactggtcgcttccgcggtttcaacgcttctttcacatgagcggcccactgtgtatgccagtgccctataaacaggactgctttcatgcgacagccccaatggctgagactgcttgcaacgcaggtgggtcctctgacccgttgacgacggcgtctgccgatggcactggcggactcttcacagaaccacattggcccatctaacagggcgcaaatcaacatatgacaccggcccctgacacactgcaactcacatcccg

SEQ ID NO: 703706 - DNA, 714 bp, Homo sapiens
  misc_feature (230)..(230): n is a, c, g, or t
  misc_feature (233)..(233): n is a, c, g, or t
  misc_feature (244)..(244): n is a, c, g, or t
  misc_feature (305)..(305): n is a, c, g, or t
ctctcaagtttgtctttctgttttgtcctctttgatttccatcttgatagaaagtttatgatactcaagagaacaaattgccccttgacagggtgtcagaatcgattgtactaagtcacgcacctttggcagttcaaccgtgttcctaatagttaaaaccataacccattcgggaggtgtccacaccgtcccttcccatccttccagtttgccccacacaactggggctntgnatgactggacnggtacagggaagtcagccaacacgatgccttgggtcacttcacctctcaaggagattattntcatcaaccttgtcttactaatgaggaaactgaatcacagagaggttaataaactttcccaagttcaaaaaaaaaaaaaaaaaaaaaaaaaaaaaatttgggggccgccgggggcccggaaaaggtttttaaacccttttcggtggggcgcggggccccagtttagtgtatctggtagacacggggccataacgcggggtcaccaaggagaaccccggggcacagagaccagaaggtgctcgggttttcctacacatattgaaaaaaaagcgccccgggggacaaaacccgagatgtttccgggaacaaatccccaaatgggaagtccagagagacacaataacggggttctaacacacacggggagtcacaaagcaaatccgaattcaatttagccccctctgggcgg

SEQ ID NO: 703707 - DNA, 413 bp, Homo sapiens
aggggggttaggggtgtcttgtttttcagttgtcctgttttgtatgttatttttttttccctttgccttttttccctttaatttgaagggaatgggagaaagtggggacaggaaggtggaagtgtgactttggttaatttttttagctcatttccacgaggggggccggcccccctttggaattgggtgattcacacaattgcaatagtgggtcacggcattttaacctgaaccaaagttaaacccggtgttgccaccatgcacaatggcttgccagatttcaacactgttgctcttgaaaatcggggtctgaaaaaacgcacaagagcccttgccctgccctagctgaggcacacagggagacccagtaaggataagcacagattgatttgtacaatttgcagatgcagatt

SEQ ID NO: 703708 - DNA, 180 bp, Homo sapiens
ggtgcagaggtgctcttgggtgcagaggagcgcgtgcgataatctgcgtgcgatcgtcgataactgtctatgcgaagaccgacgcagccatgagtacctgcggggggttcactctgtgccacaaacgagcgaaccggtttaccaagggagctcgaataactgtcgcaccgtctgcacagg

SEQ ID NO: 703709 - DNA, 195 bp, Homo sapiens
gcggccgcctactactactgctcgaattcaagcttctaacgatgtacggggacatgcctgtaatcccagctacttgggaggctgaggcaggagaatcgcttgaacccgggaggcggaggttgcagtgagccaagacagtgccagtgcactccagcctcggtgacagcgcaaggctccgtctcaataactaaaaaa

SEQ ID NO: 703710 - DNA, 115 bp, Homo sapiens
ctcgagctggtaccctatactgggtccttgaatttccacacgaattttaggatcagtgctaatttctgccaaaaaaaaaaaagcaagctagaaattctgagaaagaaactggctt

SEQ ID NO: 703711 - DNA, 565 bp, Homo sapiens
  misc_feature (11)..(11): n is a, c, g, or t
  misc_feature (44)..(44): n is a, c, g, or t
ttcattccagntccttggaagccagatagaagtttctcttaaanctgaaggacttcttaccatatgatccagtaatgatactccttggtatttacccaaatgagttgaaaacttaacacacacacaaaaaaaacgaacccacacatggatatttttaagagtttcagtcataattgccaaaatttgaaagcaaccaagatgtctttcagtaggtgaatggaaaaataaactgtggtatatccagagagtggaacatttttcattgttaaaaagaaatgagcaggccaggcacagtggctcatgcctgtaatcccagcactttgggagttcgaggtgggtggattgcctaaggtcaggagttcgagaccagcctgaccaacatggtgaaatcccgtctctactaaaaataaaaaaactagccgggcgtggtggtgggtgcctctaatcgcagctactcaggaggctgaggcaggagaatcacttgaacccgggaggcggaggctgcagtgagcagagatcacgccattgcactccagcctgggcaataagagtgaaactccagctc

SEQ ID NO: 703712 - DNA, 847 bp, Homo sapiens
ggtcgtcggggtttcctgcttcaacagtgcttggacggaatcccggtcgctcgttccccaccccggacgcgcgtcgcatagccagccctccgtcacctcttcaccgggacccgtcggacggccccagaggcccccgtgcgagcgacgtcacgagactgcgcggcggctagcccacgcgcgcagcgcgctcgccgcgcatcgtccgtataggtcgccgccatgacgaccgggtccacctcgcaggtgcgccagaataccgaacaggactcacgaggcctgccatcaagccgccagatcaagctggagctctacgcctcctacgtttacctgtccatgtctttactactttgacccgcggatgatgtggctttgaaggaactttgccaagagtactttcttcacccaatctcatgaggcagagggaacatgctgagacacagtggatgaccgctgcagagacctaccgaggtggccgaaatcttccttccaaggatctcaagaaaccaggactggtgatgactggggcagagcgcggctgcaccatgcaatgggccgtgtgtgcactttaacattgtgggacacacatcccattggtgagatcgggctcacttaactgtgacacctggcacaaatcttggggctactgaaccagaaattgacccgccaagtatggttgtagacctaccacttggcagagatccccagtttacccctgcacttgagcggccagggtcaaaaagggcgatcccatagcgaacgttcggcggtggacccaccgcgatggaagcaaactttgccgtcgcgcaatgtgtccctccgccaccgcatgtaaaacaaacaaaccaat

SEQ ID NO: 703713 - DNA, 803 bp, Homo sapiens
agcggaactgctcccagtgtcagtattgccccaggtgagcttttcaaacttgacatgatgcctactcatttctttcctcttgtgctaatagtcctagagcctcaggctgacttctctagtgtcctgtaagtttcagttaatgtaacagaaacctcttctccaccctacacacattccttctcttttctttttctctttctttttttcgttttttttttttttttttctttaaaaaaaagaacactacggcggaatctcaactctaaaaatcttactgggacacacacctggaatcttaagcattagggaacgtcgaatcggggactttttccggtcttacacattcaaagctcctaattcgcatgtacggctaccttcttgggaaataggggacggtcctcttggacactccgtgcaaaattagatgggccgggccaagtctcggatataggggggacgacttggggaagtgcccccagggttgtccgggattgacctgtaaattgaaagggaggcgggaggacgaagaagggatgtggtacccttttcggggcactcatttaacacagtggctctcccgaattggtcagtacggggacactcgtcctgagatacagttatctatcccttttggacacggggcttggacctggggggtctccatcggtgcaacgggggatctgatacccaccaaacagctccatttcgccatgcctgctggtctcgagtatgtctggatgcccacggccacgggggtcccacaaagagggcaaagacctcttgaagcttggcctacagactag

SEQ ID NO: 703714 - DNA, 289 bp, Homo sapiens
tggggtatgtggtgactgtgccctgcccaggtcagagggcaggctggcgagtggggcggggccaccccgtcgtgcctgacactgcgcctgcacccgcgtccccacagggagccgccccttcactcacaccataagtggaccgcgggccgagccccaggaggtggtggtggacaggccaggaggggcgaggcgggggcatggggaagcatgtgctgaccagctcaggccatctctccactccagttccctcaactccacctacccaatctccctcacagtcaccactaca

SEQ ID NO: 703715 - DNA, 818 bp, Homo sapiens
tcttctcctcctcctccttggcattcgctcttcttgctcctgcgtcttccccgctgcctccgctgctcccgacgcggagcccggagcccgcgccgagcccctggctcgcggtgcatgctgcccgggggggctgaaggatgggagccgtgctccgcctccccgggactgcggtgtgcggtgtgtctccggctcgttcgggcgcctgcgtggagcgacgacggcacccggatgtagccgctgtaccgggagcctggactgtgcccagaagaggcggagcaaggtgtcctcctggtgcacatgcctgtgggacatgccttagcccttccaggaggacagcaacggcacatggtgccaggatgcgcagaccatccaggcgggggcagacccagccaactgaagaagagatgacttactggccagagaagttgcaccgaaagggagtctggacatccacacacagacactaacacaaggaacaaaaagcggcatcacggaaagactagcaacaacagggattcaatcggaacggggcgacagggaacttagaagctaggactcccaacaagccaaagaaaccaaggcagaagccaaaaaataaaggaaaacacactgcgacatcagaccagaacaaatgagacacaaagaaaaccggcaagagacctgaaacaacacaaaaacaagaaaaacaggaacaaagagaagacaaagaaaaaaacaaagaaaaagaacagaggaaaacagaaagaacacaacgaacaaaagcaaaaaaagaagcacaaacaagagaaaaaaaacaacaaaaaacaaacagataacac

SEQ ID NO: 703716 - DNA, 370 bp, Homo sapiens
gtaagaccaaggggtatccttgccttcgaagatgtcccagtcttatgtgattagggaggctaggcagggagtgggtatctgcagacattagatgtctgtagatctggcagtatttgtctagggtgccaagtactgctctgtgagggtgggcacgggaggaggagtggaaggtggaaataagtgtttggcaaagtttttggactcccaggttaaggccccaattctagaccctccagctcagcccttcaggtttccctagagttcctgattatatatccttcaggaattcgccagaaatggaatttaaacagttcttaattatcatcagtgatgccaataatttcaatttaaactttccccaatctagaaa

SEQ ID NO: 703717 - DNA, 351 bp, Homo sapiens
gtctgattgagtccaaaactcagatacagaataaatacttgttttctattattcagtttactctctgactgagatcacatcctactataatgacagaaagcatgatctcccctcctcctaggtttcgggtctgggcttgtagcctagtttcaagctgttaaaggtttgtgtcataatccttagtctcattgggcccaaggcttccactgacatcctcagcatctctatgtgcttaatctttcaaattcccattgcttcaaattaaatattcattccactttgggacaaggcccagacatactacaagcgatttccatccagaatatctgtctctctgtcacatatcctggc

SEQ ID NO: 703718 - DNA, 246 bp, Homo sapiens
tgaggatatttaacagttaattctgactgacacccatatggcggggaccttgaaaggtcattggctccacgaaggctgagcccattcctttttatatagtatagagacgcataccctccagactgacttaagactcagtttcctttccagtgaccggaccagattaactttgatatgtctcacggcgattcatattattagatataatcatcctctgatacgttgctatgcctgaatatcctcaca

SEQ ID NO: 703719 - DNA, 192 bp, Homo sapiens
aatggagtttaggccagtcggggtccccaaaaaaaatccccccaaaaaccccccaaaagggagaaacggtccccccccccgtgctggaatgacagcttttttcctgctaggcagttgggccttttccgaattttttccaatgcccataaatttggacttacatcttttaattaaaacccccgccactccgga

SEQ ID NO: 703720 - DNA, 659 bp, Homo sapiens
agaattttgaaaccttttatttatattttgggcctaccaatgggcacttttaaatgggcctttctgtcagaatgttaaactcaaaaatttgcccagtttgttttttatccacacaaaatcctagaaagggtttctgggtagtcttcattaacccaaatctttgggaatgtttcactcttactgtaggatcttgaatatgttttacaataatgaagcttccaagtttttatgccgtgcattcattgtaaactattaattacatttgttttaaaaagaaagctgggttatacaaaaataggagagacttttgggagcaggcaaatctgttgaggctcagtatatcttatttgcttttgagactggtgtcattcctttaaaagagcacacagcacatgaggcatagtaatcatctgtcttggttacctctctaattagaaatttgtgttcgtaaaactggccaattttcacaaactttcatttgcattattaaccgcaggttttttccaaaacattttgttagtggtttcaacaaatgccggagggtgggcatttattaaaaaggggttttggtaagcttgccaccttcttaaatttagggctattctggcttttcccgatttaattagatttttaaggccccaagaaaagacctgtccatg

SEQ ID NO: 703721 - DNA, 209 bp, Homo sapiens
atttttgggtcccgttatattatttaaaaaagggttcctttgtaaaaattgtaaataaagaactgtatagtttcccctgttttcatcttgggggtggttattgcttaaagctttttaaacttggacccccccctatggttaaataaggtcttaaaagaaatgtaaatattctgttaataaagttaaaaattttaatgatttttttttta

SEQ ID NO: 703722 - DNA, 875 bp, Homo sapiens
  misc_feature (1)..(1): n is a, c, g, or t
  misc_feature (176)..(176): n is a, c, g, or t
  misc_feature (243)..(243): n is a, c, g, or t
  misc_feature (286)..(286): n is a, c, g, or t
  misc_feature (296)..(296): n is a, c, g, or t
  misc_feature (299)..(299): n is a, c, g, or t
  misc_feature (323)..(323): n is a, c, g, or t
  misc_feature (336)..(336): n is a, c, g, or t
  misc_feature (369)..(369): n is a, c, g, or t
  misc_feature (382)..(382): n is a, c, g, or t
  misc_feature (384)..(384): n is a, c, g, or t
  misc_feature (386)..(387): n is a, c, g, or t
  misc_feature (389)..(389): n is a, c, g, or t
  misc_feature (433)..(434): n is a, c, g, or t
  misc_feature (437)..(437): n is a, c, g, or t
  misc_feature (444)..(444): n is a, c, g, or t
  misc_feature (464)..(464): n is a, c, g, or t
  misc_feature (471)..(471): n is a, c, g, or t
  misc_feature (482)..(482): n is a, c, g, or t
  misc_feature (499)..(499): n is a, c, g, or t
  misc_feature (503)..(503): n is a, c, g, or t
  misc_feature (507)..(507): n is a, c, g, or t
  misc_feature (709)..(709): n is a, c, g, or t
  misc_feature (867)..(867): n is a, c, g, or t
naaaccaactatttaaaagtatcaaacttttaaacagttctttttccattctgataaaaaatgttataaaatcaccatactccattcatgtaccttagatgccttttaggataagacctcaaaaataattaacctagtctcaaaaatccattcaagtccaataacaaacttttaanaacccacttaaaaagacttgacactagaacaagtatacataatcagaacatatactttatatatttngtaatgtgctaggttttctcttacctttgtgatttgggatttnttggcggggnttncacacacacacacacatatatatnactaagagggggnaaatttcggcgaacaaatgcgaacctgtggggngggtgggtttttnananngnttcggtttatcagatttcgtcttctctgccgttttgggttggcnnctnttggttntttggggggtttgggctgcngggagtncatttcttgcnccttgggtatgtttggnttcngccnggcttccggttgtgcccgtagcttccttgaggtcattttccactttctcctctgtcactagatatcgtgcgtaagatatttatccttgatttggaaaagcctaaataaaaagcttcagttttgaccttttaatttataaaactccactggggaatccatttaatttttatgcatgtccacaaaaatattttctttcttaggnatcaaacacttttattgggataaagatccttcaaagtttttaactcttctattagagttttattttgattttccaggactgcaactcggttttccaggcatttcacatattctttcttcttactgcgacattctcgagcagcttctctgtgtttcatnaccttatt

SEQ ID NO: 703723 - DNA, 607 bp, Homo sapiens
  misc_feature (16)..(16): n is a, c, g, or t
taccgctattaggtancatatagaacccgttgggtttaaacaacggctgtcggtcggaattcgggatgcgcacgcggagacaggtgttgcggccgcagcgccgcgcgctctctcccgagtcggagcctcggcggcgccggccaggaccgctaggagcgcaggagccccagcgcagagacccaacgccgagaccccgcccggcccgcggcttctcccgagcaagcaaaccgccaagtaaaatggattgggcagctgcacatctggggggtgtgaacactccacagtgaaaatctggtcacgcctcttcatttttcgcattatgatcctcgttgtggctgcaaaggaggtgtggggagatgagcaggccgactttgtctgcaacaccctgcagccaggctgcaagaacgtgtgctacgatcactactttcccatctcccacatccggctatgggccctgcagctgatcttcgtgtccacgccagcgctcctagtggcccagcacgttgctaccggagacatgagaagaggaagttcatcaagggggagataaagagtgaatttaaggacatcgaggagattcaaaccaaaggtccgctcgaaggctccg

SEQ ID NO: 703724 - DNA, 102 bp, Homo sapiens
agacatgtagcgaaacaagaacatatggaaagctcgaaccatgaaagtgtaataaatctaaatgaggactgggtgcagtggctcatgcctgtaatcccagca

SEQ ID NO: 703725 - DNA, 565 bp, Homo sapiens
agtcaataaatgtgatataccacataaacagaactaaaaacaaaaatcatgatcatcccaatagacacagaaagagcatttgacaaaatccagcatcactttatgattgaaatcttcagcaaaatcagcctagaggggatgtaccttaaggtaataaaagccatctatgacatacccacagccaacactatactgaacagggaaaagtggaaagcattccccctgagaactggaaaaagacaaggatgctgactttcaccacttctattcaacatagtactggaagtcctagttggagcaagcagagaagagaaagaaataaaggcatccaaattggtaaagcggaagtcaaactgtcactgtttcttgatgatatgatcgtatacatagaaaaccttaaagactcatccaaaaagctcctggaactgatcaatgaattcagtaaagtttcaggatacaaaattaatgtacacaaatcagtagcactgctataacccaacagtgaccaagctgagaatcaaatcaataactcaattccttttacaatagtaccccccaccaaaaa

SEQ ID NO: 703726 - DNA, 222 bp, Homo sapiens
  misc_feature (118)..(118): n is a, c, g, or t
gcttgaggcatgggtggctgggctagacagacagtgttgtcagcaccacccaccctctcaggagacctggatgtcggagagggacagtgagggagatgagagctactctgtgcctgtnagtcaggctgcccacctggcagggaggggctgtgggagcagagctgtgggagccagggtgccggctaccctggggttagaagaggatgttcggagagggagagg

SEQ ID NO: 703727 - DNA, 222 bp, Homo sapiens
ttcaagtcgagattctgttcctgcgcctagactgacactgaacaaaccctcccaaagcgattgctgagtgttagtgctggttgctgtgtgcaatgtgtgctgtggtggactccaaaggtgagagtgcatgaagcacagtcctgtgacctactgtgcgcctgattgtccctgtgctgtgggactcctcatagatgtctgacacttgcagtgctatgcaaatgc

SEQ ID NO: 703728 - DNA, 427 bp, Homo sapiens
  misc_feature (34)..(34): n is a, c, g, or t
  misc_feature (191)..(191): n is a, c, g, or t
agcagacacagaatgaccctggagctttgctttntattgaccccttttgacggcaataggtgcccacttgctacaaggccccctttactgtagctcacccagcatctcttttcccaaccagagcgcgccaaactagcttcatatattacctccctattcttcccaaacccaacaaacaacaaccaacaaantgacccactgcactagttattattacatattcttagtcttttttgtacatggagactcacgcttaacatggtttatacaataggttatccctccatttatattgcagaataaatattaacaagcctgttccagagactcccaagcagcctgggcaggcagatgtaccattgttagtggtgtatgctcggcctcgtggtccatatattctgcactttcatatttgccaccagaatgg

SEQ ID NO: 703729 - DNA, 245 bp, Homo sapiens
aaaactatagataacacattatcgaaacatgaagcaactatgtcattgacaagagtgagaggtataatgcttgcccacacagatcagatgggtcatataccctacatatactatgcttatcttgcttacttagctgtctctctgtgattgatggtgtaaagtatcaggtaatttagccccagtcggacaggctatcttcaccgaagcgccgcacataatgtcttacgtacgacgatagcacacac

SEQ ID NO: 703730 - DNA, 190 bp, Homo sapiens
tttcagatatagggtgtgctgttcctcagctacaagatagtgcctgaggacgatcatcgatccaatgaatctgaaggtatactgtgttatgattgtgcgactgaatacacactggtgactaggatgagccagatggtgagatcctgtcccttaaaagcgtatctgctgctctgaatttggtattttaaca

SEQ ID NO: 703731 - DNA, 792 bp, Homo sapiens
  misc_feature (27)..(27): n is a, c, g, or t
  misc_feature (74)..(74): n is a, c, g, or t
  misc_feature (89)..(90): n is a, c, g, or t
  misc_feature (98)..(99): n is a, c, g, or t
  misc_feature (132)..(132): n is a, c, g, or t
  misc_feature (135)..(135): n is a, c, g, or t
  misc_feature (158)..(158): n is a, c, g, or t
  misc_feature (166)..(166): n is a, c, g, or t
  misc_feature (215)..(215): n is a, c, g, or t
  misc_feature (217)..(217): n is a, c, g, or t
  misc_feature (258)..(258): n is a, c, g, or t
  misc_feature (264)..(266): n is a, c, g, or t
  misc_feature (295)..(296): n is a, c, g, or t
  misc_feature (334)..(334): n is a, c, g, or t
  misc_feature (399)..(400): n is a, c, g, or t
  misc_feature (434)..(434): n is a, c, g, or t
  misc_feature (457)..(457): n is a, c, g, or t
  misc_feature (491)..(491): n is a, c, g, or t
  misc_feature (507)..(507): n is a, c, g, or t
  misc_feature (654)..(654): n is a, c, g, or t
  misc_feature (760)..(760): n is a, c, g, or t
tacagtttaatatagtatctatcttgnatccagcttcattgaagtaaactgaatttaaaattaaatacaaaaanaagaaaaaagtaaanntgcagaannctctaaagagttgttggacggaaagagaaaaanggngtttcatttgtattctctttgcnagatccangcctaccgcaaggtcacagcacagttttgtatagaatgttgcagaaaanangatggagaagccactactgctgctatgaaggagtgaggggngcgggnnngggggtcccacagaacctgctttaaaaannctgctgctgaacactggccttgaaatgaacaccagganaatctgtgtgtgatgggagtgagccacctcagatgtggagggccctgaagaatccatataaaaannaaggctcttcacttcctcttcttccttctctctncctccccaccctcagaatccaanagcagtcgtttgcaacagaaattttttttttttnaagaaataaagaaaanagtgacttatcccgctacccaagcgtgtagagccgcgcgctgtactgcttccgatatgtgccacagagcagcaacgagaagtggacagagccgcaatggttacaactgttagaggttatttcttaaaagataaagaacacctaaggnctgagtctcatatgctcttttgagcatttctacagcatgcgattctaagagtaaacccacccaatatggcaaacaatcaaaatttttaaaatttaacttagaaagnctgagatcattattttcaaaacattgatttgt

SEQ ID NO: 703732 - DNA, 361 bp, Homo sapiens
gtgcggtgcaggttatatcaccatcgatgaccatccggtttgagacgccatgcatgtcgatactgctcacttgcctcctgcaatgccctctttccttgtccaccttccccaaccttcgaataagcttctgcccgcagggggttctgtttcattgccagagtgctaaagtgagccgatctgtccagaccttcgacactggaagtgtatagatgcaccgtactaaaaagcacaccagtatagtctggctctatgtatccagagctgctcatgcagtgtctctcagatggctcacaatctcctgcctgctatactcgatgtgccaactacgatacaccttggaaggacagcatacgtaacgaag

SEQ ID NO: 703733 - DNA, 392 bp, Homo sapiens
atactagaggatccccctgcttgctcaggtctcccagagtgttgggattacaggtgtgagccaccatgcccggccccaacatgtgcttcttaaaagtccatttgtggcctggcttggtggctcacgcctgtaatcccagcactttgggaggccgaggtgggcagatcacgaggtcaggagatggagaccatcctggccaacatgatgaaacccgtcgtctactaataatacacatgattagccagacatggtggcgggtgcctgtaatcccagctacttgggaggctgagtgcaggagaattgcttgaacccaggaggaagagattgcagggagctgatatgcaccactgcactccagcctgggtgacagagggagactccatctaaaaaaa

SEQ ID NO: 703734 - DNA, 135 bp, Homo sapiens
tcactcacaggtgaacagcaacagttgactccctaagtgaatgcagacatagaccagagacgcctgaacactctgaaccaaagaccacggagttttctcagagggagcaccttcttcacactcttcccacaggca

SEQ ID NO: 703735 - DNA, 503 bp, Homo sapiens
taatgcctattctgcatctactagcataattgtgagtttttgtcattgcctctgttatatttcgtgaattacaattaattgatttgcttatgttgaaccagcctctgcatcccagggatgaagccaacttgcatcgttgtgcataaactttttaatgcgctgctggattcagtttgccagtacattaatgaggattttcgcattgatgttcatcacggatattggcctgaaattttctataagttgttgtgtcttagccaggttttggtatcaggatgatgctggcctcataccatccgttagggatgagtccctctttttctgtcgtttggcatagtcttagaaggaatggtaccagcttctctttgtacctctggtacactttggctattaatcagtctggtactgggctttttctggttggtgagctattactgcctctgtttcagaacttgttcttggtctattcagggatttgacttcttcctggttgggacgatgta

SEQ ID NO: 703736 - DNA, 723 bp, Homo sapiens
gtattaattactacagtgatgataccactcaatagggcatgccactactttgcttaagatgctaattatgaagcagtgctcacaggcatgatttaactagcaaattagtagatggactttgggggtctgtcactggtggaacagtatgtaagacttgaatttctattagcaccacagtctgcctatcaggtaagtacaccgtaaacagtatgtttctcaggagcccagaagcagttcagtttcgaacagaagttggcagactgcgaaaccaggtatgtattacgtaagcgctctgggtcaaagattaggtgtttaatattaagcacgtagttctggtaaatatttagaagtctggcattgtagaacacaaaagccttggtacctgagctagatatgtttcattgttaagcagaaattgagctctctggttcaagcgtgtatttgacacagttgtggctctttatatttatcgcgtagcaatttactatttattctcattccctcttcgatctcactcgcaacaacgtgtccttgcagtgccgcttggcatctggcgacttcacgcatgttgtgcaactgttacttgctctctttgtgcccgaaaaataatcgcttccaaaaatttaacgcatggttcccgttttttttcgaaagccggttaaagctaagggggggttaacgggggttggcccttaacgggctcctttgggggggccacgaatt

SEQ ID NO: 703737 - DNA, 550 bp, Homo sapiens
acgtagccgagagcagctcagtactctaggatcctcagtttctttgtagcatctttatgtccatgagtacccaatgtttaactcccactaataagtgagaacatgcggtatttggttttctgttcctgcactatattgcttgggataatggcctctagctgcaaccatgctgctgcaaaggacatgatttcattctttttatggctgtgtagtattccagggtgtatgtgtaccacattttctttatccagtcctccattgatgggcacctaggttgattccgtttctttgctattgtgaatagcactgtgatgaatatacgagtgcatatgtcttttgggtagaacgattcattttcttttaaaatccaaactccttaatacagcctagatatcctatatgatccagctctgctgtcgtctctcctcccatgtaactatacttgctttctctcctttctataaacacacaaattcctgttcctgcctctgggactctacccctgggaattcccactagcatccccaaggatggtagtgaggttccatcg

SEQ ID NO: 703738 - DNA, 423 bp, Homo sapiens
gcagaagggtaaggatgaacctctccctcctttgccgctttagctttagctggcaaacaaacctgctctgtaacctcttctgttacttcgttatactccccttcctcctcatcatcagtgtgggttccaaggtggaatgaaccagagtccacccttgtcccattgttaccttgatgcctccgagctccccttcttactgaccatggggactgctttaagagtactcgggtgtcctccagcttagttccacgttctccaactgtcgctctggtgatccttcgacctggattcgagcccccacgtatgggcgctgcttgccgagaccagcttggtcagggagacactaacccagtggtgctagaggaattaaagacacacgcacagatatagaggtgtggagtgggtcagggatctcacgccttc

SEQ ID NO: 703739 - DNA, 282 bp, Homo sapiens
ctggcggatcccccagcggaacatgcaatctcgagccatttctttaatctggtggtgagtgaaactggggcactccatctgctaagggtagaacgttgtcaggagagtagctggtgataatttcctttagacgttcttccatctgagctgtagcctttgggaacctttctttgtagacatggttcatcataattatttcatggtcacagcaggcgggagaacgtccagggctcagacttcgggaacgggggcgcatcggcgagttcctgcatctgttctcag

SEQ ID NO: 703740 - DNA, 375 bp, Homo sapiens
  misc_feature (128)..(128): n is a, c, g, or t
  misc_feature (173)..(173): n is a, c, g, or t
  misc_feature (326)..(326): n is a, c, g, or t
  misc_feature (337)..(337): n is a, c, g, or t
  misc_feature (365)..(365): n is a, c, g, or t
ttcaattcataattgttggtgcaaaagatttgcttgctatggattcaaatggtctttctgatccttacatcaaaatcacaaatctttctcaaaaaacgaaagtgattaagaaaactttgactccaacnttggaatgaaactttttttgtgcattttccagaaaaaacaacccnttgaattagaatgttgggaccacgatactttttcagatgattttattggcaaggcttccatttctttggcagagattccagctttggcagaagttgatatgtggatagatatgaaaaccgaaaaaaggagaatttgcaggaaaagtgaatgtnaaatttattanggcttaaaatccagcatatttgtttganataatttatt

SEQ ID NO: 703741 - DNA, 599 bp, Homo sapiens
  misc_feature (62)..(62): n is a, c, g, or t
gtgggagtagtgaaccccattctcgccagcccgccaacgttgggtctgttggagcccaaganggagaaggaagaggaggagctgtttcctgagtcagaacggccagagatgttgagtgagcaggagcacatgagcatctcgggcagcagtgctcgccacatggtcatgcaaaagctactcagaaaacaggagtctacagtgatggttctccgaaacatggtggaccccaaggacatcgatgacgacctggagggagaggtgacagaggagtgtggcaaatttggtgctgtgaaccgggtcattatctatcaagaaaaacagggcgaagaggaagatgcagaaatcatcgtcaagatttttgtggaattctccatggcctcagagactcacaagccatccagccctcaatgggcgctggtttggtggtcgcaaggtggtggctgaagtgtatgaccaggagcgttttgataacagcgacctctccgcgtgactttggcctcatttcctggacttgcacttgccccttccttcctttgggttttgtaaagtgttaaccgtggtgtgtccctgggaccaggcactctgcccaacccaccctg

SEQ ID NO: 703742 - DNA, 479 bp, Homo sapiens
  misc_feature (40)..(40): n is a, c, g, or t
  misc_feature (359)..(359): n is a, c, g, or t
  misc_feature (376)..(376): n is a, c, g, or t
tttgcaacaatagtgataactgtatataattaatttatgnacgctatgattttaaatgtgttagctaatgatttggactggtaataccatttaattatacacatttcacccgttaaaaatagtactacacgagacattaacagaataagctgaatataagcgggcagattaaagaacttttgttgagggccgtaaaaattgacagtacagatgccagattaattggccaactggctgctcagcggggtataccgcggcaacgctgggccccggtaagcaccggccgcgcacccgctatgcgcggatgtagcctgcctagagctgttgcactagggggaccctgaccccggacaaatttnggggggcattaatacanaagcgcgactgagtacgggagaaagacgtaggggacgactaaaaatagcggcaactattgaacagcccacccccagcgagccgaagaggggcgggttgcggag

SEQ ID NO: 703743 - DNA, 1242 bp, Homo sapiens
gtcaggtgactgagattctggcgcagtgtcaggtcagaaagggggcttgggctgtgaaagatggcagtgtgctggagagtgaggcaggggtggggtgggagcgagattgtctgcccatgagtgacctgtgctctgtggtgacagttcccagtacaccatgtatacctgtttgggacagtcttgcctctagcctgtaaccaggctgcctgtatgatggctgccctgtggttcctgcatagatggcgctcccttctccactcatggagaaccatgggtgcagatgcagtgtgcttgtgcccttgtgcatgatggatctccttcaagttgaccctgattccgcccattaccagcgcatgcagccgaaaatgtatgagtggccatgccaatatcttggtgcccctgagttacccaagtcatgtagggaaatgtggacgatccatactcacgcgaccagtgcatggccccattgggagggctgacctggtgcatgaggatccaggggagggccagcggacaaggggcgcctgagccgggtgatcacctaggagcgtggaacaggcaagggtctgacgaaggataaaggccgggcaggcgatgcggcaaggggaccagcacatcgatcaggcagagatggacccgagaagcatgagcgagcaagggggaacaatcggacgggatacacgggggaacagagatcagcaagcccagcattagcaagatcatacagaaacagcacaaacaaagacacaagaggcaaccaattcgatagaacaagggcgttaaggtacatagccccaagaggagccaagtcacagtcagaaggacggacaaccgaggagcaacgaattgaaatgcctagggtaaggaagagcacctatgaaagtggatagcggacaagacgaaaacagtggatcggatagccacgcataaatgcagcccccggagaataagaacgcagaactggacattggcaagcggcccccagaaacaaaggccagggaaacgaggatgtcacccctagggagaatgtcttcaaaaggaacttaaagcaaacgcagcgatacacagagaggcgcataaacacgcaaccgggcattaggacgactacactagccccaatgaagtacagcacgtaacaacacacacccaacaggcgaaagcgagcacaacaccgagtaaggtgcagaagcaagagaatgtacacagacagctgacgggcggctgcaaggagagcgcggcaga

SEQ ID NO: 703744 - DNA, 120 bp, Homo sapiens
ctgtagcgattgggttccgtgtactacgcagaactggtacctgtgagcaggtgcctcaccaggtgccctggatagagaaggccccagctcacctcagcctgccagacctgagcaagccag

SEQ ID NO: 703745 - DNA, 1027 bp, Homo sapiens
aagcatatcagacccccagtttcagtgaattgagtataaatattgcttcttgtcacctctgtgggacagtaatgccttatagtggcactagtcaccttaagtagcattcaccaccatggttgcaggtgcacataacagctagccatgtggcacatttgcctttctgtgcatcatatttccattttgctacaactatcatacatcacatccaagttatcatgtattcaacacaccgatcggctatctcatcatatactagcttgcaggcacagctattgcgcgcatatcactcagtgatgtgtggacctttttctattgttgtatcacatcatgtctattcatgtcccccgacgtcacactctctacatatctgtgcttcaatcgtatcaacacacaacacacacacacacaacacacacaacatgatgcgtgcagacaagcagcagcacggcatgtggggagctctctccaacggtgagtgagtatcgacaccaaaggccagtgtgtctcctttcagcacacactctccctgtgaggccactatcagacggtagagaccacagtctaaccacgcaccacactcaaggacttttcccgcacaaacagtatgagctttgaaaacactctccacacaaagtgcacacatgtacagatccacatgaagaatcgcactgtggagataccatatacgccgatgtatcgctttacatctctcccaacctatttacattttgacccccacatactgcaacacccttctacacaccctcacataccatccacaacatccccgaggtgccaccatacttcccttattcccccattacttctcccctctatctctctcacatacattctccacaaaccaaaacttatgtctataccataaccatgtcactaacacaacccacacctattatctaccacaaccatgcattgtaccaataacacacaccttcactcgctcttcaactatctaacgccccaccaaccgcctcctttactcacccctctatcatcaataatg

SEQ ID NO: 703746 - DNA, 347 bp, Homo sapiens
acctggtggtgtgtgtggcaacgaccgtggtgctcagacctggccgttcattggctgagggaagcatcaaactgatttgaggtgttgaaatgggggtttcatggtagttcggcaaattcgcgccctgcttagctcgttgctctgggcgtggcgtcgtgctcgtctgcaagggaggtctgcttttcagcttgtgcgcgcctgtcttcgtgaaggtgccaaggggcctcgacacttcgcgaggcggatggctgcatatgcttctggtggatcggcctctccaccaccggtatctttggatgcctacgaaagctggcactccgcattgccgcagctggaagttcccgctg

SEQ ID NO: 703747 - DNA, 297 bp, Homo sapiens
gggctggtaacacgctcataggcactgagagtaatatatcgctgacctgcataagtcagatgggaagacataaaggacctcatctttggttattagtgggtgaaaagaatctccatctgttccattcgtcatattgcaccttgtctgtgatccaccagctcaagtgacgtttgcccattcccattccacaacatgttgtacagttaaggtaactgtctgctccagttcagaaaaacaatgtctgcatcattagtcccattatgctcaataggaataggccaacctagggagagatat

SEQ ID NO: 703748 - DNA, 645 bp, Homo sapiens
ttagcagtgtctcacacctctaatcccagcactttgggaggccgaggtggacagataacctgaggtcaggagttcaagaccagcatggccaacatggtgaaaccccgtctctactaaaaatataaaaattagctacgcatgggccgggtgcggtggctcatgcctgtaatcccagcactttgggaggctgaggcgggcagatcatgaggtcaggagatcgagaccatcctggttaacatggtgaaaccccatctctactaaaaatataaaaaattagccaggcatggtggtgggcgcctgtagtcccagctactcgggaggctgaggtaggagaatggcatgaacccgggaggtagagcttgcagtgagctgagatagcaccactgcactccagcctgggtgacagagcgaaactccgtctcaaaaagaggcaggagaatcactagaagctggtaggcagaggttgcagtgagctgagattgtgccagtgccctcctgggcaacacgagtgaaactctgtctcaaaatacaagaccaagtcattttccccataaacatgttatttagacaatacgtagcacataatataaattaagcggtctttataatgttgttgaacgaattttgttcagcaccaccttattt

SEQ ID NO: 703749 - DNA, 279 bp, Homo sapiens
gttaacgaattaccacaaccaacacctatatactagttgaaaatgccccaactaacatactaccgtatggaccaccataattacccccatatctctcttacactattcctcatcacccaactaaaaatatgaaccacaaactaacagctacctccctcatcaaagcccataacaataaaaagttataacaaatcgctgagagaccaatatgaaagagactctgtgcgcttcattcattgcgcccacgatccgtaggcctacccgcgcgcgagtactgat

SEQ ID NO: 703750 - DNA, 191 bp, Homo sapiens
  misc_feature (114)..(114): n is a, c, g, or t
  misc_feature (135)..(135): n is a, c, g, or t
cctcgcctttcagactgatcatttcgagaaagaccgtgcttctaaaatggtctttggagatggtgaaccggcccctcacggagtctgtgtagtacgtgttgacaccagcaacancagcataatcaccactgatgngtgagaccaatcgagtccctccctggagctgggggaccaagtcaggatagtcgtga

SEQ ID NO: 703751 - DNA, 127 bp, Homo sapiens
gtgctcagttcatctccacgcactatgacaacctcaaggagcagtgcctgctctccttcgccaatgcctcgtggactccagagtgtccctgtccctgctcaatggacgagatgaaaacaatgaacaa

SEQ ID NO: 703752 - DNA, 339 bp, Homo sapiens
ccctttttttttggggggccggcttgttgctccggtttggggttttttcccaaaaccccgtcccagggttttgcaggcccttgtgggggcgggctccctgggcagggttcccccgtgtggattgtgcctcaggccagggttccccaattggggtcctgtccggaaggatgggatttttttgggaggtggcgccggccaaaggggggggttcctagtttgtggggggaagtttttatatccatgcccggtccctcccccccccccctttttgttcggggcccaagggttttccattggttttttgtaaaaaaataaaaataaatgggggtttttccccca

SEQ ID NO: 703753 - DNA, 310 bp, Homo sapiens
tccccctcacccaggctggagtgcagtgacacaactacagctcactgcagcctcgaactcctggactcaagagatcctcccacctcagcctcccgagcggctgggaccacaggtgcatgcaaacacgcccagctaatttttgcatttttttgctgagacgaggtctcactatgttgcccaggccggtctcgaactcctgagctcaggtgatccacctgcctcgggctcccaaagtgccggattacaggcatgagccactactccgggcttacctccttcttaatctgaaatctacttctgttcccttctt

SEQ ID NO: 703754 - DNA, 200 bp, Homo sapiens
gggagctcggtaccgaatctcgacagtgtgcaagtttaaccattgagttatttcagtttctggtaattacaaataaagtggctatgaacattaaatatgggttttggtgtgaaaatagttttcatttgtctaataaaagctcaggaatgcagggcaggtttaacttcctaaaaacctgccaggctgattcccagagtagc

SEQ ID NO: 703755 - DNA, 2024 bp, Homo sapiens
cgtcggggtttcctgcttcaacagtgcttggactggaacccgtgctgctctgttccccaccccggacggacgcaacatagccagccctccgtcactcttcaccgcaccctcggactgccccaaggcccacgccgccgctccagcgccgcgcagacaacgaccgacgacagccgcctctccttagtcgccgccagtgacgaccgcgtcaacctcgcaggtgcgccagaactaccaccaggactcagaggccgacacatcaaccggcagatcaaccctggagctactacgccatcctacgtactaccagtccatgtacacactacataccgaccgccgatgatgcggctccgacacacactacgccaccacacctccttcaccaaccccatgacgagaagggaccactgcccgcaaacaacagactgaagccgcagcaaccccacgccggtggccgacatcatacctccaggcacacccccacacgcgcctgcgctgaccccgcaaagcgcgctgacacgcaacaggcagagtgccctagcatactggcacacaacacgggcaccacgctacctacactggacctgcacaaccaggccacctgcccaccaatgacacccaaaccgtgagcaccacaccagagacagcaatacccgcactgcccaagctgagcagcacaaagcatttggctcccacctcaaacaagcgaaacatagaacgccgcacaagaggccagcaaacactcgcaaagcccaccggcaaccgagatacaccacactagccccacccagcctcaccggacttacctcacttgccgcaacgatccaccacactccgcgtccacacctaaccacattcgtgtctgttatattcctgttgttcactcccacatccaccagcacaacgacaccactcaactcactaccaacacctaaccaacgaaagctactctacatactactctacacactaagactccacacacctccatcaactacaatccacaaacaactcacacttaaaccaacaaccacacaactcccaccctccgccttaccaccccaaccacactcatcaaacacaactcctccacgagaagaccaggacacaggagcaaccgaccacacgaacgcatagcgacgaacgacgacgacgagacacagcatgacctgcaaggcacgcacgcacagcggtcggacaccccacgagcagctcgagcgaaacgaagcaggcgacttccgcactagacagacgaatacgcaccacgccacacagacaccacagaacagaacgcacaaggatgaccgacaaccgacgaacggagcctacgagccgagaccgatccgagagagcaccccagagcgacacgcgcagccaagccccgaaccggcgaggacccgtgccgagagcaggagggcgaggcatggagcgcgtacagcgcacgtaccacacaaccgtgggacgcgcgagcacggcagcgccgagacagcagctggcttggagaagtgccggagcggcagcacaagtcggtgccgtggtggcgcagagcgtagcgagcacggtcgtggcgtcgatgtctgaggggagagcacgagaaggcagccgaggagccgagcagcgagcggaggggagagagcgaggcgggggccggcggggcgaaggcggagcgagtctagagtgtagagagaccagcatgggctagcgaacgatcgacaaagcgggagcgagcgagcaggtgatcgcactgaggccgctcgcacgacctagtcgcacaagtccgatgcagagggctaccgagtgagtcacgtagaacgtcacagctgggagccaacgcacgcgtagcgagctgagaaggcgccaatccgctgcactcagcacgctcaagaccgggagcgcccacccaactccacaacgcctgcacacccgcagccgcgcacgaccgcggacgcacagctgcagaactcggggacagggcagtcagagagtatcaagtagtatcgtcgatcgagatgaggcatgcgagcgga

SEQ ID NO: 703756 - DNA, 226 bp, Homo sapiens
tagacactcgtggacggtgtcttgagatatcatccgctgagggtgacgggagtagcatgacactcagtgaggtgtcttgagattatcatctgctcagtgtgtcactgggagtgatcaccacactcggggaggtgtcttgagacttatcatcctgctgagggttggacatgggagtgagcacacactcgtgggaggtgtcttgagattatcatcacgctgagtgtgt

SEQ ID NO: 703757 - DNA, 229 bp, Homo sapiens
tgtgcgagctgctctatgatgtatcccttcgactgtggactcagatgctggtaacggttacacggttgcctgattgtatggcaccccaactgccccggatgactctgtaagtaggagaggtttccttttgtctgagaaatggtaggacggagcttttagagaaggtctacgggtggggagcttccttgtgtccatgccctactgattttaaaatcgcaaaggaccattg

SEQ ID NO: 703758 - DNA, 595 bp, Homo sapiens
tctgtgagcgtgggctgtgctcttcattcctctggccgctctgtgcccgttggcttgcgaatccctccagtactcctgtgacgtaggtgtatcgtactagtataccccgaaggcaaaactgaggcactcagaggttacgagtccagtctatatagtatcatcagttgcagaaaagtgatatacgtgtttccttttagactgttgtaaaaacagtataaataagtatacatattatatttcaaagcaccctatgaagcagacactagatatactcagaataaacaaaaatgattgcaaaggaatacataaatatgattgaataaaaacctgattaatcatctacaggctcagaatacacttttaaacctacatgaagctcatacttccacatttccatcagtgggtaatgtctagcctgcaaatcatttgtaaacaactcagtctggtacataggactccacttttacatcatgcattgcctgaacaacaaaaactcaagagttgtgaatgccccaagaaagataatggaaagcccaaaagtgagtatgaccaacttcctgtggtaactactaaatgccaggaaatccgtgactaa

SEQ ID NO: 703759 - DNA, 121 bp, Homo sapiens
ctcagctgaccacagatgacgcagccgtcttccagtcacgacgtgtctcggcatcacaggtcaggccaccctcttcctgtcaccagcctttcctcagcatccacaggtcacgcgagtccct

SEQ ID NO: 703760 - DNA, 396 bp, Homo sapiens
  misc_feature (128)..(128): n is a, c, g, or t
  misc_feature (136)..(136): n is a, c, g, or t
tctacttccttggcactagttctctctgggcagcgacgcagcctttacagtgcactggtggctgctgcaatggacttggcagcttctagtactgctctcaaagtcaagatcatctgcctccttgggtntggcccgnggcttcagctgctccagctttttggctgcagcctcaatggcggctgcagctcccaggagctcattctcagcaatgactgtggggtcctctgcgtctacccattctgttcccttcatggcttcagcagcctggatgagctcagtgacggaaccagccacacgctttgaatgccctgtcaactgctgcttcagttctgggcttggcttctgcagggtcagcagtacatggtccagcagttccaggtagccattgcactccgg

SEQ ID NO: 703761 - DNA, 103 bp, Homo sapiens
aatcgagctcggtaccagatcccctataccatccctttatcggaaacaggatctcacttcgtcacgcaagtagagtgcatagatgcgaatactgcgtccctgg

SEQ ID NO: 703762 - DNA, 283 bp, Homo sapiens
ccctctgcacggcgttgctcctgagtgctattgcctctagtcatgctgccctccatcgccaggaggctacctggtttcacgtgcacctgttctctcagagtgagagctctgccctggtctagcaggtcaggttgggctggtgggctctttgcccgttagcgctcccttcaactccagctctgcttataccgtccgttcttatgtcttccacccacactcaggtagaagagactgagtgggtggtaaattatgctctgaaaaagaggacatgtgcgaatggcgg

SEQ ID NO: 703763 - DNA, 297 bp, Homo sapiens
tgtcaattcctgtattaagcaaaatattacactatcagctgtaaagttagacccgtcaaacgtgtatgattacaatcactggattggacgactgtgcgtattgtatgcttcacatcatcgaatcttctaacagtccgttataatgtcatgaggcgcacagtttacttagtcagataaaacagatatctgagtagatccccaagggacaatcctagttggtgaatgtctgtcaagctcttcccatatttgccttttaacactgtttagggaccacaattaacagtatacgccattatt

SEQ ID NO: 703764 - DNA, 428 bp, Homo sapiens
  misc_feature (56)..(56): n is a, c, g, or t
  misc_feature (88)..(88): n is a, c, g, or t
  misc_feature (100)..(100): n is a, c, g, or t
  misc_feature (107)..(107): n is a, c, g, or t
  misc_feature (109)..(109): n is a, c, g, or t
  misc_feature (113)..(113): n is a, c, g, or t
  misc_feature (121)..(121): n is a, c, g, or t
  misc_feature (129)..(129): n is a, c, g, or t
  misc_feature (136)..(136): n is a, c, g, or t
  misc_feature (162)..(163): n is a, c, g, or t
  misc_feature (170)..(170): n is a, c, g, or t
  misc_feature (195)..(195): n is a, c, g, or t
  misc_feature (205)..(205): n is a, c, g, or t
  misc_feature (210)..(210): n is a, c, g, or t
  misc_feature (222)..(222): n is a, c, g, or t
  misc_feature (229)..(230): n is a, c, g, or t
  misc_feature (237)..(237): n is a, c, g, or t
  misc_feature (242)..(242): n is a, c, g, or t
  misc_feature (254)..(254): n is a, c, g, or t
  misc_feature (259)..(260): n is a, c, g, or t
  misc_feature (264)..(264): n is a, c, g, or t
  misc_feature (269)..(269): n is a, c, g, or t
  misc_feature (279)..(279): n is a, c, g, or t
  misc_feature (291)..(291): n is a, c, g, or t
  misc_feature (294)..(294): n is a, c, g, or t
aaatattagggcatatattatgaggcatattatttatcctatccatagatgaaatnaaaatccaaatggactatttatttatttcccnccattccccccnggctggncntganttcctgtnctcaagcnatctgcntaccttggcttccccaagtcctaagnntatgggngtgagccactgcacctggccaaggntccgaatggnttganagataccttganatagttnntcaatgnaacanacacacatatgngaggnntggngaaangggaagaganggttgggctganganagggacctgggctttcctcagctcttctgccaaggtatctgtcctttcttagtgactcactgggctgaagtctagagcattccaatgggtgctggggatgggttagtgaaccaggaccagccctgcccttgggg

SEQ ID NO: 703765 - DNA, 961 bp, Homo sapiens
cggcgggaacatggaggaagctgctgaggcgcgagctggtgctgcagctctgtcaggcccaggggccactcggggggcgtgcgtgcatcatccaggtccgtatctacgacacggatcacggacgagtgttcgtgaaagtgaaccccaaggcggaggtcagaaggaatgtttgaatggtgagatggccagtttaactgccatcctgaaaacataacacggtgtagaagtgcccaatcccagtcaaggttctggatgccccaggcggcgtgagcgtgctggtgatggagcacatggtacatgagtgcatctgagcagttcatgtctgtcaaacgtcttggagcccagcgtggcctgatttagcaccttgataacaagatagcttggagatgatgcgcctgaaggaggctgggcacagtggggagaggaggtgggcaggaggaacgggcctttgtgcgccctggtttggatttgacgtggtgacgtgctgtgtgatacctcccccaggtgacatgactggccttatggagtgcacttgggtcgtgttctattgccctgtgcatgcgctttcagccccaggatggacatgtgtggagactggagtctggggcacagtggtaggccctcctagctttggtctgtctctgcagttaaagatccctgaacctgttccgtgacctggagatcatccccagccttactccacggggacctctgggggtggaaaacgtagcagaggattcctctgggccggtgattttttgacccaggttctttctacggccactcggaatatgagctggcaatagcttggcatgtttgggggctttagcaggtccttttactcccgctacaactgcaaaatccccaatggcccaggattcgagaagagcctcagttgtatcaggtctttcactacttgcacactggaacattttggaacggggcacagagaatcaccctg

SEQ ID NO: 703766 - DNA, 1091 bp, Homo sapiens
  misc_feature (358)..(358): n is a, c, g, or t
  misc_feature (403)..(403): n is a, c, g, or t
tggtatacaattgcagaaattgattatcatgagcttggaagaaggcttcagggtaacaatattggagcgcgatttcgaaaactgacttggcagtccgaggacttcaatggtgtaccaacgggcatatcacctatcacgaggaggatactaccacgtgcatttccacatacgctgcgggagagttctgagctatactttcatccattcagaatagaatacgttccgcgctagagggacgctggataagtacgaattgcctgtatgagtaggactatcatatacatgtcacccaatacccttttatcgtgaatgcacgggaactattacacacggtcaccaagtaagagcgtactagganacgctttacggtatcccaatagtagactgtcgaatgtgatgggtntatgttctaagaaaggcactatgttcctaatatcacgtgcggactacccgaaatattccctttttcaactcgtctttactatcgtatacactttgcgtattgacgctcgtataccaattctcaatgtagacacgaagctctttgaacaaggaacgaccttcctcaaataacgtcccctttattttacgtaaaggcatttcgcatataaacgcgccgattcgagatacccagatttcccccacctaagaggaaaattctctttgtggctcgctatttgctcgaaatataaaacttttactcatagttaaactcgcgtgtgaaatatagcgatagaactcctcacgagaaccgattttcttttgagtttggtaacacctttcccttgtaatagccaataggttggtactcgtgtggggtagaactcgtgtccaattttatgtaaataaagctaggacttcaagaactgtactcgttatgcgagtgaggtccccatggatccttattttaaatgatcgtccttaggcccaaaatgggctttctttttcgggagcaaaaccaataaacttggaagactcaaacccgattgggtgaatgcacgccctaaggtccctattatccaggcttacttccaagatttacttggctgattccccaaggggaccctaatatccggaacgtaaacagatgg

SEQ ID NO: 703767 - DNA, 245 bp, Homo sapiens
ggatcccagggttcgactatctgtagggggtcggctattgttacacgggggaccccaccacgcaggatcagtgaccccccaggacggtcacgcatgtgctccagtcaatgagtgtcatgattgcagaagcggtgactggacttgcatgtcatactccaggagaggccggtcacaaatgcagtaacatgaccaggatgggccggtggggctggtcaggtcacagtgtgagggacagactggccgac

SEQ ID NO: 703768 - DNA, 975 bp, Homo sapiens
  misc_feature (98)..(98): n is a, c, g, or t
  misc_feature (106)..(106): n is a, c, g, or t
tgtcattgtgtgtgagttgtggattgatatcaatagacacaaaaaaaacagtcgaacggtcgaaaaaaacaaggaagagcacaagagctattgttgtnttcgttancttatgacacggcgccagggtcatttgtgtagtgacttgactaggtcctcagaagactcttttccgcgatgagactttgctacgccgggggtttcacagacctgtgagggggtggttttacaatcgcgtgtgtactctcatcggtgctcgccttggttctcgtcagccggttatgtaatggggagttataacaccctctttcggagcgggagcgcttataaatgttgtgcgcgcaccgctttgatcgcttggtgagaagcgtgggtgttgttctctctcttttttaatggcccccctttggggggggggtgccctttcttccacgccgtgctgcccaaactttgtgggttatccactacgagggggtcgctgtaccactcccttggggccctccttcgtggtaggctatgttttacacggccctggtgtgcaacagtagtcaactcccccgtgtttctgccgcgcctctcaaggagaacaacctcgggtgggcctcctccccaggatgtcaacacacacggtctctccacgtcatggtttccacgggcccagagtcctcgctgctctctatattggggtcgcctcccataacattccgccatgtgtggcacgccccccccccgctgggcatcccctccctcctccaagggtgctttgtggtgacatcatccctccgttcagccccgcctcctcttgtcgggcgccctcgcgccgtcgttctgtgaatctttctgaccaggggcctctactacgacagtatcccccgcgggggcttaaatctgtttcttgacaacggggcggccgctgcgccccggttttttttgttccttttcccccaaaaaaaattaaacagatctaacatagacaac

SEQ ID NO: 703769 - DNA, 958 bp, Homo sapiens
aataccttcattgtgcggatggaggagactttcgttatcctgttctctgaacctcaccatgcatgagctgaaggtgctcccccgggacctgcagctctgctcagagacagcatcaggtgttggatgttgggggccaggatgaatgcggcgcgacgctggtgcagtctggatccccagactgtgggttgtcggcggtgcgactaggaacggggagaccgttccgaggtgcatgaatctatgtactgcgcaaggtggtgactgtcagacagtcacggctgtgacccggaagaaggacaaccgcgtttgcgtgtggccttgtgactcagagcagaacaggcgatccatgtgaaaagacgattcgtttaaagggtcaatgtgaatggccccccactccagggccgagcaatggggagattcagccatctcttccgaaggcttacgccttcctacattgcaaagaaactggtaggagaacgggggcgtgtatgtctgcgagaccgccacctggtgctggctgggggctcaagagccccgtgatgtgaccaacttcaccgtgggtggcttttgcgcctatgagtccccggatcagcagccccatgcaccccagtgctggaggtcagcgtggcggctttggtagcccacggtggcggcagtggtggcatgagcaggggccggggcccggagggaccaccgaactcatcggccagaccgtgcgctcttcccagggggccttccaacgctacatcggtgtggtgacagatgccccggagtcacggcccgtgtggggttgttccacctgccgacattcctgtcgacgtccgccggtcccccggggctcacgggccggcggtgctccactttagaggggcctttgtgtcccgaccctttggttggtccacccctttggtccaacctctcgtgtgggcccttgggtaggcctttatgtcccctccagggg

SEQ ID NO: 703770 - DNA, 555 bp, Homo sapiens
  misc_feature (4)..(4): n is a, c, g, or t
  misc_feature (76)..(76): n is a, c, g, or t
  misc_feature (86)..(86): n is a, c, g, or t
  misc_feature (99)..(99): n is a, c, g, or t
  misc_feature (104)..(104): n is a, c, g, or t
  misc_feature (106)..(106): n is a, c, g, or t
  misc_feature (117)..(117): n is a, c, g, or t
  misc_feature (120)..(121): n is a, c, g, or t
  misc_feature (146)..(146): n is a, c, g, or t
  misc_feature (245)..(245): n is a, c, g, or t
  misc_feature (309)..(309): n is a, c, g, or t
  misc_feature (320)..(320): n is a, c, g, or t
  misc_feature (334)..(334): n is a, c, g, or t
  misc_feature (368)..(368): n is a, c, g, or t
  misc_feature (502)..(502): n is a, c, g, or t
  misc_feature (505)..(505): n is a, c, g, or t
  misc_feature (516)..(516): n is a, c, g, or t
  misc_feature (519)..(519): n is a, c, g, or t
tganatttcctcttgaatagctccaaaccctaagtataaatatttttatacacacaaataggcacacatatattcntgctgcaggntgtcatgctcaanaaaangntcccacctggnttnnatatgcaaggaactgcgcatccacngccatccacggccatccacccatccatccaaccttccatccatccgcaacaagacagcagcaagttctgagcagtcaggccccagggttcacagcagtnggggctgggcttccagcaggctcatgattcaggccttaacccttgccctgggcgcccccaaggntaataacatcnctttctgggggggnggaactggggccgggtgggtgactgatatttggngggggaacctaaacagtctacggaggtgtcctgagatgggcgtaaagtcaaacagaccaagcacacaggtaacactgaaataggaaagagtaagagcttctgttcaggctggaggtgctcgtatggcgggacangcnaggggaaaagnganaggggcaacatggcagacataccacggttcctacag

SEQ ID NO: 703771 - DNA, 417 bp, Homo sapiens
gtcagtgatctctgctcactcgagtagctggatacagtcgccacaccatactggctgattttgtgttagtaggaaggttcatgggaaacatatagaattgttcaggtgtctcgaatccgacctggtgattcaccacttggctcccaagtgctgggattaaggtgtgagccatcgtgcctgcctaaaaaattttttggcttcatctgggtttgtgctttgaaaacaagtttctccaaatttacagatttcctgatgatgttgggtctgaactcaccaacttgattaggtctttaggggccgagggactagccagctgcacaggtgactggatgggggaggggcaggtgaggtgggtctacagaggtggcttcgcctttgaccttcatgctggtctcgggtgaggatcactatgagcca

SEQ ID NO: 703772 - DNA, 184 bp, Homo sapiens
tcccatgcacagttatggttcggaatccaccggtcacggtcccggggctcaacggcaactcagaaacttctcaggacggacaaactgggaggtatgcagggagttccagcgacggaaactggggcccgggggaagagaccgactggccggcttggcacaccccggcagacagcaccagtgatcg

SEQ ID NO: 703773 - DNA, 601 bp, Homo sapiens
  misc_feature (143)..(143): n is a, c, g, or t
  misc_feature (150)..(150): n is a, c, g, or t
ctgcatgtttgattatagtattaatggacaaataagttttgctaaatgtgagtatttctgttccttttgtaaatatgtgacattcctgattgattgggttttttgtgtgtgtttgtttgtttgttttttgagatggagtctcnctcttgncactgcactctaacctgggcgacagagtgagacaccgtctcaaaaaaaaaaacaaaaaacaaaaattatccaggtgtggcggtgggcgcctgtgaggcaggcgaatctcttgaacccgggaggcggaggttgcagtgagccaagatcacaccattgcactccagcctgggcaaccaagagtgaaattccatctcaaaaagaaaccaaaaaaacaaaaaaaaaaacttgccggttgagtactgtgtttcaggtgtggtccacggaacatttacaaacctgtagcatgaataatgtggttttcattccgaatcttgtgatgtttcacttattatcgctcttaagaggacggtgaagttcctatttcaagttttgggtcaggtgcgtctctcaacagctgtttttcttaaattaccttaactgttggctgagtacaggaaaaaccaaaaaaaag

SEQ ID NO: 703774 - DNA, 295 bp, Homo sapiens
  misc_feature (143)..(143): n is a, c, g, or t
  misc_feature (150)..(150): n is a, c, g, or t
ctgcatgtttgattatagtattaatggacaaataagttttgctaaatgtgagtatttctgttccttttgtaaatatgtgacattcctgattgattgggttttttgtgtgtgtttgtttgtttgttttttgagatggagtctcnctcttgncacccaggctggagtgcagtggcgccatctcggctcactgcaacctctgcctcctgagttcacgtaatcctcctgagtagctgggattacaggtgcctgccgccggctggccaattttgtacttttagtggagacggtgtttcgc

SEQ ID NO: 703775 - DNA, 117 bp, Homo sapiens
tggacccgatttatgcagcccagacgcttcccactgctgctcaggacgctctctatgcggtagttcccggtggtgagcaatgttcatgccactgccattaaagggcatataacatgg

SEQ ID NO: 703776 - DNA, 155 bp, Homo sapiens
atctagagatcccgcgtctgtgtactcctccttaggcaactggtagtccccgctcccggagctcaccatattgatgctgaacttagtgcgacacccgatcgccatagggcattacagcccagaactcctggactcaagcgatcctccagctctca

SEQ ID NO: 703777 - DNA, 111 bp, Homo sapiens
catatactccatcaatcaccagcacatcatgtgccaatcatttcagcatgcagcacagccagcacatgcactcacaacatcatccagctgcatcaccattatcacataaac

SEQ ID NO: 703778 - DNA, 922 bp, Homo sapiens
  misc_feature (1)..(1): n is a, c, g, or t
  misc_feature (4)..(4): n is a, c, g, or t
  misc_feature (11)..(11): n is a, c, g, or t
  misc_feature (30)..(30): n is a, c, g, or t
  misc_feature (34)..(34): n is a, c, g, or t
  misc_feature (44)..(44): n is a, c, g, or t
  misc_feature (54)..(54): n is a, c, g, or t
  misc_feature (57)..(57): n is a, c, g, or t
  misc_feature (76)..(76): n is a, c, g, or t
  misc_feature (81)..(81): n is a, c, g, or t
  misc_feature (93)..(93): n is a, c, g, or t
  misc_feature (100)..(100): n is a, c, g, or t
  misc_feature (102)..(102): n is a, c, g, or t
  misc_feature (104)..(104): n is a, c, g, or t
  misc_feature (106)..(106): n is a, c, g, or t
  misc_feature (114)..(115): n is a, c, g, or t
  misc_feature (133)..(133): n is a, c, g, or t
  misc_feature (143)..(143): n is a, c, g, or t
  misc_feature (152)..(152): n is a, c, g, or t
  misc_feature (154)..(154): n is a, c, g, or t
  misc_feature (161)..(162): n is a, c, g, or t
  misc_feature (164)..(164): n is a, c, g, or t
  misc_feature (167)..(167): n is a, c, g, or t
  misc_feature (172)..(172): n is a, c, g, or t
  misc_feature (176)..(176): n is a, c, g, or t
  misc_feature (179)..(179): n is a, c, g, or t
  misc_feature (181)..(181): n is a, c, g, or t
  misc_feature (190)..(190): n is a, c, g, or t
  misc_feature (195)..(195): n is a, c, g, or t
  misc_feature (198)..(198): n is a, c, g, or t
  misc_feature (208)..(209): n is a, c, g, or t
  misc_feature (225)..(225): n is a, c, g, or t
  misc_feature (228)..(228): n is a, c, g, or t
  misc_feature (231)..(231): n is a, c, g, or t
  misc_feature (243)..(243): n is a, c, g, or t
  misc_feature (262)..(262): n is a, c, g, or t
  misc_feature (271)..(271): n is a, c, g, or t
  misc_feature (274)..(274): n is a, c, g, or t
  misc_feature (278)..(278): n is a, c, g, or t
  misc_feature (306)..(306): n is a, c, g, or t
  misc_feature (312)..(312): n is a, c, g, or t
  misc_feature (315)..(315): n is a, c, g, or t
  misc_feature (320)..(320): n is a, c, g, or t
  misc_feature (329)..(329): n is a, c, g, or t
  misc_feature (340)..(340): n is a, c, g, or t
  misc_feature (346)..(346): n is a, c, g, or t
  misc_feature (365)..(365): n is a, c, g, or t
  misc_feature (373)..(373): n is a, c, g, or t
  misc_feature (387)..(387): n is a, c, g, or t
  misc_feature (397)..(398): n is a, c, g, or t
  misc_feature (405)..(405): n is a, c, g, or t
  misc_feature (408)..(408): n is a, c, g, or t
  misc_feature (437)..(437): n is a, c, g, or t
  misc_feature (446)..(446): n is a, c, g, or t
  misc_feature (455)..(455): n is a, c, g, or t
  misc_feature (458)..(458): n is a, c, g, or t
  misc_feature (460)..(460): n is a, c, g, or t
  misc_feature (469)..(469): n is a, c, g, or t
  misc_feature (480)..(480): n is a, c, g, or t
  misc_feature (485)..(485): n is a, c, g, or t
  misc_feature (492)..(492): n is a, c, g, or t
  misc_feature (502)..(502): n is a, c, g, or t
  misc_feature (504)..(504): n is a, c, g, or t
  misc_feature (511)..(511): n is a, c, g, or t
  misc_feature (516)..(516): n is a, c, g, or t
  misc_feature (524)..(524): n is a, c, g, or t
  misc_feature (565)..(565): n is a, c, g, or t
  misc_feature (599)..(599): n is a, c, g, or t
  misc_feature (728)..(728): n is a, c, g, or t
  misc_feature (741)..(741): n is a, c, g, or t
  misc_feature (750)..(750): n is a, c, g, or t
  misc_feature (792)..(792): n is a, c, g, or t
  misc_feature (816)..(816): n is a, c, g, or t
  misc_feature (872)..(872): n is a, c, g, or t
nccncaaaccnctttgatgacccagggggngggnggggcggggngggggggganccnggggggggggggcggcggnaggcngcgggagccccnccgggcncngncngcggggcnnggccaggggggggcggancaagagcggngagcccaancnggggggnngnggnagagngggnagngnggccaaacnggccnctncccccccccnncacccaggccacagcnttnaanaaacaaaaagcnaccctttacagcccaaacnacacagggnagncctnccccccagcccggggcgcccagcagggnagaggngcncgggngggcagggngggggcccccnggggcngacaccgccccaccccccnccctagcnccaggggggagggncaggcagcgnngaacagnggnaacaaaaccccaacttcccccaaaccccnatgcgggcngggccatcnagncngggactgcnggcccaagggntttcngcccccnccaaaccttngngcttccncaggncgggagcntagcggagactgccccaagaggggcgggggcgcggggctcngaggcacagggggcctgggaaacaggcaagagtntggttccaaagtttttcccagcccaggcctctgccttggcaagcaggaagcagggccaggtgagagccggtgagacccaggctcagaggggccgggtggtgtggttatagaccaggtgctccgtgtccncggtagtggaganagttgagcnggcaggggtgggtggtgggtggtggtggtgtccgtggaagtnctttctctggttcttgaagaagcngttacccaagaaggctaccaccaccacaatgcagaagaccaggaacactgcgacancatctccacagagcctgttctgggaatggggattcccgcctcaggccaaa

SEQ ID NO: 703779 - DNA, 1023 bp, Homo sapiens
catttatatttacattttaattaaacagtatcaaaattgcttgcttaaaacctaagcaatatgcattttgcttgaactgcttactgtaactttaacctaagattatagtgaccttattcaggaacaaaaaaaaaatttagtgtaccttcaaagacttgacattctgtgtcagaggcaaacacaaatttctagatactgttggcttgtatataggtggttggtagaaagataaaatatttgggtagtaatttaaaatacaagaaacgaatatttatttggtccacagttggagatgtaggataaatgtcttaactcaaagatcacaggactttggtcttacattattggccattttaatttaccatttataaaagatctggtctggaataatggaattcaatgttaatcagaatctatgtatacctttatagaaggctagaaggaagtattacaaataaacatgtaaaataaatattaacacatttatcacaaagatatatttaccattgggtatgtagccccatttaccttagatcatggtaaatataacataaatgaggtaataatgtacaactatataatagaaggaagataatgacatttaaagtagataaaatgtgagataaaaggtacttataatataattataaaaggtactgataagataattaccaaaattaatacaagaacatagattgaaaattaagaaaaaaataattatataagaaattattgaaattattggaatatcaatatagaatagccatatatgaagatatgaaaaagaactggattaataaaaaaatataaaagaatataaatggtagataaaatatacaaggtagaactcataggaaaaatgaatgagaaaaaaaaaagataaaagataatattaaaaaataataaaagaataaactaaaagtacagcaaaaaatgaagaaattaatcacataaaaaataataaatataaagataaagagaaaattacataaaaataaaaataaatatgaaaagaaaaaaaag

SEQ ID NO: 703780 - DNA, 101 bp, Homo sapiens
aaaaaattcttttcttgctttcttggggtaagggaaaaattctatttggaaggaatttttattccaaaacagttttattaaaaaggatactccttttggga

SEQ ID NO: 703781 - DNA, 368 bp, Homo sapiens
  misc_feature (19)..(19): n is a, c, g, or t
  misc_feature (106)..(106): n is a, c, g, or t
  misc_feature (117)..(117): n is a, c, g, or t
  misc_feature (154)..(154): n is a, c, g, or t
  misc_feature (174)..(174): n is a, c, g, or t
  misc_feature (185)..(185): n is a, c, g, or t
  misc_feature (189)..(189): n is a, c, g, or t
  misc_feature (294)..(294): n is a, c, g, or t
  misc_feature (306)..(306): n is a, c, g, or t
  misc_feature (352)..(352): n is a, c, g, or t
  misc_feature (357)..(357): n is a, c, g, or t
ctttcccagccccaccatnggagctgcgctgtgggggattgctgttcagttctcgctttgattccctgaatcaaagcggtagtgtccccgggcccaaaccctccgncgcctcttcgnctttaagctgattcccatgttgaaccccgatggtgtngtccggggacactaccgcanagactcacgtngagngaatctgaaccgtcagtacctgaagcctgatgccgtcctgcacccggccatctatggggccaaagctgtgcttatgtaccaccatgtgcaatatcgtctgaactnccagagttcctntgaggaccagcccagttactgtttcccgcctgatgctactgttttntgaanggggggaaagg

SEQ ID NO: 703782 - DNA, 384 bp, Homo sapiens
  misc_feature (25)..(25): n is a, c, g, or t
  misc_feature (37)..(37): n is a, c, g, or t
  misc_feature (55)..(55): n is a, c, g, or t
  misc_feature (58)..(58): n is a, c, g, or t
  misc_feature (134)..(134): n is a, c, g, or t
  misc_feature (140)..(140): n is a, c, g, or t
agagccatcttttgttctgatttcnacttataaatgntagcctaacaggttcctnggnccatgagttggagtactgcttcaaaatccacagtgattgttaatctttgtaacgtcctttttagtatccactgatngtgcangtagagtaacttgtctctgacaccttgtagaagctatcctgttaggcttcctaccattggtcccctagaaatctttcttaggcgatgggctcttaattgttgtgggtttaatgtcttctgtcttacatgtgtcttagctcgatgtctaaagaactttttacttcctctttttcactctttataagtacgatatcctcagcattgttgctcagtgatttgttctgtgtcttgtcagagtgaccac

SEQ ID NO: 703783 - DNA, 420 bp, Homo sapiens
  misc_feature (127)..(127): n is a, c, g, or t
ggagcttgccctgttccaggcagcacgaagcctagctgcgtcggagtggctgagctctgcctaccagtctctccgattcctccagctcgccaggactgctcaggaaggagtccaggggccatcagangcgcagtctcggagccctgtgccaccacacttcctggcctccgccacgccccctgttaaggccctcgagccccccccgacagcccagatgggtctcccctcactcctgtgccttcccagatgccctggcttgtggccagcccagagccgcctcagagctcacctacacctgctttccccctggctgcctcctatgacaccaatggccttagccagcccccacttcctgaagaaacgccacctgcccgggccggggccacagccaggaacctggggcccaaagcaggcatcatg

SEQ ID NO: 703784 - DNA, 788 bp, Homo sapiens
acatgattggctagatctctgagctcgaaggtactctgcttcaacagtgcagcacagggctctagttggaagtttaaaccccgagcaaaacatggcctccctgtagatggaaagatccatagcattctacacccgcaccctgccctgttgtgtggtgatgatatgttgtaccccaaggatcaataagatgtcctcaacccatcctcacggactctcctctctgggacaggctgggaccttcggaggaagaataaaggcgctgcctttgagtacccgatcatattcgagtgtccctgttccttcattcacaaaggataggctgaagcagtctagggcttattatgcagtgaagttccacagtgctaacagggaacctggctgggagatcctccttaaggggaggcagagcaaggcagttgtggtccccagtcttcggggaagctggccatgagagcagagggcttactcgattgcaaatggggcgtgggcgctcgtgtgtcctgggaaagcccgatcagtcgccttcattttctggaggactgaacctcccgtgggagggaggaggggtctccaagaagtgggtccccgggaacacgagggcgggggcagccagccattctattccagggtcgggggctcctggtcctgaggacgcctgaactactacggctaagggcgcaggcctgagggactgcaagcaaacggctggctgaaaaacaaattctgtgggaccgcccgtgagcacgccaggtggttgccccaggaccaagcagcgccgccacccagga

SEQ ID NO: 703785 - DNA, 198 bp, Homo sapiens
ctggggaatgcatgaatctattatagttgggcagtatggcccccggggaatagagttctccctatccatgagcatggaaggttcttccattgtttgtatcgtcttttattttattgagcagtggtttgtagttctccttgaagaggtccttcacatcccttgtaagttggattcctaggtattttattctcttggtag

SEQ ID NO: 703786 - DNA, 298 bp, Homo sapiens
cgcagcgtatcagacagatgagtgcgagccagtcgaaaacacagcacattcctgcacttggtgccctgatcacagtacctgacagtcctcatgcactcaggatggcaaggttgttatcctggtgcttgccagggatgagataaggtagtcagagttctggaagaattggttgtatagaagatcctagtgaccaaattcagcctactgcctcggatctctccagccgaagtctgtggactgcaagtctttgagatgcttctggctcccatcacctctaacatccttgtccggggttgtt

SEQ ID NO: 703787 - DNA, 847 bp, Homo sapiens
  misc_feature (54)..(54): n is a, c, g, or t
  misc_feature (134)..(134): n is a, c, g, or t
  misc_feature (141)..(141): n is a, c, g, or t
  misc_feature (223)..(223): n is a, c, g, or t
  misc_feature (233)..(233): n is a, c, g, or t
  misc_feature (678)..(678): n is a, c, g, or t
  misc_feature (681)..(681): n is a, c, g, or t
  misc_feature (703)..(703): n is a, c, g, or t
  misc_feature (789)..(789): n is a, c, g, or t
  misc_feature (801)..(802): n is a, c, g, or t
ggggaggggggaaatggattcgcctctcctacagaaattctgagattcatttanagttctaatgcattcgattactgtatttgtacagttcgggatctagtttagcgaaaatgtgttttgtagttctggataanctatttnatccgctgtgtcctccccaaaagactagcacgacgagagcaaagctccctttcagtaatacagcctctcatatccactggcngtccccgttncacatcatggtctccatgtgtaccgccaaagtcaattatgtttgaaagcctttggtggatgttatggggcaaagttatgatttacacagaagcaactgccaaatctgtggtgcaaccatatctccagtgaaatattgtataacaccattgtggaactactgaaaagacagtggcttttctacaagtactcttccttattgcaccattttggtattaacgtagaaactaagcatcagaatttatgaaccaaagaatatgttatttttcctttgtgctctaaaaatactgagattgggggaagcaattcttttttttaaaaaaaatttgaataactatctttgtgataacacattcggcggttacgatgtggaatttagcagaactatcaaatccaaaattattttcaatcagatgttaacttataagttcttggttgttccagtangtntaatgaacatttctatgttacnattgttggcttatgtggcaattacacaccaaccaatatgtgtccaatttttttttgacacaggtgtacttaaagggctaatgttgntacggggaaaanntggcctacacaccttaacaataaatgtgccaatagggggggggag

SEQ ID NO: 703788 - DNA, 137 bp, Homo sapiens
gacaaacctacccgagcctggtgatagctggttgtccaagatagattctgagttcaactttaaatttgcccacagacccctctaaatccccttgtaaatttaactgtaggtccaagggggaccagctcttgggacac

SEQ ID NO: 703789 - DNA, 371 bp, Homo sapiens
  misc_feature (150)..(150): n is a, c, g, or t
  misc_feature (224)..(224): n is a, c, g, or t
  misc_feature (266)..(266): n is a, c, g, or t
  misc_feature (297)..(297): n is a, c, g, or t
  misc_feature (300)..(300): n is a, c, g, or t
  misc_feature (355)..(355): n is a, c, g, or t
gatggagtcttgctctgtcacccaggctgggatggaagcaggccccctctgtattcgtttgctggggctgccataacaaagtctcacacactgagtgccttaaacaacatcaatttcatatcttacagttctggaggccagaaggcaagnatcaaggtgcgggtggggttggtttcttctgagggtcataagggagggatctgtctcaagcctctctccctggnttatagacggccatcttctccccatgtctttacatggtcttnatttctgtgtgtgtctatgtcctaatctctnctntttttgttgttgagatggagtcttgctctgtcacaataaataaataaataaatanataaaataaataaata

SEQ ID NO: 703790 - DNA, 882 bp, Homo sapiens
ggtctggggcgcagagcagcgtgcgggaggaggcggacacgtgtgcaacagcgtgtagcagcccgggcggcggcagcaacagcctggcggcggcatcggcccgagccgccggcgccctcccagcctcccggccacagtgggcagaccactagcatcccgtccacttgggattcccactggatccccagctctgatacgggactgggagcaggctctggtgcatatttctctcagtgatttctcccagctgacagagacccggcagcacgggcactgagcaaaccgaccgacccaatgggcgagcaaagcggcggctatcgccacggttgcactacagctaatgcacagggccttgacagacgttgactcccgagccaccacacggctgacttccacgacgacgaccccacgaacgaggacgacaacagacacagccaccagaggcacccaatgcgactctgaacggcaacagcaacacgggacgccgtcatcccaactggcgagttggacattcccgttaaccgccgtttaccagcagccaatagaagttgacctgcgtgtcacagctccagcgcacgacgttcacttgggcgagcgagaagactgtgctagcacgccccggcggccaacttccagcactaaattcgtagacatccgagatgccaaatgcatttgacacgacgattcacaatgggcgccacagcaagcgaatagcggtccagcacaacacacggacaccatacaaacattcaccaccccacagttcccacgaaacagaaaacattcactagagcaaacaatgggggacatccacaaagataactaatagcttcccgcgacaaaaagcgcacacttatagtgaggaggcgacgtaagctccag

SEQ ID NO: 703791 - DNA, 764 bp, Homo sapiens
agcggggcgacatggtgaaaccccatctctatgaaaaatacaaaaatatgccaggcatggtggcaagtgcctgtagtcccagctgcccgggaggctgaggtgagagggacaatggaggctgcagtgagctgtgatcataccacttaactttagcctggaggaagtgagatcctgtctcaaaaaaaaaagaaaaagaaaaaaaaaaaagaaattgctgggctcagggagttgtgaaaaatttgcagaattttacttacgatagttcagcaacctatttgtacacatgtaagcaagtgttacactccgtactaggagtatacacggataaatactcatgatttctctagtttcctagctagcacttaatatgggtaagaatactttacaactgctattaatttgcaactaattttatagagacaagaacctcacttttgtttgcccaggctggagttgcaggtggttgccatcttgggcctcactgcaaactttgaactccgtgggccctcaaggtgatccttccttaccttcgagtttccgtgagttagctacgaacttacgagactcgttaccaccaaaaaccagttaattctttaaaatttttgggtgtagacaggggcgcaacattggtgaaaccccaatctctatgaaccattccaaaatttatgccagcgctatggtggcaagtgcctgtagtcccagttgcccgggaggctgaggttgacagggacattggaggttgcagtgagctggtgatccatacc

SEQ ID NO: 703792 - DNA, 158 bp, Homo sapiens
tggagtctccatcttgggtctagctactccgcgcttgtgtccttacggttgtgtgaggccagtgcaaagacagactaactgtccgggcctctccgtgacacaagtctcttcccagccttcctcacaggcttctgccgcccccctcatctccaccatgg

SEQ ID NO: 703793 - DNA, 731 bp, Homo sapiens
ggcggttgggcgacgaagggaagagtcttttcagcgctgaggactggcgctgaggaggcggcggtggctcccggggcgtttgagcgggctcacccgagcccgcgggccatcgcggatccaggcccgactggcgggacgccccgcgattccccgcgggccttcctagccgctcatggaggacggtcgtctatgaatccccccagacgcgtgatctccggaggagcggtatggaggctgggagtaacaatccgggcggcggaaaggccatgggagctgtgttgggtggagattcagcgcctgcggggaggagctcaggttgaagccattgatgcgaggtgtgaggggctggaggccaatgagggcacgtaaggacccttgacaaccggataccggaagatggcatatgggctagggaagaagttcaacagtggaccccaaggaagggggatccagttcttggtggagaatgaactgctgctagtaataaacccgaggagatcgcccgcttcctgtacaagggcgagggggctgaacaggacagccatccggggaatacctggggggagagggaagaatgaacctgggagttgtccatgcgtttgtggatctggcatgagtttcacgccgactcaatctggttgcagggcctcagggagtttctatggaagctttcgctaccggagaggcccagaaaatgaccggatgatggagggccttcggccaggatactg

SEQ ID NO: 703794 - DNA, 914 bp, Homo sapiens
acccatcaaacgttccacgttacatatactttattttcattttccgcgtctttcttatgttaaacgatcacctgtaaacttgcgcgtcattctctctgctggctaatgcaagtataagaactcaatgaaaagacttaatcttacagctttcaatgtcgtcagattttccattatgtattgattttgcaacttacgatgtttttgagccccatggttcattttgattgtttaatctttgctattaaattcttgtcaaacacaggattatattgaaaatattggccttcttggcctcaatgagtggagcttttccggccagatttccctttcatgttggggcgctaattgattgaacctttaatctactagactcgggtgttactctagtccactccgtttgcagttgacgaggtattcaacattacttcatagagatgcatatcccgcgtattccacattaatttttggtttattcgcatgtaataatactttcgacaattagggcttgttttatgcctctttatcccgtgatttaggcccgcgtttgtctgtattctatacttaatggtcccgcccctcgcgattatttattatgtatttggacctctctttctttggaccacgtatcatcccctttactcattatcatctcctcaagttattccttctggtaaatttttctttgtcctctcctaacttaccctcagcgtagatggttactctgtctctgtgctcccttctttataatttttctgattcattaatatgtttattttttagccccgcccgctttcggtatatcagatgcttttatcctattagtagtatccattggatatttttttccacttccttatgttttctaagatctctcacattctcaatcctactacttattaatcatatttatattt

SEQ ID NO: 703795 - DNA, 418 bp, Homo sapiens
taggatcccctgcctgctgtcgctatgaaagatgtttccttattatttcttcatctctaatatggacaccagggaatgggggttgggggtggtactaatgggaggaaaaaaaccagaacagggtaggtttttgttttttgctttttgttttttttttttttttttgggggggttttaaaaacagaacttttttatttaaaaggggggggttaaatttttttaaccattgaaagggtttaaaaaggttcaaaagtttcgttagcctttttttattaactataattttaacattttaatttttaattaattttgggcggaatggcggttttcctttttaaaaaaaaatttattttgggggggggagcggaacccagttaattactttttttgtcaacccccaattgttttaaaaaaggat

SEQ ID NO: 703796 - DNA, 407 bp, Homo sapiens
atatcctatagtaataggtttaacatgagtacagaagagtttgcctgggaaatctattcatcaaaacatatatgtctacagcacggaaacaagtgtagtactgcactttctggtactcacggctagcaaacggttcctggctagcatgaggcatgagtcagatactcctatcctgggaactgcctaggatatttgaagagaaatatacagaattggaccttgtcaaaacctcttccttctcagtcatcagtacagtaatatacactgggagacttcagagaaaacctagatttattaacagttatcctcgatggctgtttgaattatatttaaataacaatctagtagagccaaagaaagtgccttaattcaatgatctttcgtaacggaaataaaaaatacactat

SEQ ID NO: 703797 - DNA, 454 bp, Homo sapiens
cttagctctgagaaaggggctggtgatgaaactataaaagtgcatgcgggtggacatgatggaacatgtcagcatggtgtaagagggtcaagtctttggggccttggccttgtcacatcggaaggcaaacggtaaaagagtgcactggggacacctagaaggtgggacccatcttgagttcctagaaaggcaggaactcttagagggtaagcctttggggggggaaaataaaactgggggaaagggctggcacagggtcagaggattggattctgatgtctcgtgtgtgccggcctaaagagccactgatgcacccaaaaatgacttgatttgcattccaatgaagtcatcattccaaaaggggctgatttggctctggaaagaggtgagacataagaaacatgaggtttcccagtttaggggcatcatggcaactggtcccccttttccagag

SEQ ID NO: 703798 - DNA, 216 bp, Homo sapiens
cacgagggcgatgaagatctttacgatcgctacgagtacacctattgagacgcagttcacaacgtgtgaaccgatgaggaggatgtacgggatgtgtctcaccgaatcgggtttggagactggttcttctgcatgctcgatgatcctcgtgcagccgacgctcaacacgagtgcagaggacgactgttgctacacgtatcaggagaaggtatccgc

SEQ ID NO: 703799 - DNA, 309 bp, Homo sapiens
acatggctataatcttattacctctggttgaagtagtaacagaccaaaataaacggtgagtagagattggttatagggattatttttcccatcagagtcagtgtaagtgactgccctctcccttgtagtatgtttcagtcctgacttgactagtgaagccactcatacagatttcaaactcgttgccagggtaggaaaacacaggttggcttcagttcatcctcagcctcctaacttccttttaagtaaccatgagatatatttaggaactgatggtttctgagctaatacccatgaggcgccagggca

SEQ ID NO: 703800 - DNA, 80 bp, Homo sapiens
  misc_feature (23)..(23): n is a, c, g, or t
gcatcgtgaccgccgaggagctngagaacgtgcccacactcccgctgcagccaataggaccttaaatagccacttcgtgc

SEQ ID NO: 703801 - DNA, 912 bp, Homo sapiens
cgggcgaaagacccacctgatatcctgcggtatatctttgccgttctccgtgtccttttgtccgagcctggcgagtgtgtgtatacacgttgttcggcagcacaatcccgagatgtgccgcgatttccgcggtcaatttgttctcccgggccaaatttgtcgtgcgcgcccccgtcgtcgacatgtcaatgtggcggctttccggccagtgatcagcttgcttggcgccaagtggcgttgtggcctgtttatgcccgcgtggcgcttgaccgttctggtcgccgcaatcggttctggtagggtcccgcccgcattggcgctcgatccaataagggcgcttaattcccgcttctcataagggggttcttctcggtaggtgtgccccccttttgccggggtacactccgttaggggcgcatcatccgtgggcggcaaaatcgccgttggctgtaatcataatttctccggcgggaatattgatcatgttgcgttgcgccgcccaacacctctttctcggcgcctcttcgtcggatgtcccccgtcgggttatttctgggaggtatgcccccccgtgcgcatcctcccccgtgacctccttctatctaactctggtaagggtctacatcacatttttctgtacacccacagtaatgtttttaataaaatttcatagtagtttgttggacgccttctccttctgcacgcgaaaatctctcttattattgtagtgaagaccaccctctcccttaaacccgtgggagtagcctatattatgggagacgcccccccccctgcttccccccttctgtagaacgccgtaatacacataaacatttttgcacccaaaaaggaaaggggacccccccacaagggtttaacccacccccgggcccccgatttttttaaaaaaaa

SEQ ID NO: 703802 - DNA, 1055 bp, Homo sapiens
agcggagttgttttgcagtcctgggctgctcggaagtccaggccgtgcccgggtcatggtggtgggccgagggctgctcgggcgtgcgcatgctcgtgcgcgctgggagccgtctgcgcccgctcgaggactcgtgtccatgccctgcgtgggagttttcgtgccatgagcagattttgcgtgaagaacctgagccgtgtcacgagggcatcagtgagaggtagaggtgctggctgccctgaaacgagaattacatgtacctggtcatttgattggtcgagatcaacgcgagggcttgccagtttgtggatcctgcgttgcatgccccaggaaaaggtacgtaggactgcagggtgacgaaatgcagctgggggttgcaaagttgaccaccaggtgcgtcacgcaaggcgcaaacgatccatattgggagcccatgctttggcggggacattgaggagatagctgggtcaacgccatggagaggtccggggacctgaagacgtgttgtatcggccgggggttgactgactcggttattctggaggacctcgtgagctcagccaatgagtctacgtcaggcctttgttccagcagcttgacaagaggtgggtgatgtcctccattggaagcggtcgcacgattgcccttgggctgaaccacccgatggccaggaactatcaaagtgaacctccagtttttgttaccttttccggtggagagcaaacgccccccggggaagcggcgtccgagaagggccccacccctggcccggtgtggttgcaacaacgtggttggagaagaccctattggttcgatgtgtgatgcctttggcacttggcctggggacaagagttccttaagttgaaagagtgcgaaccttggctcggattgtagcacttggttgttacaagcgcatctggctgaggaacgagtctttggggaccgagattcccagcaccgggaaaattaaaaaagtcataaatgttcggtcaaagtatataacaccacatcagagaacactgaaagtattgagagcacacacagttgatagcccg

SEQ ID NO: 703803 - DNA, 154 bp, Homo sapiens
catcctttacgaaccagagcaagctctcgtgtggaaagatgggcagcttgttcaggaacttatcaaagtacagagcgcccactgctccagccttgcaatcaaggagtacaatatgctcaaatctgctggcctattcgcggatatgaagatgccg

SEQ ID NO: 703804 - DNA, 372 bp, Homo sapiens
  misc_feature (52)..(52): n is a, c, g, or t
  misc_feature (101)..(102): n is a, c, g, or t
  misc_feature (320)..(320): n is a, c, g, or t
gacgaactaaaaacagaattatcatttgatccaggagtcacacggctgggtntctacccaaaggaagaaaggtcagtatatcaaagggatacctgcactcnngtggttattgcagcactattcacaatagcaaagatacagaatcaacctgtgtgtccatcagtggataaaatggataaagaaaatgtggtacatatacacagtagaatactatttagccattaaaaaaatgaaatcatgtcatttgtggcaacgtagatggaactggaggtcattatctaaactgagataaggcaggcacaaaaagacaaatatctatngcatgttcttacatatgagagctagaaaatttgttctcgtggggtaggaggt

SEQ ID NO: 703805 - DNA, 118 bp, Homo sapiens
cggaagcacactgcaacaaaacaaaaaattgtataaaaatcttaagagtgtggttggggccaggtacagtggctcacacctatagtcccaacattttgggaggctgaggtgggtgtgc

SEQ ID NO: 703806 - DNA, 187 bp, Homo sapiens
tctgtcgacctaaggatcccattgaggtccgggtggggttgctcacgcctgtaatcccagcaccttgtggaggctgaggcaggcaggcggatcacttgaggtcaggagttcgagaccagcctgccaaacattgtgaaaatcccatcttctacaaaaatagaaacagttatgctgtggcatgaatggc

SEQ ID NO: 703807 - DNA, 546 bp, Homo sapiens
gagaggagatggaaaggcagagaagaaggggcggacaatggagtggcaaggctaggggaaagggagggaggggaggaaaggggggagaagaggagaggggaaggaaggggaaaagagagaaggagaaggaagggaaagggggaaaaagagaggaaaaaggggaggagaaaggggagagagaggaaagagagaagaagaaagggaggggggaaaagaaagggagaggaaagggaaggggaagggagaggagggagaaagaggagaagggaagaaggggggaaaaagagaaggaggagaaagggagaagagagaggagaaggaggagagggggaaggggggaaggaggagaggagaaaggagaagagaggaaaggagaggaagaggagaagagaaagagagggggaggagagggggaggaacaggaggaggagaaggaaaagaggagaggagagagagagaggaagagagagggagaaaaggagggagggggagggggaaaagaagagaggagagagggaagaggagaaggggagggaagggagagag

SEQ ID NO: 703808 - DNA, 393 bp, Homo sapiens
  misc_feature (26)..(26): n is a, c, g, or t
  misc_feature (29)..(29): n is a, c, g, or t
  misc_feature (62)..(62): n is a, c, g, or t
  misc_feature (87)..(87): n is a, c, g, or t
  misc_feature (339)..(339): n is a, c, g, or t
  misc_feature (342)..(342): n is a, c, g, or t
  misc_feature (377)..(377): n is a, c, g, or t
  misc_feature (387)..(387): n is a, c, g, or t
aggcataaacttagaaagatcgtttngangccaggcacaatggctgggattacaggcgtgcncgggcgcccggccttattttttctntttgagatgtacccagactggagtacagtggtgcgatctcggcttactggaacctccacctcccgggttcaggcaattctcctggcctcagcctcatgagtacttggaactacaggtgtgtgacaccacacatggtattttttgtatttttagtgaagatgacatttcaccatgttgcccaggttggtctcgaactcctgacctcaggtgatcagcctgcctcggcctcccaaagtgttgggattacaggcntgncaacatggcccagccaagggtaaagtgtttagganttcaacgtgntttggg

SEQ ID NO: 703809 - DNA, 121 bp, Homo sapiens
gatgcgcgtccacactgctccaaaagacgacgtacgctcctcatcggcagcccggcgacgtaccacccgtgcacccctgatgtatggcgacgccggcactgaacgtgctctacgagagagc

SEQ ID NO: 703810 - DNA, 380 bp, Homo sapiens
gctctgctgctccctcttcaggtacacagagcacatgcccccctgtgacactgcggatgacacctgtctgtcccaccacctgtgtatcccaggtaggtgtcccgcgactttcaactgaaatgtccagtggtttaccccagtcgctggagttctgctcgaatgctgagcctggcgtgtgtgggttgtagccaccaggggagggagctccaggtgtcataggacttgtagccaacggggctcgggctggggctagcctgataggccatgggcgacggtgtagggtggtagctggctggggagtgggtattctggtagcctgctgggcttggcgccaactggtgttagctctgggggctggggctgggctggtaggaaccttg

SEQ ID NO: 703811 - DNA, 357 bp, Homo sapiens
ggggttttttttaaaaaagaaaggtttatttttgcccctatttttaaaccggaggggatttggaaatcctggccttggttgtaattctccctttttgggagaattttttctccccgcctgttggcggggaatattcccttttttttaaataatatgaaggggggggggctccctgcttctctttaccagggcttttttgcccggtttcatcccccctcatgtaagcagcccgtttttacttttggggaggtgaatgttttgttttccccaatactttgtacagggcccctgcctcccctaattttcctttgtacttgggcggggtttttcattaaagggtgttttccttatccccga

SEQ ID NO: 703812 - DNA, 329 bp, Homo sapiens
  misc_feature (150)..(150): n is a, c, g, or t
  misc_feature (153)..(153): n is a, c, g, or t
  misc_feature (156)..(156): n is a, c, g, or t
ttcccggaacggcttttgcttttaaaaattgaaaaagttttaaacagggctttcttttggtcacccctcccaccccttggggtttagtttggaatttgccccctggaacaaaaaaaccctttaatccggggcatcccttggttttggggntgntgntgcttcccaagatccccaccagggattaaaaaggaacccggtgtgcccccccgatcccccaaattggtgggctttcccccctggcaaatttttgggtctttcccctttctgttcaggccccctaaatttttaaatgtggatgcctccccaaataaaacccattccttttgtta

SEQ ID NO: 703813 - DNA, 348 bp, Homo sapiens
agcggagagcaagcgtgctgtgcccagatcctgggagaaccccagccgagcccagcctagcccgagcccagcccgagcggagccggagccccaagcccgagcctgcagcccagcgctgagcagagcccggccaggcgctctaacccgcgtgtcatcgccagctgatcactcaagctcgtttcttcctgccccattctcatcgggacacgtcgacacgaccgctcgacggagaccgatctgaccctaatggaacactagggcgaggatggataaagaagatgtggccgcgcggcactcgagagcggactatccaggacaagaactgctctcccaatggcctctcggaca

SEQ ID NO: 703814 - DNA, 147 bp, Homo sapiens
gcagggcgctgccatcatacgctgcgatcagtgctaatggccttaacttcaaggtcccgccgcattactagctaggctgaggtgatacgatcgcttgaacctgataggtggagactgactggagccaagatcatgacactgcactca

SEQ ID NO: 703815 - DNA, 375 bp, Homo sapiens
agatttgatgatttgctagaaaggctcacaggactcatcttgtagtcatatatatagctacaatttgttacagcaaggtgtgtgtgtgtgtgtgtgtgtgtgtgtgtgtgtgttttaagacagggtctgtctctgtcacccaagcactggagtgcaatggcaccatctcagctcgctgcaacctctgcatcctcccacctcagtcagcctcccaagtagctggaactgcaggcacactccaccatgcctggccaattttcctgtttttttgtagagacagggtttcaccacgttgcccaggctggtctcaaactcctggactcatgcaatccgcccacctcagcctcccaaagagctgggattagaggtatgagc

SEQ ID NO: 703816 - DNA, 1302 bp, Homo sapiens
gagacagggtctcactctgtcaccaggctgagggcagtggcgcttcacagctcactgcatcctcaaccttgggggctcacgcagtcctcccgcctcagcctcccaagtagctgggcatgcgccaccaagcccagctaattttgtatctttagtagagatggggtttcgccatgttgcccaggttggtgtggaattcctgggctccagttatatgcccacctcagcctcccaaagtgctgggattacagacgtgacccaccgcgcctggcgcaaatatgtattcttttaaaatttcctctgatactataagctttttgcatttatctgaagcagtatacatgcctttggtatcagcaattttaacagtttggatatacttatcagctatcttattccaaaactacatctacttcttccagtatagaatctggtgcttcctgaccaaaaagatgagaaaaacaatgttaaaaatatagatgctttccattgaaatggagtgaaaacattggttctatatgttttcttttaaaataattttcttattaaaaacttgctgtctttattatacttaccctttttatgcatatcaatagtatttataagatgtgttctataattatgtaattgtagatactgttatgcattgtccagtgacatcataaggcaggccctactgctgtatcttttctaccttcttatttgtaatagaaactatagaatgtatgactaaaaagtcactttgagattgacttttttaaaaagttattaccttctgctgttgcaaagtgcaaaactgtgagtggaattgttttattctgacttaatgtgttagaaattagagaatacagtgggaggatttttagacattgctgctgctgttacccaaggtattttagataaaaaatttttaataaacatccctttggtatttaaagtggaacatttagcctgttcattttaatctaaagcaaaaagtaatttgggtcaaaatattggtatatttgtaaagcgccttaatatatccctttgtggaaggcactacacagtttacttttatattgtattgtgtatataagtattttgtattaaaattgaatcagtggcaacattaaagttttataaaatcatgctttgttagaaaaagaattacagctttgcaatataactaattgtttcgcataattctgaatgtaatagatatgaataatcagcctgtgtttttaatgaacttatttgtattttcccaatcattttctctagtgtaatgtttgctgggataataaaaaaaattcaaatctttca

SEQ ID NO: 703817 - DNA, 106 bp, Homo sapiens
tgtttcttgggtgaaagaggtagtcagagacgcaattaaaaatggtcaggccatgtgtgcagtggctcacacctatattccagcactttgggaggccaaggcaggt

SEQ ID NO: 703818 - DNA, 121 bp, Homo sapiens
tctaataattatacgtagcggtcacacctattgacagcttattatataaagtcacatattgctgtattctcaagatgacacacctttatttaaatgagatgcttgctgtagattattcttt

SEQ ID NO: 703819 - DNA, 1356 bp, Homo sapiens
gagacagggtctcactctgtcaccaggctgagggcagtggcgcttcacagctcactgcatcctcaaccttgggggctcacgcagtcctcccgcctcagcctcccaagtagctgggcatgcgccaccaagcccagctaattttgtatctttagtagagatggggtttcgccatgttgcccaggttggtgtggaattcctgggctccagttatatgcccacctcagcctcccaaagtgctgggattacagacgtgacccaccgcgcctggcgcaaatatgtattcttttaaaatttcctctgatactataagctttttgcatttatctgaagcagtatacatgcctttggtatcagcaattttaacagtttggatatacttatcagctatcttattccaaaactacatctacttcttccagtatagaatctggtgcttcctgaccaaaaagatgagaaaaacaatgttaaaaatatagatgctttccattgaaatggagtgaaaacattggttctatatgttttcttttaaaataattttcttattaaaaacttgctgtctttattatacttaccctttttatgcatatcaatagtatttataagatgtgttctataattatgtaattgtagatactgttatgcattgtccagtgacatcataaggcaggccctactgctgtatcttttctaccttcttatttgtaatagaaactatagaatgtatgactaaaaagtcactttgagattgacttttttaaaaagttattaccttctgctgttgcaaagtgcaaaactgtgagtggaattgttttattctgacttaatgtgttagaaattagagaatacagtgggaggatttttagacattgctgctgctgttacccaaggtattttagataaaaaatttttaataaacatccctttggtatttaaagtggaacatttagcctgttcattttaatctaaagcaaaaagtaatttgggtcaaaatattggtatatttgtaaagcgccttaatatatccctttgtggaaggcactacacagtttacttttatattgtattgtgtatataagtattttgtattaaaattgaatcagtggcaacattaaagttttataaaatcatgctttgttagaaaaagaattacagctttgcaatataactaattgtttcgcataattctgaatgtaatagatatgaataatcagcctgtgtttttaatgaacttatttgtattttcccaatcattttctctagtgtaatgtttgctgggataataaaaaaaattcaaatctttcaaaaaccaacaaacaacacacaaccaccacaacacaaaaccacacaaaccacgag

SEQ ID NO: 703820 - DNA, 175 bp, Homo sapiens
  misc_feature (164)..(164): n is a, c, g, or t
cgtcggtactccagatcgatttttacgagtggttcaggggtgccatccggcagagatcgtgacgtcaattccctcaagcggagacgcgtcaatttcataaaactcttcggggccctggtagtattcgatatccagttccatcagtaactgtggcagtatgcccnttctgccaccg

SEQ ID NO: 703821 - DNA, 119 bp, Homo sapiens
ttagactgattgcatttagatagctactccataaacagccccatcacgaaaagaaaaatcgtgatcccgatataaaccattctaggtctacaatgctatcaggagatcctctagaagtc

SEQ ID NO: 703822 - DNA, 308 bp, Homo sapiens
ctcctttaacctcaacagtgatcctgaagagcctgatggatggagagctggtcctgtggggtgctcggactcggcacattacatcccaaccctcagcttcgtgccagtcacggtccccgcctattggcagatccacatggagcgtgtgaaggtgtgcccagggctgactctctgtgccaagggctgttgctgccatccttgagatacgggcacgtccctcatcacaggacccattgaggagatccgggccctgcttgcagccatagggggaatccacttgctggctgtggagtacaacctgcgcgtgt

SEQ ID NO: 703823 - DNA, 660 bp, Homo sapiens
catggtggctcacgcctgtagtcccaactgcttgggaggttgaggcaagagaatcgcttgaacccaggaggtggaggttgcagtgagccgagatcgcgccactgcactccagcatgggcgacagagcaagactccatctcagaataacagaaagaaagaaacaaagagaagaaaagcttatattgaacttctctaataaaaagacctaaagacagaaagcctgatgcacacagatatctaaagtttggcaagtcgatcaattagaggatatttatttggcatcacaaaataatgctttagctccccccataaaatcaataaaaggttcaaatagcaacttttcctaatgtgtttacaatgtatagtcaccggatgtcacctgctgtcgccgaactctcatggcgagttggctgcttgcggtgcaagacacggaattctgagagaagtgaactgcttcttgcaacacaatagatgacatgcccagaaccctcaccgcgattggtgagaccacgaggtggactgtgatgtgcgactgccttttcattgagcaagtgtaacagacattcctgataaaaatacttatatgaaattgccacgaaggaacgtcccttacgtttgcgtgccccggaactccttttcttttgcctacacaggtataca

SEQ ID NO: 703824 - DNA, 310 bp, Homo sapiens
agtgcagtgagggcacgaatagaatggtatatagattagtagtcccaatagtaacttctctacgcatcaacactcacatctagtaatacattagaccacagtagtctatgaagcttaattaaaaataggtataacaacttacacatacatgaataattggaatgcagaatcatatttaacttcccttacccagtctttctataagtcagtttgtatttaattcaacaattgtttttagagaggcccacatttattaaatgtatatcttgtacagcttaatttctctagaaccaatttctcatcctgggag

SEQ ID NO: 703825 - DNA, 184 bp, Homo sapiens
cgactctcttgtgcagcctctgcattcacctttagtcactatgccatgaactggatccgccaggatccacggaaggccctgcagtgggtctcaacaattcgtgctggtggtgaaaaatgcagactacgccgactccgctgacgggccgcttcaccatactccaagagacgaattcccaagaata

SEQ ID NO: 703826 - DNA, 403 bp, Homo sapiens
caagatattgcatatgatggtgaagtaatgaagccttaatctctggatagttactagtcaaacattaaaactgtcggaaattgagtccccaataaagtgaactaatcattggaggatctgtttctcggggacatccaattgggatgtctggagccaggattgttggtcatttgactcatgcgttgaaacaaggagaatacggtcttgccagtatttgcaatggaggaggaggtgcttctgccaggctaattcagaagctgtagacaacctctgctatttaaggagacaaccctatgtgaccagaaggcctgctgtaatcagtgtgactactgtgggtcagcttatattcagatcagctgtttcattttttattattttctatgttaacttttaaaaatcaaaa

SEQ ID NO: 703827 - DNA, 422 bp, Homo sapiens
tcagcattgtgacacttcccaaagaaggccaaagctctacccgacatcctgaactacgtggcattatacttttctggattgctcatttatggaaggctaaccctctgttgaccgtaagccttttggtttgggctgtattgcaaatcctttctaaaattgcatgactaggctctgctcacgtgatgagacaaactgaaaattatggcaagcattgactataataatgcagtacgttctcaggatgcatccagggctccatttccatgagcctgtccaggtcagtttactcctgaccagtaatagcattgtccatctgggcttgctgttgcactgaatcaacaaaccacaatacttcctgagcaccttaggtactttatttgaactatgagtctgtattaactgcttgggtccggagctcgaat

SEQ ID NO: 703828 - DNA, 431 bp, Homo sapiens
ccatttaataagtgaatccaaaattaaccagtgattaattgctcatcagatttaaggatgttccatagtctataactacattccagcaagatagactcatagatgattaacagggacatttcttggcttcctgaatattgtgggttcccccttaaaatgaggctgttcacaagattacaaaaccaagtcctataccatgattcagatagatcagtgaagaggagacagacatagctccatttgctcctccaactagaaatcctcactttctggcaaagatatacctttgataagttcttggatggcttcatcccaaactgccttacttttttggtgactgcattctttgttacaaaaccggcaatccctgcttccctcttcctctctgcttccctctttccctctgcttccctctaccccctctagagcca

SEQ ID NO: 703829 - DNA, 689 bp, Homo sapiens
tccccgctgacagagccggtggtggtactggaggggcacaccaagcagagtgggcatcatcggcgtggcaccccacggtccagagaacgtgctgctcgagtgcaggctgacgacaacagtggtactcatctggaatgtgggcacagcggaggagctgtatccgcctggagcatgcctgcaccctgacctcattctacaactgatcagctggaaccacaatggcagcctgttttgctcagcattgcaaggacacggagacgtgcggcatcagtcgagccccctgtcggggacaccctggtggcagagcgggagaatggctcaatgagggggcccggcccatgcgggccatcattcctggtcagatggcaaggtgttcaccagaggcttcaggcgaatgagcgagcggcaggtggcgctctgggacccagaaaacctcgagggaacccatgggcctgcaggaactggactcgagcaacgggggcctgctgcccttctacgagcccggaaaccaggtgtggtactacgtctgcggcaagggtgactccagcatccgtgtacattcgagatcacagagggagccgtccctagatccacgttcctgaaacaggtgcaccaagcagaggagccgcagcggggtatgggcagcatgcccaatgcggggacctggaggtcaggcaagtgacggagat

SEQ ID NO: 703830 - DNA, 1187 bp, Homo sapiens
ccacgcgtcggcaggagcaggaagccaacctgagcaaagacacgcagccctagtgttcccaaggccaaaaatgctgagaatcgtccactcctaatctgtgtggtggtctgctattgccgggccccctggctctcttctggctattctctgcctctgcctcactattcttgttaggccaggtgggcttgctgcagtggacacccccagtggctggattacgggccccctttccagcacccctctgacaccttgagtttgtgcatctgagctatgagtccttcgactgctgtgatcagaacaaggaccgccgcatcgagtgcccggtactggagacatcagtggaactatatatagatctgaagagacatgagctgtgtggagattacattaaagacatcctttggcaggacgtgctcgaccctacgcgagcaccaactcatacgacgccgagagaaacccagaggacctctccggaatctcccgggccatctgactctgattgactgctctgccttccattctaactgtcactcagccatttccctgctgaccaatgaccgcgggctccaggagatctcatggaacgggacggcacccgcatctggcacctcctaggaaccttacctgacaaggactattgcctaccctaaatgttcctgaaggaacgagtatctaaacagcactgggacatagttgcgcccaagaatcctcaggggtgacttgagaactgcctgagcgaaggataggcacacggggctgcagacacccagacaaccaaggcgaccaagacggagcaagggacccaaatacgcacacctaaggagccgagcaggaagaacatagaaagagaaaaacaacaacataagagagaagccagaacaaacatattgacagtaagacaatcgtttacacacaaggaagggagtaaaacagaagcggtaactgaacaggtagtaataaaccaaagataggcgcacagcgaatctatatgataacagcagcagccaacgaaaaaccaacaccaccagctcaaagagatgcgtagatacaaaatcaactaaacagatagacaataaagcacaaacacatcgcacaggtgttgcatgccaactagacatgaaatacaacgccagccactccactcctgtgtgtctgtctccttagttttacaaacgagagctggagag

SEQ ID NO: 703831 - DNA, 481 bp, Homo sapiens
  misc_feature (281)..(281): n is a, c, g, or t
  misc_feature (419)..(419): n is a, c, g, or t
attcttctccacagctgcagactttcctgggctgtatttctcgcacatctctgaagagtttaatcttcagctcatcgtgtccaggagtggatcataaaaggaatattttttttcctaggagcagtgttaaaatctgtgtcacattcctgaccaaggacagcatcctggcttctggccatccccttcagttcacaaaagctgacattttaaacaaatcatgactcacacgtattaattggttataaatatgttgtgtacactggttagataaaacttaaggncacaaggaggggccaggtaggcgatgtcagtgtgtgaaggggctggattgggcgtggtgaggatgttggcaaaccagtgcatgcacctggttggaagatgctcagccttacaaaagctccaagccctttgtgagccanagtgtctgagagtgtgacccactcctgtaaagtatttatcccacccattaatataatttctg

SEQ ID NO: 703832 - DNA, 527 bp, Homo sapiens
ggtctagtacaggaaactttcctttctggataatgaagcaggtaatggaattcagggtatagtgttcctgtgggggtcattagccgttaacttcttgtgagatgcgggggaggggagcagaaaagtctaagcgacaaaagggcatgtagggatatttgctcctgcagcttgcctatgctgtaaattcttacttcaagtattgaggaaacaataagcgaagtctgatttcccgggcgcctttatacggaatatttcccgctccacaaaatgaaatcgcagtagttttgagttataattgtttatcaatgacaacagctatgcagtttacatatttcatgcatcccagaaatccagattcccatttcctaagccacttaacgttctgatttccagctctgcgagatacaaaagggtttggattttgtgcccttccccatctggcgccactgcaaagcttactaggagggccccacttggagagggaaatctttttcgagaagtccaggacgccaaaaaaaataaagcta

SEQ ID NO: 703833 - DNA, 1112 bp, Homo sapiens
gggttgggtttccatagacgtctgggagacgccaggcgtacagtaaactacgccgtcgtacagcaggaagagagcgatctcctggactaaggggacagataagaaactcagatatggacttaggtatctgagtgcccagaccctaggtgccctgttctaaacacgagagcaccacgtgtcatcatcggacccgtcgtcgtgaggctcacatttgtctagcaagcagtaacgaattatatggggccgtatatatgtatccacgcacaaggtgttacaaactgtcgacgtcagcagaagttcactagtaactgaccatgacaaggacctcactatagatgtagtatgaccatgtgtggaacacacgaatacattttaagctgggacagttaagaaggctcggtacagttcaagggcctcgattaagcgtcgccagtacaatgctctaaacaattgtccggcgagtaactcagagacttcgaatgttgcaaggtacattcatatacattcgagcctgtcgtgaatccagatttgcataagctttgcttccattcgagctcaatgacattactaatacgtgttataacactcacgaaaagtcaccactcattatcttctacaaggtcacacgggcctgcagtctggggcactaactgagttcaaagcttgaccttccttgccttcacacgtccacgtcagaagccagggcgaataacattcggtaaacaagccaaatccggcgcacgtgccaccctcgaacgggccaacacaccatcaccgaccgagaaaggaagggcccaaaagtgtgcaccacaactttctgagaccaaaaggggacgcacaaaaaacgggaaacacattagccctgagaacagcttcctgggtgcaaacaccaaaatacagtgactacgaggaccccagacattaatgcgcgggcatgactacggatgactcacaagcacacatcgataccagaatagacataaagccgcacaagaccatccatggaccacatatgcggggacactcatgtaagctgactgatatgtggtcgggtcacctcagcattcctcttgtctcgccttttctctgcatgagcattaatgacacagagg

SEQ ID NO: 703834 - DNA, 662 bp, Homo sapiens
  misc_feature (150)..(150): n is a, c, g, or t
  misc_feature (165)..(165): n is a, c, g, or t
  misc_feature (168)..(168): n is a, c, g, or t
  misc_feature (178)..(178): n is a, c, g, or t
  misc_feature (228)..(228): n is a, c, g, or t
  misc_feature (258)..(258): n is a, c, g, or t
  misc_feature (338)..(338): n is a, c, g, or t
  misc_feature (420)..(420): n is a, c, g, or t
  misc_feature (540)..(540): n is a, c, g, or t
  misc_feature (557)..(557): n is a, c, g, or t
  misc_feature (559)..(559): n is a, c, g, or t
  misc_feature (561)..(561): n is a, c, g, or t
  misc_feature (570)..(570): n is a, c, g, or t
  misc_feature (592)..(592): n is a, c, g, or t
  misc_feature (594)..(594): n is a, c, g, or t
  misc_feature (609)..(609): n is a, c, g, or t
cggaccgaaaagcaggacatagaagtaaacagcaaatgaaggcatcgagagataagcaggagaatcgcttgaacttgggagatggaggtagcagtgagccaagatagcaccactgcattccaacctgggtgatgaagtgagactctccanaaaaaaaaagaaatnatnaatcccggcnggtgctctacatagcctcaggggcatcatgggatagctcagagggccctngattctgggcagggcaaataaagccagaangagaaattaccatcttctactagagaaaaccaagagaaaaatttttatgctaggatgcctttatgaccacttaatttttnaatcttagttaaagggtctctcccgggtgctaacggctgacaggggccacctctttttggggggtggaggggcctacataantagcgggccttaccccatatctttggttcaaacataataccatcttttggcttcttctgaactttagatctccataacacatgtacggtagaaggtgagggaaaagcatggatgagaatntatgggcagttcagatngngntttcccaanttaggctctttataaatgggtnanggttttctccaaaangggcttcaacagtgggactcatttagtgtaccgggggcacagatactatcttc

SEQ ID NO: 703835 - DNA, 427 bp, Homo sapiens
tggtaatctgtagagtgcagtgacagaaactcatcttactagtgtggagtggaaaagcgatcatgtttttctgtgcactccccaaccccaaccccaagcagatcctgaaagaggcacaggattgcaagtggattatttaggagatgattccagggaacaccaataggggagtgaggaattgattcatggaaaggcaggaggccacacagggggcttcaatgagcagcttactactccaggcaactaggatttgaccccactgtggacctctgcgaggtgatgtggaatagatttcaaagttgttccatccagggggcgaagatattgaagcatttatagcctggctcccatccgtcactggctgaggactggtcccaggcatcaactctctggcttttcttttttcttttctttttttttttttttt

SEQ ID NO: 703836 - DNA, 108 bp, Homo sapiens
gaatggaaagtatttctatttgtcccttttttgttttctgttctaattgtcagggacatatgtagtggctataggtttccttaaaaggaataaatttggaatgctcca

SEQ ID NO: 703837 - DNA, 420 bp, Homo sapiens
tacgcctgcaggtacggcccggggtacgggtcgacccacgcgtccgtggatgctcacagtcatctatcagatggaacacaggtcccccaggggagaagctagagaaagcacccaaggagctgaaggggtctgcagccctataggtagaacaataatatgaactaactagtacccccagagctcgtgtctctagctgcatatgtagcagaagatggcctagtcagccatcattgggaagagaggccccttggtattacaaactttatatgccccagtacagggaaatgccaggccaagaagtgggagtgggtgggtaggggagcagagtgggggaaaggtatagggaactttcacgaatagcatttgaaatgtgtatgaacgaaattatctaataaaaaacacaacaaaaaaccaaaaggg

SEQ ID NO: 703838 - DNA, 404 bp, Homo sapiens
ttgaggatccccctgcatcccggggagtacctgccacagagaagggaggtgcactggcatatcggactcatgccagatgtagcaaacaagctgagagagggtgtggcatggcttgcattcagcactactgagccttttctctttgcctacttcctcattcccctttctccatgcattttcctgtctttcccatcattaaatgttgaaagcagaactagaagtgtcaaaggccaaccctttaccttccttctcctaaatgagcctttcttctgtttggtttacaaaatgccctgaactctgagagcttgagcagtctcttaatcactgtgactctcaatctccttaccccaaattggagtcatacctaccgtccccccccccggatacagctccccgggatacag

SEQ ID NO: 703839 - DNA, 1246 bp, Homo sapiens
  misc_feature (272)..(272): n is a, c, g, or t
  misc_feature (475)..(475): n is a, c, g, or t
agcggactatcaccctgggctgcggcttctgaagcttgcctgtgagctcatgtgagactacatgggagaggctgggctgttcgggatgaaggcctgggtgggctctaacgctcccgcgtggagggcgaaggaggcctagacgcagtgaacatttcgtaagcggatgaccaacgcgcgcgttgtggaagagagccccagtcaccctggcctctggttacactactgtcccctgggttaccgtcacgctagccgtcattctgctgtgcattcanactgtttggtgcatcgctgtggtcgtgttttctcccagctgtcgccttcggttctgttcggttccattccgctgtctgcgacgcgtgggcatgcgcgtcggagcacactgcggagaaggtgggtgccgtgtgtctctggttaatcaaccaagtggcattcgcacatctttgtaggtacacttgtagcgctctacttccagttnctgtggttgtctcacattctaacacttcttcagaaacctcttggacagttcttcacaatcaacgggcttcctgacttgtacgacatgggactcgcctttgcaatgagtagctacgttgcgtatgttcgtgcgtattgaaatccgacggggtgtgcactttccgtgcacgtgacaatatatgtgtagtacctaacattgtcgtctcgcatttttcctacacgggtcccttgaacccccggtgcatttttaaaacaacatgtgtccgcccttaggatatgcgaatacctattcattagtaggtacgagggaaacttggaatcgtatttttgcatcgctactcaatcttccgttgatcctgggttgggaggttcccaagctccaatcctagggctactttccggacttccgagcaccggttcgaaacacatttttcccagcgcatattaccttgtacagattgccctttggccatatggtttgcacctcggttacaccccttggtttgcaccagttctttaacatttactgctgcggccggcccttcaactagggcgttgggcgcttccagccccctttgggttccttccgaatttccttggtgcggcctttggggtttggcacagctattcctataagtttcgcaaaaccgctttgggccccctttcctttcccgaagctccggtaaccggaatttggcggccccagagctcccggggcccaatgtcccgcatgcagagttagtgtgcccgcgcttggataccctggggcccg

SEQ ID NO: 703840 - DNA, 431 bp, Homo sapiens
  misc_feature (3)..(3): n is a, c, g, or t
  misc_feature (11)..(11): n is a, c, g, or t
  misc_feature (29)..(29): n is a, c, g, or t
  misc_feature (38)..(38): n is a, c, g, or t
  misc_feature (43)..(44): n is a, c, g, or t
  misc_feature (48)..(48): n is a, c, g, or t
  misc_feature (50)..(50): n is a, c, g, or t
  misc_feature (59)..(59): n is a, c, g, or t
  misc_feature (72)..(72): n is a, c, g, or t
  misc_feature (99)..(99): n is a, c, g, or t
  misc_feature (103)..(103): n is a, c, g, or t
  misc_feature (113)..(113): n is a, c, g, or t
  misc_feature (117)..(117): n is a, c, g, or t
  misc_feature (119)..(119): n is a, c, g, or t
  misc_feature (123)..(124): n is a, c, g, or t
  misc_feature (139)..(139): n is a, c, g, or t
  misc_feature (160)..(160): n is a, c, g, or t
  misc_feature (206)..(206): n is a, c, g, or t
  misc_feature (216)..(217): n is a, c, g, or t
  misc_feature (219)..(219): n is a, c, g, or t
  misc_feature (225)..(225): n is a, c, g, or t
  misc_feature (228)..(229): n is a, c, g, or t
  misc_feature (232)..(232): n is a, c, g, or t
  misc_feature (254)..(254): n is a, c, g, or t
  misc_feature (257)..(257): n is a, c, g, or t
  misc_feature (259)..(259): n is a, c, g, or t
  misc_feature (261)..(261): n is a, c, g, or t
  misc_feature (269)..(269): n is a, c, g, or t
  misc_feature (272)..(272): n is a, c, g, or t
  misc_feature (275)..(275): n is a, c, g, or t
  misc_feature (277)..(277): n is a, c, g, or t
  misc_feature (282)..(282): n is a, c, g, or t
  misc_feature (286)..(286): n is a, c, g, or t
  misc_feature (303)..(303): n is a, c, g, or t
  misc_feature (312)..(312): n is a, c, g, or t
  misc_feature (318)..(319): n is a, c, g, or t
  misc_feature (350)..(350): n is a, c, g, or t
  misc_feature (360)..(360): n is a, c, g, or t
  misc_feature (362)..(363): n is a, c, g, or t
  misc_feature (365)..(365): n is a, c, g, or t
  misc_feature (371)..(371): n is a, c, g, or t
  misc_feature (417)..(417): n is a, c, g, or t
tanaaaaaaantttattttttaggaaaanagccaaaantatcnnaaangngaaaaaccncaaccaaaaaacngaaaaaaagttttaggaacaagggaanatcntattgtcacncatncncagnnaaacaccattttaangcagggccagagccaaccgcngtcccgtccaaccccaaagggacaagggcccggcccccccccccgngtaccgcccnncncccccnccnnacnggggccagcaaaaagcagaggnccncngncttccccncangcngngatcntggnttagagggagggacagngccgccccngccgcnngggggtcgcgttacttaggaacagcagcccntttttccccncnncngtaggngccttcccatgtggaagccaattgttttccaaaaaaaactgaaaanaactttcaaattcc

SEQ ID NO: 703841 - DNA, 549 bp, Homo sapiens
atacttacctggcagggttgatactattatcaaacgaaggtggtttttctcagggcgaggcttatccattgtgttccggatgtgctgacctctgcgatttccccaaacgtgggctcgactgcataatttgtgttagtgcaggactgcgttcgcgctgtcctctggagcttttgcgttgcgaataggagatgagccgtaagtgcttttggaattcagtgttcgtcctcgtgtttagcggctgtgatctgcccggtcaggtgcaccggactgcaccgcgtagaccacaggttggactttattcgaagctacagcacttcacctgtcactcattctgttgtctctccaacctcatcctattggcctggacacgctactctttacaacccatcctctctcttgctcgtgtctcctttactgccgccctaccctctctccccctcgccttaatttttctccttgtcaccctcttaatttcgctactctctattcgccgcttcactccctctcctccctttctacatcggtacactccttccccttttcttctcc

SEQ ID NO: 703842 - DNA, 290 bp, Homo sapiens
agatgtctacagagacttttaaatctataatccaggagtatataaccatgtagcacagacaattaagccaaatgcaaataaattaaaatcttaccaaaatatcctataaacactgcaactattcttttcaaaaggaccctaatcttatgtgaaaagagctactgtgtgggaaccagaaacctagctatactgatctaggaggaaaggagcaattcaagttgcatgtggttggtgggagcaggcagtagtatgtctcgctcatttattttgctgctgttgctgctgtattg

SEQ ID NO: 703843 - DNA, 370 bp, Homo sapiens
ggtcgacattcgattccatttgatgataattccatttgattccatgcgatgattctattcgattccattcaatgataattccattcagttcagtgattcctctggactccatttgatgatgattccattcaatgattccattcgattctattcgaaaatgattccatttgaatccatttgatgatgattccattagattccatttgatgattccattcgattccatgcgacgatgattccattcgattccatttgatgattccattctattctattcgatgatgattccattcgattccattcaatgatgattggattcgattccatttgatgatttcatttgattccattcgttaatgatttcggtcga

SEQ ID NO: 703844 - DNA, 196 bp, Homo sapiens
  misc_feature (16)..(16): n is a, c, g, or t
  misc_feature (156)..(156): n is a, c, g, or t
cttaaacgcactgganatatcctggtgctatgtacaaatcttccttgtgtaatattctcagaagtgggatttcttgaatcagagagtacataaaatttctagataaagtcaatagcttttcaaatcaaatgcaatttacatgctattagcagtganctgagaattttacactcctcgcacaaaacattcagtaaca

SEQ ID NO: 703845 - DNA, 552 bp, Homo sapiens
  misc_feature (265)..(265): n is a, c, g, or t
gttatgatctagaggatcccgttcgggctccattcaggctctccagaagggtggggtcctgtgcccctccgtgaacccaagttgtgctctgttactacttggaccagatgtgactccgccatttctgtgcctaggctttaaaagatggtcacttctccatttccggtgcctggaacattctcggggagccttgacaccacatttgaagttgcctatgggggccagcagggtggctcacgcttgtaatcccagcacttcagaaggncgaggcaggcagatcgcatgaaatcaggagttggagaccagcctaaccaaggtggtaaaacccgtgtctctactaaaaattacaaaaattagaggggcgcgggggggggcgcttgtaatcccagctattcaggaggctgaggcaggagaatcacttgaaccggggaggcggagtctgcagggaggtgaaatcacgccagtgcactccagcctgtgcaacagagcgaggctctgtctcaaaagaaaaaaattagttgactgtcggtttggcatggtggctcatgcctc

SEQ ID NO: 703846 - DNA, 140 bp, Homo sapiens
tagaggcacaaggagggggggtttgtggttagagccccagccaggaaaggagagagtccagaatgttccaagagtctagccgcagccccagacaccatgagctggagggtcgggatggggcagcctccttgtgcctctgg

SEQ ID NO: 703847 - DNA, 105 bp, Homo sapiens
catatgagcgggaaaacgtttagcgaatagaaactttttttctgaatgtgggttttctgtgtccttttggcctactcccaagaaggatattggtagagctattga

SEQ ID NO: 703848 - DNA, 1101 bp, Homo sapiens
gaaaaaaaaaaaaaaaaaaaagagtttggggaagaagaaaatgaacaaagggagactatgagttgtttggtaaaaggagcggctcagctgtttgggaaagtgcctacgtgacattccagaaaatctccaagtggatttgtggttcttgggctctgtgtggggtttgacacgaagaaaatgtgttcaggtggcggtgagtggaccacagagtgtgcaacaaggcagggtttggcaggcgtggaagatataaccatgtgtgtgttagcgccacttctagaaaagttctcgtgctcgtgggccataacgtggtgggtgctcttcagacactttgtggggaaggccaaggccagaacagggattgtgcctgtgagccccagggagttctcaagaaaccaagccctgtggggacaaaacaactgagtgtgcaagacagcctcccaactcgtcttagcacacaaaaaacaatattttttataagcgccccgaggcatatgtgggcgtgggcccctcatgtgcgcccgtgtataatctccccacaagaccaacctatgtggcgaaagggcccaaagggtgtgtgggccgggtatctcacaccaggggtgctccaggagcaaggttctccacaagaaaaccccgaagtgcctgtggccccacaaggaaatgtacatgtggaaaaaccccccccgcggttcgttgtgttccttaaaaaaaaatgttaaccaaaaacaaatctgttagcccccaaggcgccgtttgtggtgtgggccaaacgtcaccacaccctataatattaaatactcactataaggctcattaaccatcacgaggggcacagacgtctttgtgacaagcggcgcgggcaacaagacacaatttggcgcgccctgggaaaggccccctgtggggaggagaacgaaacccagcgcaggtctttttgccactgcgtggataaccccctgggaagaatattgagggcgcccccaaagtcgtggggacccttcacccaaggctctgtgtaaagcagtgctaacaccagtgacgtccaagcgagaacgtgtggttgctcttccagaccacacacactgacacaaccgacacaca

SEQ ID NO: 703849 - DNA, 913 bp, Homo sapiens
tgcttgcgaaaatctgtgatttcatttgattaggctaaaagggtacataggcttgattacactgaacgctgcatctatatgtcactgacataaagtcgaaaacacataacatgcaggcaaataactacagtacttctttaaagggggtctggctgggttctgctctcactgaacatggccagtcgctgattaaatgtgataaaaccccataatctgtttcggtatatcgtacacaaaccttacaaaaataaactgaacttgcaatatggtttgcaccaaaatctgtcgttaaagactgaggataaaatacctgctcaattgttattttactaagtatatatttacatttcacccaggcaggtcattttcttttgtgattatagaaagagtagtcgttgattaaattttcagactaaatataggacaggtacaatttgggataaaatagtcacatttataagaaccggctaatgaacagactgacttgaaatagatgcttgtgactcatggaacagtaattgcatccagccgatttcaaaataccagattcactgatgcataaaagtcaatacatattcgaggaataaggtctcctaaaatcttaagcttcacgtaataatgttgcgtagcaaatattactgcgtctagcctttaggaattaagatctgatcagaatttagctaaagggtagtgtctaacaatgagactaaaactgacagatggtgcctgccctgaggcaaacttggtagtgtcggcaggtgttatacaggctggcagaggtaagctgtccagggacaattgggacactggttaaccaagggattttaaagggtccttacaaaagatgccggacaattccttccggtaccccaccttgtgcacagtcagtgggaaagcgagccacacaataatg

SEQ ID NO: 703850 - DNA, 195 bp, Homo sapiens
cgatggtgccttggatacgcgggtgctgccacagtcttcggctgatatcaggcgaagactgtgtgcacgatgacgaggatgccacaggcaatgtcagcagtctgctcagtatgtctagcacagcaagattcgttatgcatagttaagtggttcttcgtgtttacttgcatctgacaccctattatacctaaacag

SEQ ID NO: 703851 - DNA, 116 bp, Homo sapiens
ttttttttttccccccgggggggaaaatttaaccaaaaaaaattggctttcaaaaattttgttttcctttttggggggggggggtttggggaaaaataaaccccccccccctttta

SEQ ID NO: 703852 - DNA, 351 bp, Homo sapiens
cgtgaagaattaccaaaaaaaaaaagttctgagcccagtcctttattatctcaggagattttacttcttgaccaagtcaagacatgatgtctctattttcgccgctaatggttttctctagatctgattctgtgttagcggtatcaaaccaacttagaaatttccaattcatgcacgcagttttcacccatgtggtcccaggagcctctgggcccaggcagaatatggaagggtacagggttacagttacaggggctgaaggtgagtctataattcactaattcaaaagtttagttaaatgacctcaaagtatttatagagtttccctagtgaccctgcctcgtaaagctg

SEQ ID NO: 703853 - DNA, 1001 bp, Homo sapiens
  misc_feature (374)..(374): n is a, c, g, or t
  misc_feature (661)..(661): n is a, c, g, or t
  misc_feature (786)..(786): n is a, c, g, or t
  misc_feature (817)..(817): n is a, c, g, or t
  misc_feature (825)..(825): n is a, c, g, or t
  misc_feature (865)..(865): n is a, c, g, or t
  misc_feature (909)..(909): n is a, c, g, or t
  misc_feature (937)..(937): n is a, c, g, or t
  misc_feature (944)..(944): n is a, c, g, or t
catgttgtggtgataggcgctgcctttgttgtggagcccctcggggaatatgtgtctgttcgtcccgcccgcgttctgtttacttacgatgtgtgcgctttccccagagggggtttttggccccggtcgccgatgttcggaagtttgattcgtgtgtgtccgtgctccaaggtcccccccaatcctgttctaggcgttatccgccgggtggtttgccagccctgtgtataacccgtgcacatttgccttgggttctcacggcagacacatgtggtgaaattctatggcttgtaagtgccccagggcccccttggtggattccagatgtctggaaatggaagagaactgggagagtacggtttccatgaatatanccgaggtccaaacagtcaccgtgaaatctctcagaagaactcattaagaaataccagagtggagagaagctcttccatagctaagcatctccttaccgtccctaatatagtagattttaaagaccaaatttttcttttcttgatttttttaaacactaagctaaatcactattagtattaaatagctacccactagaaaccttgaccactgtagcttcttctgaaagaattatttgcccttctgaaaatgtgaccccccagtcctatcctataataaaacaaagccnaattcggaatgtatgatctctctagcctttgtcaatagttaatgtgattttcctcttgtagctaacttttgcacggataataattttaatagaaaaggaaccacgttgcactttagctttctttncccttagtgaacttcttgaagtacttaaacnaacaccgntaactcgcacgagtaaattgctctgttcccacgtagttantaaagtccttggagctgttttgaaaagtttcctaggaatgtcantgtctgcttgtccaaagaaataatcccngtaatantttagctgtaaactgaatataaagcttaataaaaaccaccttgcatgattcttgtta

SEQ ID NO: 703854 - DNA, 689 bp, Homo sapiens
gtggggaagactggttgctgctgtacggaaatcgtaagccgggtggagtgtgataggtgactcgacgctagggagattcaattcaacgcgatcactatgtcgacagacacattggtgtctcaccttccttcatatgaggaagatcagggatcaaaattcattcgaataacgctatagaggcacacattggtacccgttgaaatagtgggttctgagacgaatttgtagcatatggattatatatagtgaagatgcaggtgaagatattagtgaatgtgcattcatcgtgatccacatgcgtgtggcagccaaggctttgttgtaggagcaatgactgttggtatgggctattccatgtatcgggaattctgggcaaaactaagcgcttaggaagaagagatgctgtcttggtcttgtggaggagcttgctttagttagatgtcttattattaaagttacctattattgttggaaataaactaatttgtatgggtttagatggtaacatggcattttgaatattggcttcctttcttgcaggcttgtatttgcttggtgaccgaattactagtgactagtttactaactaggtcattcaaggaagtcaagttaacttaaacatgtcagctaaatgcacttggatggtggttgaaatgtccaccttcttcaaatctctaagatgaacttat

SEQ ID NO: 703855 - DNA, 838 bp, Homo sapiens
cagaatgggtcccggcacacatgggggtgaaacaaagaggtgtcccaaaagacggaaatgctgccgccgaggctgtttgtcgcggcaaatgtgggcgtcgggttttcggtaacaaataaaacagcttcgtcccggcgccagacaatgtggcggctgttgtgaaccacgtgcctgccccacgctgtttctctccgccgtcatatggtacgctgcttcgccatcctcttatctggaccatgctgcatgcaacatactgcgtccgcgggggccttttccatgcaagatattaagtcccctgcgccttcctctctcaagaatagggtcagtcacgtcgccccaaatggagggcaacacgtgagtagacccctgccaatcaattgatcttttctaactacgggaaggcctcctccgcagtttgtttcgtatcaacgggtgcgtggtgtctttccactgtgtgggggcacaatcactcgcgctccccccactacaggtgttagtcaaattgtcgcccgctttacccccccccgagggtactttcacccaatgcagtggtcccaccaactcttgtctttctgtggagtgctggccccaagagagcatgcattttcttggttgtgcaattccctttggtttgttatagttgctcatcacactctaatgtcagatagtggagcacacgccttcgtgtgtggccttccgcccaccctcggctgcgggcagtcagtttgttccacccaacgaaagacaaggcgctacccgataataaaagaaacaaagaacacaacaacaaaccaactcaggatacgttaataacaaacagaatacaacaaaaaacata

SEQ ID NO: 703856 - DNA, 804 bp, Homo sapiens
tgccgcctgcgagcgggtggcctagccctaatagtctcaatctccaacataatatggctagatagtacataactaaactaatccaatgctaaaactaatcgtcccaacaagttaatatcctacccagtgacatggattttccaaaaaacacacatacatctggaattcagcacaaccacccacagcctaatttaatagcattcatcccttctattaattttttaacccacattcaagaaaccaacctaattttaagttgtgccccaaacctttttcctcgagaccccttaaaaaacccccttcttaaatactaaactagctggatttcatacccttcaaaaattcatggcaagccaaggccactttatccagtgaaccacttatcgaggaaaaaaacgtctaagctctctaatagctaatctccctaaaaaaatctccttaagttattacacattcacagccacaagaacttacatcatatttaatatcttcttcgaaaccaacatttttatcccccccacttgggttaatcaatcacccgatggaaggcaacccaagcaaaggaacggcctgaaacggcgagcgcaattactttcctatttctaccaccccctaagtagtagcgtcccctttcccctatatttcatcggcacttaatattgaacactccaaaaaccacccctaagggtacactaaaacattctactaattcattctcagtggccacggaattatacaaatcctggagcaaaatttatattggtgaggttaaacaaaataagtttaaaagaaaggatacttctg

SEQ ID NO: 703857 - DNA, 311 bp, Homo sapiens
tataagtacaatcaacgtaggcctcaactcaatcgcaaactataccaaagttaaagaaactataagaagcttgaactaagcgataacagagtctcaggaggcctggaagtatcggcagaaaagagtccgaacctcacgcatctaaatttcagtggcaacaaaataaaagcactcagcacaatagagccactgaacccgttatcccccctcaagagctacacacttttccattgcgaggtaaccaacctgaacgactcaccgagaaaatgtgtacccagctcctcccgcaactcacatatctcgacggctat

SEQ ID NO: 703858 - DNA, 217 bp, Homo sapiens
ggccttcgtctatctaccgtgttaggcttaggaccctaagtactaagtgtgtccaggaggctggaatctcatacaatggaggaaatttggagattaggataaagatttggagaaagaggcatgagaagctaaagatgcaggagttgcctatgctggctcttgcttcgtggtcatgcagtttaacaggccctgggtgaaggctgagggctgctgtttt

SEQ ID NO: 703859 - DNA, 356 bp, Homo sapiens
  misc_feature (91)..(91): n is a, c, g, or t
  misc_feature (97)..(97): n is a, c, g, or t
  misc_feature (116)..(117): n is a, c, g, or t
  misc_feature (124)..(124): n is a, c, g, or t
  misc_feature (139)..(139): n is a, c, g, or t
  misc_feature (179)..(179): n is a, c, g, or t
  misc_feature (195)..(195): n is a, c, g, or t
  misc_feature (214)..(214): n is a, c, g, or t
  misc_feature (219)..(219): n is a, c, g, or t
  misc_feature (238)..(238): n is a, c, g, or t
  misc_feature (245)..(246): n is a, c, g, or t
  misc_feature (263)..(263): n is a, c, g, or t
  misc_feature (270)..(270): n is a, c, g, or t
  misc_feature (276)..(276): n is a, c, g, or t
  misc_feature (339)..(339): n is a, c, g, or t
  misc_feature (344)..(344): n is a, c, g, or t
tgtgtctcttgaacatacttaggatattctgcacattatggaaaaaggtaaattttagaagtttctgctctactaactgtagatatttatnaccctncgagttatctatttttatnnccacctnggtccatttgttcanttttaatttcacattttcttattgaaggtattggtaacangggaggggagacaccntatgattaggcagcttcanttttntactacttcagccaatctntgaattnnaaaaactacacttgttngccttgntagganccaccctcctgtaatatggaacaaatatctgaattgaatccaccctaggggacggggtcaaanctaancttgtggttttt

SEQ ID NO: 703860 - DNA, 418 bp, Homo sapiens
ttgcgctgtgtaacacaagatgcctccgtgagaggctggtggtcagccctggggtcagtaggttaacataagatgcctccgtgagagggtggatagataaaagcatgggtgtaagataagaaggaagatcactaggatagtaatcaagacatgtactataggatagcacatgtgataaaagaaaaacaggagacagagacgataaggctatgggccccagaccaaacggatacacagaagaggcgagccagaacagctaatgcaaaaagtaagaatgagaatatgaattataaaggcaaaagacaaaacaataggaaacagataaatatatcaacaatgacaatgataatataaagacaacaagaattgcatcaaacaacaacagaagaagagaaacagcagaaaacagaacagtaca

SEQ ID NO: 703861 - DNA, 218 bp, Homo sapiens
ttgacctagttaattttcataggagtccttatgaatgtagtttaaaatatggaattgatggtgatatggttaatcaaatcatttgaccaagttattataaattatagaaattaagaaacagtgagaaattataggtcaaataattttctgggctaaataattaatcaaagctacccatataagattgttaatttaatattactggagtataattgagg

SEQ ID NO: 703862 - DNA, 990 bp, Homo sapiens
ggctgtgcttttaaaaagagatgcttgcaaagcaatagggaacgtgttctcggggcaggtttccgggagcagatgccaaaaagactttttcatagagaagaggctttcttttgtaaagacagaataaaaataattgttatgtttctgtttgttccctccccctcccccttgtgtgataccacatgtgtatagtatttaagtgaaactcaagccctcaaggcccaacttctctgtctatattgtaatatagaatttcgaagagacattttcactttttacacattgggcacaaagataagctttgattaacagtagtaagtaaaaggctacctaggaaactacttcagtgaattctaagaaggaacggcacggaagacaggaccggaacacgaagggacgggaaaccaggggagcaacacgggacacccacgacagacccaccagacgaacacgactgaacaatacggacacaaactacaagacaaaccaacattaagggccatattgtacgatttccatgttaatgatctaatataatcactcagtgcaacattgagaatttcttccaatggctcaaaaatggaaactgaacagcaagtcatggggcaatgaatcactttgggcagtatcttcctcaatggtcttcgttaagcccaaaaagaacaagagagagacgacggaacaacaacatatatacgaggagcctccgaggcccaagaagaaaggtctagaaagagccacaacgcagttagggccacagcgaccacaagagaggcaaacaaggaacacactgtggccagactagttgtgcaccaagcgaaaaacacgcgggcacaacacaaaagaagggcggtgagagcattaccacacaaaatcaacaacagccgggaggaaacaccgagagtgtacgaaacaaaatccagaatgagctccggagaccagccagacggagcataaacagaggagtccagcaaaccaataagaaatgcc

SEQ ID NO: 703863 - DNA, 107 bp, Homo sapiens
gccgcccactcagcattctttacttttctagtcataacctattttcacgctggaaaccagaaaggctggttctatgtgcagatagcaatgctgaggtttagaggtaa

SEQ ID NO: 703864 - DNA, 197 bp, Homo sapiens
attcattccagcgtagtcctagatcgctgccattgcactctagcctgggtgagagagcaatgagagcaagagcctgtcttaaaaaaagaacaaacaaaagaaaactccaaaataaaaggggccaaaaaatccttaaaagggttcgctcaggggggggttgccctgagaaatcccagtccccccccgttggcggggcc

SEQ ID NO: 703865 - DNA, 831 bp, Homo sapiens
agcggcattactactaataagtcgaataataccaacgcgtggatagagaaaaaaaaatcaagagaattccaggaaaaagaaaaaaacaccaccggttagatgtatcctacaatttgcgtataattcatttggaagaaggttgtgctctgggacgtattttggagtgaccttctttcagccagaaacaatagacataagttgtcccaggtgtgtggatggtgcttgtggctctaaaaagtgacacgttgagactctcttgacaagaatcccaacaactgtacaaataaaagacctggccgggcgcggtggctcacgcctgtaatcccagcactttgggaggccgaggcgggtggatcatgaggtcaggagttcgaggcctgcctggccaacatggtgaaaccctgtctctactaaagataagaaacaaaacaaaagaattacctgggagtggtggtgcgcacctgtcatcccagctactcaggaggctgaggcaggagaatggcttgcagctgggagatggaggttgccgtgagctgagctcgcaccatatacactctagcctgggcaacagagtgaacagtgagactccggctcaaaaacaacaaggcaacacaattcaggttttacacacttgtgacctatttattgcgcgtgtaaggggtttgctcaaatatatgtaacataatgttaaaagatgatatagtgtggaattatagtcgcaatagtgaagaaatgtggagttacaatgtggatacacgagtgagagaactgttacacaaaggagattcttgagaaaatggaaagagtaaaaatgcacaaagtaattgtaaa

SEQ ID NO: 703866 - DNA, 356 bp, Homo sapiens
catcgtgagcagcgacagctaagacttggggatcatctgacactgtccataatagttttgtctaagattttcatagagtgtctataattcttctctattttaacctctacagcattctctgctacaaaatttgctgcagatttttgcacaggactccattccaaccttccagatttaagttctgaactgtattcatcaaatgaactaaggtcctggacactctctccaagtttttccaaaagaaatttgatatcttcgctgaatgttatctatcgtacttctgctgtgccaagttctccaactgtttctagaactttgcactgaatatagccagggctatattcttggcgagtcac

SEQ ID NO: 703867 - DNA, 319 bp, Homo sapiens
ttgagtccgggtagggcctcggggttatgaacagagcagagacatcagagcgtgggggtcacctggctggccgggatcccagcttcagccctgtgggagtcctattgttcctgtcatgcacttatctggtttggcggcagtgaagacaattggtatcctactgtgaagccctgggccttgcagaaggcggtgaatttctcctattaactacagccctggggggtctgcggttctggcttgtagacgggtggccatgctggaaggtccttcgtccagggaccctttgctggcccttggcttgatacatgcaagcggcgta

SEQ ID NO: 703868 - DNA, 324 bp, Homo sapiens
catcgtgagcagcgacagctaagacttggggatcatctgacactgtccataatagttttgtctaagattttcatagagtgtctataattcttctctattttaacctctacagcattctctgctacaaaatttgctgcagatttttgcacaggactccattccaaccttccagatttaagttctgaactgtattcatcaaatgaactaaggtcctggacactctctccaagtttttccaaaagaattatgaactcttgaaaatcttgacaaaacttttggaagtgtcagatgatccccaagtcttagctgttgctgctcacgatg

SEQ ID NO: 703869 - DNA, 1075 bp, Homo sapiens
gaaggccccaccgaccctcggctgcagaaacccacagactctaccggcctcctccccgggctgccaagcccggacctgctgaggcgccctctcccaccgccagcaccgagtggggatgcctccaccacagacaagcgatcaccatacgacacctcgagtgcatggaggacggtgaactgggctcagggacggaggagggcagtgtttaagctagttgttgatgaagtcgatatcagccttgtacagaacgctgaggtaatcccaaactgactggaggaggccatcgccataagtagcacgaattgtatagataagatgatgacacaagcaagcaaggattgatagaaggcaaagtgacaataagacatcaggccatccaagaggcaataggtgcagaactaccagaaatgatcggcaaatctaggccaggaaagccagaccaatacaacagtgtaagtgcctgtatgcatgcattgtggcaacccatctatctttattactatatatggaataagaaaagggaagatgtagcaatgggaatgattggaagtaaaagaagaagtacaagaccaggaacgagtatgaaacatacaagcgagatagagaagaaatagacaggagagagacgcgataagagattgcgaaaagaggaagaggagaggccgaagagaagcaagagtatagaataaaagggataaataaccgagaatatagaatgaaaaaataaatgaggtaaaaattgagaaaaagagacgtaaaatagagaaacgtagatgaaagaagagcagaacatggagtaacgtcagcaaaagagaagcaagaagaagaagaaggaaagagagaggaacataacgagaataagaacggaaggaggaatataaaagatgcagaaaagagaaaggaaaaaaaacgcacatataagaagaaaagaaaaacatgtcataggagaagaaggagatagatgagagacagaaagaaaaagaaggaaagcgacacggagaaagaaaggagaaaagagaggaaagaaaggaacaagagagagagaagaagacagggagaggactagaagaaaggg

SEQ ID NO: 703870 - DNA, 797 bp, Homo sapiens
ccaaactcgggttaatcagagggggcttcgcgcgcgccccacagcgcctgcgcatcgcactccggcggtgctgcttggggccctcctccttcaccgccccttcaccacctctacacgttctaggccttctgtcctggagaagaagctatagtcgttctccctttgtgggcccggggcgcagccaattggtggacggcggcgaagggaggggaactggcagcggagaggaggcggaggaaactagccaggcctctgcacggggacagaagatgggacgcatactggggaccagcagagagcaggagagcccaatacaacccggggcctcgatggacttcccggggtgaacccggaaagataaatcgggtctccatcggtgggaagcaggctgcaaatgagccggggagccatttataggaacagctctccaggcgggaaacatggctgggccagatgtggacacacaaggcacagaattacccagagaaagcctttagagtgcagaacatgtgggagataaagttatatggtatgtccagagaacaggagttcagtttgagcacacaaagggaccaagggacaatatgtagagaatacccatacacggacttgacacaccaccacaacacccaagatttggcacaagaactggggtcatgtgacagcagatgagagtggtgggaaaccacgaccccaaggggactgtatgaggcagacgttggcgaggaaaaacgaccgggacataaataagcacacaggattggatggaatacccaacaagattaaaccccaaaatt

SEQ ID NO: 703871 - DNA, 233 bp, Homo sapiens
  misc_feature (192)..(192): n is a, c, g, or t
tgtctagaggatcccaattctgcaccacagctcccaagtaactggggctacaggcgccgccacacgcccggtaatttttgtatttttagtagagacggggtttcaccgtggtctcaaccttctgatctcatgatccgcccgcctcggcctcccaaagtgctgggattacaggcttgagccaccatgcccggnctcctttgttctcttaactgcagaattgctgtgggtggatt

SEQ ID NO: 703872 - DNA, 575 bp, Homo sapiens
tgactggtgaaaaaaatctaactctacatgatgataacattgtacagttttatatacaagctctgcaggaactagaagaaattattaactttttagaactatatataattctaattcacttgtctattttgtggggaggcagactttggtatggagcacagaaataccaaaactactttaaatggcaagtaacaccaactttattcttgtaatcccccatactggtcgatcacagcaaacttacataagtgggctattgaccgaaagagttcacaagcttaagatacagaagctatttgttcaacggatagaatgcatctaagagtttaggctcaagatcaatctttacagcttgatatttacagtttttaatcgactggactgcagatgttttttcttttaacaaactggaattttcaaacagattatctgtatttaaatgtatagaccttgatatttttccaatactatattttaaaaaattgtatgatttacatatgcacctcagttctgaaatacattacctctctgtctcattctgccttttatactgtctaaatgcatcagattgattt

SEQ ID NO: 703873 - DNA, 456 bp, Homo sapiens
gggggtttggttttatttatcaaaaatttaaaagaaaccataaaaataaaaaaaactaaatgaaaagactaaacaaaaagaagatacaaaaaaacaaaagacatacaacaaagactatctgcactacataacaaaagaacaaccgttaaaagaaagcagccacaagaacatgtcatgacaacctgaccccctgcttcagggactttccccatcggtgacatcgtcacagtggcctattgccagcctctgagcatgacagtgcgctccaacgtgctcaaggtcaccaaggttgccgccaccaagaagcagttccagaagttctgaggctggacatagccccggtccccacaatgtaccgttattggctcattccatttcacccctttcccccaatctcaacacgtcgtccgccttggtccaaccaattttggacccgaccaagcttgctgcggcccc

SEQ ID NO: 703874 - DNA, 224 bp, Homo sapiens
agttggagaccaggtggctaatatggtgaaacctgtctctaccaaaaatataaaattgttatattttatataatacagctgggcgtggtagtgcatacctgtaatctcagctatttgggaggtggaaacaggagaatcacctgagcccgggagttggaggttgcagtgagcctagaattgcgccactgcactttagcctgggcaacagagcaagactccatctc

SEQ ID NO: 703875 - DNA, 404 bp, Homo sapiens
tacttgccacaggttaagtctagagtctaattgtttaaaggtgtcagctaaagaagaaaagtttgtatatatgttagaaaaatactagagaaatagtgcttagaataaagttgtctttctgggacaggcgcggtgggtcacacctgtaatcccagcactttgggaggccgaggcaggtggatcacctgaggtcagaggttcgagaccagcctgatcaacatggtaaaatcccgtctctactaaaaatataaaaattaggctagacatggtggcaggcacctgtaatcccagctactcaggaggctggggcaggagaatcacttgaacccagggggcggaggttgcagtgagctgagatcatgccattgcattccagcctggggaacagagcgagactctgcctc

SEQ ID NO: 703876 - DNA, 515 bp, Homo sapiens
tgagtgttcatcgcagtgtacgtagcggataattgtataccatgtgcttagaagagcataaaattcagttccagtaattatggctgctgttggtaccagacaaaatgaagagttaccttgtacatgcccactatgtacctcagcacagcagggagctgtgttagtacacactgaagggatccaactggcaaaagaactaggagcgacctatcttgaactccacagcctagatgacttctacataggaaagtatatgggaggagtgtgggagtatttgatgattcaagccttaaatcagcaagacaagtgaaaaaatgaagacacgaaaaatgagcaactcctttcagggaattagaccacctcaagttgaacacacagaagaaaatgcctgtcttcaaaggctgaagcgtcacattataactctgacttaaataagcttgctgtactgctgccagtgtgtggacgtggtatataacaacccaatttaagaaagtgtagaggccagagatcgtctc

SEQ ID NO: 703877 - DNA, 688 bp, Homo sapiens
  misc_feature (520)..(520): n is a, c, g, or t
  misc_feature (531)..(531): n is a, c, g, or t
  misc_feature (562)..(562): n is a, c, g, or t
  misc_feature (570)..(570): n is a, c, g, or t
  misc_feature (611)..(611): n is a, c, g, or t
  misc_feature (688)..(688): n is a, c, g, or t
tttacacgaggtctgtgagagacccaacccttgttcttgtttaagatttttaagcacaagtgaaaatcaagtggtgtcagggagttgggcatttccatgtcgtctccatcatgaactccacatctgaaatttgtagagagatcatatgtaggccaggtaaggacaacagtgtaaggaatgggtcgtaggaaaaaagtggaggtcaggaatgtgtagaattgttgggccgcttccaggtgagttctgtaatctactctcatacttcagggctattaagtttccagaaggtgtgaatctgggtgatgctcggtgcattgtactgggcaatggagaaacacgtggcttgcaatctggaactctctgcctagtcctggctgggcttcactaggactcactcactaactagttgtttggccttggtaggagtcactttacctctttgggcctatgtttctctacatttaggatgcttgataggtgatttcagaagccccctggtttagcctcatgagagtagggntcctggcctcnttacaactggatttcctgtggttgggacagnggctcatnattattattattattatattaataggcagatttttcatagngcttacgatgaaggaacttagtgcgaaagtgtttataaatgtgctaaggatttcccttgggaggggcccggtttccn

SEQ ID NO: 703878 - DNA, 1100 bp, Homo sapiens
  misc_feature (214)..(214): n is a, c, g, or t
  misc_feature (827)..(827): n is a, c, g, or t
  misc_feature (831)..(831): n is a, c, g, or t
  misc_feature (833)..(834): n is a, c, g, or t
  misc_feature (837)..(837): n is a, c, g, or t
  misc_feature (844)..(844): n is a, c, g, or t
  misc_feature (857)..(858): n is a, c, g, or t
gtaaaattacacatgcaaacctccatagaccggtgtaaaatcccttaaacatttacttaaaatttaaggagagggtatcaagcacattaaaatagcttaagacaccttgcctagccacacccccacggacgtcagcagtgataaatattaagcaataaacgaaagtttgactaagttatacctcttagggttggtaaatttcgtgccagccacngcggtcatacgattaacccaaactaattatcttcggcgtaaaacgtgtcaactataaataaataaatagaattaaaatccaacttatatgtgaaaattcattgttaggacctaaactcaataacgaaagtaattctagtcatttataatacacgacagctaagacccaaactgggattagataccccactatgcttagccataaacctaaataattaaatttaacaaaactatttgccagagaactactagccatagcttaaaactcaaaggacttggcggtactttatatccatctagaggagcctgttctataatcgataaaccccgctctacctcaccatctcttgctaattcagcctatataccgccatcttcagcaaaccctaaaaaggtattaaagtaagcaaaagaatcaaacataaaaacgttaggtcaaggtgtagccaatgaaatgggaagaaatgggctacattttcttataaaagaacattactataccctttatgaaactaaaggactaaggaggatttagtagtaaattaagaatagagagcttaattgaattgagcaatgaagtacgcacacaccgcccgtcaccctcctcaaattanattnannttnacataantaatttctaacanntttatgagaggagataagtcgtaacaaggtaagcatactggaaagtgtgcttggaataatcacagtgtagcttaatcacaaagcatctggcctacacccagaagaattcataaaaatgaacactttgaactaaccctagccctacaaccaaccaacataactaaacccccacataaactaaaacatttaactcaaaaagtattggagaaagaaatttacttaccaggagctatagagaaagt

SEQ ID NO: 703879 - DNA, 693 bp, Homo sapiens
  misc_feature (251)..(251): n is a, c, g, or t
aaaatggatggggcccccaaaaggcttcacacagaggttctctggaaccagtggtgtggggcggatgagatgatagcgttcatcggggtgccccaggccaagggctacaaaggggtcacaagtggttggcaccacagagagttgcctcgccaacccccaccagggcggcggaaggggggcctgtaatggggcacggcattccgcttgggagccctttttgtgcacgcgggtgggcaggaaggctcccctcnccgcctggagatcaacaagaagatttataagattgggccggggtcccttatcaagggcggggaggtggtcaagaacaaagcctcccctggttatggcctatttgacaaggggatcaaccctttgggggggtttgtcccctatggggaagggaccaaagactttgtcatggtgaaaggctggggggggggaaccaaaaaggggggggtccccccccgcaagtccttgttggggcaaaaaaaaggggggggtttggagaaaattgcccttaaggttattgaccccccccccaaggttgggcatgggcggttccagaccatggaggagaagaaagcatttttggggcccctgaagaaaggccgaattgcaaagggagaagggggttaatgcccgggacagattttgcggggggggggggttcaaaaaaaggtattttcccctgga

SEQ ID NO: 703880 - DNA, 809 bp, Homo sapiens
  misc_feature (355)..(355): n is a, c, g, or t
agcggagaatagataagagcacggctgtcaaaggagagaaggggacgaatggtgagagagcatgagacaccaaacacgactgactctgacacaggttacaagcaatattggggcaccgttcaaagacacatccgatttcttgttataagagcaaagacgaactccagtggcactactcagctcatcagatgaagctcaggggatgtgaagttaccccagatgtaatcatttcaggccagaaatttaacattaaactcctgattccagtctgcagaaggcatgaatgaaatctggcttcgttgtgacattgaaggaacacgtatgcacactggatggcagcgcatgctagattatngctccaaaggcaagatgcatggcggacagtgcttacaacttagaagttcacgagatattctttcctttctgaagatgcgagcagtttaaagtccagatcctcgagttaaggaccagagcagatcacgactgatataactcctgaatgttcggtgtctccccgttatctaaaaaagtataagaacaaggagtcaggctatataggagatgtgataacagtgagaatcttggagggccatcagaatgtagctcagatgagtctaatatgaaagccaatgatgagatttattcaaggtatggagtcgactagctgaattgggcatcactcacattcattgcatgggttccaagggggcagaaacagaagaattattggaattgatacaaaagactgattcggatggatgcagactggagatgcaagttaaaaccatggcgtttcaggaacatgaaag

SEQ ID NO: 703881 - DNA, 224 bp, Homo sapiens
ctcctggcaagcgtactgcgagatgaagtcatatggaatctggacacgaccgtggacgacaaggctgatgtcaactgcgcatgtgtgacccacgctggcctgaacatcgtcacaggagatgactttgggctggctgaccgctctttgactttcccctgccaccgaacacactttgccacacacactaacgctgatacttctggtcactcgtgctcactgtgacg

SEQ ID NO: 703882 - DNA, 626 bp, Homo sapiens
ccgcgtacagtcgcggcctaaggcagttttcccctatctcagtagatggaaaatacaatcgggttttataccgagacattccattgcccagggacaggcaggagacagatgccttcttcttgtctcaactgcaaaggaggcattccttcctcttatactaatcctcctcagcacagaccctttacgggtgtcgggctgggggatggtcaggtctttcccttcccgcgaggccatatttcagactatcacatggggagaatccttggacaatacctggctttcctaggcagaggtccctgcagccttccgcactgtttgtgttcctgggtacttgagattagggagtggtgatgactcttaacctgcatgctgccttcaagcattggtttaacaaagcacatctggcaccgcccttaatccatttaaccctgagtggacacagcacatgtttcagagagcacggggctgggggtaaggttatagattaacagcatcccaaggcagaagaatttttccttagtacggaacaaaatggagttcctatgtctacttctttctacacagacacagtaacaatttgatctctctttcttttccccgcaactggacggcgggggcaccgagct

SEQ ID NO: 703883 - DNA, 174 bp, Homo sapiens
gtattagcaggcactgtcaacatcacccacaacggtaacccactgtcgcccttactaggcgcacaggtcagacaaaatgtgaagaacagacttcttgttaaacaaccaggatgtcagtatttcaacacgttcagcccacaaacatccaacttttgtaccaatccatgtgccaac

SEQ ID NO: 703884 - DNA, 1466 bp, Homo sapiens
ctagttctagatcgcgagcggcctgcccttttgtcttgattttttagatagcctcttatatgacttaacaataaaaaggatgtagggtattttaatcaaacggtcgtccaaaataatctctgtgttaggcaggggtacgtacaggttgctttccatccatcacatgaaggtcccaagtacgtaggctataccctaaacgtggcaaagggcgaatctgtatttgacgttggatgtacgctcgttgacaacgcaagcctgttggaggtgaagaaggtaatggtggtgcgtatacgacccctacacaatatcacgagtgcgctggatgtaggcgagcatgtttcactccacacagatgtgttacacaaatgagtcatcttaggggcgtagacagttgaccgactgtatggcgctatagtccacaaatgcggcgattctctacttaatagaacacaccctcaagtgcaacgtcgggtctcaatacacccttcctattagacagaatattcgatgtcttccctcctaaagcacagtcttttcagcactaccccatctggggggcggcgtcaacaatccgttcccgggcgacgaccaacagaagccacgtgcccttagcctgcagggggcaaaaccgcgtctctactggccgcaatcctataggacacttacacgagcacaacgactctcatctcaggtcccaacaaagcgcgagggggcatcactcatccgaaggaggccaccaaacagaaaccaaacaacacgcaaataccaaagaagacaaacaacacataccacacacacaaagcaccggaaacccgaacggaacacaacaacaagaatccaagcgaaacaagcacaaaggcacgataaacaagcggaaaaccaccgcaaccatcacacatggaaggcaaccacagcacagaaacaacacgacagagaccacacagcgcaaactggcgcaacccctcacaccccaacccctcggcggacccaccacttatcccagagcgacaaccaccccacagtgaccacagacagcgacacactacaagcaaactacaaccagtatacaaaggcgcacccccacaacttcggcagcacgcgcaacgacactgacacaactaacgcacacctcacacggaacggacccaacagagtacacggacgcacagcgcgtacaccacgcacttcccatacaccaagcagcggcaaacaggcaacccgaaccgtgcaacacctcatcccacagcatacacacgacacgcacgcaggacgccacgcccgacacaacagccctaacgacctcaacccgcgaccgagcacagtcctgcgacacgtcggccctccacacgccgatccgtcaactatcgcacaacaccacgcacacgtccacgacactttcccccaaagaccacccaacccgcgcgcacgacagagctcaagagagaccctactcgaccagcgcccca

SEQ ID NO: 703885 - DNA, 332 bp, Homo sapiens
ggtcggtccctggttggtagcacaataaggaagggtccccaggttggggagagccccaagttgagaacaataatgaacaattattgtatgaacacatgttagagacagctaatcacaaacaacctgcgggcacaatgacctcattccacacgtagcacccttcagcaggaccctataaaactttcctccagcccttgcctctttgcaggtagccccttctctgctgagctgcccactgcaacatattttcacaatttctctaataaatctgcccttctttacctacaactatcttggtaaatggctttaccacctgcaaaactgaccctagg

SEQ ID NO: 703886 - DNA, 181 bp, Homo sapiens
ttaagcatcctaacagaaagaatgcaactaggtcgaatggtgagatctaccattatattgtcagcactaaacccgtgctcttgcgcctatccgaagtttcctccggaattacgaagacaacagccatggttaaaaccgcgtactttgcgacaaccaaacacattaattctgtaggccgcac

SEQ ID NO: 703887 - DNA, 114 bp, Homo sapiens
  misc_feature (40)..(40): n is a, c, g, or t
  misc_feature (94)..(94): n is a, c, g, or t
  misc_feature (97)..(97): n is a, c, g, or t
cggagagcgattcccgtacccttctttccactgggacccnatccgggaccccttgagggatccttaccaagaacttgacattcaccagagaganccngtgggcagggacttcct

SEQ ID NO: 703888 - DNA, 126 bp, Homo sapiens
aggtcttttcccctcaaaaatctcatgtgatgccagagagacctttctgaaacctctccgttttttactgtgtttaaaaccccccagtgccacccatgaaatacacagctgcgtttcacttcctga

SEQ ID NO: 703889 - DNA, 371 bp, Homo sapiens
  misc_feature (359)..(359): n is a, c, g, or t
gaagccctatgatgacgatgccgagtacatgaaacacacacgtctcttccggtgaggccagggccctgaccctcccctcagtcctggcactgctgcttatgacctctggcctcaccttgacccttgattcccagagtgctccagacgagaaggtgctacttgtgcagtgactgagaatatgctccagacttattgccaagaatgacctgggcagtatgatgacatacatgttgctagactaatgcgccaagaggtgctacatgtgggtgggtgacccagaactagcctaggtggagtatcaagtctgaagcctgaagcgcctgccagtgtatatatccagcaacatacggtaccaaggnaacatgagcggc

SEQ ID NO: 703890 - DNA, 265 bp, Homo sapiens
ggctggtgtagtgggcagctgcagctccattagacccctagcctgggaacatccatatgctgtgagggtgtggccctaaaaagacaaaaaaaacaaatcatagtcatgccagttttattgttgacttggtgggggcaggagattgtctggatgacaggtttgggagagagaattttgctgtatgccttcttgcgtgtgtcctggtctgctgcttatcccttgctttctaacggaatttccctcaatttgtacctgattcagcttg

SEQ ID NO: 703891 - DNA, 713 bp, Homo sapiens
cacttctttgtcgagttgtgtgcccggcttgtctttggcgcggtttttgttcttgttctcgtgctgttgtcgttcctactgttgttgtgcgctttttgtggtctgccttgtggtctattttggtctcctcgctctccctccgccgtctgcccgggcggtagccttgctctttgtgttcggaccgcacacaatggtgttcttgctgctggcctcacctcgcggtaatttttgttgagtttagtgtgcggtcgtatttgtcgcgccctcgttgcctcgctcttggtatgcgcgcaccgatctgtttgtattattcccacggggcgcgtggctccacgcaagatgttcttagccccgcaacatcatcggcagcccctcttagcgctctggttgtgcagacgagcttcccctccacccattcagttgcttgtcaccttagaattgcttgatagggcgcgtccacacacaaatgttcctctcaacaaatcaggtggatacatcgccctctcgacagtcaacagagagcagtgcaacaccccctgactaagtgtcttctactatgacgacttttcacacatctctttctccatagagccccccttctacacaacaataatatagcgcgcggcggcccctcgggtgttgtggacacgttgttgcggttgcaccaacaacgcgcgtgcttcgactcacggcccaacaaaaacaacaaagat

SEQ ID NO: 703892 - DNA, 461 bp, Homo sapiens
  misc_feature (30)..(30): n is a, c, g, or t
  misc_feature (39)..(39): n is a, c, g, or t
  misc_feature (185)..(185): n is a, c, g, or t
cctaaccccatatccaaacataaaataaanctaatttanaaaaaggaaacccttgcaatgcctttgtggttcaagtgtaatcttccatgtaatttccatccatttaaatgctccccagcccaacctgtacctactaggccccattttaatagattagaaaactgagatgcaggccgggccatggntgtcacgcctgcaatcccagtactttgggaggccgaggtgggtggatcacgaggtcaggagttcaaaaacagcctggccaacacggtgaaacccctttgctaccaaaaatacagaaactagccaggcatggtggcaggtgcctataatcccagctactcgggacgccaaggtgggagaattgcttgaactgtggaggcggaggttacagcgagttgagatcacgccactgcactccagcctggtacgacagagtcgagactctgtctcaaaaaaaa

SEQ ID NO: 703893 - DNA, 390 bp, Homo sapiens
ttcagttcactgccactccgtacctcccaggctcaagcgattctcctgtctcagctcccaaatagctggggggcacacaccaccgtgctcagcaatttttgtacctttactagagatggggttttcaccatgttgcccaggctggtcttgaacttctgacctcagatgattcacccgcctatggctcccaaagtgctgggattacaggcatgagccactccacccaggcaacatgcatattatttatgatagtcaatcaacacttggtgaagaaataagtgtgcaccagggcctgtttcccaatatatgtatttaattatttaatcttgaagtgtgcctttatgagttagactcatttttatacatatttttggaactggaaatggagcg

SEQ ID NO: 703894 - DNA, 791 bp, Homo sapiens
  misc_feature (246)..(246): n is a, c, g, or t
gcggagccgcacctagtggtcctcttccgtcccccatgccagctacccgttcagaccagcagcctcgtgggggcacccccccgccagcctgctccctcccgctcagccctgccaagggggggggcctttttttcccccccgcgaaaagttcccagtgaattcttcggtattttccccgccgggggaaagttttttccccaagttggcgggcggcaaagggaaaccccctatccaattcgcgccaanatcgcgttcccccgatgccggtacccccaaagattcaaagttttcccttgtgcgcgcccttttaaccccagttgtgagccttttcccgactgaacacacaaagattcccctttggggcgcgcccaaaagaagaggcacgttatccccacaccaccgcggggcgcacattttcccgggcgtgttgggaccggtggccgcgcggggaaaacacatgctttattttccccaccgcgcggggggtgacgcaacaccacgggggccacaaaggagagaccgccaccccaacggggcgcgggcgcattatttcccccccccccttttgtgcgtatttctccgttggcgccatattggagtagagtgcattcgcttatccaaacctctgttgtggcccacccgccgcgggagcaagtatttaaacgtttttccaagtttcggcgcgggaataccacgcactgtttcccgatatttattatcgacaaccgcccgaaacaaaccgctttaaatcaacatttttccgttcccaacaccaattccggttaatccag

SEQ ID NO: 703895 - DNA, 696 bp, Homo sapiens
cttcgtggatttactttgcctttgtgtttgatgccgtcgttgtggtgaaaagtcaactccgagtgccaccattgctgggccggacgaagtgatgctttcttcctagaggctcctgagctgagctgcgaactcgccccccgcccttgggacacgaagaccctagtcacatcactgcatcccgtcctgatgtcctcgaccagttgctatgcaaaggtgatgtcttgttggtacactaaggattgtaacataagtgcacctattctaagacactgttgacagaattgcgggctctgggagcccgtcctcttagttgtattgaagtctcttggagccgttccttctgtgagcagtgaacttggacgggctgtcccttacgcacacaggggggccatcaggcaaaaccttgagcaccacaggaaacgggcacatgggttcctaccaattgacgttacgcaaggagccctctgaggcaactttccaccaacgcgcggtgtctgaaagtccatcccagaaaaggcatcacattgcgaaagagcctcggagacacctaattaatacatggctccaagggcccactggaaagcaggaaaaagcaagcttagccctacccaaataggtgggacatccacgggctacccatggttacaagcatctggaaggcccgcccttggccacccaacaccctggacaggccca

SEQ ID NO: 703896 - DNA, 414 bp, Homo sapiens
caagtttgtattgtgtgattaatctgcttaggcattaattcataatactttcaattgttacacaaaattgttactagaagttcttaagtctaaaacatcttaggaggtttgccttgatattctgaaacactgtcttaatactttattagaagaaatatgctttaaatttctttaccataatctatacgcaaactttataaatatatatctagtagaataccatatttcaaatgcccagaattgtataataaaggtcaaaaactgcttggaaatatctttatgattacactcataatcaacaatgcttatgaactagcacaatcattatgggaccaacatttcaaaatattttgcctatcaaagcttgcaccaggaaaagtattatgcacataaaattgagaaacagataatctt

SEQ ID NO: 703897 - DNA, 1720 bp, Homo sapiens
  misc_feature (73)..(73): n is a, c, g, or t
  misc_feature (654)..(654): n is a, c, g, or t
gctctaagctaagattacacatgctagcatcctccggtaaccagaagagttctaccctcataaatcactcatngcatcaataaggagagcccgcgaatcaggcatcgctagtaatctgcatgcttcaatatactgcgttagctcgtagactaacacccatccacggcgcaaatcacgctcgtgagtctcacctatttggtgcactataggcaatgttataatctaaagctagtacctaagaccccaggggtttgggtccacatattccgttgactaggcccatcagatgcgtccacaacgcattcatagcgccatagtcaatatacagtaagcctggccgtcaaacgcatgtagtccttaagatctaccccccttacactccgaaatcaaagctaaacatcatctaccttagacgatttggtaacaatagaaaccttctccacgatatagcaacaacacaatcataatgacgtaactgcaaaaacggtcggactctatacacaataagtaccttgaaaatcaactacaagactaatgcattacacgcatactcacatacttgtggactataacgcaataaactcgcaacataatagaatcttaaatttcctgaaatagtcttcccacacaaagatccttatatattcacatacngaggaagacctcggcctacagacacaaagacaacacccacattcactgtcagactcacatcaggactttacacatagaccttctacaccaatagagtcaccttgcgacgagattggctattgcgcataaattcgcccattcttgcagccagggtagactccgtgagttccgtagtgtacaattctgaatttaacaagaccacgcggaattaccatactcatacaatccctaactccattcatttgaagctttcatgccccttaaataattacttcgtgcccatttctattcacagtacaaacactcccatgtaatggacaaggcgtaacaaaacggttaatgccggcaaagttatccccactgttagaaaggaaccgttcacgggttcaaaacgggctgatcatgcccccaattgtagcggtgggccccaggaaacgtctggggggccttcacaagttgtctttgataaaagcccccaatgaaaaagacttaggcgacataagtccccttttcatggaataactataagcggcgcttccgaacgggtgggcactttaccgcagtatatacacctcaggcactgttgaagtctggcgcttctcactgtgtaaacccgtgtggaccctcgtcacgaatgcgcgtatacaccaaggaccgtcggtaccccagtccctgtccagcgtagtacctttactaaagggcccgttaagccgtagaaaccctatacgggttttacttttcacgggacacaccacgtctttacatagggtaatcgttctgtgacacaggacccggtggtgtacccacaaagcaacgatatgtggccactttgttgggtgcgaacatgccacactagtcaaagctatgcggcactgttacacccacttacaaggagaacgtggcacaattagacacttttgccattactaactagaacgacagttcagcactccatacagcagcccttaactcgctcaacgagagccgcctaccttacaatctcatctacactcatttttgtgctatactgctcatgacactactagcagcaacgatcagcgaaaca

SEQ ID NO: 703898 - DNA, 470 bp, Homo sapiens
  misc_feature (45)..(45): n is a, c, g, or t
  misc_feature (121)..(121): n is a, c, g, or t
gcccggaggccccttaaggccggggggcgggaggggttgttgggntggtcctccctgtgcgggtctggggccactaccctgggtgcgggccctggcctccctcctgtgggcctttcttggnaaattaggcggggggggggaggcccccctccgggccggggcccgggggttatttggggccggggccggcccgggtttttttgtgggggggccgtttggccctttggccctttggggtttccgcccttttgcccgggcaggcccggccccctggggattttgggtaaatttatcacgcgtttcccaggggggggggtgggggggggggggggcggggcccccctcggggtggccccggggggttttttttttggtcctgggccccccccccccccccccccccttggcccccggccttttaccccggtggggtttttttatttttttgggggggtttttttttcccccca

SEQ ID NO: 703899 - DNA, 243 bp, Homo sapiens
ctgaggatccagatgcagcaagtagtgtctctgacaccagtgtctgcaatttggttacgatgcaattagatcactccccctccacacctgcatcctgggcccgccaggaactgctgtctccaacgcttcattcacagcgaatcctgcacactggcacctcatgagctccccctctgacctgctccgggacccaattccctgcttacttttctcccaaacacagactctgcccaagaactgagg

SEQ ID NO: 703900 - DNA, 838 bp, Homo sapiens
gcaggctgtactggtccggaatttatggatgtaatggcggcggagggaggtggagcgtagtgcacgctcagccctgatccccgaaagtttaggttcgaatgccccaccaactttcctgtggaagcgctgccgatccggaggtcgtggacggaaggggaagccgaggcgggaagtctggtgggaatcgtgcaatgggagccgggggagactcgaacccgctggcgggggcggagtccgcagtgcctcgcgcctccgcggtccccgcctctttctctgcaccctccccgcggccggagcctggagccgtgagccggagccgtagtctggcaggccctgcaggcctgcaggccgcggcgccgggcctcgcatggcagcggcgctggctgagctgcatgccgggccccctcctcgcgacctccggggccctgtttgctcggggccggcacctggccgcgtgtgaggcccgggggccggcgtttcggggaaagctaggcagggagggcccggggccaaccggcggcaggcccccttgacggggcccccaggttcccttggggtgccgggcccccgagtaaggtggcatgcgggtggcggggggcgtgccgttgaaccccggaggccgaacggattggaaaggggctttaacggcttgaagccggaatgcggagccaaggaaaattacttatgcaagaatctctttcctccatacttgcggaacatttgaagagccacccaaggaaaggttggttgtcacacaccgggggcgggggttgcctggacacttgatacccgggcctgcgcaagtttgcggaacaagaagttgggccccttacaagat

SEQ ID NO: 703901 - DNA, 138 bp, Homo sapiens
actcctgcaagcagtatggcatcacgggcgaaaatgtccgaggagaactgctggccctggtgaaggaccctccgagtcagctggctgagattggggcagcggctcaacagtcccttggggggaagccattttacgtgt

SEQ ID NO: 703902 - DNA, 110 bp, Homo sapiens
atgcagtggactcggaccaccattgtgctgcccctcgcaacttctgggagctcctcattaacgtgaagaggggggccttactggcggagacgtacattatcccggaggag

SEQ ID NO: 703903 - DNA, 219 bp, Homo sapiens
tgacacaggagccacaagcacagctcccacctgtctctctgcactgtgacaaactggaattctgaaacaccgctggcctcgcacagctcccacctgtctctctgcactgtgacaaactggaattctgaaacaccgctggcctcgcacagctcccacctgtctctctgcactgtgacaaactggaattctggaacaccgctggcctcacacacaatctta

SEQ ID NO: 703904 - DNA, 145 bp, Homo sapiens
  misc_feature (80)..(80): n is a, c, g, or t
aatcttggcagagtggctttgggagtcagatcaacccagttggctctgtcccttattcactcagggtcctcaggtaagtnttagtcccgtgtcctcgtttgcaaagtggagctaatgatcatgcttaatgccgaagtgggtgtgg

SEQ ID NO: 703905 - DNA, 287 bp, Homo sapiens
gtagcatgatctcggctcactgcaacctctgcctcctgggtccaagcgattctcccgcctcagcctcccaagtagctgggattacaggcatgtgccaccactcccagctaatttttgcatctttagtagagacggggtttcgccatgttggccaggccggcctcaaactcccgacctcaagtgatccgcccacctcggcctcccaaagtgctgggattacaggcatgagccactgcacctggcctcaatccttatttgaaaaaatacttttgcatcaccatagaagt

SEQ ID NO: 703906 - DNA, 106 bp, Homo sapiens
aacccccggacgggggggggtttaattttttttgggggaacccccaaaaggggttttttgggggggggggcccccttttcgccttccaaccccggttggggttcca

SEQ ID NO: 703907 - DNA, 339 bp, Homo sapiens
gctcatagagactgtgtgctctagcgccttgcggcggagggaggcgatgctggtgccccgccacacgtcgctgctgtccggggagctgcagagctggggcgaaccggagacgttgctggggccggggagggaggcgggcaccatgccggggaaggcgggctggtagaggtgcgactgcagccccgcgccgttggaacccgccaggctgttggacaggcccatggagttgggcggcggaccggccgccaggctgcactgggacagcgactgcgccatggcctgctgcctgcccagcgccggcggcagaggcagctgtgacacgccaggcatggcggccgc

SEQ ID NO: 703908 - DNA, 784 bp, Homo sapiens
cagcaatttcaaaactacttctggtgttaaacacttttcccattaaataagtcctgtggctaatgaaagcaattgaaaaccaaagaaaaagctttctgtggcctcaataagttatcctgaaactgaaaagtgtctgctgtccgcactgaggagacatccgggactctaaatggaagcttattgcagacaatgatgaagacaacccacagtcagtagctttggagttttatcctcgatttactgtttaatgataaccgtatgtatcaagtagagaagctatgtagccattttgctcattatgcagtttaatatgttctctcatttgatagccttttccctcctctctcacttgctcccccttcctccctctctgaaacaccatggctcacagtacttaagtaatagtgaatatgtttaagagcacataagttcctacctaggaagaggtacaggcaaaagcatagacaagataaagagaaatgctgagaaatatgtcacaggaggggaggaatctgggtaatgcttgccagacattccaggacacggagtcatcacgatgtgagggaacaagagttctggttttgtttttaattctgtaagttagtcttttgggggctagaatggaatggggagggggtttattaagtcctgtgccagcacttcgctcataaagttttaaattctggaccaatagtgtttgtttcctgattattgtatccaatactttgcctagtatgtaactcactcttactgataataaaataaatattagtctgtaacagaa

SEQ ID NO: 703909 - DNA, 192 bp, Homo sapiens
  misc_feature (18)..(18): n is a, c, g, or t
  misc_feature (23)..(23): n is a, c, g, or t
  misc_feature (26)..(26): n is a, c, g, or t
  misc_feature (31)..(31): n is a, c, g, or t
caggttaaaccttcccantaagnagncaaancagtatcatgtaaaaggaagaagagatataaagccctaaaatgtgcactcattgtattcaatagtttgttttaaaacaattatgaaatgacttgttttaactgaagttgagttgcttttgcataatcctagttgtgaataaaaagttttcaaaagcagaag

SEQ ID NO: 703910 - DNA, 244 bp, Homo sapiens
atgtgtcgtgtagatactattccccagagcagcctcactgggtaggctcccagagctttcaagatgcgttgcggtttgcctttgtgctcacgggtcacacctgtggtctgctcattactcgctcttcctcttcctgtacttgcacccctctccccatgggagcttgggggagactgaactgttacaaagtccctgtcaggtgcctagtaaacagtatgcaaagcttcctgaataaggccacggt

SEQ ID NO: 703911 - DNA, 163 bp, Homo sapiens
cataggtaaatatattgtaaccatcaaaatatttacagagaatgtaaagagatagtgaaaactgcttatgatagccatgttacatagaaacaaacaaaacttagaatacatgctacagtaataaaagaagaaaaaggtcagccaggcacagtggctcatgcct

SEQ ID NO: 703912 - DNA, 966 bp, Homo sapiens
  misc_feature (142)..(142): n is a, c, g, or t
cagcttcagatgtgtgaagtgcaaccacgttgatcacctctgcatcacaaggtgcgtaacagccaggccaattcgaactctctgggatcctgcacggtgactcaaagacggcagcagggatgagggagctgatctgtggagntccacgtgggcacagcaagacctgaagagcttgtattagacctaaggggacacgagaggtttcaagccgcaaccaggatcgttggagctcgttcgtaggttggcagtagaagcaatgcgattacccatgtattgcgtgcgaaggggaaatatcggggagccccagacgcagatagtccacgaagcggatggttggagaagagcgggcctgcacacgcaatcgtggatgtgggccacctccaccaagtgctgtgcatgggcaacgactgtgcctggactgtgtctgcaaagaggctgcctctcatattgctctgcgaatcaacttcttatccatcgtatatcgtgctcacaccacatgaaacgctgtagaccgacgttccttgtcctgcatagaaagggatgaaccggatgacttaattcctggaattgactggacctgtttgccgtcgtcgtaaatgggacccctacataagagggtgacgagatagcgtgaggttgcgggtctccacgagagcgacctctttccaacgtagaggtaacctgctggtcctagttcagcagcgcaccaaacaagtattcgggtcggacccttaatcaagatggggcggagagacatgtagtgctcgccattggtatatgggcccccagcccgagaaggtcaagcacaacagagcttatctggagaaaaaagcccatgagaaagggcattcttctccagtggacacgccccccagggggaacgtttgttccgaacagagcgaggaaaggcccagccaattggcaagaagccttgtgaaatctacgagggggcttcctggaagccaa

SEQ ID NO: 703913 - DNA, 189 bp, Homo sapiens
ttcgtagagtgtggtgttccatttgcggatggtccggctcttgagggcgtcgggtgtgaggttgcagtgagctgagatcgcatcactgcagtttagcctgggtgacagtgcgagactccgtctccaaaaaaaaaaaggaaaggaattgtggcttttaggaccacatactgaggtggtaaaacaaaaaag

SEQ ID NO: 703914 - DNA, 745 bp, Homo sapiens
  misc_feature (32)..(32): n is a, c, g, or t
  misc_feature (87)..(87): n is a, c, g, or t
  misc_feature (106)..(106): n is a, c, g, or t
  misc_feature (130)..(130): n is a, c, g, or t
  misc_feature (151)..(151): n is a, c, g, or t
  misc_feature (172)..(172): n is a, c, g, or t
  misc_feature (346)..(346): n is a, c, g, or t
  misc_feature (388)..(388): n is a, c, g, or t
  misc_feature (395)..(395): n is a, c, g, or t
  misc_feature (408)..(408): n is a, c, g, or t
  misc_feature (451)..(451): n is a, c, g, or t
  misc_feature (512)..(512): n is a, c, g, or t
  misc_feature (517)..(517): n is a, c, g, or t
  misc_feature (537)..(537): n is a, c, g, or t
  misc_feature (577)..(577): n is a, c, g, or t
  misc_feature (596)..(596): n is a, c, g, or t
  misc_feature (600)..(600): n is a, c, g, or t
  misc_feature (616)..(616): n is a, c, g, or t
  misc_feature (630)..(630): n is a, c, g, or t
  misc_feature (657)..(657): n is a, c, g, or t
  misc_feature (709)..(709): n is a, c, g, or t
cctgaccaagagggcaccagcagaagcggcanggccaccattaattgctttctcttccggtggaaggctgctttgctctcatgaganttgacctgcagcgggatanaagcgtctagatgatacagccgcngggggccccccatcaccaggnggttctccccgatctccagcnacaccccagggctccatccagtttggggaggtcaatttcggccaagaggaggtcgggggcttccagccacaggttcaggtgaggcttttcagggcctgacttagctctcccgggggcgggcgtgtccaggtcccccagcccctggatccgaggacgctgccccgagcggatttncttctgccagacggagcccatgaatggccggtcctccatcangcgccanttcggattcagcngcaagttgtatttgttctcaaggccctccctggcgatggtgancacgagcccccgcaagatatcgctgttctccatcccccggtagaagttgctgttgaaagcnacgtngtaggcggtacatccctggncttttgcatccagttctgcatgaggctctcccagaatcanggggatgcgaaaaccagcntggncctcctctagcatctnaagcagcccctccncggtcacgtaggcgggaggagggatanaaggggagttgcagaagtagatgaaaaccttcccttccgaggagttggtctntatgcagaaaccagggtgaggctggatttgtgtgga

SEQ ID NO: 703915 - DNA, 1131 bp, Homo sapiens
gaattccttggcatagttaaaggtgatgatgatagtgcaagaggtatcgttgcacaaaatatgacaactgctgagattgaaacatttggttcagatgcagttattatggcaacgggtggccctggtattattttcggtaaaacaacaaactcaatgattaatacaggatcagcggcttccattgtttaccaacaaggcgctatttatgctaatggtgagttcattcaaattcatcctactgcaatccctggtgatgataaactacgactaatgagtgaatcagcacgtggtgaaggtggacgaatttggacatataaagatggtaagccttggtacttcttagaagagaaatatcctgattatggtaacttagtgcctcgtgatatgccaacgcgtgaaattttcgatgtatgtattaaccaaaaattaggtattaatggcgaaaacatggtatatcttgatttgtcacataaagatccacatgagttagatgtaaaactaggtggtatcattgaaatttatgaaaaattcactggtgatgacccacgcaaagtaccaatgaagattttcccagctgtccactattcaatgggtggtctatatgtagattatgatcaaatgacaaatattaaagggttatttgcagctggagaatgtgacttctctcaacatggtggtaaccgcttaggtgccaattcattgttatcagcgatttatggtggtacagtagcaggtccaaacgcgattgattatatttcaaatattgatcgatcatatactgatatggacgaaagtatttttgaaaaacgtaaagctgaagagcaagaacgttttgataaattattagctatgcgcggtacagaaaatgcatataaattacaccgtgaacttggtgaaattatgacagcaaatgtaactgttgttcgtgaaaatgaaaaactgttagaaacagataaaaagattgttgaattgatgaaacgttatgaagatattgacatggaagatactcaaacttggagtaaccaagcggtattctttactcgtcaattatggaacatgttagtacttgcacgtgtgattacgattggggcatataatcgtaatgaatcacgtgccgcccattataaacca

SEQ ID NO: 703916 - DNA, 268 bp, Homo sapiens
cccggcaatcgcacggaggcggacaccccgctcatggtggccgacaccaggtggttgaggaccccgtctgcgggatggggcagcttgagggtgctgctacagatgtcgaagattgcctcgtgtgcgatgcaagacttatcatccgtatcctacaccagctggagcacagacggtgctactgtggatcgctccaccaccgtgcatgacactgtgcgcgagatctccacactgaaggcgtacatgatgcaggctggcagctcctcgcgga

SEQ ID NO: 703917 - DNA, 303 bp, Homo sapiens
tgttggacgctgctgatcaagcagtactgccgcgagagcggtctgcgcaacactgctagaagcaactgagagaaggcgctacgggacatcgacctacaagattggcagcgccgaggccgagtccgtggaggagacgcccgagaacctgcaggacttcgcggagaagcccgcgttcaccgcggagcgcatgtatgacgtcacaccgcccggcgtggtcatgcagctggcctgcaccgcaatcgcatgctccacgctgtttgtggagacatccctgagacggccacaggacaaggatgccaaggg

SEQ ID NO: 703918 - DNA, 350 bp, Homo sapiens
cctcatggattgtaactaaaaaaaaaacggttcctttttgtttttttaaaaaagatttttaaaacccgttttttaccccgttctctcgggactttttttaaggtaagtcagcattgttttccagggttaaaggcatccctcccctttgcattgaacttagggatccatgccaaggaatggaatttccatcctgagccagttcaggtaggggtcaattgaaactattttaattttttatgcaatttgatgagatggggtcagatttaaaaatttcaaaagcccgttttttgtaacaaaaattgttatgtattaaaactgcagttttcaataaagattgacttgggttgcca

SEQ ID NO: 703919 - DNA, 172 bp, Homo sapiens
  misc_feature (67)..(67): n is a, c, g, or t
  misc_feature (168)..(168): n is a, c, g, or t
cgagctcggtacccccacggagaaggggttatcggagctgctagcggccggctacgccagagccacngcaactcgggatcgagccgcatctgtgacccacaccacagctcacagcaacgccggatccttaacccactgagcaaggccagggatccttctccggtggcntggt

SEQ ID NO: 703920 - DNA, 262 bp, Homo sapiens
tgacacctccatgacccgagagacaccccgtcgacgacatatcacctccagaaccagagcacccctcacacagggatcacacacacggacacctccagacccagagcacccctcacacagacacctccagacccagagcatgcctcacacagagatcccatcacacggaaacctccaagaccagagacacccctcacacagacacctccagaggcagagcactccctcaacagagatccctcacacggaaaaactacaagaa

SEQ ID NO: 703921 - DNA, 955 bp, Homo sapiens
  misc_feature (955)..(955): n is a, c, g, or t
agcggggccggccccggggcctccatgatggaggagcgagcggccgccgggtctgccgccgcctgctcctcctgccgtccgctcggtcaggcgcgggccctggccccacgtaggggcggccccggatcgtccgcccctgtccccgggccgggccggcagggtaagggaggcggcggctggaggcagccccgggcccacggcgaggcccggagcccccatgagcctgccggggatccttgcacttaatccagcacgagtgggccgcggctatcaaatgcctgagaaaaggccctgctgggagggcctgagctggccgcggattttacacggctcacgtgtggcctttcccttcgcgggcacagacggacaacggggcagggacgcactcgtatagggacggtgctgtgtgctggcgtgatcaccgattgctgcgattattgcgctgactggcagtgaaacggggcccaacgtactcataaacttgaacgtttgcggacatggaccttgaagccagggggggacgaccgacgcggcacgagtgtcgtcagacacccaggtctccagatggcccccgtgagaatccggtccaccccttgtaagacaccagccccgctttgcgtggttgcaacctgagcgaagcgtgctgcagcatctctttgccgggaacacgtataccttgggcacaacaacgtggtggccgccgtactccacgcacccctccaatccctccggaacatttgccgtgtccaatatgcgccgttcctggttcccatggcttggggcccggcttctgcgttggaatcccttccaccgtgggaatatgggaaccttgagctgtgaacgtggggccccgcaaggggactcccagctatgtgcccttgccgggcgttagagatgtgtgctgtatggtcacgttcggttgttcgacaccacgattacggtgactgctgataan

SEQ ID NO: 703922 - DNA, 314 bp, Homo sapiens
  misc_feature (17)..(17): n is a, c, g, or t
ccgtgcagtatccaggntatggtgcgaagctaggttgcgcttgtccaccttcggcagagcagcgacctatgctgagcgaggttcagaacctggacatcaccaagaagaaattggccacgagtgccactgacgtggcgggtgactaaggacaagcagtggagtgcatgtgctgtgctggacgactgctgctgtgctccaggccagacgagcggtgtgtcaagtccatagccgaatgacgcccccccgatgagacatgcggccggcggtcactcgcagacggagtgcacgccgctcccccgccccccgccccgctg

SEQ ID NO: 703923 - DNA, 409 bp, Homo sapiens
ctcaaatgcgcacagaaattttagcttccagctgttttccctattagctgtcagatgagagtcttccattgggagatgcccctgcaggggctggaggatagagtcatgaggttaagcttttactctcctgcactggttacagcagacactgggcagatggcatatctcctgactgcaggaagctaataccagctgtggcaggtgttaccactcctgagtttctggcaagtttacaggagcttctctgtcctctgctgccttcattttcctgtccggatctctgagcgaaatccatcacccctttagggatgccatgcccagatctatagtcgtccccctcctcgagtctcaccaaaagcacccactgcctctcagggactatgctttgcttctagaatttctgtgcccg

SEQ ID NO: 703924 - DNA, 585 bp, Homo sapiens
  misc_feature (3)..(3): n is a, c, g, or t
  misc_feature (193)..(193): n is a, c, g, or t
  misc_feature (531)..(531): n is a, c, g, or t
  misc_feature (574)..(574): n is a, c, g, or t
cantgtgctccaggaacaaggagcagctagagcttgccgggcttttttagatgtagaggaaatgaaaagaacaagaaaaaggaagagcttgcaacggcctattccccactgtgtcacagaagaatttccaaacaccctacttgggaatgcacttgatccaaggagtgtgagctggaggaggtaagatgcctcntgtcggtgacttgtctggagcctaacagatgccgggtgctcttcacttttggcttctgcatgtatcttttcatatttccccaaacccccagggccgtggctaatgcctatacattttttgttaactctagttttccatgactgcttgcttcccatctcatgtccttgacagcatgtatgctaagatggcagccattgcctttgccttttcacttgctttggggagtcttctctcagacccatggaagtgaaacctgcctgaaggcgggaaccattcagttctgctcaccattgcatcacctgggtgtggcctaacatctggacacagtaggtggctcnaaaatatctgtgaatgaatgaaaaattggatgggatcccaaangagaatagctt

SEQ ID NO: 703925 - DNA, 198 bp, Homo sapiens
agcacctacagcagaagagatatgaggaattgttaggagtcagcacttacattaggaaattggctacaacccgacacagtagcatttgttgccaatttctggtgggatggtgacacatgctggggccaggtgcttaacatgccttggttcagggattggaaggttcacccgtgggtgggcaatccgtgggacccagtt

SEQ ID NO: 703926 - DNA, 230 bp, Homo sapiens
tcgtgccgaattcggcacgaggcgtccgaagggatgatagcggatcctagtaggtgctatgtgtcaagcctgacgttcacggctaccgtatacctgcgggggctaccaaccttggatacaagggagctctttgctaaggattcagatcagcccttcgcagagtgtgcaggtgtaaaattatcacaggtcaccgaggatgctttccgcgcccatactggttgtaatcactt

SEQ ID NO: 703927 - DNA, 661 bp, Homo sapiens
  misc_feature (176)..(177): n is a, c, g, or t
  misc_feature (195)..(195): n is a, c, g, or t
gcccggctgggagaagcgcatgagccgcagctcaggccgagtgtactacttcaaccacatcacttaacgccagccagtgggagcggcccagcggcaacagcagacagtgtgtgtgccaaaaactggtgcagtggtggagcctgccatgggtcctgcgttgctctgctaccttgctnnttttttttttgggggggncgggggccccttttgcaaacaaaaggtgtgcccccctaaatacccttaaaaaagggatggacccctccaccaaaaaagtgggtgtcaagttttttaccccagcaaaaaactcacccccccttgtggtggtttcttgtgtggggttgtcaatatcctccccctgtgggtggtgtctcgtttggggtgggggttaatcatcccttctccccctcccacgcccccccgtggtttttttttccccccctgtcgtgtgggccgattttttcatccccccctttttgtttttgtgtgtgtgtgtgtctgttgtgtgacccccccccccgtggtgggtgtgtcgtgtgggttacctcccaacaaaatgcggggtggccaaaacaatgcgcaacccattgccacaacaaattttttctccccctcacataaaaacctcctcccctgcggggcggtgggcgcacaaaacacccgc

SEQ ID NO: 703928 - DNA, 225 bp, Homo sapiens
  misc_feature (8)..(8): n is a, c, g, or t
  misc_feature (39)..(40): n is a, c, g, or t
  misc_feature (58)..(58): n is a, c, g, or t
  misc_feature (95)..(95): n is a, c, g, or t
  misc_feature (203)..(203): n is a, c, g, or t
  misc_feature (211)..(211): n is a, c, g, or t
aaccacanctgcttgggttaaagtccccatcctggcctnntctcagccaccagacatngccaggaaccgcctagttcccaagaacaatttaaagntcactctttggatttgaaagaccaccattatcattttactaaattcttatatatacttgtgccttttcccaactttcagttctctttaagaaaaacatccactgtagntttataanaataccttagtatt

SEQ ID NO: 703929 - DNA, 145 bp, Homo sapiens
agtctccatgaaattatgtgcatgtctatgtgtgtggcatttcatgttgaacacacagatggtagtgctcctagaaaatatttcttcttctagtcttatgtgctttggaactacacatgtattaccaatgactgactctgaaata

SEQ ID NO: 703930 - DNA, 173 bp, Homo sapiens
  misc_feature (111)..(111): n is a, c, g, or t
  misc_feature (130)..(130): n is a, c, g, or t
gacgagcgtaaaggtcaacttaagaaacagagagaatataccttcctcttaggacctccctgggttagcagaaggaaagaacccagaagtcttcagtaccacagctaggcnttcggctatctccgctagnccaagttggaccctgctgggcggtacccgagcctcgaaattcg

SEQ ID NO: 703931 - DNA, 400 bp, Homo sapiens
tttctaccacccactcaaaatgtcaggttcctcctggtctccataatgatccataaatatctaccctgaactcatgatgatgattggattcaacattataattgcatatgcctgacttttccactctgtcaacagcctcttttctggagtatctcccagtgatcatgtcatatcctgttaggtaaattgtgaaccctgtaaggatggtatcccctagttttatgagtgaagatcacatttaattctctgtcattttcagaacataacacatcgttagtgctttaaaaggatgaaacatgcagggcatttgtaaactttaaaagtactttttttatctggttattttatggcaatccctacaattaatcctttgaagggctgggcaaatcccgggtttgac

SEQ ID NO: 703932 - DNA, 572 bp, Homo sapiens
cacagtgccaagcgaccaagcaaagtatcgccgcgcgccgaataaattggcggagtcaatctgttgatcaacgctgctggggtgaatcacttcgccatgctcgaacagctcgacgacagtgatatcaatgcgatgcgtcgcgttgaatatcaacgcgccgatttgcctgaccaagctattgctgccgctactcaagcaggccgatagcgccatggtagtcaacgtcggctcgacctatggttcgatcggctatgccggttacgccagctattgcgcgacgaagtttgccctgcgcgggttctccgaagcgttgcgccgagagctggccgacacccgggtcagcgtgctctacgtcgcaccgcgggccacccgcacgtcgatgaacagcgtgacggcgcaagcccttgaacgatgcgcttaaggccaacgtcgatgatccgcaaaccgttgcctcggcggtgatccacgcgattgcgggggaccgccgcgacctgtatctgggatggcccgagcgctttcttcgtgcgcctaaacaatctactgccgcaactggtcgatcgaggtctgcgcaa

SEQ ID NO: 703933 - DNA, 1004 bp, Homo sapiens
attaatcccctggcccaacccgtcatctactcttcacctatcgtttgcgaggcacacttcatcgaccagcgcataagcatcgcgcgtgatttatttaccgtgagtagtgcctagaaataaaccatgcgtagcgttggattaccagttcgtaaccaaaaaattcaaacccgtcagttccacaagaagcttgccagtcacgtatttccatcacgtcaagcaaccgtatccataatccttctaatagctctgctcttcaacaatatactctccggacaatgaaccataaccaatactaccaatcaatactcatcattaataatcataatggctatagcaataaaactaggaatagcccacctttcacttctgagatcccagaggattaccacaaggcaacacctctgacatccggcctgcttcttctccacatgacaaaaactagaccacccatctcaatcatatagcagaatctctcccatcactaaacgtaagcctacatacctcactctcatcaatcttatccatcatagcaggcagtaagaggtggattcaagcaaagccagataaggcaaaatcttagcatactcctcaattacccaaataggatgaatacacagcccataactcaccgatacactccctcaacattaagcaattccataaatacaactatcctatattaatcctcaaactaattaacgacattcctaatacatcaaacttaaactcccaaaacatcgaaccttaatactatctcgcacctgaaaacaagcctactcaatgaacctatacatacacatataagttacaattcacacatttccatactaccttcagaacgcacatgtctctatactaaaccgcgcttaattgacccaaaatgatccccataaatctgaaagaagtacacaaaatacacacatatacccatatatcacatacccaactcactacatcactcaccatataaacatctcatataccactctaagttaactttagtc

SEQ ID NO: 703934 - DNA, 815 bp, Homo sapiens
tgatctgtcttaaccttaataaaaatgggtctatcagacaacacggacttcctgacgtaatgcaataggaagtccacaccatcatctacaaagccttattgctggaataattgaactaggaaagagcgagacagggagctagatagaacagtatatggtcgatccctgtggtatccatcggggaactggggtccaggatcctccacgtagataggtagaagcttgatggattgctcaaagtcccgtgtataaaaggggcatacgtatgtatttcgctatattatcctactcacatcttgcggtatactttagattattctgttaggaatcaacttgatatcgcttagagcaccagagtgttaatatcaccttatggtacagattgagatttggttgatgactgtgtaatcttattgccaatttgcaatttagtatgtattgactgtggtatgggtatttgttagtagtgagcttgctgaatatagacgatttgagattgggtgtgaaactcttgcactatgatggggagggggctgggttataaaggggggagactacaaggagtagaggaaaagctcagagacatgaccgcagaaatggtgctggacaccattcctacgcgagggcaaatttacctgatgttcgttccagctaacccggttgcctggaattatcccaagctgggaagcgctcacaccagttaaacagatttaaccgagacctttgtgagcactattatcgcacttagatgccggtttgctggggctcacttgcgcctggtttcgaccccaaccttatacgccactcttgtcccc

SEQ ID NO: 703935 - DNA, 263 bp, Homo sapiens
gaggttacgagatccccatacagagtaaagggttgggatggatagaggttagtcaacagatacaaaattacagctagataggaatgagctctggtattctgcaatactgtaggatgaatatggttaactattatttattgcatattttcaaaaggccagaagagaggattttgaatgttcccaacacaaggatgggtgtcctaattaccctgatttgatcattatacgttgtatacacatattgaaatattactctgtatggg

SEQ ID NO: 703936 - DNA, 333 bp, Homo sapiens
tcggtacgtccctctgtagtacttctagactatgagcagggaatcgaggactctcaggcctttgtgttgggacactgactcactgcattagtaccttctagactatgagcaggggaatcgaggaacctctcagggctttgtgttgggacgctgacacactgcattggtactttctagactgtgagcaggggaatcgaggaacctctcagggctttgtgttgggacgctgacacactgcattagtactttgtagactgtgagcaggggaatcgaggaacctctcagggctttgtgttgggacgctgacacactgcattagtactgaggtgtcag

SEQ ID NO: 703937 - DNA, 378 bp, Homo sapiens
ttaaaaaaaaggggtttctggtaaggccggggaaaaaaattttttgcccccccaaaaaaggggggtgttaaaaattctaaaaaaaggggcccccccctaaaaaaggtgaaaaaaaaaaaagggggggggtctctattaaaaacggtttaatttttttgtcacacccctattacccccaaagggcccgggggaaaagggtcccccaaaaaaaacgccaaaacgtttttaaagaaccccccccgggttttaaaacacagtccttttcaaaaaatttttttaggaaccgtaagggtcccccttttccttccaggaaacccgccttaaaaaaaccgggaccgttcaattaccctcggattctccggcttcctactacctctt

SEQ ID NO: 703938 - DNA, 215 bp, Homo sapiens
acaggataaattaaaatttgtgttaatgtttgttatcaatgagatagaactgtcaggcacattatgttattttttttcttagcattttttcctatttccttgcgtgccatacaacaaacttgagtgtctgctatgtgctgaacactcagtatattacagttcatgatgggtaaacacacagtctgcacactcaggagtcttccattttattttag

SEQ ID NO: 703939 - DNA, 746 bp, Homo sapiens
cactctctccgtttctccgtctctctccctccctccctccctccagccccccaatcttttactaccaccatactcatccatctcgtctcttatctcttcaggaagagcctagtaggcgcgaaagcaccaacgaccgtctatgcacatgggaacatacacgtgagtacaatagtgacagaagaggaaacactcgattgcatcgttcccggattcccaggtggcctatatatgggagattctatactgacctatattgcctgtgatgcgaggatactggagatccagcgaggcactctggagatggagatgccaaggctgtccaacacatgtctgacagatattatctaccagcgttaagactcgacctgcgacatccctgagaatgctatatttggtccctgtgtcctgagccatactgccctatatgacggcatagcttgcatagcactcaagtctactgacaagagaacagtaccggatatactttcgggtatgacaacctcgagacgagcaaatggttcctcagaaggtctcatgtggctgcgtgtaggtccaatcgggcagagataacggaagagcagaaccttgaagcctagataaaaaatggacagattgttctaccgatctctccgcaggacttgccagagacgaggagtaactaggttaggacggggagaagaactgactgagtgactcttgctctgacccctactagatccacaacaaacatgcatgggcacgccccc

SEQ ID NO: 703940 - DNA, 511 bp, Homo sapiens
cgcgtacgccgtcagacgctgaactatgtgtatacaaaaacctgtacaagactgttcgttacagcttgatatgtaatagcctcagactggaaacaagcaaaatggccctcaataggtgaatggctaaacaaactgtagtaaatctataatatggaatactactcagcaacaaaaagaaatgaattatcgttctagcaacagtttggatggttttcaaggacattatgctgagtgaaaaaaccaacctgaaaagatcacacacattgggccaggcgcggtggctcacgcctgtaatcccagcactttgggaggccgaggcgggtggatcacgaggtcaggagattgagaccatcctggctaacatggtgaaatcccgtctctactaaagatacaaaaatttagccgggtgtggtggtgtgtgcctgtaatcccagctactcaggaggctgaggcaggagaattgcttgaacacgggaggcggaggttgcagtgagctaggatcgtgtcaatg

SEQ ID NO: 703941 - DNA, 874 bp, Homo sapiens
ggcacgttgccgcgcaggtaggtctacaagacgctattcccctatcatagaagagcttatcacctttcatgatcacgccctcataatcatttccttatctgcttcctagtcctgtatgccctttttcctaacactcacaacaaaattactaatattaacatctcagacgctcaggaaatagaaaccgtcttgaattatcctgccgccatcatcctagtcctcattcgccctcccatccctaggcatcctttacataacaagagggaggtccaacggatccctcctttacatcaaatcattgtggccacccattggtactgaacctacgagtacaccgactacggggggaataaatcttcaattcctacatatttcccccatatattcctagaaccaggcgacttgcgaattccttgacgttgaccaattcgaagtcgtaatcccgatttgaagcccccattcgtataataactaccttcaccaagacgtctgtgcaactcatgaggctgtccccacatttgggcttaaaaaactaggatgcaaattcccggacgtttaaaacccaaaacccattttccacgctacacgacggggtaatcctacgggtccaatgctctgaaatcctggtggggccaacaccacagtttcatgcccatctgtcttaggattaatttcccttaaaaattctttgacttagggccgtaattaacctaatagaacccctttaaccccttagagcttaaaaaaaacaaaaaccaaaacacaaaattgtgggcgccgcgccggaaaatcttcacacactcgtggcgccgcggccccaacattcagcatgccatgttcccacaacacggcacactggtggttcccccaaaag

SEQ ID NO: 703942 - DNA, 891 bp, Homo sapiens
  misc_feature (170)..(170): n is a, c, g, or t
  misc_feature (179)..(179): n is a, c, g, or t
  misc_feature (186)..(186): n is a, c, g, or t
  misc_feature (212)..(212): n is a, c, g, or t
  misc_feature (223)..(223): n is a, c, g, or t
  misc_feature (254)..(254): n is a, c, g, or t
  misc_feature (266)..(266): n is a, c, g, or t
  misc_feature (268)..(268): n is a, c, g, or t
  misc_feature (280)..(280): n is a, c, g, or t
  misc_feature (288)..(288): n is a, c, g, or t
  misc_feature (290)..(291): n is a, c, g, or t
  misc_feature (295)..(296): n is a, c, g, or t
  misc_feature (313)..(314): n is a, c, g, or t
  misc_feature (316)..(316): n is a, c, g, or t
  misc_feature (320)..(320): n is a, c, g, or t
  misc_feature (322)..(322): n is a, c, g, or t
  misc_feature (326)..(326): n is a, c, g, or t
  misc_feature (350)..(350): n is a, c, g, or t
  misc_feature (354)..(354): n is a, c, g, or t
  misc_feature (365)..(365): n is a, c, g, or t
  misc_feature (373)..(373): n is a, c, g, or t
  misc_feature (378)..(378): n is a, c, g, or t
  misc_feature (385)..(385): n is a, c, g, or t
  misc_feature (393)..(393): n is a, c, g, or t
  misc_feature (399)..(399): n is a, c, g, or t
  misc_feature (414)..(414): n is a, c, g, or t
  misc_feature (604)..(604): n is a, c, g, or t
  misc_feature (609)..(609): n is a, c, g, or t
gagtgccggcttcctcgtgtgaggggatctgccggacccctgcaaattcaatttctttcccattccgggcccttccctatcgtcgcccccttcaccttggatcatgtcaagaaatttgatgaaaaagaaaatgtgtccaactgcatccagttgaaaacttcagttattangggtattangaatcanttgatagagcaatttccaggtatganccatggcttantcaaatcatgcctaagaaagatcctgtcaanatagtccgatgncnatgaacatatanaaatcctnanngtanntggagaattactctttnnangacnangagnagggcctttttatccaaccctaanattncttcacaaatntccttttnatccngccaacnagcaggtngataanggagccatcaaattngtactcagtggagcaaatatcatgtgtccaggcttaacttctcctggagctaagctttaccctgctgcagtagatacatgtgctatcatggcacgaaggaaaacagcatgctctatgtgtgagtcatgaagatgtctggcagaagacattgagaaagtccaccaaggaatgggcattgcaaattccatanttaangatgggctgggcatttgacgactttactgagctcagaggatggctgggcctcctatggtctggcggaatcggtcgggtcgtgtgtggacgcatgacgacatgcctgggtatggcgataatcccccgctccaaacaacaaaacaaacaactcggcgccgcccaaaattaaaccacggggcggcacacatagcagtccgccaaaagggaacggggccaacaacgcgcgcgcaacaagttgtcgtcagcaagcgtccgcaccgcacggaaccctccgtccctccc

SEQ ID NO: 703943 - DNA, 1162 bp, Homo sapiens
cgtggtggcatgcgcctgtaatcccagctactctggagtctgaggcaggagaatcgcttgaatccgggaggtggaggttgcagtgagctgagatggttccattgcactccagcctgggtaacagagtgagactccgtctcaaaaaaaagaaacaaaaaaatctgaaagctaccactttcctatttataaactatattcaaatttctggcaaactgaacttccataaatataacacgagctgttcggcatacttcatccatcattggccttgggaaaataactgactataacactcctggctcgacgtagaaatgactgaacctttggaaatactgcataacactcactcggacagcttttcattctctataccaacacaaagaacctatcttgtgaaccgactcctggctccctttacatgtgagctcatcttcgcccgttcaccctaaagaacacgttacaacaggctcttccaaaggaatacactcatcactcccgttactccgctcctggccacagtctacagcggaacccatgtattgcgactataccctttccacactttaaccaccagcgagccacaaccagcgttaccgtggtccaaacactcaattgcggactcagctcacaaaaagccctacaattactcgcgcagcagcttgcgccttctatctacacaaaaaccttccgtgggatgctaccataaggcagagatcccacaaacaaggtttcgttactccaggcaaacagaggcaaagatgaaacccctcaatctccggagcctgtggtctaaccagacttagcgactaagttcaggccaaacgaggctatgcttcaagcttccgtaatcaccggacaaacatctacatgttgcccccacagttgtgacccacgttaagctttaacactctttaatagatagttttccgcctaggcgagccctcctctctgatcgtccctccagttcccttccccattaacactgcgaatcttcaacaccagctcgtcgcctgcaacgacaacatgacctcatcacggggtggcactcagaagcgggaaaaccaacccggcgtgccaatttggcggacccactcaacatggagggcttacacaccgcgaatttctaacggctctctgaccacgtacggaatactcttcccgc

SEQ ID NO: 703944 - DNA, 107 bp, Homo sapiens
accacacacttgtgcatctggctggtctcacgtggcgttaaatgggctgaaccctcactgccactttcacctgaggcaccagccatagctccagacactcctgcccc

SEQ ID NO: 703945 - DNA, 447 bp, Homo sapiens
gtagaggcagggagtcaagatttctataagggcagctaacaagggagaagacaagaaacatcacttggaaaagtgccacggtatgaggtcattcactgaaagaacaagctaagccctgcattcttagaagttcccgaaagcatcactgaattacttattggttcatccaaattccttgatatcactaagaaatggtctccttagcctccttatgctctgcttaataagacagaagagtgtgtaaagtgttttagaagtactcccatttgaaataatgtttttaagccaattgcattttgttattgaaagaggtatgtttcagataactggaaagttaatttatgtggaacaccaccctatctgcattactttatccccagcaatattatcttgctgtaagaacctgaaatttatattaaactcagggcatgtgcactaaaaaaaaaa

SEQ ID NO: 703946 - DNA, 370 bp, Homo sapiens
  misc_feature (4)..(4): n is a, c, g, or t
  misc_feature (24)..(24): n is a, c, g, or t
  misc_feature (92)..(92): n is a, c, g, or t
  misc_feature (100)..(100): n is a, c, g, or t
  misc_feature (357)..(357): n is a, c, g, or t
  misc_feature (362)..(363): n is a, c, g, or t
aganaaaaaatgaagttaagattnagcattgcctggtagttttaatgaacatataataatttagtaccagctttaggcccatatttcccatntattttantcagattttactgagagtgttgtttgtttggggatgtagaatatcagcactttcgatttgctttatttctcatttgtaggctatggctgtaatgaatttctaataattatgactgagtaatatctccagccgttctggcaacttgaatgtgttactggatagtctgtttctagtgatgattgtttatttatttaaggactttttttagatgcttgagatgtgagttactctagaatataattaagagctatggttantactnntgtgtaa

SEQ ID NO: 703947 - DNA, 230 bp, Homo sapiens
  misc_feature (11)..(11): n is a, c, g, or t
  misc_feature (15)..(15): n is a, c, g, or t
  misc_feature (24)..(24): n is a, c, g, or t
  misc_feature (28)..(29): n is a, c, g, or t
  misc_feature (50)..(50): n is a, c, g, or t
ccggaagaatnctgntggtgatcnggcnngacgtcgcggaggatctgggnacatcttactggtccatgctactgagactgacaggaaagatttggtgttgtactgcgaggcattcctgatcaccaccaggaagtaactgcaggtatagtgataatatcaaggaaattagaactaaaagtggagcctgaagatgtgactgaattgcttcagtctcacgataaaacttgaac

SEQ ID NO: 703948 - DNA, 350 bp, Homo sapiens
aatcaggcgatcacactgcctcattctcccaagtgctgggatacaggcacatgccagcatgtcagctaagtttttgtatttatacgtacagacgggatttcagtatgttacccagactggtcttgaactcttgacctcaagagatccacctgcctcggtctcccaaagtgcttggattacaggcatgagccactgcagctggctctccactttctgtctccatgagtttgagtacgccaggcacctcatataggcagacttcatatactacgtgcccttttgtgactggctgatctaccttagcataacgtcctcaggtttcatccacgctgtcgcatatcacaggattt

SEQ ID NO: 703949 - DNA, 986 bp, Homo sapiens
gacagagggctgagctgccggtcattcagctgaaggtcaggccaggtctcagcctcccctagagcctagttgtttgctcacctgtgacctatgctgtcttatctcattcagcagacaaccagacggccttgatgggttcccgttgaattcgtatgcgtgggcacccaggagtgtgaccttgccttgctcttacaggagatcctcatgagagacggtcggggctcagagcaactagacttgatgtcatatgtcgtggtatgacctgatgtctaagttgacgcgcgtattcctgatagactcttgagaagggatcacagcattccattgtcaagggaagactccattaggttgtgcaaccattgttgcgcatgttgcttctgaacgaaatgagtaagggcgctggcatgacctcacatggggagtaacacgcgtttgacatgggtgaagctggagacacgcatgggtgaatagcttatggctggcatgcaaatatctcccatctttctctcccttactttccaaagcaagttaggtacgctttcccaatggggattctggcctgtgtggttaggaaagggaatctccctgtggtcccatgtgcatggttgtcgaacatcaccctgttcgctgcagaagggaggcctacgggccatctccctcgtggtaggcctctgactccacctccacctggggccctcagttttctcgggatgcgaccagtggaggatcgttccctccgcggactcaaggggaggatagcctgggccagacgcgcgggacgagccccggggaacacctcacaagggcgggttttggggctcccgaaaaatccccaccgggatagggctcaaccccaggttacggccggtgcgtgagagtccaaactccgtgagggaccaagaaaaaggcgggccaaagagagtacaccctgcggcgtggcgcccagaggttgaaaacacggcccaccgaaagggggcaccgagata

SEQ ID NO: 703950 - DNA, 869 bp, Homo sapiens
ccgaggagtgtgggctgttggactctttgctgatggaccccgtgctgtgctggcccgtgggtgaagtgctgtgcctgatgtgctgtgcgtgctgtgctggctgtgccgtgtggtgcgacatgtgcgtgatgtgagcagtgacctatcgtgagtgtggagctgagcccctggttgtgctctgtgatgtgatgcccctgcttgccgtgtacccctgtgtgtgatgctgctgccctctgctagtgtgccctgactggctgtgctgtgctgtgctgtgatctggtgccttgctgagcacagccctgtgtgtgccattggtgctgatggcttggggcaatgtgtcaaatgaatgtgatggcatgcatgtgagctgtgggcgatgttggctgtgactgagtgatcaatagtatcccctgtttgttgcagttcctgcgaggtgcctgtcatgccagcgtgtgcttcatgctggctagctgacttggagctgcttgtggtgccccatttgcccggtgtctgctgtcaagctgtgctggccatgccaaaatgccaatgcctgcactggtcaatgctggcccattgagaactgccttcagtggttgttggtgctcatggtgcaggctgccgcaggtgaatggcttcgctggaccagtgtaccctgcaccgtagcacagacgcctgagcttccatcacatgaacgccttgtgggcaatggctcttggaattgcttgctttgaactgaagggtgagcaaggctggccccttccatctgaggggaggctttgttgctggattcctgtatttgcagccacacatcaaacggaccaccctgggactaaaagttaccagcccaggcggctggaggacctgggtgg

SEQ ID NO: 703951 - DNA, 887 bp, Homo sapiens
catcattttgcctctccctttttttttccatttgaaagactacttcattttagttttgcttcaataacacaagccatacttatactatatctgcgggatgaaatctgcgaaacctactagggtgtcaaaatttaacttctcatgaatctgtttggcttccaaaacatactcttggcttcccagaacagattcagaattcaaaagaatgatgttacggccatgctggtgatggctcatgcctgtaatcccagcactttggtgaggccaaggtgggcggatcatcgaggtcaggagatggagaccatcctagccaagcatcgagtgaaaccccgtttactactaaaaagtgcaaagatattatctcgggtataggatgagtaccgttgcattcggagtcccacgctatctcgggaggctgaggctggagaatcacattcaacctggaaggacgagaggattgcacgtgtagctgagacttgtgtccactgcactccaacttggtgacagagtgagactctgtctctatacagaatgaatagataataactagacaataatacatactggtactaaagtgcccatctaggtaagaaggcctatatatcatcctagaatgagacaacagcctactataaatagtatacttgttgccgcggatgcgcgtggctgcacgcgcttgtatatcctcactcactctggtgaggcccgagcgcgggcagatcaccgaggtcaggagttcgaaaccagcgctgaccaatatggtgcaagccatgtctctactaaaaatactaaaattagctgggcatggtggtgtaataccaacatactcaggaagactgaggcagtagaattgctgaacgcgggataccagcggggcgtggagacca

SEQ ID NO: 703952 - DNA, 115 bp, Homo sapiens
gatgacatacattacgccattgtgtgtggattccgctctgatagtccctagttactcgcgcgtacgacgtcgcaattcttgagattgagcgttatcccgggtaagcgtggcatct

SEQ ID NO: 703953 - DNA, 210 bp, Homo sapiens
tgctgacctgaggattccccccgtccgatggccatgcacggtttgtgtggtggcttggtatgtgctttctcgtgttacatcgcgccatcttggtatatgttagtgtgttggttagtattgcctagtctgcggcgcgttatggagtggcagtgaaatcacattgctaggccggaggtcattaggcgggctgagagggcccctgtaaggggt

SEQ ID NO: 703954 - DNA, 1056 bp, Homo sapiens
  misc_feature (4)..(4): n is a, c, g, or t
  misc_feature (26)..(26): n is a, c, g, or t
  misc_feature (92)..(92): n is a, c, g, or t
  misc_feature (96)..(96): n is a, c, g, or t
  misc_feature (119)..(119): n is a, c, g, or t
  misc_feature (127)..(127): n is a, c, g, or t
  misc_feature (155)..(155): n is a, c, g, or t
  misc_feature (177)..(177): n is a, c, g, or t
  misc_feature (218)..(218): n is a, c, g, or t
  misc_feature (244)..(244): n is a, c, g, or t
  misc_feature (259)..(259): n is a, c, g, or t
  misc_feature (283)..(283): n is a, c, g, or t
  misc_feature (319)..(319): n is a, c, g, or t
  misc_feature (381)..(381): n is a, c, g, or t
  misc_feature (392)..(392): n is a, c, g, or t
  misc_feature (400)..(400): n is a, c, g, or t
  misc_feature (406)..(406): n is a, c, g, or t
  misc_feature (413)..(413): n is a, c, g, or t
  misc_feature (460)..(460): n is a, c, g, or t
  misc_feature (475)..(475): n is a, c, g, or t
  misc_feature (479)..(479): n is a, c, g, or t
  misc_feature (488)..(488): n is a, c, g, or t
  misc_feature (492)..(492): n is a, c, g, or t
  misc_feature (524)..(524): n is a, c, g, or t
  misc_feature (527)..(527): n is a, c, g, or t
  misc_feature (530)..(530): n is a, c, g, or t
  misc_feature (532)..(532): n is a, c, g, or t
  misc_feature (534)..(534): n is a, c, g, or t
  misc_feature (545)..(546): n is a, c, g, or t
  misc_feature (561)..(561): n is a, c, g, or t
  misc_feature (563)..(563): n is a, c, g, or t
  misc_feature (565)..(565): n is a, c, g, or t
  misc_feature (588)..(588): n is a, c, g, or t
  misc_feature (590)..(590): n is a, c, g, or t
  misc_feature (592)..(592): n is a, c, g, or t
  misc_feature (599)..(599): n is a, c, g, or t
  misc_feature (614)..(614): n is a, c, g, or t
  misc_feature (620)..(620): n is a, c, g, or t
  misc_feature (623)..(623): n is a, c, g, or t
  misc_feature (626)..(626): n is a, c, g, or t
  misc_feature (640)..(640): n is a, c, g, or t
  misc_feature (644)..(645): n is a, c, g, or t
  misc_feature (656)..(656): n is a, c, g, or t
  misc_feature (660)..(660): n is a, c, g, or t
  misc_feature (662)..(662): n is a, c, g, or t
  misc_feature (669)..(669): n is a, c, g, or t
  misc_feature (689)..(689): n is a, c, g, or t
  misc_feature (693)..(693): n is a, c, g, or t
  misc_feature (695)..(695): n is a, c, g, or t
  misc_feature (714)..(714): n is a, c, g, or t
  misc_feature (716)..(716): n is a, c, g, or t
  misc_feature (729)..(729): n is a, c, g, or t
  misc_feature (731)..(731): n is a, c, g, or t
  misc_feature (753)..(753): n is a, c, g, or t
  misc_feature (764)..(765): n is a, c, g, or t
  misc_feature (775)..(775): n is a, c, g, or t
  misc_feature (783)..(783): n is a, c, g, or t
  misc_feature (795)..(795): n is a, c, g, or t
  misc_feature (854)..(854): n is a, c, g, or t
  misc_feature (872)..(872): n is a, c, g, or t
  misc_feature (889)..(889): n is a, c, g, or t
  misc_feature (918)..(918): n is a, c, g, or t
  misc_feature (920)..(920): n is a, c, g, or t
  misc_feature (928)..(928): n is a, c, g, or t
  misc_feature (931)..(931): n is a, c, g, or t
  misc_feature (935)..(935): n is a, c, g, or t
  misc_feature (952)..(952): n is a, c, g, or t
  misc_feature (967)..(967): n is a, c, g, or t
  misc_feature (1015)..(1015): n is a, c, g, or t
aggngtgggggctggggactgcaccnccctcctactcatgggggacagcagtggggactagggaggggcaggagagggggctgaagcaaggnagcngtaatggggccacgacgccacanagccagcnccgtcctctcccagaccctggtgggagntcctgtggcttggggtggggantgggggacccaccccaggccctccctctcccttcctcaganagcctcctttcgggctcaacccattncttccggcaggagantgaggcacaaagagaggaggaagngggagaggaggacgagggaggggcagggtggcagcncaaatgaaggcagaggtgagaggcgtgggcaaggccactccacccccacacccaccccaganaggggcgaggnagcaacancatcangcagcangtgggggggacaaggcggggtttaaggctgaggggcccggggcaggnggggcctcgggcctnagtnaaagccgtnccanttgctgttctctgagttgtattccagcccggngcncanananttgaaaacatnnagcagcatgggcgtncngnggtgccggttcatgaagcgggcntncnccgtcangcgcacacaggtgcnagttcnaanttngcaggctagcagtntctnntctttgaggangccntntttgtgngcagagttctcacacttganaatntnaccttcagggacgggcacnangctgaggagcttnangtgcaggctggggacaggtgcnttgcggacatnnttgcacagcntgttcacngggggcagagtnaaggtaatctcaaaactgttcaggatcttcaggaagccaactttgaacagaaagctgcngttacttttctgggttancatgaacaccgagttangcagcttctcaacaaagttgacgtggctntnggaacctnctncatngtggcctgccgcaaagngagtactccggactntgggcttgttgccttgttggctgcagcatggacgcctcctgccaagcnctcctgccagaaacgccactaagctcagcagccttccatgc

SEQ ID NO: 703955 - DNA, 636 bp, Homo sapiens
gtgagaactgctttatggatgctgctggtgtggcctctctgttaactacgagcagaagttgtagtctacagaaattcctaagagaagagaaggaccctgtgaatgggtgcaatgggtggaatgggaggtggtatgggaggtgggatgtgcgtaactcgctagactagtggtttagcatttattaatgaacgtgtgacaggaagcgcaaggcagtgttcctcaccaataagttcagagaagtcagtgggtagaaaatgaagaacaaaggctgggtggaaaatcactatgaagcatcagttactggttgtcagtttgacaaagatatatagtggttttactgctgtcgattgtccatgcctagcagtatagattggatttggtgattgtttggaagtaaggaaatcatttgtacatgtcctgatacttgggtacgaagagccgatgtaccagtgtacttgctttcaagttagatcactgaggcatttttacatagtattctgttaagaatcaggatgtggagtgctgtgccagcaggcagatgagaagttaagcgagcctttctgtggagagtgagaatgattgtggtacaacagtagagaagtatccaattatgtgacaaccgttgtgtaataggaa

SEQ ID NO: 703956 - DNA, 322 bp, Homo sapiens
  misc_feature (53)..(53): n is a, c, g, or t
  misc_feature (196)..(196): n is a, c, g, or t
  misc_feature (304)..(304): n is a, c, g, or t
ctgagaagtatcattgcttgttttgaaagaatacaacaggatttaagtttctntttaaaaattgcactgaagaaaggccgggcgcggtggctccccctgtaatcccagcgctttgggaggccgaggcggggggatcacgaggtcaagagatcgagaccatcctggccaacatggtgaaacccgtctctaataaaantacaaaaattagccgggcatggtgacgtgcacctgtagtcccagctactagataggctgaggcaggagaattgctttgaatccgggggaggcggaggtttgcaagttnagccgagatcgtgccact

SEQ ID NO: 703957 - DNA, 481 bp, Homo sapiens
  misc_feature (333)..(333): n is a, c, g, or t
  misc_feature (408)..(408): n is a, c, g, or t
  misc_feature (445)..(445): n is a, c, g, or t
  misc_feature (449)..(449): n is a, c, g, or t
  misc_feature (456)..(456): n is a, c, g, or t
ggtacactgagactctgttcctaaaaagaaaaaaaaatgtatgattatttttccacttcttaagatttcatgtctttatttttcagacattctgtgggattttaaaaaaattttttatttgatatgtggttatgtttccatatcctcttttattttactaaatattgaaaacattttatattcagcctttcacacttcatgtggttcagcgtcttggtggtcagcttctgctgtctgttcttcctcctggtgctcaggatggcatgtgtccttgtgagtttggtgatttgagattgtgagctcatgttcagcggggattgggctgtgagaatncaccggccctgggatgaggctctgtcctgctgggggctcatgtctttgtttctgtggggtggcccagagccttangaatctgaggcactttaacctaattccttgtcatttnggtntcacaanatcgcaagcggtgtgcatgggatca

SEQ ID NO: 703958 - DNA, 854 bp, Homo sapiens
  misc_feature (308)..(309): n is a, c, g, or t
  misc_feature (724)..(724): n is a, c, g, or t
gataaatattatactaagcatatataccatactacactatactaagtgaataactaagtaataatactgctacacacctacataatacctaccctaaactaatagcctaagaaagtgaataaataactaattactgtctagttatacaatataataatgctaactactacataaaccctacaacacccactaccctactataatgccaataatatagtagcctaatatgccataactaagtactatatagcctgcctagcgaagcagctggtagtgcctaagccctaactaagtactacaatactacnncaacacataataagtgctctaaagactaactgtaacataaacctaaaacctaactaccaatagctaaaaactaaatacgtacccaacaattaataattaactaaccacctagacatagactactaccaaaaaacacataaattttgaatacaacacaaccacccacagcctaattattagcatacataccccctaactattttttaaccaaatacaacaacaacctaatttaactgtatccccaacctattacctaccgaccccctaaacaacccccctacctaatactaaactaccttgactactaacccctacacaatacatggcaagccaactgccacttataccatgtgaaccactatacacgaaaaaaactactaacctactactaataactaaatactaccctaacaanatactaccttaaattaataaacatatcacagtccacagaactaaatacatatatttatatactatactacggaaaccacacttataccccaacctatgtgctatacaagaaaaataacaacacaaggggg

SEQ ID NO: 703959 - DNA, 981 bp, Homo sapiens
agaaattaaaatggtatcagagggttttctctaatcattttttctatttgtttttttggtacttctagatgtttgggtatatacagcttcatttatagatgagcattctatatttttggtttggttggcccaatttccttatggggttttaatagtctatagcattttaaaacggctgatgtggtaggcataatttacaggctaaaaacttagtagcatagagttggtctggcgcacagccttctggacaaagtttacagttattaaagtggcagtatccttttaaatggctagtaatcaggcactctttctttttatttttaaatagaagacaggggtctacgcagggttgccaaggttgggtctgaaattcctgtggatcaagggatcctcatgggcttagtctccaagagtacggggataacagggctcttatcttttaaaactataaaatgtttaaaatggggtataaactctggtactctggcccataaatgtgtttaacgattacggtgctggtgaatcatgagtacgggtagagagattgtctccataagatgaacttcatagggaaatggcctaaaagaatctcacaagagcggcgcactcccgggttaaacccagggggaattgttgtcaaaacacggttcaactcgcgacaacgcaggcacaccggggagccgccacttccactgcgctattgttaccccagcaatttcacaacgtgggcgccaccagtcttattgaacaccccggcgtctcaaccaacaggggcaacaagcagcgtggcgtaaaccaaccgactggtacaaaacatcaccagcgctcgcaacgaggacggcataaacacaattgcgcgctcgcactatgggcacaaacccagtgcaggggaggcaaaacagccaacagtgttcacacgaacgaacaggtgtcacaccgcggcgagcacagaagcaggcgttgcgcccccacacaacacgg

SEQ ID NO: 703960 - DNA, 520 bp, Homo sapiens
  misc_feature (192)..(192): n is a, c, g, or t
  misc_feature (194)..(194): n is a, c, g, or t
  misc_feature (199)..(199): n is a, c, g, or t
  misc_feature (201)..(201): n is a, c, g, or t
  misc_feature (207)..(208): n is a, c, g, or t
  misc_feature (218)..(218): n is a, c, g, or t
  misc_feature (235)..(235): n is a, c, g, or t
  misc_feature (245)..(246): n is a, c, g, or t
  misc_feature (374)..(374): n is a, c, g, or t
  misc_feature (376)..(376): n is a, c, g, or t
  misc_feature (378)..(378): n is a, c, g, or t
  misc_feature (393)..(393): n is a, c, g, or t
  misc_feature (510)..(510): n is a, c, g, or t
ggtctgtggaccagcagcggcagtgacacctgggagcttgttaggaatgcagagtctaggcctcaccctatacctcccgactcagaccctgcattttagcaagacccccagctgattcctataagcactttagagtttgagaagcaaggacctaggctggggatgtcctccgagcagagggtgaagtttctntnagttntntccctnntacttccagngatctgagcctgttttnagcttccttnnttacccaccctgggagactcttggcctgttagattgttccttgagttttcatggtatttcttaagaagggatttttacttgttttcacttagtagatgagggttatgtgttttctgtcctccttaccngncntttctgtttaacccntgcatgcctagcttccttctgctccatttcctcacctcagtcctttgaagtggtgttgtttctgtgaagttgttttctcttctgcttggagtgtttttccttttttgtcttggaaantgtgggcagc

SEQ ID NO: 703961 - DNA, 1005 bp, Homo sapiens
gtcccgtattttaatttgcccaggtaccctccaagaccatttcataaatgctgaagttcttcaatttcaccaatgataacgacacacgcgtttttaaaacagctccgtcggccccggattcatttaacagttcggtggaacctgtcctccatacttaaagtacctggtaggaccaccttaaaccatcccaaccagagggaagtatgcatcttgatgagttccccaccatgcacggagttacaggtagtgagttccaatacctcaggtgtagcattcacacctctgtcatatacctgacatatatatgacgtgagtatactggccactgagtcctgtaactactgactcattcttccaatggtcactggggcaatcactttatcttccacctgatgcctgcacctagatatgtactgttgcgtggacgaaggattctcacacttggtggcatcagccaacaacgcatttattatctcactgatttctatggactcacaaactgctaggcatcagtcttaacttgtgtcgctcctgggtcaaggtctttgttgacgcttgccacgcaaactattggccagggctgtggtctcatctgaagcgccatgagacgagaccgcacgaaaaaggggagggacatctgttttcaatttcacttacacaatctattggcaggtccttctacgctgggctgaatgacaacatggtagcctgacttcccatatgaatagagagcactaagataagcaggatgtgagagaagtgagagtaagagacacgcacaagatgagagttgagcaagaatcactcgtgcagaccatatgcacccaaatgtgcaccagagacacagaagtcacaatctttctgtgatctaatcttgaagtaacatctcatcattgtattcatcacttagttagaagcaagtcaacttcagcacataaccaggagaggaaatacacaggttgtgaaataccagaacctggctcgttgtgatcctcctagggagaa

SEQ ID NO: 703962 - DNA, 164 bp, Homo sapiens
taaccgtattctgatcctcatgtcctgtgcggtttcagccgtgcaggacaaagcctatgtgaaaatagtggcgcactgaatgtcgacctcgagcctcgatcttgtccggcaatatccgatcgtgcgtgccagcacgatcgcgatcctgttttttggtttcgcgg

SEQ ID NO: 703963 - DNA, 429 bp, Homo sapiens
acttctttcaagatgtagccatcagttactgcactgctattactgacttaaatggacctttttgcttttacaaactatacttatctatggttctttgttgaagaactcaggagttcgacattaatagaaattagaaaattttataatgtattataaaatccattactaagttgaaagtatgcttttaactctgtgtatcaggggatgtatgtttgtgtggagatgtttttttctgtctgtaggcacatgtatatatcccagtaagttcttattttcatttcatttctacatttttatgaacttgttttataagggtactgtttagttgtgataattaaatatatataaaagctttctgagagattatttactatatgaatatattttcagctggctgatcaaaagtatttttaaaattttgtttttagc

SEQ ID NO: 703964 - DNA, 192 bp, Homo sapiens
cagcatcgctaaccagggggctgccgattacactcaccctttctgtaaattaggaagtttcaaggaatgatctcttgctttctttctttttaagtggagtcttactctgtcgcccaggctggagtacagtggcaagatctcagctcactacaacctctgcttcctgggttcaagtgattctccagcctcaga

SEQ ID NO: 703965 - DNA, 258 bp, Homo sapiens
gcgctgtgagcagtgacgcgcgaggctttctgaggcaggataatcactttaaccctgtggggcgggcaggttgctgtgcgctgagatcatggcagtcacactctagtcctgggcgacaagagcgagactccgaaactctatgctaaatgttttttgtggtatctctctcttaggaagagaaccagaggctttttttcttggttccaatttggggggggtcccgggggcccaattcggaatcctgggcttggggttttc

SEQ ID NO: 703966 - DNA, 274 bp, Homo sapiens
gaccagcgagagtacttgagcctgggaggtggaggttgcagtgagccgaacgaaattgagccacttcaccccagcctgggcgaaagagtgaaataccattcaaaaaaaaaaaaaaaaaaaaagggttaggggctgggattaactgggggggcgggttgtgggaaaattggatttaagggaggcccaaaaaaaacagaaagggctgggcggggcgaaccaaggccttatatctccagcatttgggagggctgtgagaaggggggaatggctgtgg

SEQ ID NO: 703967 - DNA, 641 bp, Homo sapiens
gcttggcaaaatggtattttggaatgtgaagttcaaccttgtggcagtaggttgttgcaatagtgatctggcactatgtgtgccagtatagccacatagcggttatttacacttaattaaataacatgacaaaatttatatttttccagtgtgcattagccacatcttaagtgtccggtaagccacatgtgacctgggtggctaccattattacgtgcagatatagacaacgaacatttccatcatcacagaaacttctcttaattctgggtctagaagataacccttagtactgtggtaagacaatttttggacaggcttatatgaccgacaacagttgtgtaaccccttgagtctttgggtattgccccaaaaagaacaacattagggtaatccctttttcaatattattcgagacccagaagaaagctggttattccagccactatttcttgggacaatggctaagtatttgtgagcgtcttattggccatataccacgctcttaaaatttgttgcccaagatctgtgttcgtgggaacatggcttaagttttcctggatcttaccagagaaattttaccgagcgaaccattaggttaggaattaattgccttccaggtaaagagctggctttaaaaa

SEQ ID NO: 703968 - DNA, 972 bp, Homo sapiens
ggagagagagaactagtctcgaagtttttgttttttttgtttttaaacagtatttcttcagaactttattaaaaaatgacttaaagtgcatcttattaaaaaatgtttaaaaaccacataatttcagggccccgttgttgctgggcagctgcttgatactcccttagaaggtggaggaaaggtgagaggatggcagggtgaacgtggggacgtggggagcaggaccagtggttgcgagtcagtcccgtcgtgtatgaagatccaagagcatggcgcgaggtgtgtatactggtgggcaaggggcgacacgggattcctcaggcacaagaatggcaggcagatggcaggggaacgagattgtcattcccatgagaattctgcaggcgcaaaggcgatccatttggtcccaggaaagtcctcgtcctgaagcctcggagctgatccatcttgcggtagtggccaagaggcacgtgaattaccagagctggaaaagaggtccacgcgaagttgggttccgagacccaggaacctggatgagggccgtcacttgccagacttaagccctctggtcccctgagagtggtgagaacacacggacagcaagcaaagttacatcctcggtctgactgggcataggcagaacgcacggaagcccaagctggtccctgaatctgctagtgagcacagggcagccggttggccagcgggaataatgtggcacacggtgaacaggccagttggcgaagggtaaaccaactcagttcctgaaaacaacaccaatccaggatgacattccaaagacaccccacgggagaaggacacatagcacatgcgacacacgcaggacatatgcaagcaatgccaagcctaaccacaatgaccacacataaaactacaacaattagcaaaaagcaacaaaaacaacagggctaaataaacatacggagacagtcccacaacaaaaaagagcca

SEQ ID NO: 703969 - DNA, 409 bp, Homo sapiens
atctatatcatgggggcagttacccatcatgctgttcttgtgatagtgagtgagttcgcatagatctgatggtttactaaggggctcttcctgctatgcccggaacttccccttcctgccactgtgtaaagaaagatgtgtttgcttcttcttctgccatgattgtaagtttcctgaggcctccccagccatgtggaactgtgagttaattaaacctcttacctttgtagattactcagtctcaggcagttctttatagcagcagttaccagagagtattcaattatatgaactaatacaccacacaatggaatgccctttggcaacacaaagagcaaactattgatacattcaacaacatgaatgaacctcaaaaacatggtatcatgatattaagtgaaagaagtat

SEQ ID NO: 703970 - DNA, 328 bp, Homo sapiens
cacgaggttttcttttatttttctaacattggcggacgtttactcacacacggttgcgatgaataagttaactcagtcactgacatttttgctacaccaacattcctttgactcctatgcttacacccaaccccccatcatagcacaacatcgtcctttcttcaatcacaattggagcacaaaaggtcttttcaatcccttttcccataaggtttacaattttacacagcaagttaactatcactatgttacatcataacacatcgatttggtcaatcatatttccatcatattaacgatacttgttgagcatttttcctttaacacg

SEQ ID NO: 703971 - DNA, 102 bp, Homo sapiens
ggtaggcctgggagcagtggtggctggaagacgaaggacctctggttatgctcgacagatacggaattatgtagtgatgaaaagagtcgtcgatcgagtcac

SEQ ID NO: 703972 - DNA, 322 bp, Homo sapiens
  misc_feature (38)..(38): n is a, c, g, or t
gtttattaatatttaaacatattaaaataatacatgtncataatgaaaatgaaacattacaaataaatacacaggaaaggcagtattccccttccagttccactcttgaaataaccagttaacaagatgatgaacatctttccatgatgttctccaagattcatattatttttgcaatcatacaatggcatatacagctcaggtgcggtggctcacgcaagtaaatcccagcattttgggaggctgaggcgggtggttcacctgagatcaagagttcgaggccagcctgaccaacatgaagaaaccctgtctcttactaaaa

SEQ ID NO: 703973 - DNA, 140 bp, Homo sapiens
  misc_feature (8)..(8): n is a, c, g, or t
  misc_feature (14)..(14): n is a, c, g, or t
  misc_feature (24)..(24): n is a, c, g, or t
  misc_feature (35)..(35): n is a, c, g, or t
atgggtgnccattnacggtgtttnccaaaaaccanaaaaagtgttttcctgagagttcgtgtcattcgtgacttttttgtaaagaagttgtgttttcagaggtgattttatgacaggaaagtgaaaaaattagttttgca

SEQ ID NO: 703974 - DNA, 289 bp, Homo sapiens
  misc_feature (41)..(41): n is a, c, g, or t
  misc_feature (147)..(147): n is a, c, g, or t
  misc_feature (203)..(203): n is a, c, g, or t
  misc_feature (226)..(226): n is a, c, g, or t
  misc_feature (244)..(244): n is a, c, g, or t
  misc_feature (266)..(266): n is a, c, g, or t
tcctccttgggttaattaatgtgccaaagcccggaattacnggaaatcttctctagcaaccttgcaacctcttgtgatccctgtccatcatcccccgtcgccgtccctgccatgaccggtcatcctctcttcggccatggtcccccnagtcacgtctgccctggggggaggaggcagccccggccctcgctcatcctcttgtnagagccatagcccccccagccantctgcgggagtcccgccngtgccctctggtcctccattgntgttctgggtaatgcttgtcctt

SEQ ID NO: 703975 - DNA, 853 bp, Homo sapiens
agcgggaacgggggcttccgctcagcagagaggcaagatggctacggcagggggtggctctggggctgacccgggaagtcggggtcgtccttcagccattcttgtatttcgtggcgtccgtaatagcaggtttgtgcgaggggaaactcagtggagacggaagatatatatccccttaaataaaacagctccctgtgttcgcctgctcaacagccaagtcatcagattggctgccgagtcttcaattagtggagacacaggggttatccacgtacgtagagaaacgaggaggacctacagtgggtatcgactgatggcccaacccccttacatggttctgctggagagcaagcattttaccagggatttaatggagaagctgaacggggagaaccagccgaattgctggtcttgcacgtgtccttgaccaagcccagtcctgcctcaggcttctctcctagtgtacagtgcccaaatgatgggttaggctgtttactccaattcctatgggcccagagttttgctcactgcaagagaaataccgtggcacttccgctgggcaaatggttgggcttcactgacgactttagttttccccatctttcttcttggaagatgaaaatgaaacccaagagtcatcacagcagtgctaatccaagatcacaacctgagtccagaattgtgctcagggacaaacttatcccagttatgtgcccatggcagcgctctttgcacacattgcattgcttgtcaatcagtcactgcacaccttgaattgcggcgcagttcccatacaagagcaacgttcagcgatcaacccagagaatcgtctgggacccctgtctggatgacc

SEQ ID NO: 703976 - DNA, 738 bp, Homo sapiens
cccctttaaggtgattttccgctccacaacgaagtgaagtcatagagtggtcaacaaccacagtgccgccacaaattggccaaaggtttgatcgtacaagtcagggtgccctcagaaccctctgcgacgtccagggctcctcagtagcattcaagtgcatctacgtctgtcacggtggggcaagcagatcctaagccgccttgttattgacctacgtgcaccaggaaggcgtatggatccacgaatacagggattgctcctttccagggtagaagttcattcatcaaccacggatccgcagcgtattacatcagcccctgtggtggcacacagccagagcaagggtgatcagtgtcctccctctatccacacaaactctagtaggttcagccgtattctgccgattgcgtatatgggggccacctttagaagcactctctcgagccctgtaacacccatactgcaaattagtgacaacacaggggcctggctcccagcacatcatgcaatgtcgaacaatcaagtgcaaataaccggcggtaatcacaacctgaagggtcccctcaaatcccttcaacacaagcgtcatgagcaggattagtgtccgagctgagtatgcaagccctagagtagaataatccaggccgtctgttaagcctggggaacacaacggcaactgggaaatttgtaagtgaacgctgtttcataaaaatatgcttcagactttctaaacaagta

SEQ ID NO: 703977 - DNA, 1172 bp, Homo sapiens
  misc_feature (336)..(336): n is a, c, g, or t
  misc_feature (562)..(562): n is a, c, g, or t
  misc_feature (676)..(676): n is a, c, g, or t
  misc_feature (779)..(779): n is a, c, g, or t
  misc_feature (875)..(875): n is a, c, g, or t
ctggtgtgggtcgatggtcgactagctgattagcgggggcacgtcctacgtgctagacgatagactcacagtgcacgcgaggctctgtgcaactgacggaagacagcgcgcatactacccatacgaatggtacttgtcttcattgcttcgcctggtgataatcattcgtagctttcagcctgccaaggaacaccatgggtagggaaccctgaatcgtatgcgtagtctttcttggaccaccaggatgaatagaccatcgaacgtgcatctaatacgaacctcgcacaagcatgtggtgtattcccttccttgcactccaatagagcaccaagcaantgtttcgacccatgaatgggacttgggggcattaggacaccagttacgacaaaagtaggtctgacctctggacgacgcgacagtgtgattctgcgacatatcgaatacacaaacgcgagcatatcttgtaacatacttagatattctccaggggacgcgaaattggcagacgttctccgtgcaacaggttagacatggagacacattagttgtagaccaaggaggntaatttccaatacgagccaagaaaacgcacttggtttggggctaacgcctaccaatgtcgcccaaccgagatggggacttcctggcggttggggcaagtgggccattggatatngtctcccgtagggggtcacgacactgcggtccacaggaggcatttgtggttccctttccataagtccagcggatgaaatggcaccatatctttcgaaccacgnacctatcaatggggccaccgctgggcatggggcaggagatgcctcttgccctctcggagctttggggcgggctaatgcagattctggcgcttcaangaaagtgtgtagcgcatttttgcactatatttccttccactatacgtatgaggatgagcataacatcatagaatctggttagcggtctgctgggcaaaggcacggagtaagtattgactcaaggagcatgggcgaacggggaactggtggtggtctgggtaacgccaccgttggtaaggagcaagtcaaaccaactttggatagggaaatggccaaaattaagatatccttggcttaaggcaggctggccgactctcgacagtaacatgggccctcttgtttttagccccccaatgg

SEQ ID NO: 703978 - DNA, 196 bp, Homo sapiens
  misc_feature (180)..(180): n is a, c, g, or t
ggtgactctagaggagcttcacactgggttcgagttcgaacagctgaggttgaggatagtgttataagggccttccacggtgacctcaatttcaggaacctttgaatactcccaggacttcgtggtcttttgggggactgcaaaggctttaggtgtttattttcactagccatcccaggnaggcaagtacggagat

SEQ ID NO: 703979 - DNA, 516 bp, Homo sapiens
  misc_feature (297)..(297): n is a, c, g, or t
gggaacccaaggagccagccccagaaacagctgatggcccctacctggtgatcgtggaacagcctaagcagagaggcttccgatttcgatatggctgtgaaggcccctcccatggaggactgccggtgctccagtgagaagggccgaaagactatcccactgatcaagatctgtaactacgagggaccagccaaggatctgacggtggaccttggtaacaacgaacaagttgaccccaacctcgtgctcatgccccacagtcttggtgggcaagcaatgctcggagcttggggatcntgcgccggtttcttgtggggccccaaaggaacatgactgcccaatttaacaaacctgggtgtccttgcaatgttgactaaagaagaacatgatggggactatgatacaaaaacttcagaggcagcggtccgctctaggccccaggaccttacggaggccgagacagcgggagctggagcaagaggccaaagaactgaagaaggtgatggatctgcgtaa

SEQ ID NO: 703980 - DNA, 176 bp, Homo sapiens
catggatttgctggtgcagtacaactaggcttaatagggacatgtctgtataccaacagctaacaatctgaaaaagaaatcaaggaagcaatcccatctgcagtagccacaaataaaataaaatacctaggaaataagttacccaatgaaacgaaagggctctacagtgaaaacta

SEQ ID NO: 703981 - DNA, 129 bp, Homo sapiens
tgaagggtcatcccagatgctgtggggcaagtacatccccaatcgtggcctctgacaagtggcgggcctgaatcatgagggtaccaatgtgctgcccccctcttaatactcaccaataaattctacttc

SEQ ID NO: 703982 - DNA, 402 bp, Homo sapiens
gcagcattaagaatagcgtcacgtgaccaagaacacacatttcttacaaatcagcagccccaatacatgatgcctaagatgtcccaaaaaggccaggtacggtggctcccacctgtaatcccagcactctgggaggccacggtcggagggttgcttgaagctaggagttcgagaccagcctgggcaacacagaccctatctcgacaaaaatcaagaaaaaaattagccacgcgtggtggtgcacacctgtggtcccagctactctggaagctgaggtgggaggattgcttgagcccagaagttcaaggctgcgcaagctgtgatggtgccactgcactccagactgggcaacagaatgagatcctgtctctaaaataaaattgttcataaagatctccccca

SEQ ID NO: 703983 - DNA, 705 bp, Homo sapiens
gcaaggaggcggcggcaagacgctcgagtggcgagtagtggaaccggttgcttctgaggggagtccaagatgaccggttctaactgaatgttcaaggttgaaccatgctagccagaaggatagagatctcctccgtgaagttcaaccccgaacacctcccatgtgtcctgcttgtctcctcctgggacacgtcctgtagcgtctttactgatcgtgtcgggcaactccattgcggttcaaggtaccagcacgaccgggcggccgtgcttggactgcgccttctacgatgcaagggcatgcctggacgtggaggactagatcatcaattgaaaatgcatgattcgaacacgtgatcgagaaccatcttgtggggacccatgatgctcccgtatcgagatgtgtgaatacgtggtccagaagtgaatgtgatggtcgactggaagttgggatcagacagttaaactgtggggatcgcagaactcctgtgtaaggctgggaccttctctcagcctgaccaggtatataccctctcagtgtcttggagaccggctgagtgtgggaacgagcaggcagcagagtgtaggcgtgggaacttacggaacatgggttacgtgcagcagcggcagggagtccagctgaaataccgagtgggtgctacgagcgttcaaaacaagccggtatgtattacgtctattgaggccggtg

SEQ ID NO: 703984 - DNA, 690 bp, Homo sapiens
gcaggagctgggcttgccctgcggagcagtagctaggaacagatccacttgctgggttgctgttcccagccatggcttctgcgctgctggctgctggtgtggtgctggtctggctgtggcctcgtgacccggctgcctccctgccgggagcacccctgatgagaatgacccctccatgatctagtgtaggttgtgtgcatgttgagcccatgctgtgctatctacactgtgcccaacgaccttgctaaattgcaagcaccacccatgtgcccactgatgagaacaatctacagatgagaatcatgaccgtagatgccctataatgagccatagtgatagctgcatataatgagctagttgtgcaagcctagaatcatcccccgaaggcgctgcaacgaccgtgacccagtatcttgagcacagcatagtagcctatacttgtgtgcgcaagctgtagggagcgtagagcgcacggggaacctgttagaactggcttgccctgggaatgcctagctagagagatgagacctaccccgaacaagctaagatagcagtttggcctttggacggcgataccacttgtgagcgccaaggaggggaagacaaattcagaagtacacccttaggggaaaacatattaccatatggggatggaccgcgcatagacttatggcccaaagtggataggtt

SEQ ID NO: 703985 - DNA, 291 bp, Homo sapiens
aggtaaatccacaggcacagacagcagattagtggttgccaggaactcagggagaggggtatggggagtaaagggttaataatctgagtttcctttttggtatgataaaaatgttttggaagggttaattttatgttatatgaattttacttcaataaaatctagggccagtcacagtggctcacgcctgtaatcccagcactttgggagaccaaggcaggaggatctcttgagctcagaagttcaagaccaccataggaaacatagcgagatttcatctctactaaaact

SEQ ID NO: 703986 - DNA, 189 bp, Homo sapiens
tctataggatccccgatgaacagcatcgccgggtttgagatcaggtgccgtcatttcttttattgattgttcggtgaaatgagctttgatgctggaatttgacagcccatgtttttgcctctgcatctactgctgtggctgatgggtctggctggctgatatcaacgcgtacaagccgaaagtataaga

SEQ ID NO: 703987 - DNA, 296 bp, Homo sapiens
  misc_feature (221)..(221): n is a, c, g, or t
ttcaataaatagtattgaatacctattctgtactatacaaaacactggtgataaaacaatgagcaaaacaggccattcttggattctgagaccattcctcctgccacacacaactccccgcaagaacacttagctatcagtgggaaaaatccagtgtctttctcttgctgggaccgtcatgtccatatcagtcatatacaatatcacaggtaaccctgggngggaggggaaagggggatggggaaccaaaatgcaaaggacctgggtgctaagcgccccatccttatttcatggca

SEQ ID NO: 703988 - DNA, 378 bp, Homo sapiens
  misc_feature (98)..(98): n is a, c, g, or t
agcaaatccaggtttttgaagagttaactcaccaagtgcaagaaaaagattctttggcctcagcagctccatgtccgccacgttgccatcgaacagcntctgaagaactgttctaagattccatgtctgcaagtagggcgaacaggaatgaagtcgcacctacccataaacaactgacctaaacagacttacttcgatgccctgccctttattggtctcccagacatgcaaactttgaagaagttgaagaaagttgtggcattttatggcattaaatttgccaacataggcagtattacactattgcaataagcagatcataatactcatatataattagcatcaaagagaatatacatggacgcagcagccacagag

SEQ ID NO: 703989 - DNA, 639 bp, Homo sapiens
  misc_feature (60)..(60): n is a, c, g, or t
  misc_feature (119)..(119): n is a, c, g, or t
  misc_feature (161)..(161): n is a, c, g, or t
  misc_feature (187)..(187): n is a, c, g, or t
  misc_feature (202)..(202): n is a, c, g, or t
  misc_feature (214)..(214): n is a, c, g, or t
  misc_feature (225)..(225): n is a, c, g, or t
  misc_feature (233)..(233): n is a, c, g, or t
  misc_feature (356)..(356): n is a, c, g, or t
  misc_feature (361)..(361): n is a, c, g, or t
  misc_feature (498)..(498): n is a, c, g, or t
  misc_feature (521)..(521): n is a, c, g, or t
  misc_feature (525)..(525): n is a, c, g, or t
ggcggcggggaccatgttgcttccgaacatcctgctcaccggtacaccaggggttggaanaaccacactaggcaaagaacttgcgtcaaaatcaggactgaaatacattaatgtgggtnatttagctcgagaagtctgatcatcggatatcatggagtctngcaagacggcttctcccaagagcatnccgaaagatgcacanatgatggcacanatcctgaaggntatggggnttacagaatatgagccaagagttataaatcagatgttggagtttgccttccgatatgtgaccacaattctagatgatgcattggcaatccagtgccgcgctgatcagtcttttacctctcctnccccnagagattttttattagatattgcagggcaagaaatcaaacccctttgccattgatcaagccatattcaagtcctaagttgccacctgattaatactgcttaacagctccaaactataggctgaaatctttacagaanaagggcataacctcttgcggaangaantacaatcccgccggtaaatgttggttcaagtactaacagaacaaatacctccacactttggacaaccaaccccacaaacatgtctggtttaacttggggacttcctgttccccc

SEQ ID NO: 703990 - DNA, 732 bp, Homo sapiens
gtgactctagatgatccccaccagacattgggctcgacacggatgtcaccttcgcctctgacatttcggatctctgggccctctttgctcacttgggtgacgggcaagcgatcggtcttgcggagaaccagagtgactggtacctgggcaacctctggaagaaccacaggccctggcctgccttgggccggggatttaacacaggtgtgatcctgctgcggctggaccggctccggcaggctggctgggagcagatgtggaggctgacagccaggcgggagctccttagcctgcccgccacctcactggctgaccaggacatcttcaacgctgtgatcaaggagcacccggagctagtgcagcgtctgccttgtgtctggaatgtgcagctgtcacatcacacactggcccagcgctgctactctgaggcgtctgacctcaaggtgatccactggaactcaccaaagaagcttggggtgaagaacaagcatgtggaattcttccgcaatttctacctgacccttcatggatccaaatggtaaccctgctgcggagagagctctttgtgtgccacagccagccccaacctggcgctgaccactggggaaagcgcatgcaccactggcccaggaaaaatccttgcttttatgtacggcccgacccacctcactcacaaacatcgaccaggagcgtatcgtgcacccatgaaccaccctcactataggacttaac

SEQ ID NO: 703991 - DNA, 805 bp, Homo sapiens
  misc_feature (491)..(491): n is a, c, g, or t
aggtaaacgccctttcagaagcaactgcgtttcattggataactcataaccctccagagtgtactgattacaagtccaggcgcgggtgcttgggaacaaaagtaacatctttagagtcgggcatttaagcaccatatcttgctaccaaacgatggcagatgcctccactgagcttcagcaagtcatcctgatctcgcggggaacattttcgatgctgtcggtgctggcaggagggggtgtcttcctggtgctgacctatagaggcctgattaaatactggtttcacactccaccaggcatgccattacagatagaagagtatttaaaagacccagctcaacccatcttataggccttggacaaggacagatcaccacaggatgacgtctgggactctgtgtacattatctcgttaccggaaaaggagctagaagatgttctccaaacgctttgaaccagagcatggggcctagcccactggctccctggangagatcaagccttcggagctgctagagttctggctggactatgcagagaccagtattccctgttgctgcctctaagaggcctgtccctgcagacatgagagacaggatgtctcatgggggtgacaagcttttttttttcttcttaaagaaccttgaaaatcaaattccacagtggagttacgggagatatcccaggaaaataaagggtgcctttaacactaaaaggggctatatttgcttggtggacaaaagggtatgacacagatccgaaacttttttcattattggggggggttggccatctaaagaccggt

SEQ ID NO: 703992 - DNA, 117 bp, Homo sapiens
gttaccatcgttcacagtgtgccagcatttatgttctctcctccgccatgcatctactaggtgcgcgtagaggatataaacaaaagcagcatctgttgcacagcattgtatcacctc

SEQ ID NO: 703993 - DNA, 81 bp, Homo sapiens
tgtgatcgacgcgtgtagatgaaagatgggttgcaacatgttggtcaggctggtctagaaaacctgagatcatgatcaacc

SEQ ID NO: 703994 - DNA, 449 bp, Homo sapiens
ccgaggcgagatgcaggccgacaccggcgatgaccgcgacgctgaaggccagcacgacggcggcaccgcggccggcgagcgcggcgaggatgccgacgccgacgatggccgcgagatggtcgacgccgatcaccggatggccgacgcccgacagcaggccctgcaggaacgtctcgggcatcttgccgcccatgacgtggtgggcccatgccggctgcgccgccacgatcatgatgaccgcaagcgcgccgagcctcctggatgaaaacaccatcgcttcctccgtcgtcgcgagcccgaaggcccgaatggatgccgtctccgacggagcaccttcatccagcccagcggccggacgaaaagcgttgcctcgaccctcgctgcgccccgcgcgacggttcggatgcggtgttcgacggcaagtttcctggctctcgggtcttcgcctt

SEQ ID NO: 703995 - DNA, 100 bp, Homo sapiens
acttctcgtactctccatcgagagaatggtggcaagaccacgtcgctggccagaaagttgtgcttgaacccaaaatgaatgctgaaagtctgcacgcgca

SEQ ID NO: 703996 - DNA, 202 bp, Homo sapiens
cagattcactcactgggagaaaaagagaggagacgttctgcatctcctacaatatattctctacgcaccactagaattaagcagggattcacagatacaatcactgggagaaaaagagaggagacattctgcatctcctacaatattatctctacgcagcactagaattaagcagggattcacagattcaatccccggtcga

SEQ ID NO: 703997 - DNA, 383 bp, Homo sapiens
  misc_feature (127)..(127): n is a, c, g, or t
  misc_feature (131)..(131): n is a, c, g, or t
gtttttcctcgtctctagcaggataccccggtccgcctactagacttctcatagtgctgggattacaggcgtgatccaccgcgcccagttaaacttcagtttttcatgttccatgcattggtcaggntctnagggagtgattcattctagcagaactccctggattttaaggcagatgttccatttattaattgacaaaggaggcatatttctcccctggtaacccaaagatttaggtcattttcccagagactccatttccactgtgagggttcttggaaaactaagcagaggatgaggaaaagtctgtgaacaagcttgctggtctcttcctgtcctacaaaagagcatacctcttctgtaaccagaaggccctcttgatt

SEQ ID NO: 703998 - DNA, 158 bp, Homo sapiens
gtgtttgcttaggtgcagacgtggaagcggacaaacatgtcagtggcccggagctgggtttgtcgcaaaacttatgtcaccccgcggagacctttcgagaaatctcgtctcgaccaagagctgaagtagatcggcgagtatgggctccgaacaaacgt

SEQ ID NO: 703999 - DNA, 272 bp, Homo sapiens
cagaacagctcttctaagaagggatataaagcaccgccgggtccttggagttaaagctgggggtcgtagggttctgggcgagcagtttggtggattaaccggtggaggttaagggctaagcataggggggtatcaaatcccagttggggtctaagctatggggtgtccagatatgtgaaagccactttcgtagtcaatttggggtcaccgggagtttttaacaactcaggggagtttaagcttaatggccaatcaacataggggggtaccga

SEQ ID NO: 704000 - DNA, 478 bp, Homo sapiens
  misc_feature (44)..(44): n is a, c, g, or t
gagtgggagggggaggtacctggaactgggagtgatgtcagctncccaagctcgggttgccctgtccctggattccttgacaatgggtggtagtgcaggcagggtggtggaaaggacggggaaggactcgtgtgctgcgagactggggtcgggccggaatgtcgctgggggcgcttggaaactccgagaggaaggttggaccagaactttttggaactagtgccggcggtctccaccccccagtataaaagaacgtgtggatcacttttgctgagtacatccacagagtattggagagactggcaataaatccagtttaaacctgctttttaaacaatatctggggtggaattgtggccctgacaaataataaaatggatgagtgatgcaagtgacatgttgggtgcagcgttggagcagatggatgggtatcatagcaggttctaaggctctggaatattccaatgggattttgatg

SEQ ID NO: 704001 - DNA, 432 bp, Homo sapiens
  misc_feature (156)..(156): n is a, c, g, or t
ggccactacacagccctgtgccggtgccagactggttggcatgtctacaatgactctcgtgtctcccctgtcagtgaaaaccaggtggcatccagcgagggctacgtgctgttctaccaactgatgcaggagccaccccggtgcctgtgacacctntaagctttggcacctgtgaagccctttaaacacccttaagccccaggctcccccctccccgattaaaaagacacaaaaatagacgtctctgaggtaaacggggaggggggagggggtggttgtagctccattattttttttattaaaaaatacccttccacctggaggctcccttgtctcccagccccatgtacaaagctcaccaagcccctgcccatgtacagcccccagaccctctgcaatatcactttttgtgaataaatttattaagaaaaa

SEQ ID NO: 704002 - DNA, 151 bp, Homo sapiens
cgatcccggtgtcatcgatgccaccgtaggcaaaagcaacatccacatctcactcctcccggtgcttttggcggtattcctgcagcgctttctccgccacggtctccataaatttagggttcttccgggagaccggggcatcgataaacag

SEQ ID NO: 704003 - DNA, 371 bp, Homo sapiens
  misc_feature (93)..(93): n is a, c, g, or t
  misc_feature (173)..(173): n is a, c, g, or t
  misc_feature (192)..(192): n is a, c, g, or t
  misc_feature (194)..(194): n is a, c, g, or t
  misc_feature (228)..(228): n is a, c, g, or t
  misc_feature (249)..(249): n is a, c, g, or t
  misc_feature (348)..(348): n is a, c, g, or t
catttgccaagaaatggtcatgcttcagggcctttgcacttggcgttgcctccccctggaatgtggtctcccagctctgtccatggttgttgntttctcctccctggggtttaggaaaagacccttctcagagacggcactctcaaacaccagcccctctatcggcagcctgnctgaagtctttgaagcccngncactctcttgaaaggtctggcttaatcataaagngaatgaagggccctacttcanttggaatataccagaagcctggagagcaggaccttgctggctggtcatggttctctcttccagactgggacatgcaagggcccggtcttaaaataaaanatgctgggaggataactttgttg

SEQ ID NO: 704004 - DNA, 562 bp, Homo sapiens
taggatccccacgctgtggagtgaggctgcagcaggcacagcaggtgcgagcggacaggggacgtgagcaaggccagcgtagacaggcctgagctggaacactgagttacactctcccctgatagacaactgccaaggcattgaaattttccttttttgaaacagggtctcattctgtcacccaggctggtttgtaggggtgcaatcacagctcacggctgccttgacctcctgggctcgggtggaatttctaggagagaaattacatgccacatagaacacattggccttggccgcgagaacagatagaaggaagcgatgtccagcaggggagacactgaatcctacctgattctagccaaggtggcagatgaggaaaccaagggcacagagaggagagcttgtttgccccaacatcagtcatctagaaagtgaaggaatcacatgtgaacttgagttcatcacatggcagagccgagcttctgggcacctatgcaagccacttcccatctaggtccctgctaggttcaccagtctgttggcccacaagcgcctgggggta

SEQ ID NO: 704005 - DNA, 1202 bp, Homo sapiens
tcttggtttggttttcccggtttaaaaaaggaccccaaatttaagggtagggaaagggacaagagggaacattacccctttaggtggtagagaaagtgggaaggagaaggagaagcctcaaagaggagagggtgggaggggaagtgtcattagggcagcaaagttaatctcgtgttaaaaagagtgggggaggacccttcacatatagcctcagagattaagggcaagagatggccctctacgaggtggtccagaagggaaatgtggcagctttgtcttccttccagtggcagccacttccattgggcctcacctcgcgggatataccttcaactcctttagtggtagaatcaagagaggtgcgtgcagaagcctcgaaaagcgggcgagaaaaatctcgcgtgggtggtgggttttaacagagctcagcaattctccaagaccagcagtgtggtgcctccgcgaagacccgtcacaatcttacaggtataccaaccgaaggtggcaactggggggcgggggcccttcggggggggaaaagggacctccagcgggggacagggaaaatacactcgtcgagagggcccagacatccctcgtgggaggaaagccccaaccgagggtcaaaaagaatttggggcccaaacgtgggcacggcactacacagaaggttccccacagaaaagaaggaggcatttccagaaagaaaacaatcctcgtggcaaaaggaatacaggccaaaaaacttcccaatgtgggtcccaccagcggtgtgtgcgcaaatacatgtgggaccctggcgaaaagacaaccttccggagaagacccggggtacccagaaggtgtcaccaacccaacggtgggtcacagtagacaacggggggacgctgaaaaactcctggggcaagggcaaaagtccgccagctttagatggtggcccaccaaatgggacccaaaatttggccgggagccaaaacctcggcggaccaccagacatgcggcgtaaaaggaaatcataggccctttaaacaagagggggcacaaaaccacgtgcggcgcagacggggaaaccagcgggggagatacgtacgaactagccaaagacgggcacaagcgtacacaaggagtgtgaacacccaccgtagcgcgacgagcccaccacccaggacaaagagtgtatacgacccaacagaagaaaaacg

SEQ ID NO: 704006 - DNA, 187 bp, Homo sapiens
gtacctgggccggatgagcggctaacgccggatcgttacccactgagcagggcaggcaccgaacctgcaacctcatggttcctagtcggattcgttaaccactgcaccacgacgggaactccccctataaattcttatatcctgttttaacattttattttccacgtagagaagacacttcaacact

SEQ ID NO: 704007 - DNA, 260 bp, Homo sapiens
cgaacccttgcactttgagcaggtcgatgatctcgacggccgggttggccttgacggcgtaatacaccttggcgaattcgaaaccggcgcgcaggtcatcgtaggcctggctgatcatcgcggtgtcgatcaccacgaacggggtttcctgggtgtcagcgaacgccttcattttgtcaaaagtggcgcgcgcgaaatagtcttcgacctggatcgacatgctgggaactcctactggcaaactaaattgatcaatgggt

SEQ ID NO: 704008 - DNA, 822 bp, Homo sapiens
  misc_feature (1)..(1): n is a, c, g, or t
  misc_feature (75)..(80): n is a, c, g, or t
  misc_feature (86)..(86): n is a, c, g, or t
  misc_feature (99)..(99): n is a, c, g, or t
  misc_feature (130)..(130): n is a, c, g, or t
  misc_feature (156)..(156): n is a, c, g, or t
  misc_feature (167)..(167): n is a, c, g, or t
  misc_feature (175)..(175): n is a, c, g, or t
  misc_feature (238)..(238): n is a, c, g, or t
  misc_feature (304)..(304): n is a, c, g, or t
  misc_feature (337)..(337): n is a, c, g, or t
  misc_feature (415)..(415): n is a, c, g, or t
  misc_feature (438)..(440): n is a, c, g, or t
  misc_feature (454)..(454): n is a, c, g, or t
  misc_feature (456)..(456): n is a, c, g, or t
  misc_feature (468)..(469): n is a, c, g, or t
  misc_feature (502)..(502): n is a, c, g, or t
  misc_feature (505)..(505): n is a, c, g, or t
  misc_feature (515)..(515): n is a, c, g, or t
  misc_feature (528)..(528): n is a, c, g, or t
  misc_feature (638)..(638): n is a, c, g, or t
  misc_feature (688)..(688): n is a, c, g, or t
  misc_feature (719)..(719): n is a, c, g, or t
  misc_feature (757)..(757): n is a, c, g, or t
  misc_feature (804)..(804): n is a, c, g, or t
naaatcaccttgattaaaaggatgggaaaatccaccctcagcagaaaatgatacagtttatagaaaacctccccnnnnnngggggncccaattaaaaantacaaaaaaatctcccctccttccctacgangtcatggtagtctgactcctccagtngcactgcagcnctggagtngccagctcaccacagccccctccacttcaccttggggagaggagggatgctggtggttaaggnggttaaaaccattagttccagtgatgccagtgcccaaacatgcacttccttcctttcccccaaggnctgggaccaaggagaaagggaccgaaatgagcncagccatgaggagcaactcgaggagagaaaatatagcccaaggaggttagaagagttccaatatacctcctccctccnaccacctcaaaaaagaaaaaaannnagtataaaaaaaananaaaaaaaaaaanngttccccctcaggcctgagataaagaccaagangtncagtcttganggagttctgaganactcagagctcatctatccttgagcctccattaatttcatctccagggcaatggctaaactaggtcccttttcttggcaacctgcactgtccagaactggagatggaganatacagggcgaggacatcaggagggcaccccaggcccaggggtccccctnggttccctcagtcctcgggtgggatgcgcanggcagaatacaccatcacccgactgttctcctgccgtnggcacaagaggctgcgctgaatacttcggagggaccctccagctgtnatgaaggccgagagcccc

SEQ ID NO: 704009 - DNA, 856 bp, Homo sapiens
gcatggacgtttgcccgtgacggatgtgccatccagatgtgaagcaacgactggtgagaacgctacgtggactaggattcactacacaggcaactcggtgcattatggacaagcacctgtgaagcatgcctgcgtcgcacgagtgtctacgcatagatggtcggcatcgcgcactgtactctgtttgcgcgaagttgacacagactgagtgtactcaagagcacaggtatgggtagtgacagccttttatgctcctatgtagagggtaccaagaggatacgtgaccatctggttgaaaactgtgaccaatgatagctgtacgagttgagcgctcttacctggcggagcgaatgatgtgcttgtcaactgatccaggaactgtggtcttggcaccgcgatgatcgacgtggccacgcagtcgggcgacgaactagcagaacatgacccccagcaatggcatcccagatgagagtcagtggctcagggtgggtcatcctgtacaagtacagggacacagtagggaccgtaatacgtgttgtatggacctgcgcagtggtgcctttggctgcatgtggaggagcagaagaagcatggactcgcaaatggtaaaagcttggagatgaccttaattttgcagttgggatgctgcatgttgagatgtccggaacccatgtggtgggagactccaaaatcactgtgatgaagggggtggaagaggaaaatgcgtgagtctccagggccagagtctttatgggggcgagtcggatcagagagaatcataccgatcaaggaaaacagagataatagaagatatcagttgctgtttttatcaactaataaaaacatagagcgaacg

SEQ ID NO: 704010 - DNA, 622 bp, Homo sapiens
ccggctgggcacggtggctcatgcctgtaatcccagctgcttgggaggtggaggttgcagtgagcagagatcatgccactggactccagcctgggtgacagagcaagactcagtctcaaaaaaaaaaaaaaaagtatttggccatttttatgagttgtaaacccaaggggcctgtcaaatttcatagggtgttaaaattttttcttttcttttttataaaggaccagggttatttactcttattcggcccaagccttgggtctactaacttccttgatgctttaaggccattcccaattcccaaaggtggctagggatttacagggcgtgaaccaccacggccttgggccttaaaaaattattttctgggcaacaccaggtctggggcttgggtgggcacaatggcctggtggcgttctaggctaccctggaagaaagacctaagcggcacacagaagatattgcgtttgagaggcctgggagagggtcaaggggccgagaactgtggactctgtggggattggcgcccattgggcactcttcaacctgggggcagacaagtatgtggaagacccctggttctccaaaacacatacatatctggtcatggtaaacgctggtc

SEQ ID NO: 704011 - DNA, 167 bp, Homo sapiens
aatccaggaggtcaggaggctgtgatcttaagctgtgatcctgcgactccagccgcaagctaccagtggcggactgactggtcagagcctccctatgactcacaggttgcagctgtccaaaaccaacaggaccctcgtttatactttggctgtcacaagagtatatt

SEQ ID NO: 704012 - DNA, 171 bp, Homo sapiens
aggagccaacgagcagacactggatagctgagaaataggctttgcggagcctgctgggagtcctcccagatctcgtagtcgaaattcttggggtgaacaaatgccggttgagctggggtctagtcctggagtcattacaacaacgcctctatgaacaggcattcgatagag

SEQ ID NO: 704013 - DNA, 979 bp, Homo sapiens
  misc_feature (29)..(29): n is a, c, g, or t
  misc_feature (119)..(119): n is a, c, g, or t
  misc_feature (132)..(132): n is a, c, g, or t
  misc_feature (150)..(150): n is a, c, g, or t
  misc_feature (225)..(226): n is a, c, g, or t
  misc_feature (228)..(230): n is a, c, g, or t
  misc_feature (232)..(232): n is a, c, g, or t
  misc_feature (264)..(264): n is a, c, g, or t
  misc_feature (268)..(268): n is a, c, g, or t
  misc_feature (275)..(275): n is a, c, g, or t
  misc_feature (293)..(293): n is a, c, g, or t
  misc_feature (304)..(304): n is a, c, g, or t
  misc_feature (306)..(306): n is a, c, g, or t
  misc_feature (315)..(315): n is a, c, g, or t
  misc_feature (323)..(323): n is a, c, g, or t
  misc_feature (326)..(326): n is a, c, g, or t
  misc_feature (331)..(331): n is a, c, g, or t
  misc_feature (376)..(376): n is a, c, g, or t
  misc_feature (381)..(381): n is a, c, g, or t
  misc_feature (388)..(388): n is a, c, g, or t
  misc_feature (391)..(391): n is a, c, g, or t
  misc_feature (396)..(397): n is a, c, g, or t
  misc_feature (419)..(419): n is a, c, g, or t
  misc_feature (427)..(427): n is a, c, g, or t
  misc_feature (431)..(431): n is a, c, g, or t
  misc_feature (454)..(454): n is a, c, g, or t
  misc_feature (461)..(461): n is a, c, g, or t
  misc_feature (500)..(500): n is a, c, g, or t
  misc_feature (506)..(506): n is a, c, g, or t
  misc_feature (521)..(521): n is a, c, g, or t
  misc_feature (534)..(534): n is a, c, g, or t
  misc_feature (536)..(536): n is a, c, g, or t
  misc_feature (539)..(539): n is a, c, g, or t
  misc_feature (542)..(542): n is a, c, g, or t
  misc_feature (544)..(544): n is a, c, g, or t
  misc_feature (559)..(559): n is a, c, g, or t
  misc_feature (890)..(890): n is a, c, g, or t
  misc_feature (955)..(955): n is a, c, g, or t
ttgaaatggggaaaaaaaagtagtaaatngaaaaaatggagtgagttagaaataagaaatattaatatagtgagaaatatggatgaatgttaaatgtattaatgataggaaaagaagtnggtatcaaaatgntaaataaaatataatttnatgtatataaaagtattaaaaagaagaaaatatatgggcggaaagggtggttgaggcatataatcagaggagttnngnnngngggggagaagaaagaaagtggggaaagggttntttnaatatgnagatggttgagggagaangaaactatttnantggtattcncccgtacnacnggaantggtgcttggaggggaagggaagtgagatcagtcgattagtcacnaacancatcatnagnattgnnagagaggtggagaggagagatnatggaatnaganaggttggtggggattttatctgnacgtttntggatcttcttcttatttttgaggggagatggcagagcntgggcntgttggagggggtgngtatgcatgatcntntgnagnantgaggggcggtgcantgagcagagatggaggatagtgttggtcttagggcggtggtccacattgcgtttagcccaccccatctgatgacggttcggattggtgcaatacccagtgagatctccaatcttatacacggtggttttattttcaatggcatctgctattttcgtcatcggagaatggagcaacttgatctccatttcaagtgggtccgtgtcacccaacagctcatcagattctccggtggccaagcattccatggtgtcttcattggcctgctcagtatcctcgatgtcaaagacctcggtcatttccttaacgatctcagcactgagatgggtgggnagagtgtgagtggctggtggtggtatatagaagctgatcttcccgctcacccagttagctagganagctttggcggctgttcctgacta

SEQ ID NO: 704014 - DNA, 248 bp, Homo sapiens
caagctttagcagcacggtatgtgaaatatttcatagccagtattcaatcatctaatatagatagataataagagaggatacagggtggcagtattagagtgctaagagcgattacattcaaaaagtgatcttgattttatattgtgaggtggagtctcgctctgtcgcccaggctggagtgcagtggcatgatctcagctcactgcaacctccactcctgggttcaagcaattctccctgcctcagc

SEQ ID NO: 704015 - DNA, 357 bp, Homo sapiens
attcgcggccgcgtcgacacggcgttgtcgggctttgtggctgtggccgcggtggcgttcttcgccatgtggtcggtgttgtcgaacctgctgtgcgccattctgatcttcaccgtcgggccgttccgcttgggcgacgtggtcgagttggtggacaccgtcgacaagcccggcgtcaaaggccgggtggtggcgatcaatctgctctacaccacgctgatcgaagtggaagaggccggtaccggcagtgtcatggtgcaagtgcccaacagcctgttcttccagcgctcggtgcgccgttggcgcggcagcgacatactgccttaacctttggcgagaggtcgacgcggccgcgaa

SEQ ID NO: 704016 - DNA, 1116 bp, Homo sapiens
  misc_feature (4)..(4): n is a, c, g, or t
ggangcatttccggttcccttcgtttaggtcggctggaaattatgtcctccgtcggttttccgcagtttttccaccaagcgagatattttgggagttattccctaaataactgcattatatgctcctttcatgacgaaattgctgccgtggagaagactggaggaaactcgaggaagagggagaagccgacaagtgctcgacgggctaggaactgtcctgcttgggtgttagcgtttcccgccgggccagtaaggctgagtgacccggcgtggctactaggagaaggacgtacggtcctgctagtagaggaatatgtcgagtttctctagggcgccccagcaatgggccacttttgctagaatatggtatctcttagatgggaaaatgcagccacctggcaaacttgctgctatggcatctataagacttcagggattacataaacctgtgtaccatgcactgagtgactgtggggatcatgttgttataatgaacacaagacacattgcattttctggaaacaaatgggaacaaaaagtatactcttcgcatactggctacccaggtggatttagacaagtaacagctgctcagcttcacctgagggatccagtggcaattgtaaaactagctatttatggcatgctgccaaaaaaccttcacagaagaacaatgatggaaaggttgcatctttttccagatgagtatattccagaagatattcttaagaatttagtagaggagcttcctcaaccacgaaaaatacctaaacgtctagatgagtacacacaagaagaaatagacgccttcccaagattgtggactccacctgaagattatcggctataagagaataagaattgcagaaaataacagtgaagtgattgaaactttcttctgatgagtttctctaacctacaggatggagtaaaacaactgctacagttcagcacctgttttatgtgccgaatcactgtggggaaaggtcaggaaggtgtagtccttcaataggaaattgtaattaaaatataattttatagaaccatttttatgtaatctgatttgaatgttatagttgataataataaaatcacttacttggttgactaaaaaaa

SEQ ID NO: 704017 - DNA, 150 bp, Homo sapiens
ctggactacagacggccaccatctctacatcctcactctcactgatgaacagtttctggtgcaggatcagttcccagtgatgcccgtgagcacgctgtgtgcagaggccaggaaacggcgcggcggctgctgacccactacgtgaaggtg

SEQ ID NO: 704018 - DNA, 1079 bp, Homo sapiens
  misc_feature (4)..(4): n is a, c, g, or t
ggangcatttccggttcccttcgtttaggtcggctggaaattatgtcctccgtcggttttccgcagtttttccaccaagcgagatattttgggagttattccctaaataactgcattatatgctcctttcatgacgaaattgctgccgtggagaagactggaggaaactcgaggaagagggagaagccgacaagtgctcgacgggctaggaactgtcctgcttgggtgttagcgtttcccgccgggccagtaaggctgagtgacccggcgtggctactaggagaaggacgtacggtcctgctagtagaggaatatgtcgagtttctctagggcgccccagatgggaaaatgcagccacctggcaaacttgctgctatggcatctataagacttcagggattacataaacctgtgtaccatgcactgagtgactgtggggatcatgttgttataatgaacacaagacacattgcattttctggaaacaaatgggaacaaaaagtatactcttcgcatactggctacccaggtggatttagacaagtaacagctgctcagcttcacctgagggatccagtggcaattgtaaaactagctatttatggcatgctgccaaaaaaccttcacagaagaacaatgatggaaaggttgcatctttttccagatgagtatattccagaagatattcttaagaatttagtagaggagcttcctcaaccacgaaaaatacctaaacgtctagatgagtacacacaagaagaaatagacgccttcccaagattgtggactccacctgaagattatcggctataagagaataagaattgcagaaaataacagtgaagtgattgaaactttcttctgatgagtttctctaacctacaggatggagtaaaacaactgctacagttcagcacctgttttatgtgccgaatcactgtggggaaaggtcaggaaggtgtagtccttcaataggaaattgtaattaaaatataattttatagaaccatttttatgtaatctgatttgaatgttatagttgataataataaaatcacttacttggttgactaaaaaaa

SEQ ID NO: 704019 - DNA, 470 bp, Homo sapiens
gattgtaaccatgattcgatgcggtaaccctacagactctggtctcatggagcgctgatcggcggatctcgatggccgcgcggaaacctctaaagtcgagtcgaaggtattgatcacctggtattggccgctgcaacaagagttcgcgactgctcctctccggtagtccggcccctgacccctttccccagtacccacttcctgcctctctcattaacccttccgtagctgctcaccatgaccccatcagaatccagttaaaagactcttccaaatttctcagcgttcctcaataccccatctctctaacccaccaaaagggcctacagcccatcgtaaacaagctctgctcatgcagtcttcttagaccaacacactctccatataacacccctatcctccctgttaaaaagtctgatggctcataccgactcgttcacaacctccaagccatcagtcaagctgtcctc

SEQ ID NO: 704020 - DNA, 1275 bp, Homo sapiens
  misc_feature (4)..(4): n is a, c, g, or t
ggangcatttccggttcccttcgtttaggtcggctggaaattatgtcctccgtcggttttccgcagtttttccaccaagcgagatattttgggagttattccctaaataactgcattatatgctcctttcatgacgaaattgctgccgtggagaagactggaggaaactcgaggaagagggagaagccgacaagtgctcgacgggctaggaactgtcctgcttgggtgttagcgtttcccgccgggccagtaaggctgagtgacccggcgtggctactaggagaaggacgtacggtcctgctagtagaggaatatgtcgagtttctctagggcgccccagcaatgggccacttttgctagaatatggtatctcttagatgggaaaatgcagccacctggcaaacttgctgctatggcatctataagacttcagggattacataaacctgtgtaccatgcactgagtgactgtggggatcatgttgttataatgaacacaagacacattgcattttctggaaacaaatgggaacaaaaagtatactcttcgcatactggctacccaggtggatttagacaagtaacagctgctcagcttcacctgagggatccagtggcaattgtaaaactagctatttatggcatgctgccaaaaaaccttcacagaagaacaatgatggaaaggttgcatctttttccagatgagtatattccagaagatattcttaagaatttagtagaggagcttcctcaaccacgaaaaatacctaaacgtctagatgagtacacacaagaagaaatagacgccttcccaagattgtggactccacctgaagattatcggctataagagaataagaattgcagaaaataacagtgaagtgattgaaactttcttctgatgagtttctctaacctacaggatggagtaaaacaactgctacagttcagcacctgttttatgtgccgaatcactgtggggaaaggtcaggaaggtgtagtccttcaataggaaattgtaattaaaatataattttatagaaccatttttatgtaatctgatttgaatgttatagttgataataataaaatcacttacttggttgactaaaaaaagaacttgactctcattctgttgaatcagaaaataaaaattggagatagttttctttttatttgttgctacaaatatattcctgtttcgttctactccaagaattttctttttgtgcgaacacccttgcgttcaaaatgtgctatcggcttaaatacctg

SEQ ID NO: 704021 - DNA, 150 bp, Homo sapiens
acacagttaaaggcaagagcagaggcagcgggtgccaggccgcactgggtgcaagagaggtagcaagcctcacttgcccaaccttctccagcctccctctccagccgcagtacatacaaggctgatgtaggcagcgccagcttctcctcg

SEQ ID NO: 704022 - DNA, 725 bp, Homo sapiens
ctcaccctttcactctatatacctttaccttgctttaaaaaaaatagtgttcatgtatcacctgaaatgttatgtgactgtggggatcatgttgttataatgaacacaagacacattgcattttctggaaacaaatgggaacaaaaagtatactcttcgcatactggctacccaggtggatttagacaagtaacagctgctcagcttcacctgagggatccagtggcaattgtaaaactagctatttatggcatgctgccaaaaaaccttcacagaagaacaatgatggaaaggttgcatctttttccagatgagtatattccagaagatattcttaagaatttagtagaggagcttcctcaaccacgaaaaatacctaaacgtctagatgagtacacacaagaagaaatagacgccttcccaagattgtggactccacctgaagattatcggctataagagaataagaattgcagaaaataacagtgaagtgattgaaactttcttctgatgagtttctctaacctacaggatggagtaaaacaactgctacagttcagcacctgttttatgtgccgaatcactgtggggaaaggtcaggaaggtgtagtccttcaataggaaattgtaattaaaatataattttatagaaccatttttatgtaatctgatttgaatgttatagttgataataataaaatcacttacttggttgactaaaaaaa

SEQ ID NO: 704023 - DNA, 155 bp, Homo sapiens
aagtctctcttcaccctgccgtcatgtctaagtcagagtctcctaaagagcccgaacagctgagggaggcttttcattggagggttgagctttgaaacaacctaatgagagcctcaggagccatttttgagcaaatggggacggctcacgggcct

SEQ ID NO: 704024 - DNA, 993 bp, Homo sapiens
  misc_feature (4)..(4): n is a, c, g, or t
ggangcatttccggttcccttcgtttaggtcggctggaaattatgtcctccgtcggttttccgcagtttttccaccaagcgagatattttgggagttattccctaaataactgcattatatgctcctttcatgacgaaattgctgccgtggagaagactggaggaaactcgaggaagagggagaagccgacaagtgctcgacgggctaggaactgtcctgcttgggtgttagcgtttcccgccgggccagtaaggctgagtgacccggcgtggctactaggagaaggacgtacggtcctgctagtagaggaatatgtcgagtttctctagggcgccccagcaatgggccacttttgctagaatatggtatctcttagatgggaaaatgcagccacctggcaaacttgctgctatggcatctataagacttcagggattacataaacctgtgtaccatgcactgagtgactgtggggatcatgttgttataatgaacacaagacacattgcattttctggaaacaaatgggaacaaaaagtatactcttcgcatactggctacccaggtggatttagacaagtaacagctgctcagcttcacctgagggatccagtggcaattgtaaaactagctatttatggcatgctgccaaaaaaccttcacagaagaacaatgatggaaaggttgcatctttttccagatgagtatattccagaagatattcttaagaatttagtagaggagcttcctcaaccacgaaaaatacctaaacgtctagatgagtacacacaagaagaaatagacgccttcccaagattgtggactccacctgaagattatcggctataagagaataagaattgcagaaaataacagtgaagtgattgggagtaaacaaccggtacagttcaggacgtggttgatggaccgaaacacatgtggggaaagggcacgaaagggataggcctttcactagcacatatgaatagaat

SEQ ID NO: 704025 - DNA, 489 bp, Homo sapiens
aacacttatgaagtattagtaatttattgctaagaaagatattttaagaaaattaagtctaaatttttttttaatgtagtatattccagaagatattcttaagaatttagtagaggagcttcctcaaccacgaaaaatacctaaacgtctagatgagtacacacaagaagaaatagacgccttcccaagattgtggactccacctgaagattatcggctataagagaataagaattgcagaaaataacagtgaagtgattgaaactttcttctgatgagtttctctaacctacaggatggagtaaaacaactgctacagttcagcacctgttttatgtgccgaatcactgtggggaaaggtcaggaaggtgtagtccttcaataggaaattgtaattaaaatataattttatagaaccatttttatgtaatctgatttgaatgttatagttgataataataaaatcacttacttggttgactaaaaaaa

SEQ ID NO: 704026 - DNA, 410 bp, Homo sapiens
agtgtttgtagctatttcttggtgaacagttatttttattttaaattggaaaaataatcctcatcagtcaggagaaaacaaaataatgattcatgaagaaatatgttgattttttctttcagacctgaagattatcggctataagagaataagaattgcagaaaataacagtgaagtgattgaaactttcttctgatgagtttctctaacctacaggatggagtaaaacaactgctacagttcagcacctgttttatgtgccgaatcactgtggggaaaggtcaggaaggtgtagtccttcaataggaaattgtaattaaaatataattttatagaaccatttttatgtaatctgatttgaatgttatagttgataataataaaatcacttacttggttgactaaaaaaa

SEQ ID NO: 704027 - DNA, 338 bp, Homo sapiens
gtctttccttctttattgagcaagtttcatctcctctagggaactgccacccatgctttgcttgtgttactgtacttcacaactggactgttgtgattatttgtctcttagtagtacactgctatttctgtttcttaatttcctgaatttgtgtctccctcttcggcagggattcttctcaatatcttatgttgtttatatggattaagttttttcaacatgtttgagtattcttaatcagtatagttaagattatttgagtcatcttattttaatctcatatggtgtgtatatttattattaccctgcactaactcagtctgagttaaatgttcgca

SEQ ID NO: 704028 - DNA, 340 bp, Homo sapiens
ttcactcgcactgagtaccgagttgtttaatgagggaggagaggcaccctagacctgaagattatcggctataagagaataagaattgcagaaaataacagtgaagtgattgaaactttcttctgatgagtttctctaacctacaggatggagtaaaacaactgctacagttcagcacctgttttatgtgccgaatcactgtggggaaaggtcaggaaggtgtagtccttcaataggaaattgtaattaaaatataattttatagaaccatttttatgtaatctgatttgaatgttatagttgataataataaaatcacttacttggttgactaaaaaaa

SEQ ID NO: 704029 - DNA, 682 bp, Homo sapiens
  misc_feature (21)..(21): n is a, c, g, or t
  misc_feature (23)..(25): n is a, c, g, or t
  misc_feature (27)..(27): n is a, c, g, or t
  misc_feature (29)..(30): n is a, c, g, or t
  misc_feature (32)..(32): n is a, c, g, or t
  misc_feature (36)..(36): n is a, c, g, or t
  misc_feature (39)..(39): n is a, c, g, or t
  misc_feature (654)..(654): n is a, c, g, or t
  misc_feature (656)..(656): n is a, c, g, or t
  misc_feature (658)..(658): n is a, c, g, or t
  misc_feature (660)..(660): n is a, c, g, or t
  misc_feature (664)..(664): n is a, c, g, or t
ggatcccccggactgcaggantnnngnannangtcnagnttctctagggcgccccagcaatgggccacttttgctagaatatggtatctcttagatgggaaaatgcagccacctggcaaacttgctgctatggcatctataagacttcagggattacataaacctgtgtaccatgcactgagtgactgtggggatcatgttgttataatgaacacaagacacattgcattttctggaaacaaatgggaacaaaaagtatactcttcgcatactggctacccaggtggatttagacaagtaacagctgctcagcttcacctgagggatccagtggcaattgtaaaactagctatttatggcatgctgccaaaaaaccttcacagaagaacaatgatggaaaggttgcatctttttccagatgagtatattccagaagatattcttaagaatttagtagaggagcttcctcaaccacgaaaaatacctaaacgtctagatgagtacacacaagaagaaatagacgccttcccaagattgtggactccacctgaagattatcggctataagagaataagaattgcagaaaataacagtgaagtgattgaaactttcttctgatgagtttctctaacctacaggatggagtaggtcangnangngtantcccttcataggaaattc

SEQ ID NO: 704030 - DNA, 322 bp, Homo sapiens
cgtccccatggtaactaacaggagacctccaggtagactaaccaggatataggcttactaaagtgtgataacgtaggcttggattacggcgacagcgatttctagtgatagtcagtagaattataattgtgaagatgatgagtgtggagggaagggtaatggtggatattgctagggtggcgcttccatatgaggtgcgtgagtaggtggcctgcagtgctgtttagcggtgtagcgcgtgcgggcaggactatgggttgagtgagtaggctgacgggttcgatcctcactagtatggtctacctgggttaagtctacctgg

SEQ ID NO: 704031 - DNA, 104 bp, Homo sapiens
tcgaatcgagctccgtccgttacggagcatcagtaacggagtcagtaagtgagcggtcacgcctgctgggggtatgttgtgttgggtttgaatctaatcttgct

SEQ ID NO: 704032 - DNA, 982 bp, Homo sapiens
  misc_feature (4)..(4): n is a, c, g, or t
ggangcatttccggttcccttcgtttaggtcggctggaaattatgtcctccgtcggttttccgcagtttttccaccaagcgagatattttgggagttattccctaaataactgcattatatgctcctttcatgacgaaattgctgccgtggagaagactggaggaaactcgaggaagagggagaagccgacaagtgctcgacgggctaggaactgtcctgcttgggtgttagcgtttcccgccgggccagtaaggctgagtgacccggcgtggctactaggagaaggacgtacggtcctgctagtagaggaatatgtcgagtttctctagggcgccccagcaatgggccacttttgctagaatatggtatctcttagatgggaaaatgcagccacctggcaaacttgctgctatggcatctataagacttcagggattacataaacctgtgtaccatgcactgagtgactgtggggatcatgttgttataatgaacacaagacacattgcattttctggaaacaaatgggaacaaaaagtatactcttcgcatactggctacccaggtggatttagacaagtaacagctgctcagcttcacctgagggatccagtggcaattgtaaaactagctatttatggcatgctgccaaagtatattccagaagatattcttaagaatttagtagaggagcttcctcaaccacgaaaaatacctaaacgtctagatgagtacacacaagaagaaatagacgccttcccaagattgtggactccacctgaagattatcggctataagagaataagaattgcagaaaataacagtgaagtgattgaaactttcttctgatgagtttctctaacctacaggatggagtactaaacaactgttacagtgcagaaccgtgtttatgagactgatcactgggcggaaggtcatgtagggatagtccttcaataggaattggacataaagatact

SEQ ID NO: 704033 - DNA, 238 bp, Homo sapiens
gatctagaggatccctacggcaggtgtactaaacattcagagaacagatacaacacaaattctttcagtaaattaaaaaagggactcatcttcagttccttttttttttttgtaggacggtctcgctctgtcgcccaggcggcagtgcaggggcgcgacctcgactcactacaacctcggcctcccaggttcaagcaattctggtgcctcagcctcccaagtagcggggataaccaga

SEQ ID NO: 704034 - DNA, 603 bp, Homo sapiens
agcgggcgggtcccgcggcggcgcccgcggtggcagccgtgaatgacgacgaagttatgaggaatcgtctcatcgttgaagaagatggtgcagaagatgatcggataattatgtctgactaatgcaagtagctttcataagagtggctgacatactgtctgggtacccagagaagaaggaatatataggccagtagccgagaagtgtatggatgaggcagcgctggactctcgatgtgctgtaattatgtcaaagtgggcaaaaacatttactagtatagtactgatgtatgaattcgtcagaagatgcatctggaaataattactgaagaataaatattatagggaaggaaacaaatacgtaagtgtagtacgaatagacaaggagacatgatgcacagaatagattgtgagtgtaggtggcaagtaagaatgaattttctgtgcaaggcatagaacgtaagtacgaaacaaccagatcgaaccaaagtaaagtaatggatgacgtgtgggaggagatgatgactgtcaagctagacaatcgcaggacaggggcagttaaggactatttgagagagagcatagaaggttgtcggaggaagaa

SEQ ID NO: 704035 - DNA, 386 bp, Homo sapiens
  misc_feature (6)..(6): n is a, c, g, or t
  misc_feature (22)..(22): n is a, c, g, or t
aaaagntaaaaataagcaatcncaacaaatggcctattacaaagaaaaaaaatgagacttccggaagataactctatccaactataccttatgaaattataagtcacaggccgggcacggtggctcatgtctgtaatcccagcactttgggaggctgaggtgggcggaatcacgtcaggattttgagaccagcctggccaacatggcaaaaccccatctctactaaaaatataaaaattagccatgtgtggtggcgggcacttgtaatctcagctacttgggaggctgacacaggagaattgcttgaacctgggaggtggaggttgcagtgagctgagatcgcaccactgcactctagcctgggcaacagagcaagactcggtccc

SEQ ID NO: 704036 - DNA, 320 bp, Homo sapiens
tggctaaactgtattatgatatagccttttaaatactacactgaagacagccctgggcttgactctttggagctacactagattaataagaaaggatagaattgtaaaataaaaatactacgtgatgagtaatgtcgtagtatattttagggatccaggcagaagggaagaagggtgcgatttgaccttgagtttaagtctgggagaatggagtcttaaaatattttacagaggaggtgatttttaaattgagtccagtaagattagtaagtgggagtggaaactataaggaaatagtgaaaagagttattccaggcaaa

SEQ ID NO: 704037 - DNA, 555 bp, Homo sapiens
  misc_feature (30)..(30): n is a, c, g, or t
  misc_feature (35)..(36): n is a, c, g, or t
  misc_feature (150)..(150): n is a, c, g, or t
cacaaaaaaaagggggggtttttcgcgcgngggannaaaaaaaagggggggggcaaaattttttttttctggggggttttttttaaataagaggggggggtattttttttttttttggaagaaaaaaaaaaaaagggcccccccccccantttttttttttttttcccacacacccttttttgtggggggggggggggggggcccacccttttttttcgccccccccccccttttttttccgggggaggggggggctaccaaaaaaaaaaaacgccgggggggggaaattttttttttctgaaaagggggtttaaaaaaaatttttttgcccccccccctccccccaaaaagttttttcccaaaaaaaaggggggtttaaaaaaaccggtttttatttttctccccccccccgaggggtttttttttacccgggtaaaaaacccccccccccccccccgaaaatgggccccaaaacctcctttgagaggagtctccctggggggggaattccaaaaaaaaaatttctcattcccccctttaaaaaccttaaaggg

SEQ ID NO: 704038 - DNA, 700 bp, Homo sapiens
ggctgcaggttcaaatgtagaccacatttagatgtcatcttaccctagtcaaaataactattatttatttatttatttatttatcattttatttcaatagcttctggagtacaagtggcttttgttacatggatgaattatatcttggtgaatttggagattttagtccacctgtcacccaagtggtatatgtcatacctaatgtgtagtttttttgtccctcagctcctcacactctccctgtttcttagtctccagtgtctattttgccactctgtatgctttcgcatactcatagcttagctcccacttataagtgagaacatacagtttttggttttccactcctgtgttactacttcacttagaataatggactccagctccatccaaattgctgcaaaaaagacattatgtcattccttttcatggctgagtggtattccatggtgtagatataccacattgtctttatctactcattagttgcttggcgtttacgttgcacgtgtgaattgttgctgtataaacatgtgtgcaggtgtcattttcatataatgacttattttcccttcggtaagacccccatagtgggattgctggatcaaatggaagatctacttttaactctttgaatctgggaatctccatactgtttccattcagggttagtccaattttccttttcaacagcagggtg

SEQ ID NO: 704039 - DNA, 1426 bp, Homo sapiens
  misc_feature (588)..(588): n is a, c, g, or t
  misc_feature (1426)..(1426): n is a, c, g, or t
tcaggggaaaataatttttattgaaaccccaccaactggcaaaattcgtgttccgtggcatttaagcctccttctttccttttgcaattcggctcttctcttcaggtggctcccattgaattgcttttcttctccctccagtggctcgtggaagcggccatgtggccaaactgtgggagggtgggtgctaaagtgaaactttagaggctcaactctttctctccagaacgccccggccgcttctggctcttgccaccaagcagaggcactttgcggggagggggtggagccacccgcttctcttgtggtcccccaccaacacacaggcctttctcagcatgtgaccaaaggtctcatgtgtgggctcaccttctcacccatatatgtgtggaacaacaggcacacccacaagaggggtgtgatgatgtgctctcttgtgtgtccaagatataggggctcatataggtctcaggtgtgagaagggacatttggctctctgtgtagatctcacgctgtgtggcccggctcctctgtgtatctacacggggataacgcccctgtggtgccacaatctctttatatattaanatctctctctctgtgggagtaggaactccctccagggtgccggggtgcatttgtggataccgccttttttctgtcgcgcccagggtcgggcatgttcgccacaacaagaaggaaggggctataaccaacgaagaacgccaaggagtattgtgccattgttgccccccaaaatataacaagggggcccaactcttttttgtgcgccaaggggcccctcatacgggtggggctcacttgtgcggggggcgacacgcctctcttgtggggtgttcgcccaaaacagaatttgtggggtttgtcaccccccttttgtggactaaagtattcgtctgaggaattacgacgagagatcgagacccgccctcctaagagaagattatcccccttcgagagggggggcccccaaaggctatttaacggctgttacccccaaggtctttttcttgtgtaccacacggggtgggtccccctaaataaggaggagagtccggatattattaaaggcttaagggccacgtggtgcccgccgttttaaacaccgcttccttgaccgcgcgggaaacaactgttgctaagtctggggggaaaccctttgggggacgagaaacccttactttcggtggcggtgtgaccattatgttgtggccaccaaccttccttaaagagagaaatttaaaagggccctacggcgacaaactatttacactttctacgggtctctcatcggcgttctaaccccgcgctggcaattactttgccctggctgaggacgaacttgcgctccacgggtatataattttgaaacattcgccccccagtatatattgtagatatcacn

SEQ ID NO: 704040 - DNA, 127 bp, Homo sapiens
ctactgtgctcagaacggcttctactgcctggtgtacggcttcctgcccaacggctccctggaggaccgtctccactgcgagacccaggcctgcccacctctctcctggcctcagcaggtagccaca

SEQ ID NO: 704041 - DNA, 246 bp, Homo sapiens
  misc_feature (35)..(35): n is a, c, g, or t
gtttcattttctacacaataccccagaatcccaangaatattcttcatcttcctctcgttggattctgatgggaacatctgatctaaaaatgttaatcacagatacattcatgagagcattccttattataaattttaaaaacatatacaaatctattttcattcatgaatctgtggactttcttctggagcctgtatattctattgaataacaaccaccacttctatagtcgtgtagaaattgaa

SEQ ID NO: 704042 - DNA, 296 bp, Homo sapiens
gtggagctgaagaagaacgagtccagggaagagctggagaagcagcgggagccagttgacaaatccccgtcccagccacaacttccagctggaagagcgtcaacaagcttgtaccaagacgaaaaggcgggtttgggtgaataaccatccaccacaggtaagaggctcatccgagtgcttgcaagaccagttaaagaccctgcagaggaattacggcaggctgcagcaggatgtcctccagtttcagaagaaccagaccaacctggagaggaagttctcctacgacctgagccagt

SEQ ID NO: 704043 - DNA, 114 bp, Homo sapiens
attagtgatttttggattctgtaaacaaattactgtatcatgaccaatacttgctcaagatcaacatcgatcatggattgtgtcactgaggcatgtcatgagtacagctgtaag

SEQ ID NO: 704044 - DNA, 90 bp, Homo sapiens
gtggacacagccacatattactgtgcacacagaaccgtttcctacggtccctataaagcagactggtacttcgatatctggggccgtggc

SEQ ID NO: 704045 - DNA, 636 bp, Homo sapiens
  misc_feature (441)..(441): n is a, c, g, or t
  misc_feature (536)..(536): n is a, c, g, or t
gccagtaggagagagagcagataaagcacgcagagctccagctacgtactgcctgaagatgggcgacctgattaggacagctctgcactgcttcaatgggatcatccttaactgcatttaccaacggcctctgcacagacgactgacaactatgtgcacggatggaaacgaggtccaagaggtccgctagggccagaggtacttgataagatgatcagctacaggatgatggatatgacccgatgcagactccaccttggtgctagcatacatatgaaatgaggactctgggtgcacgggacatgcgactactcctctgcatgaaggcgcacacatctgagaactgaaggccgccctgacatgaccactgatctctaatggcgctaatgcccacttggtatcatgcgtgatgagacatgccagggttaccaggactctctnctgtacaatggttcatcacatgctccgggatagagtgtggcgtgaatcaagcccattgcttcctgtctgtagctgggcttggtattgactcctangaatcaagagagcatgtgagatgttcgatgacttgagctgggacttacatcttagcacctcataagggagccattcgcagctggaatgtacgcatgtggc

SEQ ID NO: 704046 - DNA, 494 bp, Homo sapiens
cgacgagtcctttaaaattaacgcgtttttcccactgggctagtgagccttatctctccacttcccaggcatgtgaagaccctgtttctctagctgtgcagctgcaaggtcactagacagataatctcaagtcgtaaagcatgttgttccttaaaaagtaagaaatgatgtaatgcatgtcttaactgaataactgtctttgtttcttgcttctgtaatacgcttccccctgcacagatctacccccaccccacgaaatgcttaaaaggtagcttgactttttgttcaaggctcagtcctttggatgttaatctgactgggttgatgcacctaaacaattaaataattccacctcaacccctccggtctctctgattccttaattatcccgctgcagtgtctctactaaaaatgcaaaaaattagccaggcatggtggcacgtgctgtagtcccagccacttgggaggctgaggcaggggaatagtttgaaccc

SEQ ID NO: 704047 - DNA, 629 bp, Homo sapiens
atcaccattaagtgaacagcgcaaatgactttccccggacacacgtcctttatatagcagccaggtgcaactggtggggatttcgcaaggctagccgagccgtgaacgtcgtactgctatcgacagatccaaaaggcgttcaaagaggtgagcccagtcttggtaataacgatggaattccatctacagagccgcggcttctgtgattaccgaggctgggctctttagtttttcaaaagacccagctttttttgcttttttccacccctcccctttttgtatttgcgcgagatcatcccctccccccttgaagtcagcacagacagatggttgcaaaaattaaaacctcaggcatgatcgcaatgagcgtttgccaacgcttgcacgcccaccagggcgaaggctggatcaggccatggctgaaaatcctctttttgaagcattgtcttacggtgatgcgccttgagggcgtggtgctaaatccgtgtaggagatgctttgtctaacgtaaatcgcttcccatccggcgcaactcttgaccaggtcaagaaagacgccaagaagctcgccaggactcagaatattccgctcaaccaagcacaggatgcagctgcgctgaagcatggtct

SEQ ID NO: 704048 - DNA, 920 bp, Homo sapiens
gaccttagccttgtgattgcacgttccagctccgataacgctcctcaatactaggcctactaaccaacataactgaaccatatatcgcaatgatggcgcagatgtagacacgagaaagcatcgtaccaaggccaccacacaccatctgtcgcaagaaagagccgttcgatacgggataatcctattctatgacctcgagaagtcttgatgtgcttcgcacggatttgttctggagccgttccaaacgcacgtcccagcctacgaacgccgtaacccccgaattacggagtggcgactgggccgcagcccttcaacgtgccttcaccccgcatatatccccactagtaagtaccttttcctgtcacaaccctccgtattacgtcatcatcaggcttatcaatcagtctggacgctgcgaccccttagttcgtcatattcgataagagcaatgcgaagactccatatgacattctggcagtggtggactaacaatttaacgtggggtcgctttgtttttgcctgtcctactagctcgcagcagtatggactgagggcatccccttcgtcctagtctcccgagcgggcatctagcggattcactcatttttgggtgtgccttcgtgtgggcctcggcctggtcactgtggttcatcgtgctctccttgcctcactattgtgctaccttcctggcacactgatatgtcagcttcaactgtcgcatatggtcattttggccctcgacaccggacgcctggatactggctattggagagtgtggtcggctgcattcgggggtctcgcccgaagggcggggcccccttataaaggccgtcgagaacagccgttggttgccgcgccccaatttttgggcccctgggccccgcggcccctgtggagtgggcccggggcctggacctcgc

SEQ ID NO: 704049 - DNA, 163 bp, Homo sapiens
aggaaaaaggggaaatgagaagctgctggggcagctgtcgaaggacatcccagggcccaaaaatgcaatccccttgagagaaaggaaacaggattgtaaagggattatcttttcacttaataggagtcaggactgtctgtcttaattctgtgtccaggtatca

SEQ ID NO: 704050 - DNA, 235 bp, Homo sapiens
ccagggaaccccagactcccgcaaaagatgggatgctgcggtcagcaggatggcaccataccatcgagcaggtctacaacagaagagtaaacatacttaaaaatcaaacaaacaacacgcgcatacactacctttaatccaaagtcacagaagaatttcactacacatggttcacagataacacattctgacaaaagtaatgctcagccaaatgagatacaattctgataaacac

SEQ ID NO: 704051 - DNA, 805 bp, Homo sapiens
agcgggagggctgggactcatccctagccctggcaacctccatgggaatgctgtggccacacctggggcgttggctacagacattcctagggagctactcttctgggtagcaaggcagggctaggttccctggagtctctgctgcaacagtgcagctctctgaggcactcctctgtccagctctgctgccctgagtcttctaggccctggggcactgcctgcgctgccacaggccacagtcctgatgaaaactactgttcagcttgggcttgtagccctctccaagggactcagatgaattccaaggacctgctgtgagggctcacagttgaagcatacgacatggtattttcctgttgccccctgtctgcatgtcttcctgggtgcacaacttcctcttggagcaaggctcacttcctcatgtaaattacctcctgcagagagacacaggccagacattgccaccactaactcatcagacacaccctgaatcgtcagaatcctatccacaggcccagcccgggacttccagttctcagttaacaaccatcaacgttaactgaggggagagtgtttcagagacccctctctgaaatgcagcgtgaagttgaactctggactgtttctaagagctgtttactttccatatcccaaagctagaggggctagggaccagagagttcttagtccatctggggctgctatatccaattgtccatagactggttgacttataaacaacagaaaatttatttctccacaggtctagacactgggaagtccagatcaggaacaccctgtacca

SEQ ID NO: 704052 - DNA, 204 bp, Homo sapiens
gagctcggcccggctgacgtctgaatccctttcttccggcaatcttttcgtcacctcgcatctcctcccccgtctgttaaccgtatcaccaccaccggtgtgctctgtccggtcaacgggatcgccgtatgcgcatccaatacaacccggtatccccttacctgtgtttcatcaaacaataatgtaaagggtttcatttccagc

SEQ ID NO: 704053 - DNA, 411 bp, Homo sapiens
ggcaaacacgttttaccagttgaatccgtgtctacagcgccacctatacagtgagaatatgcggtgtacggttttttgttctcgcgatagtttactgagaatgatgatttccaatttcttccatgtccctacaaaggacatgaactcatcattttttatggctgcatagtattccatggtgtatatgtgccacattttcttaacccagtctatcattgttggactcgatccacttattacctacatatggcttgctagcagtgctagtatattttgcacagcagtaatcaatgaaatgagcaggtgaggctggacctggggcaacaaagcgtttttaaaagtttttgttttgttttgtttgagacggagtcttgctctctggcccaggctggagtgcagtggtgcgacctc

SEQ ID NO: 704054 - DNA, 454 bp, Homo sapiens
  misc_feature (204)..(204): n is a, c, g, or t
  misc_feature (445)..(445): n is a, c, g, or t
  misc_feature (447)..(447): n is a, c, g, or t
cacatttgcttctgttactagtcatgatagctgaatggtgtgcttcattcagatactgtgtagtgatcacttactttgaattgcatattaagacatgtgaccatataaccttttatttgaaccaagcaatttacatggtggagctgaagattggttgttactggttcatttttagtgagcactgactgtttctaagactctatnttggtcagactctctcttgaggtctcccagggtaagtcagccagactgagagtgacccaagaagatggggcaacattctgaagaaaatagaaaatagtgctgtcatgtggtgaagaggccagggagcatttgtttccccatgcccctacccaccccgttatttattgattctgctcataacgtaacagtatatgtatttttgttgttgttgttgttgtgggtgacagagtgagaccctatntnagaagag

SEQ ID NO: 704055 - DNA, 346 bp, Homo sapiens
  misc_feature (204)..(204): n is a, c, g, or t
  misc_feature (236)..(236): n is a, c, g, or t
  misc_feature (284)..(284): n is a, c, g, or t
  misc_feature (295)..(295): n is a, c, g, or t
  misc_feature (324)..(324): n is a, c, g, or t
aactggctggagtagaactcactgaaagtggtaaggtgtggctacaggcagagctgaagccttcccagctgctctggttccagctcctcggaaaggaggactcagcactcttttgctacctacctagtgaacaagggcggatattttaacgtgaatcctgaaatgaaggaagatttttgaagaaagaaggcctttggggcaaanacccgtccctttggttaaaaaggggctaaaanttaatggacctccaaaaaacccccacctgggaaaaaatttcaccaggnaaactttaacntttaaaaaaggcttggaaattttggaacnggggcccttttaaaaagggaaa

SEQ ID NO: 704056 - DNA, 108 bp, Homo sapiens
cccgcaaatttccttccactcgttcccatcttgcaaggagccggaggcatgtggccgtggtctccgtcctgtctgaagcacctgcgccgtcgtgctttgaacttgacc

SEQ ID NO: 704057 - DNA, 912 bp, Homo sapiens
  misc_feature (395)..(395): n is a, c, g, or t
ctcgcaaatacggtctgatgaaggtcgtttaaagggttggtacaaggtcccgggggatataatacctgtcgagccccttttttagtggggggacctccgcccccgtttgggaaatagggcccaagccgtgtcgttgtgaaaccttagacgtttatatgcgatgtcacccatgccccgaatgttccggtccacaaaagggccggccccctccctttttgcgtttgcgcccccttccccccactattaccacggcgggtacccaacacccggtggcccccaccgagaaagagtcagacaatctggtgccactcatcacccgcactgctgcaacgccgctggttcgcccccccaaaccaaaagacggtgcggttgcacccccccatagccaggggccnctcatctctaaacgcgacgggcctctatatcccctcctggcgcaccccttcttggccgcgcatatctgcccaacggcaacactatgtttgggagccccctgtaacaccaccagcattgaggaaagactagcgcccacaaatcggttgggagtagtcaacagcccactcccccactagggggccgacggggctatgtataacacaccaagatttctgttcacaaaacaattcattccttattcaaattcgaacgaaccaccctcatgtctcattcttccggaatcacaccatgtgtcgcgttcctcaaattcgttcaaacttcagtgagcacccaatctccaagtcggctacaccatttcttctatccaagcctccacgcacccacctgtttttccaccgtagtgacttgttcctgcttataactcgatgacagactgacccaacacaggagtctcaaccaccccattcaatcttcctctcctcacaaaagggccaaccccacccagcccacatgtca

SEQ ID NO: 704058 - DNA, 586 bp, Homo sapiens
ccctgaacaaataataaataaaaaaataaaaaaataatagaacaatgcagcactcaccagctagatcgacacagtacagcacgaaaatgcaaaaagcaataacatgaagagaagagaaaagtaaaaagtacatagcatgagagtaaggaaccactagtattatgagccaacggtagagactagatttataaaccgagcagtaggacgaatagcagctaggagagggaacaagacacagcacgaggagaacaagataacatacaatgcaggaatagtacagcaagaagagcacagaaagagaaaaagaagtgcagcgaaaaaaccagagagagtacgacaaaaacacaagaaaacagataagaaaagagaatccaagatgtgtcattataaatattgtttgtatgtgatttagtgtattcatacatgattcgatatatgttgtgacgttctttttgagtctgattgtctgaatcgtgtttgtatgtgatgatgctgatttacatacacctctaatgttcttatgatgattagagatctatgaagaagtaatgtgatgtttttgtgtactttcgatcaatgatagtga

SEQ ID NO: 704059 - DNA, 162 bp, Homo sapiens
aggttgtacctgagctgcatatggtggtgggtggtataatccagctgttgggaagctgaaggcaggagaattgttgaaccgggtggggcggaggttgcaggttacagtgagccgagattgcacacttcactccagcctgagtgaaagagtgaaactctgtat

SEQ ID NO: 704060 - DNA, 1155 bp, Homo sapiens
  misc_feature (576)..(576): n is a, c, g, or t
  misc_feature (620)..(620): n is a, c, g, or t
gctcctggggtttcctcctcctgcggtgggctatacccgtttggggttctcacccgtggttctcttttcatccgaggacactctttcgccgcattcacgggcgcggtctctcaacactgtgttttcccgccacggaggtgatttaaacgtttgtttcgctggggcgccccccgccctgctgggggccccccaatagggaggagatttttcccacctctttctggggaaccacgggaaatttcttactgtgcgaacaacctcaaggcccttaaggtgggcttttactgggaaagaacccactgggggttttggctgaaatgccacccacacgccggagaatacccctgtgggtgttccccatttgggtgcacagtatatcctcgtggagggccccccaccacctgggagacacttcgggtgcttgccccaaagagtaatgggggtccccccccacgagattgccacgccacgcggaaaatccccctccttttcaccgcgccacagctgaaaatgtggttcccggagttgggcgcagaaatgtgtgtgaaaaaacagggaatttttgtagtttatatntctttgtgagagaatagagaggtgagaatttttttgcacgcgcncctctcacgaggccacgcggataaatggaggggaaaatatatataacacttccgcgaactatccactccacagctttagaaccccaccccacagtatatatggagatgagaagaggagatccaccaaagttccgcgaccacagagtatgcccacaattatggagactctgcacacccctatagagaaaagaggccacgcaggtgtaaaagaggttgtgatatttccattggaccgcgcaaaagagatggctctgctcggagagattgaggagaccacagcagaaatatagtggcacttgcacatgccccgcccagagtcgggcccttttcccacgccacgaccacggagaagaatcgcgaaactgagggttgtctggccctcacacaacccacatgcgttgaggatcaccacccaaggcgttgagataaatatattaaatatatttagcacgggtttatatttacgtgcctaaccgtagcttctgggagttttattcgcctgtggattttatataagtgtttaatttaaaagtga

SEQ ID NO: 704061 - DNA, 143 bp, Homo sapiens
ggctcagcgattcttgtgcttcaggcccacaagcagctggagagtcgagaggcacgcccggctactgtttatgttggtagagatagggtctcaccatgtcggccaggctggtattgaacttgtgacctcaagtgatttgcccg

SEQ ID NO: 704062 - DNA, 912 bp, Homo sapiens
gcttcttcgccataaccaagcggttgcttgctgtcccagccggcgccccctcatcagcgtcgccatgccgggaggtctggttctcgagcacgtgtctcccataagttttgaggcaatttaacaaccggatctgggcggatctgttttctacgaattgcatgagtagagtcatggatgggtatatggcgtttacttcgcaacttgcggggagttatataccccaagtagtaggagaaaaaagcagtttgtgaagtagcatgtcaagattggggatcaagtagtttgtcaatgataggcaatgtgtaggttggatggccgcttttcaagttcagtagagtgttgtgagtggaccattctctgtcgtgtagcaagggtattcacgtgttgaccctatttgtgagagaggcaacatgagaatgttactcttctctcacctattcatacagtgtgatacggaatcagtgagaaggttgagatcctggttgggaatgctgtggtttcagacagatgacgtgactgataagggtatggttgttgactgattcatgtctggggtatagtacgaggtcactgatatagcatagcgcgaaagcgtagacttatacctgtgatccagggttaccactggcaagcgatacttcttgatcgacgattcttccagggtaagtcacatctccttcttccagcttggtcctggcagcaacaacagggttttggccatcaccatggttcgctggcgccggcttgcgggacagtgtgatcggtccttccaaactatccctggcaccagacgcccacttgactttccccgatggggttcttccatagactcccatctggagacatccttctgcgtacacaccaacgctaggttcttgggaattggttcgtcacccagcttcctgccttgtc

SEQ ID NO: 704063 - DNA, 791 bp, Homo sapiens
ccacgaagacatccggggcgtgggacgcattcaaaatgcatttccaaaccgagatactccaacactcatacagactcgttcaggcttttcaacagcattcccattcttgatggaagccagctttctacattaagagaccctagcaaaacacctagactgcagatcacaaatatcaacacatttggctgaacaaaagaaagcctccaattttaacagagtcagttcagttcgattacagcctgaacatcgaaacataaaaagacaacattgcatatttgggttcgctagttcctgctagaatctgagcgaggtaaaataacatcactaatgcgttgaaagaattccacatatggaaaacctttgctttatactatagtagctttacacagctattgctctgtctctattatctaccatgactacaacttacctagcttaaggtgtctttagtgaaattatctaacccttatggggttcaggctctggtctggcttggtagccctggattctagggaaagagaatactaacatatattgtagggatcatgtagaatgtaccttatatatattcattactggccatgtacttacatccactatatctatatttattaccgaccatgccactataggatgaacttcctataattttaagaaacaacgacattatgcgttgaatctcctgacacttctacaaattttatttttaaaaaccctaactggaaaggttgggttaaatacaataggccgggattggcctttcttgaccccaagatattatattgttttgg

SEQ ID NO: 704064 - DNA, 977 bp, Homo sapiens
  misc_feature (256)..(256): n is a, c, g, or t
aacgttgttattggtggaagagaaggcgcacctaaacaggatttgcccacagtttagggctcttcaggacagtgtctacaatcagattgtatgtgggatcgccctcgcctgtcccattgaaaccgagtgtgatattgtcaggcagctgctttttacatgatgacaaaagaagagaagcaaaacacatcagacaatattatgtggacgtccccagtctggctgagcctttccaggtgaaatatatcgactcaggggnaataagcctcagcgaatggaggacccaggctaggacatcaatgaggggaaggataaacatgcagacgacctctataactggcccactcaggcgttcctattcactcggtaagacattaggtcccatcatcacgaggacacgagcagctgtcagaatccagggcttcaaagcgttagacacttttaaggggaactcgtcccagatgttcctcggtatactcttaactgacacttctgtcaaatcgcacgcgaatatatcctccaactatagtcttaatcctaaccacgaacatccccgataggattgacacggcttgtgcatcacgaacacgtcactgaggtcatgtctttagcgccaccggttacatcgacaaaacactctcgcctaatgagacggaattcaagcgacatagcaagactgccctggttgtctactttccttttcagcagccaacatttaacaaaattggtggtgctgactaaacccctaagtagattaagccctttattgccggcatacaatcctgtatgggtattgacgaaggggacagtttatcagggtgcaacggaatcctgggtgtgcacgcctctcacattttgttacacgcactgggaccttcgatgacgcacacaactactgtcatggtaacgtgtacctgcactactgccattagtgccaacgacggacagcacacgttcggccaataatagaaagaaaacaa

SEQ ID NO: 704065 - DNA, 407 bp, Homo sapiens
tcgacgtgaccagccccccaccatccccaacaacattccacacatcactcgcgcacgccacttgcgaacaccacgcacacgtctttggcgggcggagagagaggtgcccagcccgtgcacgacacgaagctccatgtgttctcgacgcaaccactctgacctggctacagccagagacacctcgaactcctccatctccccggcatggtcacgtgatggtggcagcagggacacagctcttcatccaccgacgcttggcgggggacagattctatgatgacctccactgccttgatataagtgacatgaaatggcagaagctaaatcccactgcgggctgctccagcaggctgtgctgcccactcagctgtggccatgggaaaacatgtgtacatctttggtggaat

SEQ ID NO: 704066 - DNA, 340 bp, Homo sapiens
  misc_feature (2)..(2): n is a, c, g, or t
anatccccggtagagcggtctaggaacattcctgaacataatcaaagccatttatgataaacccacagcaaatatgatactcaatggggaaaaactgaaagccttctcactccaatctggaacaagacagggatgcccactctcaccactgctcttcaacatagtttgggaagtcctagccacagcaattaggcaaacaaaagaaataaaaggcatccatataggaagagaagagataaaactgtcactgtatgcagaagacatgatactatacatagaaaaccctaaggactcaaccccaaaactacttgaactgatcagtgaactcagcaagtagcag

SEQ ID NO: 704067 - DNA, 561 bp, Homo sapiens
  misc_feature (17)..(17): n is a, c, g, or t
  misc_feature (21)..(21): n is a, c, g, or t
  misc_feature (33)..(33): n is a, c, g, or t
tactatttgcagaatgncggnttccagcatacntcgatgaacgcctgtagctgatgcggtttcatagctggctttcagcctggtcgttcacttccgtgccccgttcaaagaaatagcagagacgcttgcgtggcgacaggtaatcataggcggctcttggcagttgcaccggacgaagactgcggtgaatgcagagctgctgttcatgttcaagattgatcaccagcgcttcctcccggttgatcgacgtgtcatgaatcactactttgggtttgattgggcgtgaggagttgacggagaccaccagggcataacgctggtccgtcagttgtacgacggagccgggtggataaatacccatcatgcggattaaggaggtcagcgtcgggacatgaataatatgttttgtactgcgtgaatatctgggaaagggcttcatgcggtgtgatggcctgtgccggatttgtcgggttgcagagattatcgtaatgattcaccagggccacgatccggctcagtggcgacattttttcacccggaatccggcttggatagccactg

SEQ ID NO: 704068 - DNA, 397 bp, Homo sapiens
ggaattaaaaatgatttttaaactctctttggggactgtgtggatggtggcattattaaccagtatgggaaatataataaaataataaaatgagaggtgctttggagcagggattgagtggatgagtggatggagttgttggggaaggcagggagtggttgggaaaggtaaagaaaatgacaaagaagacacttggggaaagtgttgtaggcagttgacacatgctaggactcagaataaaggtccaggttgtagatacagacttcggagtgttaagaatttttaagaaaattctgcagggtgagaagggaaggggtgcttaagatggaaccctggggagaagcatcagttactggatacctctgaaaattataaatgaaagcaggatccattgact

SEQ ID NO: 704069 - DNA, 945 bp, Homo sapiens
taaactcgtgacaaggcgggtttgttatacagattatttagtgacccaggtactaagactagtacccaatagttacttctctggtcctgtcccttttcccaccctccaccctccaggtaatgaaccagtatgtaatatcctttgctgtccatgctatatttcactcccacttgtgagaacatggaatataatagatatacctgtaacctactaattaaattaagtacacagactaattcacctccaaaacacactccatgatccctagacacaaagaccatgattcattatcatatatagacaaaccaactcttcgataactagatacagacatagtcaatcatatccaactatatactacgacacatgttccactaatagcggccactcccatactacgactaatgcaaagaacataaaaaaacagaacaggtcgaatacaaaaacagcatcaacttgcatcactgcacacatcaacaagctaccactcaaaagaataactaacagtgatacaacacgatacatgcacaatacacaatctatatctcacaacaaagatcacaaaaatcttaccacaaccaatgccctcctaaccacatacacctatgcactctccaacccccatatctcacagctactcaacaatgcaaactatccacatataacaacaacaactccaatccactacaatagactatcacaaacaaaatcacaactaattatcggatacacacgaaaaacactcaaacaaaacaccaaacccaacatgatactaagataaatacatacacaccactcacacactatccactccatgcaacgacacaaacacacaatagacacagaatcacgagcactattcataaacaacaaacctcaaccaataacaacacctaaagagtatacaaacccaataacataaaacacaagccacaaactaccaag

SEQ ID NO: 704070 - DNA, 1644 bp, Homo sapiens
  misc_feature (2)..(2): n is a, c, g, or t
cnccaggagtggcctagcaacggtaaaaggataggggtggggtgggggctggggcccgtacaccacatcccgtgtagcgtgataaggtagtggtgctggcccccggtccctcttatgtggtgtggtgggttgtgggcatggagataatagtaatgttgaattgtcccatctccctaaccaggtacagtaatggtgggtgtttctcatctgcagtttagtgtttgggtatttgcccgttgcgcgtcgccatctgtcctaagcctatcctgcccctaccccttccctcatacctcgattccatgcccctaccactcatcctcggtgccctgcccctactcttagttgtgtgtgctaggcaatccttcctcccgatcctgccagatctcagtgtgagggtatatgtgttaaggtaaatgctaggtaattagtaaaattataggaaatgtgctaatacactgggccgtgggcaatggtaagctccataccgagcgtcccataccatgctgggccgtggctgaccatggacatggggaggagcaggtcactgagcaggggaaggggtaaaggtaaggataaaaggtaaactgaaaggtacggccaggcatatcacttgtgtgttgtgccgtcacccctccagaggggtgggctcgtttgttgttgtcctgactcggcgggtgggtgtgtattccatacattcgtgcctgtcactgatggtgggcctgtgtcccatccggccctgtacgtggtgtttttggtcggtcggggggggggctactccggcctgaccatcctcgtggcgggcggcgttgctttccgacctggtgggccggcagtctccctcactcggaggaagtatgccaatcttggtttgtttttctttccataccggcgccgcgcttggtccgaccgaccgatcggcggtggatgtacttctccaattgagggggccgcaactacagcgagggtggtcgccccccacctgtagagcagcagcgtggtggcgatcgagggatggaggcatgtcttggtggccgccgccacgcgccgacggcgccgaacgacaaggaggcggcccgcggaggccgcggcgcgcaaaagagcgcgcacgcgcgcggagagagagcgctagagagagcgctggagcacacaataggccgccccccccacgcaagaatagagctctgtgggggcagcaccgccggcttcttcatcaccaggtgttctcccacgcgcgcacaccccttcgagcacatcttttccggaagcagccgctgtgcgcacagcctcgaggcgctctcgcgagagtctgctagcacacagcagatctctcggcggcgtctcaccagggggagaccccctcgagaagagctacccgcagagggcgcacacacttcctcttcagagagagacccgggtgtgtcacaagaggctcttccacagagaggagaggagataatttgagttcgagagacctctcgagagagagagagagacccacagtttccaaaccccacagtgaacaacacagggtgaaacttggtggaggaaaccgggccgttccctgaggagtccccttgtaggctgccctccgagtgcccggaggagctccccccttccaattaaaaaattttttttagcggtgaa

SEQ ID NO: 704071 - DNA, 199 bp, Homo sapiens
gaaggatgggaggatgcttggactcaggccttgggagggaatggtgggaacatcctatagctcgcaggttggaagagatactactgtagccaagccggcgtagggtggagccgttgagaatgatgtcattgggcatggggtggggtggatgcagtagtgtcatcaacccccccatccccattaaattaatcccaacatg

SEQ ID NO: 704072 - DNA, 1259 bp, Homo sapiens
cgcctgccacgacgcccggctaattttttgtatttttagtagagacggggtttcaccgttttagccgggatggtctcgatctcctgacctcgtgatccgcccgcctcggcctcccaaagtgctgggattacaggcgtgagccaccgcgcccggcacaaagaactcttaaaattcaacaattttaaagtggaacaaagatctgaacagccatcttaaccaaggaagcatatacagatgatcaattaagcatgtgaacaagatcacttaatgtaattaagtatcattagggtactgcaaagtaaaacaaccagtaagatcaccactgcacaactgttagaatggctaaaatccaaaaccactgacaacattagcaaggaacactgacaggacgtggagtaacaggaactctcactcattgctggtgtgacatgcaaaactggtacagcgacattggaagacacttaacgcagtaatgacaaacttcacctataaatttgcccggacgataagaatgtcacgcgtagtgtcaaccccagggcttgacagttgccagtaggccgcagaagactcagggatcaactagaattccctcacgagactccacgagggatatacagagccaagaatatatcatgctaaaagcacttccaaaagataagtgagaatacacaggagtgcgtgacacaagaacccggtacaagattcgagcaggactttgacacgaccacacaagtgggcgggtttaacaccaaatctagtgcgccaaaggctggagtcatgagatacctccctttgactccgtgagagaaactcaaagcccggagcctcttgacgcctgacccaaaaagggatacctggcgagaatatatagggcagtacgcgctacagcaatagacacagaccgctgagacaggtaattagtaacacaaggccaacagaattggcgggtctatccccacaaaccatatctagtcagacgcgcaattggctgtcctaaggtgaggatgccaaccacacatacatcagcttggaaacagcataaactatttaaccgcaaaaagaagcgagtcacatgagaatgttttctcaatcacagcatttagattaataattgagcacccgatcaggtgtaatgccggatcaacgttctcgtcgcgatcagcgcgaagccataacacaaggtggggaagcaacataacaggggacaataaatacgagaccatagacaacgacatatagcagactcaccgctgaaacaa

SEQ ID NO: 704073 - DNA, 142 bp, Homo sapiens
ggccagtgtcataggagcccacgatagaagaccctcagtagacgacctagataaagcagcaaaggaatttcaggagaaacacaagaaggaagtagggaagctagaagaacataggacctactctagaactacataaataccg

SEQ ID NO: 704074 - DNA, 141 bp, Homo sapiens
  misc_feature (81)..(81): n is a, c, g, or t
gtgatccctcagagaagtacatgcccagttagttcaaacccaggtttcaaagaagtgtactgggctctactgtaaaggcancagtgaccaagaggtggggttttagaggagagtaccctcaaatcactcccattttcactt

SEQ ID NO: 704075 - DNA, 159 bp, Homo sapiens
tagcttggtgtgaagactgtcctcggggtaccttatccaatcctatatatctcacagagattgatctctatcagtatatggcgggggattctcacggagatacatgtataataactggaaacatgtatatagcatgtggtgtgtgccaagtactcttca

SEQ ID NO: 704076 - DNA, 441 bp, Homo sapiens
tgaatttattgatttatttatttatatattttgagacagagtcttggtctgtcacccaggctggagtgcaatgagactctgtccaaaaaaaacaaagagaaaagaaagagatatatctggatcctagcactttgggtgggtggatcacttgaggtcagaagttcaagaccaggctggccaacatgacagaaccccgtctcctccaaaaatacaaaaattagccaggcgtagtagcgggtgcccgcaatctcagctacttgggaggctgagacaggaagaatcacttgaacccaagaggcagaggtcgcaccgagctgagatcgtaccactgcaaactccatctcccaggcccaagcgattctcctgactcagcctcctgagtagctggaattacaggtgtgagcccctgcacccaggctcacattgcttgttttattagtt

SEQ ID NO: 704077 - DNA, 569 bp, Homo sapiens
caatccaatccaaggttcccaaatcgcccgcacatccaaacctcttctacgtcgcgatttagggggcttagcagttatattaggggaggggaaggggtaggttagggagaattggggaccgtactgggggagagaaagagatagtctttctgacggggcgcgactattgcgaagtatgcggagtaggggcgggttatttggatcccgggttagacgacttgggcggcggggctgccggcgaacgtcttcttttccccctcgtaggaggttgttggggatggtttcgagggagagagggagggtggataatctctaaggtagattgagttctttaggaagtacgattaggcgccgagaaggagggggcggtagccttcaaagagggggctaaaggacggtaaggacgttaacgtcggctaggggggtactacgaagcgggataggcggagcttccggaagggaacgacggcgaataaggactattagattaagaactgggaggattctcggggggttgtttccgggaatatctatcccttctggtttagattgtaataggtaattacgta

SEQ ID NO: 704078 - DNA, 164 bp, Homo sapiens
ggctcgaatctataggatcccgaggcatcacgattgtccgtgaacgaggtatctttactataaaagtctattgtgttagctagtcatattcattggtaggctcgaggagttcgatagttcttgggcggtgagattgagtcgtagaatgttcagtgagcctaggg

SEQ ID NO: 704079 - DNA, 255 bp, Homo sapiens
cgatcggatggcatgcgatgatgacagagatgatgcgggcagaatgctcaatggatcgattgcctgcgcgtctgagatgttagtatgagttagattggtcgggcttgtaaaaccctgggcatacaggactaggaagcagataaggaaaatgattatgagggcgtgatcatgaaaggtgataagctcttctatgataggggaagtagcgtcttgtagacctacttgcgctgcatgtgccatgtcaaacaataaata

SEQ ID NO: 704080 - DNA, 272 bp, Homo sapiens
gcgtcgacaaaaatttcaatagcttttgggtacaagtggtttttggttacatggatgaattctatagtggtgaattctgagattttaatgcacccataacctgagtagtgtgtcgtagccaatatgtaggtttttattagttccagagtatatgtgtaggatgtgcattttgttacataggcaaacgtgtaccatggtggtttgctgtacctgtcaacccatcacctaggtattaagcccagcacgcattagctcttttccctaatgttctc

SEQ ID NO: 704081 - DNA, 156 bp, Homo sapiens
atagtgggggagtagagcagcagcagaaactcattctcaaacatcttcttcattcaggcgctcgatggcccggctctggccttgttggctttctccttctggatatcactctatgagggcagagatcttcatcttcatgtcctccagctcatggtc

SEQ ID NO: 704082 - DNA, 148 bp, Homo sapiens
ggactcggtcctatttacacagggtcaggttccgaagctgtacattagaggctaccagctggtccatggcccggacagagtaggtgatgtcccagcattcaagtgatttcttgtccgttcagccagctctctagcaatgttggcagca

SEQ ID NO: 704083 - DNA, 229 bp, Homo sapiens
agatattaagaactacaaactggtaataaaagtcagcccctttgcctgcaatagaaaacaaaatgggcaaaggatttgaaaaaacactgctcagagttaagatccttaattggccattcattacttaaaaatgtgtccaaccttatcagtcttcaaaaaaatacccatttaacctgtttatcagaaaaattatccaccaagaaagtgctaaaagttaaaattgacaagt

SEQ ID NO: 704084 - DNA, 298 bp, Homo sapiens
cgttctagaaagtcctgtccctgcttgccctggttaagccagaagtctggactctcaaagagaaatgcattctggtgattacatggatccaacacctgatccctgttcgtacaccccctcccctttttaaaatccctaataaaaacttgctgattttgcggctcggggtcgccatcatggtcctaccaatatgtgatgacacccctggaggcccagctgtaaaatttctctgtttggactctttctctttatttctcagaccagctgacacttagtgaaaatagaatgtatgttgaaa

SEQ ID NO: 704085 - DNA, 141 bp, Homo sapiens
aaggaaattttaaattctgggcccctgagttagatggtaaatcctgccttacgaaagttgaattgggtgaggcgggcaaatcacctgaggtcagcagtttgagactagcctggcaaacatgatgaaaccctgtctctacta

SEQ ID NO: 704086 - DNA, 114 bp, Homo sapiens
aaatgctagtggtcgccaccttgagaggatgccttggtcggctgcaatctggtgctcggcaccagcgcccgcgaccggcgtatcccttgtgcgctgctggatcccgcgtgaatg

SEQ ID NO: 704087 - DNA, 321 bp, Homo sapiens
aggtcgactcgcaggaatgcagctgtaaagatagcaaattcaactgccatctacgctgtgcatcaataagtaccaagcagactgccttggtacgtaggttacttgcaatggagaaccttccagtctgggaacagatacagatataccaatggatattgacaataatgacataaatcgtgatagtagttcggggtttggactgacacagaagagccatcacccccagaagatccgatgttcttcttggatccatctgatctcgatgtggacggagatgaagaagccgtttgcacactcagtccatcaatcagcgataatatt

SEQ ID NO: 704088 - DNA, 890 bp, Homo sapiens
  misc_feature (211)..(211): n is a, c, g, or t
taaatctggggaaaccggttccattctgggtctgagttaggaggcttgtgggctgtagtggggagctagtgagtcccattggaaggtggcctgcagcgacaggtgttgtgtgatgcgcacatgggctgggcccatgctgtgccctgtgcagcatggctgccacataatgccagattgtcatgcgtgccagagatgccctgtgcactacaanccatgctcactggtaaaaagcatgtgggtcgaatgtgtgctcaaattgctgtgctgctgtgctttgaatgtgcttgggtgggaattgccaaaatgtgtgctggaatgtgcatgggtagatgtgctctgggctgatagatgcctgcatgtgctgcttgcaggatcacaatttgcccaagaaaaggactgtctgtccgattgtgtgtgaatgatgtctcgaccttgtctgcatcatggctgccatgctcatgtgctgtgttgcatgtttgtttgggccccctgtgaagatgcacaaaggccaactctgtctgcccagtgtaagagccgaggataaggcgggcagtgccgtacatcgtgccttcgtggggattgtatgtactttgctaagccccgcgtttgtctggatagtgggcctgtgccattgcacaattactgtacaccagcaagcaaggtctttggcgcctggggtccccgaggtgacgccaggaaacctccagggagatttccccagtgtacaggaacactattctggtgttgcccttaaaaaagaagcgcattttgttggcaaatagttgagtgcctggttgaaggtggttctcttgagcttagtttacaacggggttgtgagtgccaagcagattcgatagcaggtttgccgaaatgggtcttgttgccgcccc

SEQ ID NO: 704089 - DNA, 897 bp, Homo sapiens
tgtcaaaaacgaaagaacaacggaacacgggaaacaggaaaggaacgggaaacggaacagggaacagaacagagacggaacaaaacaacaacacaaacaacaaaaaaaaaaaaaacttggtgtgcggcgcgccgcctctggcgccctatcgagaaaagaaaagcgctttacacacagacccattctggcgctgggcgcgccgcgcggggccacagtatagggagaagtggacaaatgggcgcaaatagcggggtgaccacaaggaagaaacccgtgggaacaaaaacacagagcgcgggggggaactctctcacaccaaagacacaaaaaaggccccggggcggggacaatcgagcgggcggtcctcgagcaacaaaaactccaccaagagggagagcatcacaggaggggcacatcacaacgggaggactcaaataaccaagagagaaggcgccacaaaagaggaagcgccagcaagagaatctcaagatatgagaaaggccgcccgaggaaaccagaggcggaggacaaagcaaacaacacagagcaaaagaagagacaacagaaccagacacacacaacaaacgacgaaagcacaaaaagaacgagacagaagacaggacacaacaaagaaagacaagaacaaaacacagcagcacaacagacaggaagaaaggagtgagaaaaagaagaaaaaaacaaagaaagagaagcagaaagaaaagaaacacagaggaagagacgagacgaaaaacaacaaaagaagagagaaccggcgaagaggaaagagaagaaagagaagaacgagacggagagaaaaagaaaaagagaagaaacaaacgagaaagaaagaaagaagaaagaaaaaaagagacagaaaagagagaaagcgaaaga

SEQ ID NO: 704090 - DNA, 839 bp, Homo sapiens
tggaaacacagtctccctcttttacccaggttggagtgcaatgggtgacctcagctcattgaacctccacctccaggctcaagtgattctcctgcctaagcctcccgagctgtggggaccacaggcttgtgccaccatgcccagctaattttggtatttctcaggagagacagggcttcaccaatgtgggccagactagtctcgaacccttgacctcaggtgatccacccgcctcagcctcccaaagtgctggggaccacaggcttgcaccatcacacagggctgatttctggtatcttagtagagacggggttccactatttggtattgggtattttagtagagacgggggcttcaccgggccagggggtctggaactccgtgacttcaggtgatccgccgtgcctcggcctcccaaagtgctgggattacaggcatgagtcaccgagcctagcagaaattctacatcagaaagtttacctcgattcaagctccccttagaagcgctacctggagaatgccgctcgggactgagggtggaagggaagaccctagggggaaactgtgggtgtaattaccccacaagggcgggggaggaggagttcccaaggtgcctggccagtggcgggttgggctgtaccagactggggggcaggcgaaaatcgtgaccagagtcaggccagctggcacaaatggaccgtttggttaaacagagcgcggggggcccccgatcagaatgggggggggcgggcaagccagggggtgtgagcaacaaactcccgggagagcgcgaaaaaaaaaggggcccgaacaatagccgaagaataatagtaagcaga

SEQ ID NO: 704091 - DNA, 1153 bp, Homo sapiens
  misc_feature (60)..(60): n is a, c, g, or t
ggccccgccctggtgtcacaggagagctactattactggcctggaagcggggaaccgaantaagtacaactttgatgatcaatgtgcgccgtgaagaaatagatcagagagatgcgagccccgcatgcattggaaaggaagaaaggagcgggacagagaagcgtctcctcttcagactgacctattctcatgtggcccctagttccaggtacacttgtctgagtacattcatgtcatgtcatcctgttgggcactggatgaacgaaacccctgtacagtttacagggttccttggagagctttctaactccaagtggccacatgcatgatcacggtccttcagtcatgagtgtgcccgctctacgatacactccgataggttgggaggctactttgaaaggacgcgaggcaggagagccataagaggttgcgggggcaagggaaggctcttgtatacccagttgggcgcggaatcctcgttgttcaaacggatacggcctttggagaccctagaagccaataacagggaactgaaccatccggtggcttttcggatccccccgttaacaactacgggtattgccccctacctatatgactccgttttgggaagtcttgacggtagggggacaccccgaggatggtcgtgaacacctccaggggccctatttatttccactgtgtttgtgttaggccgggatcggactttttaaggagcttgtttggggattagtgggtgttggccatctttggcgaggaagtggttggatttccattcattaagagaatggggggtgccccacttagacaaaattggggtcggttagaaactttaataacattagtttggggacaggaaagtaacggtggggaaaccgggtggagtgggaagagacatattggggcaaagaatgggagttgatggcgtggcgagaaggtgctcatgggagggaaggggggtaagaacatgtggtcgaatattgttaaagaggttgttggaagccatacaattgcaggggcaatgggttgagtaacgcaattggattggggtggacaccccagaagatattttcgttcaaaggaggaattaccggagttaagggaagaattctaaaagcgatgcttaatatgtgttggaattgttggtcacaag

SEQ ID NO: 704092 - DNA, 614 bp, Homo sapiens
  misc_feature (51)..(51): n is a, c, g, or t
  misc_feature (63)..(63): n is a, c, g, or t
  misc_feature (77)..(77): n is a, c, g, or t
  misc_feature (156)..(156): n is a, c, g, or t
  misc_feature (163)..(163): n is a, c, g, or t
  misc_feature (167)..(167): n is a, c, g, or t
  misc_feature (185)..(185): n is a, c, g, or t
  misc_feature (191)..(191): n is a, c, g, or t
  misc_feature (230)..(230): n is a, c, g, or t
  misc_feature (272)..(272): n is a, c, g, or t
  misc_feature (313)..(313): n is a, c, g, or t
  misc_feature (331)..(331): n is a, c, g, or t
  misc_feature (362)..(362): n is a, c, g, or t
  misc_feature (379)..(379): n is a, c, g, or t
  misc_feature (406)..(406): n is a, c, g, or t
  misc_feature (434)..(434): n is a, c, g, or t
  misc_feature (501)..(501): n is a, c, g, or t
  misc_feature (550)..(550): n is a, c, g, or t
  misc_feature (605)..(605): n is a, c, g, or t
cccctctccgcctgcctggcccccccggcccccctcccgccccccctttcnctcccgccccgnccgcccccgcgggncttgtcgactttggctcccctagtgcccgtgggcctcctttccccacaggctgggtgggagccggccgctcagcgactngcccccncctngaaggcggctgctgaganggcccnggcccccgtctgtgccaaaccagttaaccacgtgctgtngggcggaagagaggggaggggcaaggctgatgctccgaaccngggagcccccccaagccctcctgaataataaaggagggaangggcttcacagggtaatnctgcctggggggaagggacaggagggctgcngcacgtccagggacagncccagcgcagatccgggcctggcccgngtgagctctaaagaaggagacggtgacngcggctgcgttgcgggtactagttcactggcaaaacattgaccttgttcaaggtctcttctagcagngcagtcaaccggctctggtccgcctccctaatgaagcccagctgcaccngctcagccagaccaactcgagggaatatatactcatattggcctcagagtcacanactcagagt

SEQ ID NO: 704093 - DNA, 116 bp, Homo sapiens
tgaggtctcgtccacgttattttagctgcactgctggatcagactcgcatgcattcacagtactgttgctaaagtgctatcagattctcgctgctatcctccatcaattgtcgcgg

SEQ ID NO: 704094 - DNA, 174 bp, Homo sapiens
aaaccttaaaacttagtcaggcatagaggcgcatctgtagtcccagctacttgggaggctgaggtgggaggattgcttgagcctaggggattgagactccaatgagctgtgatcacgccacttcactccagcctgggtgacagaatgagtccctcatttaaaacaaacaaacca

SEQ ID NO: 704095 - DNA, 190 bp, Homo sapiens
  misc_feature (21)..(21): n is a, c, g, or t
  misc_feature (44)..(44): n is a, c, g, or t
  misc_feature (49)..(49): n is a, c, g, or t
  misc_feature (109)..(109): n is a, c, g, or t
  misc_feature (175)..(175): n is a, c, g, or t
attcggcacagggagagaagnactcgctgtgtcgcccaggcttnggtancagaggtgcaatcatagctcactgcagcctcgaattcctaggatcaagcaatcctcctgnctaagtctcctgagtaactaggaccataagtgtacaccaccatgactggctaattttttacttttncgtagagatggagtc

SEQ ID NO: 704096 - DNA, 813 bp, Homo sapiens
gcgagccctcatagccgctcgctatggggaggctgcggagggtcccggatggggaggagcccagccaggcatctgtctccagccgacaccgcagacgtatcgccgaggatgtcccatattgcgcccaggccaggagcgtgcccaggacgacctggacacaacggagcaccaggcggcgcatacatgagagatgatggtgtgagagacaaccagggccattgttagagaacaacaaagcaggataacggaagagtcagaagaagaggagcacgtagagaaacgacgataacaaaggcagaggcaaagatccagagagacagagaccgttgagcacaacatgagagctccgcgaacacgagagtggaagaaggtccatggactacggacgcatccgaccaccaccgttgcaagtatcgagatttaagccagtggctgcacaacgtgacttgcgttgaaaccaaaagcagtctttgaaacgagaagcaccatggaggtagtgggcccgtacggacatcgcgagacgacccaggggacacccaccactgcgaggtgttcgcgctcttgacccctgcgaagaggtggctacccattgggagcacgaagagagggggcacatgaaaagttgacattgcatagtgagagaagacgtaggacactggcgacattcatctgggcgagagggcgaagcgcgacgattaaagagtttgtggacccacgaaaggagctgcagtggtcccatactacaacgatgagttgcgtcgctgacaaacaatggacagggacacttgctgacgaacgagacactgtgtgtgc

SEQ ID NO: 704097 - DNA, 369 bp, Homo sapiens
  misc_feature (63)..(63): n is a, c, g, or t
  misc_feature (223)..(223): n is a, c, g, or t
  misc_feature (225)..(225): n is a, c, g, or t
  misc_feature (287)..(287): n is a, c, g, or t
  misc_feature (325)..(325): n is a, c, g, or t
  misc_feature (354)..(354): n is a, c, g, or t
  misc_feature (362)..(362): n is a, c, g, or t
gaatgaccctgtatggcagatgcatctgacagcaataacttaagaagtgagggttgccacgtngaggctgctgaggggagggtgctgagtgaaagtgctatgtaaactgcatgctttttataagtggttgcagttctgtccagcccgcggccactggaccaccctgtaaggttccccaaataaaccctatgtttccttcactagctccagggtctcttctttngncctcttgaacctgggtgccatccctactgaagttaacagaggtctgggcccaacctaagggncatcattttttaaagtcccatgggaaaaaactcccagncagagtttcaggcatctggggaacggttngggcaggnccccaca

SEQ ID NO: 704098 - DNA, 403 bp, Homo sapiens
  misc_feature (403)..(403): n is a, c, g, or t
tctccctactgtatcctataaaccatactagcaaatgatcaaacttgaggagggggttgtggggacctctgatttaccctccagttggatgggtgagagcctggatctgtaattgttgtttgaagtgggggcaatcttgtgggatgtagcccttcatctgtgggacctgttgctgtctccaggtacacagtggcagaattgaattcaattgtaggacactcagctggtgtccttacagaactggagaattgcttggtgtaggaacactgcacacatttggtcacagaaacgttctgtgttgagtgatagtataaaggcaatgatttttcctatacaagaggtaaagagagtaatgtctatgatggtgtctgctcctgtcccagtgcctggggagggcaggtgn

SEQ ID NO: 704099 - DNA, 847 bp, Homo sapiens
gcagtgggatgtcctaatgcttaccgaacgaaaaattctagggctatatacaactacgccaaaaggccccaacgttgtaggcccctacgggctactacaagccttcggtgacgcgcataaaactcttcaccaaggagcccctaaaacccgccacatctaccatcaccctctacatcaccgtcccgtaccttagctctcaccatcgctcttctactatgaacccccctcccgcatagccaagcccctggtcacgctcaacctagggctgctatttattctaggccagctctaggcctaggccgtgttgatgtcaatcctcttgatcagggtgagcatcaaagtcaaaattacgcccctgatcggagcactggagcagatagcgcaaacaatcgcatatgaagtcacctatggcatcatactacgatcaacataactaataagtggctcctgtaagctctccacccttatacagaacacaagaaaggtctgagtactcctggccatcatgaacccttggcataaatatgattatctccacatagcagagacaaccgaaccccttcgaccttgccgaaggggagtccgaactagtctcaggcttcacatcgaatacgccgaggccttcgcctattcttcatagccgaatacacaaattattatataaaacaccttagcaggtaaatctactaggaaaaatatgacgcatctcccgaattagaaatatttgaccaggaccaaatctagctcggtctatgaatcgaaagatacccgaatcgtagaacataaactctagaaaaagtctaataactaaatgtattaaatgtcatacataaattcgttccacact

SEQ ID NO: 704100 - DNA, 685 bp, Homo sapiens
ccaccggcgtcaaggtattttctgactcgcccactccccggagcccatatgaatgtatctgctccactgctctgtagcccttggattcatctttcttttcccgtaggtggcctgactggccttgtattgagccaactcatccctagacctcgttctacccgacccgtattaccttgtagccccctgtcccctatgtcctatccattaggactgtatttgcccatcataggaggcttcattcactgatttcccctattctcaggctacaccctagacccaacctacgccccaatccctttcactatcatattcatcggcgtaaatctaactttcttccccaccacactttctcggcctatccgggatgccccgacgttatctcggagctaccccgatgcatacacccaccactggaacatcctatcatctgtaggctcacttcatttctctaacacgccgtatatattaataattttcatgattttgagaagccttcgcttcgaagcgagaaagtcctaatagtagagagaaccctccactaaacctggaagtgactatatggatgccccccaccctaccacacattcgaagaacccgtatacataaaatttagaccaaaaaggaaggaatcgaacccccccaagctggtttcaagcccaccccctggcctccatgactttttcca

SEQ ID NO: 704101 - DNA, 950 bp, Homo sapiens
ctggttatgactcagaagatgttatctgaaacaaagtctatagaacaaaaaaacaagtttcccctccctcatcaacaaaagcccacccttctaagagacatttcaacgctgaacttatcacaatctcttaactcagttacaactttacaaaccagcataaccgtttaacacctaaccaactttacaaaacttttggaacgcattactcttacacatctggtctcggcacgtctaacaccaactggcgaaaacgtatatgctccttacacctaacaacaaccaacttggctatacaccaccaaccgtgcaacacattacgaactctttactgtgaactaacttacataacacgctataccattcgagcacgagcaaattcccttctcgagcgcactcactataacggccacaagattcccattttggctctcatcgaaagagtctaccacatattacgcgtacagtatcacaacaactctccactcacactatacacatttccacacttgggacacacacaaaattttccctatcactacccagcacgaaagcccaaacgacaagctatagcgcaaatatctcccacatctcacacctctctctgggccatatttatcccgcattataacactgtgctacgctatacatgtggctcaagagcccacatgtaatagggcgcccaacgaatccacagacgcacacgcaatgtcttctccacatctataaccgttttctccccccttctttcgactccccgaaaatcaagaggactctccaataatattaacccacttctcgtggcacaaacggagcgaacaaaataacgaccgagcgcgaatattaccgcaagcgtcacgtctttccaagcgaaacttcctgatcgtcggcaagacagaatctctatatattcacacccattgttggtccccccaactaagacgcttctcaaa

SEQ ID NO: 704102 - DNA, 120 bp, Homo sapiens
gcgtcagggggcgttctggttccggtttttctcctacgcttctgggccggtttaccaccgttaaatgatcccttcgttagctacttttccaaagtttttaaatcgtttgggcctcttagg

SEQ ID NO: 704103 - DNA, 131 bp, Homo sapiens
agcggttgcaatccgtttgacagtgagcggttgcaatccgtttgacagtgagcagttgaaatccgattgacagcgtgcggttgcaatccgcttgacagtgagcggtatgcaatccgcttgacagtgagcgg

SEQ ID NO: 704104 - DNA, 390 bp, Homo sapiens
  misc_feature (20)..(20): n is a, c, g, or t
  misc_feature (37)..(37): n is a, c, g, or t
  misc_feature (86)..(86): n is a, c, g, or t
  misc_feature (192)..(192): n is a, c, g, or t
  misc_feature (366)..(366): n is a, c, g, or t
tttccatatttaagagcctnccttcaggagctcctcntgtaaaggcaggcctagtggtcacaaaaatctctcaagcatttgcttgnctgtaaaggattttatttccccttttgcttatgaaggttagtttggctggatatgaaattctaggttgaaaattcttttctttaagaatgttgaatattggcctcnactctcttctgcttgtaaagtttctgcagagagatctgttgttagtctgatgggcttccttttgtggttaatccgacctttctctctggctgcccttaacatttttttgttcatttcaacattggtgaatctgaggattctgtttcctggggttgctcttctcgagattgggcncggttcccaattcgccctatagtg

SEQ ID NO: 704105 - DNA, 469 bp, Homo sapiens
aatccaacccaatggttcatcaatggtagctggataaagaaatgtggtacatatataccatggaatacttatgcagccatgaaaagaaatgagatcatgtcctttgcagggacatggatagagctggaaggcattatcctcagcaaactaatgcaggaacataaaaccaaacgccacatgttttcattcataagtgggagttgaacaatgagaacacatggacacgtggggttggtcggggaaacaacacacactggtgtctgtcctggggaaaggtggggggagggagagcatcaggaagaatagctaatggatactgggcttactacctaggtagtgggttgatctgtgcagcaaagcaccatggcacatgtttatctatgtaacaaacctgcacatcctgcacatgtaccccggaacttaaaagttgaagaaaaaaataaactgtggaatgtattgttcagccatt

SEQ ID NO: 704106 - DNA, 257 bp, Homo sapiens
ggcagcagcagaacatgctgcggggtgagcaccaccggccccggggtctgtagagtgggacgtaggtgagagcacagcaaggctgctttggagcccagcctaggagctgcgggtgtctcgctgtgacacgcacattccacgattcaagtgcaagcacattcgatgaagccctcagtgaggctgacaaccttccaaatgctgagaaagaattttttttcaaccctttttgctttttaaaaataatgacttgtaaaaaa

SEQ ID NO: 704107 - DNA, 94 bp, Homo sapiens
  misc_feature (9)..(9): n is a, c, g, or t
  misc_feature (52)..(52): n is a, c, g, or t
ttcgacagnaggttccttcttctcctccaccttgggctttggagcctccttncttgggtgcctcctctttacttgctgtccttcttctcctctg

SEQ ID NO: 704108 - DNA, 1039 bp, Homo sapiens
tgctgtacaatcggccgttgtcaccatgccggtcgtccggaaggattttccgtcgccgcggggtgactcggaagtcagaggaagatgagcaggactcagaggaggtcgattaaacatggaagaagaccagagaggtaccggaacttgaggaacgaggcccaaggggtgagtgctgtggccctttgtggtggcgagaagaagcgtacaaaagaggcgacccactcttagtggaaatggatctccttctcagcatgaagaccggtggtatggtgagatatgaacgaaaaactgaagggcaacacgcgggccacagcatacaagacatcagtgagcaggaagggcaccctgcaccctggggcacatcgtttcacttgcagacaaccacaacggaaggtgaatgaagggcatgcaagacacttgacttcgacactaccctttggcagcactcaggaggctacaagccaccacgcacaagggcagatcggcgggaccatgaggggcaccgaaaccagtctcagtcaacagaattggagacgggaaactgtcttttagtgaactctccagaaacacaatcccgtgttccctccagcaaacagacagaccggaggagaatgctccccaacaggcaattgtgagtggcattcttgaggtggccctgggatatgatgtaaaataacacatttctttaccccggagtattgccagggcccgtattgtgtgaaagcatacccagcaagacagacgagacgcgagacccccctttgggcctatcaaacagcgtggtacttatggtgcgccacaacgatttaccatgagggccaagggggccatagaggaaacgtagagccaggtcgtgcctggaatacgtgaaagaaagcaaactgcgggtcaacatagaaagacgtgaagagacgggtaaatcacgggaagcgaatgtatgggacacgtgcaggaaacaaccgacataccaaagatgcagatggaccatacccgagtattgatagcggacacaacactaacatgcgcctggttatgtttt

SEQ ID NO: 704109 - DNA, 160 bp, Homo sapiens
tatatcgccatgcttgtgatgtgcgaccaaaaggaacgagacgtgatatatgagggagtttctgttctggctctagcagagttttgattaccactgacctgctggccagagcgcttgctgtgcagcaggtttctttagtcatcaactatgagacccgcaa

SEQ ID NO: 704110 - DNA, 138 bp, Homo sapiens
  misc_feature (85)..(85): n is a, c, g, or t
gcggtcgatctagaggaacccctgattgaagagtatgcaatgagcgattaggtctgttgtcgtaggcagatggagcttgttatanattatgttatagaagaggcattaacttcaagataactaagtgaaagcctggta

SEQ ID NO: 704111 - DNA, 143 bp, Homo sapiens
gtctgtagcgttgcctgccgtcttgcggtgacctttcctggaaacagacattctggagatctaccagtgggctcgtgcacaacggtgttcactggtttgcaccgcccctgtgtcgtatacggagggcctcgccacagtcttcg

SEQ ID NO: 704112 - DNA, 489 bp, Homo sapiens
  misc_feature (235)..(235): n is a, c, g, or t
gttaacttttttattaactgggggataacattgttttttttttattgatacctttatcagaggtgcaggggaattaccaacatatgtttttcctttagcaaacattaaccagggcaaaaccacaaaccgggaacagggaaaaggacatttttgggaaagacttgcgccggaaaatttaaacaattgtttctttcaaatttaaggtattcgcacaaacaaatttgagcctggccangaaactttcttctagattcgctgaggtttttacataaaagaaactttaccatggaggtgtttaaaagccaacacaggtttttttgaccaaacccaactgacttatttaggcttacttttttctcaaacacaagggtttcctcctttgcaaccagtattcagattgccagaggccacctttatttgggggggaagccatccactgggaagggaggggtgacttacattgcctgggggctttacatttggattaag

SEQ ID NO: 704113 - DNA, 105 bp, Homo sapiens
tgtcgtacacctagttccacaatactgttttcgcatacggggctatcacccactatggccggactttccattccgctttgctaacaatactgctaaagagtacaa

SEQ ID NO: 704114 - DNA, 530 bp, Homo sapiens
cacatggtgtcagatgtatatgagcagctgtcctctgaagtccctggagtctgcccgaatttgtgccaataagtacatggtacaaacgatcgtggcaaaggatggcttccatatccggtattcggtctccaccccttccacgtcatccgcatcaaccaagtactgttgtcctgtgctggggctgaccaggtctccaaacaggcatgcgaggtgcctttggacaagccccagggcactgtggccagggttcacatttggccaagttatcatgtccatccgcaccaagctgcagcacaaggagcatgtgaatggaggccctgcgcagtggccaagttcatagtttcctggccgcccagtaagatccacatcctcaatagaatgtggggcttcaccaagttcaatgctgatgaatttgcagacatggtggctgtaaaagcggctcatcccagatgatctgtgggctcaagtacatccccagtcgtggccctctgtacaagtggcgggacctacactcatgaggcttcctagtt

SEQ ID NO: 704115 - DNA, 262 bp, Homo sapiens
cgtcagattaagcttggtgagacatatccaagttcacatttttctctaagtgctttcccatcatcatactggtccagccctatcctcagatttagctatagaatacttctttatggggctggtcacagtggctcatgcctgtattctcagcactttgggaggtcaagaaggaatgatctgcttgagtcaggagttcgagaccatgcctgggtagcatgatgagagcccatctctactattattcgaagacagataaaatcca

SEQ ID NO: 704116 - DNA, 996 bp, Homo sapiens
  misc_feature (44)..(44): n is a, c, g, or t
  misc_feature (63)..(63): n is a, c, g, or t
  misc_feature (95)..(96): n is a, c, g, or t
  misc_feature (99)..(99): n is a, c, g, or t
  misc_feature (108)..(108): n is a, c, g, or t
  misc_feature (118)..(118): n is a, c, g, or t
  misc_feature (178)..(178): n is a, c, g, or t
  misc_feature (208)..(208): n is a, c, g, or t
  misc_feature (212)..(212): n is a, c, g, or t
  misc_feature (219)..(219): n is a, c, g, or t
  misc_feature (243)..(243): n is a, c, g, or t
  misc_feature (250)..(250): n is a, c, g, or t
  misc_feature (288)..(288): n is a, c, g, or t
  misc_feature (292)..(292): n is a, c, g, or t
  misc_feature (296)..(296): n is a, c, g, or t
  misc_feature (299)..(299): n is a, c, g, or t
  misc_feature (303)..(303): n is a, c, g, or t
  misc_feature (307)..(307): n is a, c, g, or t
  misc_feature (311)..(311): n is a, c, g, or t
  misc_feature (314)..(314): n is a, c, g, or t
  misc_feature (316)..(316): n is a, c, g, or t
  misc_feature (321)..(321): n is a, c, g, or t
  misc_feature (330)..(330): n is a, c, g, or t
  misc_feature (355)..(355): n is a, c, g, or t
  misc_feature (365)..(365): n is a, c, g, or t
  misc_feature (370)..(370): n is a, c, g, or t
  misc_feature (377)..(377): n is a, c, g, or t
  misc_feature (383)..(383): n is a, c, g, or t
  misc_feature (387)..(388): n is a, c, g, or t
  misc_feature (390)..(390): n is a, c, g, or t
  misc_feature (395)..(398): n is a, c, g, or t
  misc_feature (405)..(405): n is a, c, g, or t
  misc_feature (409)..(409): n is a, c, g, or t
  misc_feature (416)..(416): n is a, c, g, or t
  misc_feature (430)..(430): n is a, c, g, or t
  misc_feature (476)..(476): n is a, c, g, or t
  misc_feature (488)..(488): n is a, c, g, or t
  misc_feature (492)..(492): n is a, c, g, or t
  misc_feature (495)..(495): n is a, c, g, or t
  misc_feature (509)..(509): n is a, c, g, or t
  misc_feature (527)..(527): n is a, c, g, or t
  misc_feature (534)..(534): n is a, c, g, or t
  misc_feature (539)..(539): n is a, c, g, or t
  misc_feature (546)..(546): n is a, c, g, or t
  misc_feature (551)..(551): n is a, c, g, or t
  misc_feature (559)..(559): n is a, c, g, or t
  misc_feature (563)..(563): n is a, c, g, or t
  misc_feature (574)..(574): n is a, c, g, or t
  misc_feature (587)..(587): n is a, c, g, or t
  misc_feature (591)..(591): n is a, c, g, or t
  misc_feature (595)..(595): n is a, c, g, or t
  misc_feature (606)..(606): n is a, c, g, or t
  misc_feature (608)..(608): n is a, c, g, or t
  misc_feature (643)..(643): n is a, c, g, or t
  misc_feature (654)..(654): n is a, c, g, or t
  misc_feature (674)..(674): n is a, c, g, or t
  misc_feature (684)..(684): n is a, c, g, or t
  misc_feature (713)..(713): n is a, c, g, or t
  misc_feature (761)..(761): n is a, c, g, or t
  misc_feature (852)..(852): n is a, c, g, or t
  misc_feature (861)..(861): n is a, c, g, or t
  misc_feature (945)..(945): n is a, c, g, or t
acctttaaaaaagtaacaaaaaacaacaccacaaatggaaacanggttggaagtaaacacagngggccaacagggagagctgtcacagtgtcttnnggnctgggaatntgggcatggnggccaaaggcttgaggagagatctttaggtttaaggcaaagggtacagcctataaaaggnacaaccaccagttatccctagaagaatctntttnttatttnttccttgggggttatagattaagngcgtctncccactctcaatcccacacctgtgactcagagtgattngggnagcngcnaganggangggntgngnggggngagattggnggggggagagacagcgaccatcttngccctcaggntctgnagaaggncagggncagnngngaggnnnngcctggnagangtatgtnctgcagtaataggnatctcttccacagagggagcagagaagtggtttagtgccatggatngggggggaaganaggngcncttggccagaaggngactgggttccttaggcnttaagcncaggngtttttntattntgtgtgcnaggncaaaaataganttgggggaaaatnaggnagtnacatctaagananttgtagcaggggagaggtggagaagagcaattgcnaagggcagggnagagtgtttgctggataatntttgcgtttnaagagatgcattggtccacagcaactggnaaaggggtgtagcaagaagaatggaaagaagagaagcaaggccctctnattccacttacctcaaaagactgagccctgaggactatgtgaatacacacccctaaaggcaaaggctctcactccaccatccctttctcanaaaagcatntggtgtgccatctctccccacagtagggtattggccctcagcagagaacagaagcccatcatagtacaggtattgatggatgcncagactcctaaaaactaagtcaaagagaagggctcctacccacctactctg

SEQ ID NO: 704117 - DNA, 720 bp, Homo sapiens
gaacagtatggttttcttgtatccatgaattatatcagtatgactaaaacatcgcttcagaaagaagaacggtttatttctgctaggcttcctgtccgtttgtggtatggttctgtggcctatattctatcacgtggactgtttcctttctccaaactttgaggcgtgattttcattcattgaagaatcaactacatagtatcgtgtctcaaaaggtttgaaagcaaagagacatagatggtagactctttattgaaaacatatatggatgtggaaagcactatatattaatgcagtcatccctgtttcaggtgggacagtagagcaataccagtatgacttttttaagttcatccttagtacacagagaatatactatttccgtcagagtaatatacctgtttgaagctttaaggagcagatgtgtcggtaacgtagtttcatttgtcccatagcaaggtttgctatgtctgtgtgttaattgtgttatacctgcattgttctttgtcctggaggttcatgttgtcgcagtctagactggggtggtagcaggtttgaaccaggggcggagggtattctggaagtgatgcgatagtcttacagactcgattcactatggccaagtgtggctaaccttgaatcgtaccaataattggtataaaatatccagtttccaaccactttttactaataactctctaatttcccaatgaaagagtg

SEQ ID NO: 704118 - DNA, 3861 bp, Homo sapiens
aaagagttcgaatattaaacaagtacagaagaaaagggaggcctagggggcaaacgactctcttaatcttccaccgctacacactacatattctgcatttattcagctacttccagttcttgtgattgtgattatatctgtcattactcagctgctggctactaatcccccatatagtctgttctataaatcgaccttgggctacaccatttctagagaaactcagaacctgcaggtgccttactttgtggataaaaactttgacaaggcctacagaggagcttctctgcatgacttggagaaaacaatagagaaggattacattgattatatccagactagttgttggaaggagaaacaacaaaagtcagagctgacaaatttggcaggattatacagagatgaacgattgaaacagaaagcagagtcgctgaaacttgaaaactgtgagaaactttccaaactcattggcctacgcagaggtggctgagaggataatggtcctacgcagggctggggttttgctacttgttcctatttatgttcctgattccattttataatacaaaactaggtaatgatgaacactttactatttgctaacttcgttggttgggcagagtggcaggagcatgggcacgagagccagatgtgtcttcacaggatccttcctggggagtggctccagggaccaggagtagttcatctaagttaaattaatggcaaggcattggattccgtctccctgctccatgcctaccctgcctatgtgaatggagttcagggcatcccagagcagatccatgctttcttccttcttcccttcttcagtgaagtcttaagaaccaggcattcctaggcttagccaaagcttaatattagttatttacactgtctaccaagaattatacctctcccttcattagagtcatcatctccgccaagatttagcctttggaacatgttcctgcccagctttccattttctaggggaatatggagaaatttaaactattgtagtcaatagttttctattattccaatctctgctcagttagtagcattagcaaactgcctaatttgagattcctttatttccttaaccctctctcctttagagagtccagaaattaaaactactgagcagcatctggaggcgggggccagggcgaaggtataatgcaagaccgagcctcatctcctccacgaagcctccctactccatcatagaacccagagaatgtcccttcggtcatttcccctcagtatcatcattggtgtcatcgcacttaggctgagttcctacatcccacagaggcagatggtcagacccaggaggaggcattgccagctctccaggctgtttgctcaagcctagagatagaggagacagatcctctctccttggatatgggggtctagctttggccccagcagccactttgtttaacccagtatcctatagtttgtgatttgagatgatttttcattcattcaacatttattgagtgcctactataaaagcaggggctctcacacatattttcttacttaaacctcctcacaactctgaagtagatgtattatccctggttctatgaatgagaacattggcccagagaggatgacccaggtcttgtagtggcagagcaagacggtaggctgagtgtcaagtagaaagtggagagcatcctcatgtctcaggtgattctagccagactggcaaagcagaacctttcccgaggatgcctccgtcctccccaaccccatgacccctcatcttttctgtggcaatcttgcatctgttcaggacaacatccctgctgctctttaggaagcaggaccctgtctaacataaattctgtacacaaaataagaggtccctcacaggcaggcagccctccactggtgactaggaagaattcagtcactgcctgggctgtgtggttctgggccttcctgtggagctgagctgcctgaattatcatgactctgaacttggaaggatcattaagtgactgtagcctacactccatgcttccttcatattggaagaaaagtttctggtagagagtcggccgggtgcactggctcaagcctgtaatcccagcactttgggaggctgtggcaggtggatcacctgaggtcaggagttcaagaccagcctggccaacacagtgaaaccccatctctactaataatacaaaaattagccaggtgtggtggcacatgcctgtagtcccagctactcgggaggctgaggcatgagaatcgctgcaacttgcaaggtggaggttacagtgagctgaaatcacgccactgcactccactccatctcaaaaaaaaaaagagtctacattaaacagattccaaagtaaagtttcttcatcccaatgcatggccatgatttacacagacgtgcctagcatggctcatcaacatctgaacggttgttccctaccatgcctctgcaggcattccacagagtcaggagatgggttcacaggtaaagattgggggctttagtggcttgtaggggacaactgctcagttgcagggagagggagcatttctagaaatagccagattttgctgcccaactagatctgtcctcctggttttagggggcccttcttgatcccctctgagtgactgagggaggttacattgtaaaatatgtccatgagccaaacaggcttatggaaagttcttctacacacaaaaaaatcaaagctctcctctccccatccccaaccactgctagaaaattggccataatgaaactgacttgacaggttaaaagaccctgtcctagatgcccaggaatcaggtagtcacacattttatggacttcatggcagcgatgagtaatctgtgatgatactaaatagaagcaataataactaactccattaaatgtcacgctgattgtctgtttttatagcaccgatggtactgttttatttattgccaatagaccacaacattcacatctgtttttcctcaagggaaccgtatttgcttttggttgaaggatttatctatttgatactatccagaatattgtgaagctataatttcctgggttatattttagatgggttgtctgcatggtggtaaaataagctttttcctctcgcctacgtcctttggaagatctcctgatcatacataactaggtagggcttattcttgctgccggagcttggcacccagctctagactgtttctttgagcattactgcagattggagacgtgtgtgagaggagcagcgctcagaaatagggcttgaggctcaagcagaaactgaagctctcattcaaatgaagatgctctctctaccgcacgatcggcagtgagaaaaggaggatgaaaatccttctcatcacaaagagcttgaaggaacccacgtccccagattagcaaccctagagttcatctgctcaggccgggaaatgtgtaagcttccttgatcagctccaggcctcacagcacgggagcagtgaccagtaaggaaacgtcactgctgtgctttctgttggaaattgttcgaaaatacagtgaactggccaggcccagtagctcatgcctgtaatcccagcactttgaaaggctgaggcaggcagatcatttgaggtcaggagttccagaccagcctggccaacatggtgaaaccctgtctgtactaaaaatacaaaaattaggcgggcatggtagcacgtgtctgtaatcccagctcctcaggaggctgaggcagaagaatctcttgagcctgggaggcagaggttgcagtaagctgagatcacatcattgcactccagcctgggtgacagagcaagactctgtctcaaaaaaaaaaa

SEQ ID NO: 704119 - DNA, 476 bp, Homo sapiens
  misc_feature (220)..(220): n is a, c, g, or t
  misc_feature (451)..(451): n is a, c, g, or t
  misc_feature (464)..(464): n is a, c, g, or t
ttggctcactgcaacatctgcctcctgggttcaagcaattctgcctcagtctcacaagtagctgggattacaggcgggtgccactacacccagctaatttttctatttttagtagagatggggtttcaccatgttggccaggttggtcttgaactcccgacctcaggtgatctgcccgccttggcctcccaaagtgttgggattacaggcgtgacagctngtgcccacccgaattatatttttcgaagcggagtcttgctttgttggccagggtggtctccaacctgggctcaagcaatccccctgccttggcttccctgaagtgttgggattaccagcctgatcttaccatgcccagctgattttatttgttggagcttgagataaaatttggggttcatgtgttatggaaaagctttctgattaagattgagaattattactgtttagnatatcttacaaanattttgtttgtg

SEQ ID NO: 704120 - DNA, 840 bp, Homo sapiens
ccgcgcaccctctctgggctccacccaggctgagagctggggtcgtggcggcgggggtggagagcgcgcccctagagatacacttcgagtggattctggccatttgagcattctctccaactctccaatccccagtctgcccccacgggggtctcccccactctcccccgtcccacagcctagaccactctatcgcccgtgacagcgtccctgttgcctcactgcggcgaaatgggcacagggccccgcgtcagacgtcccaggagcaccagagctggcccgtgagcgcaagccctgagcccagcaggaccgtggggacacgggtgactcaggagcgtgacgtcaggaaggcatcagggtcctgcgtggcaatcctgcggcaggctgagacgggtgagtcagagcgtgggatgggagactccccaggcagaggggacacccgagaggaggcacaaggacccagcctggccgggctaggaagtatgaatggagaccagaaggccccagaccagcatgggcagactcggccagagagaagatctccaagatgaggacaggaactcagcattcagactggaaggtccaggcacaacagaccgtgcctgacaagcgggcagggtcacggacaaggtgatcctgtgcttggcaaaggaagaagatacatagacaaatgtacatccgaacgggcaacgtacaagatgctaatcgtgtcctgccgactgaaccctgtacctgagcagttccacccgagttggtccaagctgtctatcctcatcatcatgcatcctgacaaagcattccgcgaatctgcacgctgccgggttctcgatcaggaaccat

SEQ ID NO: 704121 - DNA, 152 bp, Homo sapiens
gtctgtgggcccagtcattgggtttatcagtgctaatgtgaactaagttaatacttccacgaatacaagccactaccttctgacctccccaccccacaccaaccgacatctattaatatgactgtagggcatggaactcggatgaccgctgt

SEQ ID NO: 704122 - DNA, 718 bp, Homo sapiens
  misc_feature (85)..(85): n is a, c, g, or t
  misc_feature (139)..(139): n is a, c, g, or t
  misc_feature (159)..(159): n is a, c, g, or t
  misc_feature (172)..(172): n is a, c, g, or t
  misc_feature (177)..(178): n is a, c, g, or t
  misc_feature (187)..(187): n is a, c, g, or t
  misc_feature (195)..(195): n is a, c, g, or t
  misc_feature (197)..(197): n is a, c, g, or t
  misc_feature (213)..(213): n is a, c, g, or t
  misc_feature (216)..(216): n is a, c, g, or t
  misc_feature (233)..(233): n is a, c, g, or t
  misc_feature (236)..(236): n is a, c, g, or t
  misc_feature (274)..(274): n is a, c, g, or t
  misc_feature (276)..(276): n is a, c, g, or t
  misc_feature (283)..(283): n is a, c, g, or t
  misc_feature (285)..(285): n is a, c, g, or t
  misc_feature (287)..(288): n is a, c, g, or t
  misc_feature (292)..(292): n is a, c, g, or t
  misc_feature (303)..(303): n is a, c, g, or t
  misc_feature (310)..(310): n is a, c, g, or t
  misc_feature (316)..(316): n is a, c, g, or t
  misc_feature (400)..(400): n is a, c, g, or t
tgatgacttagggaaagatgagttagtgagagttcaccaagagatggctccagaccattttcttttcttgggagccagtggattnttccagcagtgaagggacattctctacactcagatgactctaccagtggccttntaaccaagaagtagtactgnatgggtcatttgnaaaannctgcagcangtgaactntntgcatctcaagaaaanatngaaaaattctatgaatngtngtagccggtgaatgagtcgtattctgtcacataatatntngaagaanancnnggcngtcgaaacatntttctcnctgacngctgcattgagatgttcgtgtggagggctggtgttcgttatgtagtggagttgtttgtatgtaatggttggatcccttcatttngaatattacatggcttctattcgcgattacaagagataaatgatttgtgggacgaatgccggtataacactgtgagtgaaggttagtattccacattcataagatgtcagagtgagtgtgtaagcgagtagaaatcgaagtattgttcgaatcgtgcatacgagcagatgttctttccatcctcgcagcgaaagcttgtattgtaagaccgaaagaaacgaatgaccctcgttttgcttgtaggatgggtgccacctaatgcccatcgagaagcaggagattttctaccattggaaaacgcggggctcaagtggagaa

SEQ ID NO: 704123 - DNA, 448 bp, Homo sapiens
  misc_feature (383)..(383): n is a, c, g, or t
ccgcatcttcttgtgcagtgccagcctcgtcccgtagacaaaatggtgaaggtcggtgtgaacggatttggccgtattgggcgcctggtcaccagggctgccatttgcagtggcaaagtggagattgttgccatcaacgaccccttcattgacctcaactacatggtctacatgttccagtatgactccactcacggcaaattcaacggcacagtcaaggccgagaatgggaagcttgtcatcaacgggaagccatcaccatcttccaggagcgagaccccactaacatcaaatggggtgaaggccggtgctgagtatgtcgtggagtctactggtgtcttcaccaccatggagaaagccggggcccacttgaaaggttgaancaaaaaggtcatcatctccgccccttctgccgatgcccccatggtttgtgattggttttaaccac

SEQ ID NO: 704124 - DNA, 164 bp, Homo sapiens
gtgagctatcagcattggtgaggattgtgccagaatggctgagtaggatattttttttgagagtacccagttattctactgtgcttatgctactgttcttatgtgaatgttgtacatttaaaatgtttgcatagcttttaggacttggtgtaaaggggcaagtg

SEQ ID NO: 704125 - DNA, 418 bp, Homo sapiens
cgccttacccttactgcgaacatcacttagtatctaccaaccacctgccaagcattgttcacatataaaagttgacttaaaaagacaaagaatcgaccgggcgcaggggctcatgcctgtaatcccagcactttggaaggccgaggcagacggatcatttgaggtcaagagttcaagatgagcctggctaacatggtgaaactccgtctctactaaaactacaaaagttagctgagtatggtggtgcactcctgtagtcccagctacttgggaggctgaggcaggagaattgcttgaacccaggaggtggaggttgcagtgagctgagattgtgccactgcactccagcctggtgacagagcatgactccgtctcaaaaaataaaaatagaaaataaagacctcttatttatggtgct

SEQ ID NO: 704126 - DNA, 782 bp, Homo sapiens
gctctgaaggataggcaacagaaaggctagggcagcaaacctttaatgcactacctccgacatatccttcgtcttctggcagagtttggtgaggtcctcatgattggtattgctaccctgagtggcacaacatacgggtacactgtgggccagtctgagactgatctaaagtaggactgtcagttagtgctagcgttttggttcatggaccagctggtccacagatacccagaatgcagaagacgatggacacgcacctgcgcttgtgcccggctggttcactcgacaagcctggctgcatgcaagggtagttggcacagatgcccagtgttggaccactagttggaattggaaggtacaaatgcagctcacttgtgactgggcaaccatggatattggctagagagtacatgagaaacgatgccaggctgtcaagtgcaagatgatgtgtattctagtctagatactcatcaatggtagtcctgctcccatccaacctaccagtcgttctacaagaaagtgctcaacgagcggaagacctcaagcaccatatggcagtgaatcgagacgagtcgaatttcgtgattctctcttgaaagacaaggcggacgtggttgaatggcactggcccacgaggtaccatcataaggcttaacgtaccttgtctcaaggtcctcataccatggggcctcaattcacgagtcagaatgctggatcatagagcgcctttgggaagcactattgccacggggaattgttggagcaccaagtgagaaccgagt

SEQ ID NO: 704127 - DNA, 860 bp, Homo sapiens
cctaccccttccttgtactatccctatgatgcataattataacaagctccatctgcctgcgataaacagacctaaaatcgcacattgcatactcttcaaacacccacatacccctcgtagtaacagccatgctcatccaagaccccctgaagcttcaccggcgcagttcattctcatagaatcgcgccagcgggagcttgagcatcctcagtatagctatgtctgccctagcagaaccgtcacaagctagcgagacgcacgtcacagatcgcatcataatcctctctcaaggacttcaaactctacctcccactaatagcttattttgatagacttctatgcaagcctccgctatacctctgtccttacccactccactattaaccttactgggaaaactactgctgtcgctagtaaccacgtatcttctgatcaaatatcactctcctacttcacagggacgtcgaatcatactagatcaccagaccctgagtatctcccgtactacaatattatacgcacaatcgacaatggggtctcactcataccacgcactagttgagacgaacataaaacgcctctatgtcacacgagaaaacaccctcatgttgcatacgactcttaatccacctcaattctcactcacttattcccgtcacaaccccccggcaaaattcgatttgaacccgggggtttgtaccccctctttttaaaatgagacacaagcctgtttctccccagaggtactaacacgggggagaaccagaattcttcctcataaagggcccttaggttcctagaacagaaacacttggggccccaaacagtgaacaatgaagacacttgaaagatcgtgccta

SEQ ID NO: 704128 - DNA, 219 bp, Homo sapiens
gccagcaacaaccacggaaaccaagacgagcgcggtcgggaagttatcgcggctttacatatctcgcagccaggcgggtccctcgggagaggcgcgacagaggctctcgttcggcgccccccggagaaaagaagcagtcacgccatgatctacaccccggttgccgctttctcctctcctaaccgttaagtgcgctaagggccatggctgaggtgcacg

SEQ ID NO: 704129 - DNA, 264 bp, Homo sapiens
  misc_feature (10)..(10): n is a, c, g, or t
  misc_feature (51)..(51): n is a, c, g, or t
  misc_feature (177)..(178): n is a, c, g, or t
  misc_feature (209)..(209): n is a, c, g, or t
tcccgggggntcagagtcgacatgctcatatgggagcttggtgctggtggncaccatcagttcctgcctaccatcgatatgcatgcattccttctctaagagagaaatttcctttccttgaagctgagctgggcttgcttgatctgagttggtgcaagtgatgtcctcggatttatnnaggctgtcgtaaggaagcctgtagcttctgncctgggactcttctgcctgagcacacaccaccactggatagactgctttgcgtca

SEQ ID NO: 704130 - DNA, 362 bp, Homo sapiens
tacttttttactaaatttcccatttttggcccaaaaaaattttatattgggctcttcctgaaaaaaaccattgttggggaaaaaaatctggggtgggagttattttttcacccatttgaccaagtcattcccctggggccctggccccctgtaaactggatgggaaaggaaaccattaaatattgtgtttaaagttttcctgggctataggaacagtatttgaattttatgcaaagggccaccccccctaaagattgttaccgttaaattaacccagtgattggatggggtttttagttgctggaaaaaaggagttccagtggcccatgcctaagccccctaattaattatatatttggtga

SEQ ID NO: 704131 - DNA, 313 bp, Homo sapiens
gctaattggatgtaaaatttggggtgattttttaaccctttccgggtaaagttttttaaatatacttttttttaaggttttttttccgcctttttggattttccacctttgcaagtggtttggggtttttaaattgcaaattttccttttttcctttccttggaaacccggtggacccctccccctttttttgggttttgtaatttgctttttacccggggttgaatttctttttttttttttccccttttttgggaaaaggcccccgtttttatttttttttttcccaaattaatccccccttttgtttcca

SEQ ID NO: 704132 - DNA, 235 bp, Homo sapiens
tctaagacccgttatgggtgccttccgaatgtgttggctctttgagctgatctcctgaatctccatcttctcctcatcgttcatggccggtttctatcaccttcattcctctgcaaggagcaatctcatcaggacggccgttcactcacacccctccatccacctctcatctatcttttctttcagatggagtctcgctctgtcatccaggctggagtgcagtgtcacgatctca

SEQ ID NO: 704133 - DNA, 943 bp, Homo sapiens
  misc_feature (568)..(568): n is a, c, g, or t
  misc_feature (943)..(943): n is a, c, g, or t
cggaggacaatgcccagcacagatctctcagccccagtgaatggtgaggccacatcacagaaggcgtgagagcgcagagtgacaacggaagcacgaggcagggtcgggactcggaggaggggccaagtgtgtgttgctccatcatgaaagtacctgcatcgaacgatgcgttacgtggtagtggtcccgcacctggaacatgagcctgagcgagacgacgctggcaggcagcgcgcatgagggcactggggggcgactcggtagggacccatggaatcgagcgacgagctgagcctgcggagcagccaagggcccaaacactcgcgcgcctcggaagctcaatgtgcttgcccacctcgtccttccgcctggactcttccaagtgaagaagcgataagctagtagggaacctgttggcgtgaaacagcttggtgtcctggtcaaggtaatttaggtaccctttgggggtttatgtaactgtgccttgcccctaaaacttttctctgtctcgaatgttgtcccatggcccgagagacaattggcaacagagtggaaacctttattaganagctgtggcattcttgttgaaactggaaaaatcacaagagaacttaacaccttgaccacagccaaaaaatagacgctggggggagcgtggcagggcgtaccccaaacgaagcttgtttgtgcgccctccgtgtggggaggggtcccgtcgcagaacttcctgatccaggtcctgttacacccacaaggggaaatcatcgcatgttggcatacgcacaacgttgtgggcggcgccgcacaactaaaatgcgagaagacgagtggcgacttggaagaatatattagaacagggcgacgcttatagggaaccatttttgtagaagcgtacaagattcaaatttatgggcattagacccgaatttggcgcgaagcgatn

SEQ ID NO: 704134 - DNA, 116 bp, Homo sapiens
tctgtcacagcaggctcctcctctacagtgcactatttccttagcaatcccgaagtctccatactaaactacccatctacactctagcagccctcagcgggatccatggctgcagt

SEQ ID NO: 704135 - DNA, 410 bp, Homo sapiens
gcagctggcagtgtaggagggaggtagtttgccacctcccggtacaccccggggacgtctgtgggagaggggagacctgctctgggcagcccgccaggcatagccagaccggccctgcccctccagcctgcagcccaggcccccgggacgccttcgcatcctcttgggagccatcctttgcgctgcgtctaggcccaagccaggcttgccgcccactcagacagcagtgtcctcaccaggcacatccggtcgggctagtctggggtctggtaattgtggccaggacaggtgggaggtcaccagcctcctgcggagcctcccagcccccaaccttaggctgtggcctgggatgttcacggctgggatgacaccaccctgctgggccacacgaagctgcgtataggatgcta

SEQ ID NO: 704136 - DNA, 1433 bp, Homo sapiens
atgaacacatacaagaaggcattcctggactgaattctctaccaaagctagaatggaatgcaaatgtaatgtaacgcttcttactttattagcacaattctaaatagctaaacagcttcattaatctatgcattccattcagccttttactatttagacatcgtctaaaacatgtaactacatactgtacagctacagtacttcccatttggactgcactgcgaaacagcaaatactacagtaattccggaacgacgcgtgcaactgcggacaacaaaacaatttatctaacctcctctccaatcaatgctaccagacaacctcaccctaccatcacaaacatatcctgttaaaatcaatccagcacacacaatcctacagcgcagcaatatttaattagccttctcatcttcgctacctaacacagcacaaacaacctgcacaacaattcaaaaacaccagttcccccaacgcggcaattaaccagcacagccatgacgtatcacccgtcacacactcagcattatatcggggacacttctatcatacactccttcagcggcttcatcgccctttacatactttgcaccaatatccttggccctggaatatataattaccgcaattcaacagaatgcgacgggaccaatatgcgcacgatacaaaacagacaatagatgaaatacccacatatactagtcccacccatatacttgttcataccacaccttatattcacaaccatccgatttcacacctcaactcacttggtcctcaccgctagcccccatatctaaagccaaatataacgtgacgtaacataacgacccccaacctcgctttcaactcatgctctaccttataaaacgtcaaccattatagaaaacaacacagcaaggaaattgagatacaaagaacgacagagacacccattacaatagtcgaaccaacgaagatgatatacacatacagaggtagcacaaactcacacgaccaacaaagatacatctacaaccacccggaatcaacgagcggaacctaacacaagtatagaccagtccaaagcagaaagaaccaatgaccgattcaaggccattgcaacttccactccactactacccaatcactcttgtcaaactcaacgaaaaatcactcgtcacctctttacttgcaacatcacaatcacccccccatcaatgattctgcaacaccacatatccagcaacacaacatctgaaaataataaagccaaacaatcaccacccactacatcaaataccacaaacatataatcacctacaacaaatcaacaacaaaacaaaacaaccaacatacaactcagcacaccccaagccaatcaaataaaaccaacaccatcacaccacacccaaacaacgcacaaacaatataaacaacacaagcaagaacaacca

SEQ ID NO: 704137 - DNA, 127 bp, Homo sapiens
taaggaagcatcctcctgcatgcagcagagcgttgatcgtctgctgggtaaacagcgtggaagatggacgcacccgcgtatgactacgacatcgagaaagagtccactcgtgcatcttgagtccgag

SEQ ID NO: 704138 - DNA, 269 bp, Homo sapiens
accattgttggccaggatggtcttgatctcttgatctcatgatccacccgtcttggcctgccaaagtgctgggattacaggcatgagccactgtgcccagcccttttttttattttttttcggacggaagtctatctctctcgcccagtatggagtttcatgacactattcttagcttattgaatcctccaccttctatgttcaagcatatttcctggctctcccctctgagttgtgggaattacaggttcccgtcaccatgcttctct

SEQ ID NO: 704139 - DNA, 813 bp, Homo sapiens
gtgctattgtactgatgccttggtgtttgtgaattctgtgcactgagttgtctgctggctgtggtttgtctactgctgtgctgctggctgtgactgtcgtgatgtgccatgctgtgtggatgctggatgctgtgtggcctgcctgggtgcctctccgagtggcctgcatgctgtgcatgcatgtatgtgtgccccccttgcccctgtgcctggctgtgacctgaatgaactgccatgtgcaatgtgtgtgtgcctgtgtgtgtgaccctgccccctgtgcctgtgcctgcagccatgaactccaactgtgtgatgaacctaccccctgcacatcatcctgcctgtgtgtacaatgtgatgtgtgactgacactgacctgcatacccaccctgaatggcatcaatgtgtctttcccaactgaggatgtgacctcacctgacctccagtgtcaccatctgatgtgtgccctgatgtggtgaccccatatgcttgtgatggtcttgttcctgcatgaaactcctgctgggtgaatgtgacttccctgcctccccacccaatgtggctacttcctgaccaagatcttccaccctgaacgttgtgcgccaatggcgagatctgcgtcaactgtgctcaatgagtggactggactggctgagctgggcatcctgacactgtactgctgaccatcaatgttgcctgctgatccaccctaatccccgagtcttgcactcaactgagtgagtgcttggcctgtctgctcttggtagaactacgatgagtattgcatgctcgtgcccgtctgtcacagagatc

SEQ ID NO: 704140 - DNA, 319 bp, Homo sapiens
  misc_feature (1)..(1): n is a, c, g, or t
  misc_feature (27)..(27): n is a, c, g, or t
  misc_feature (64)..(64): n is a, c, g, or t
nttactcagggatgtaaagatgtgggnccatgggtccccagaacaggatgcattctgctggggnctgggctctcaaagtggcactttgttgtagccacttaagacataagggtgtgtgtgggagccagcatgagcttctctcgagcaatgcggtcacagagtttccaggcagctccccatgttagtctcagagcctgcaggggttgagtcactaggattgcagaagtccatggtgggaatgtggtcagctgggggtctctcacttaccctttccctgcactgggagcctctctgggctcctggccaatcccagctgagc

SEQ ID NO: 704141 - DNA, 397 bp, Homo sapiens
tgttttaaaccaaggagaaggtagacggatacttgtgggtaaatggctaacggtccatattcacattagagacacagggtactctcggagcccaatatacagagaagggaggaaaaaagctagaatcctatgcactactacacgggggcctagcaccctccagctcccagcagagcgaagggagcaggtttttctttttccccacagagctcgggggtgtggatcccatacagttttggtccagacaggaggggataaaaatgaccttcgaacagaagaggggtagagactcttttcccatggtatccggctcagaggtatttccccccaaataaatggagacccagggagtagagaaaagagacctcaaaaacagggcgacgtgagcacaagaggg

SEQ ID NO: 704142 - DNA, 166 bp, Homo sapiens
gtgactggacttcggcggtaagacctcaggaggcctgggagctgagacgacctcaggtttgaggttaccggtctcgatcctgacgacgtgaccggccttgcaaacagtcactttggcgctcatggctgcggccagaattgatgcgctgccatccacccgaggacga

SEQ ID NO: 704143 - DNA, 469 bp, Homo sapiens
ctttattgtccaggctggagtgctttttcccctttttggaggaccccaggaataaaaagggggctttaaaaaaaaaaccccccggttttactttataaaacccttttcacaaatgaacccaaatttttccctttgaaaaaacggggggaaaccagtccctaaaaaagggcgtggggaacgggcttaatcccaaaggggggaaaaaggggggccaccctttgggggggtttatttttttgcccaagttggggcccccaattccccatcccaacatgtttttttcaatgtttgaaaacctaataaaagacaaattccccggtaaaacacaaattaaactgtttcacctgtttttgaaaaaaggttttgttggggtgtccacctaaaggctttggtgaaaagacccacaaaatctcgggaaattccccccggggggaagcatttggggggttttgaccaatgccaactttaa

SEQ ID NO: 704144 - DNA, 353 bp, Homo sapiens
tataatgtgacctgagtgtccaaaaaagcacaacaattaagacttggggcactttatgtagcagatatataaaaagcaaagcaggaataaagagcaaatgaatttaataatacggatataaggcagctttaaatctatccacaggaaaaggaaaaatttatataatctcctaaatataatagcaggtattatgaagagttaataatctcgtccattcggaatgaaaaaaactaactttaaataagttaattctatgctcctggaacgtcttaaaaaacagaaagggttatgattggctaggactacactttaccatatgagcagcgttacaggggataaaatagacctagtag

SEQ ID NO: 704145 - DNA, 449 bp, Homo sapiens
ggttagattggattagataaagtaattcagccacagaggagaaaagtacgtacataacaagaagggtatattatgagactgaagatcttctgctccttttccttccgtttcgtgcctctcaccttcctccatctctactctcccgagatagcctgtgtgaacggtgtaaacgagagagaatatctttcttaagattagagctaacccattaaggacttggctatgtctccaagtattgattgccccatcatctcaagtaggatattttaaagatttctactttaggtggaatatggaccaagtcactataagtaactataagataccagtactccatttttgaggcagcatgacttaaagacgggctgagacaatttacgggggaattcctgcttataaaaaaggtgagaaaaatttgagacattcaagagtaaatatggtttgtggac

SEQ ID NO: 704146 - DNA, 279 bp, Homo sapiens
tttcacctctccaaggcttaggttctttatctttaaaatgataatagcagtattttaaaaattaggtacaggatattgtgggagatcaagtcttgtaaaggattttagacaatacctctcaagttgtaagtgcttaacaatcgctactattgtttttgatagcttaatcactatctccattgttctttggatataaaaatgtttaaaaatgttatttaggcctggcacagtggctcacggctgtaatcccagcactttgggaggccgaggtgggcggat

SEQ ID NO: 704147 - DNA, 160 bp, Homo sapiens
tcccactggacgcctgaggctctccttaagctccttcttccattctgccattcctccctcccttccttttttaactgatttttattacggtgtggcccttattcagatggacattggttttcaaataacttacaataacacgttatgtgccatgttgcca

SEQ ID NO: 704148 - DNA, 226 bp, Homo sapiens
cacttaacccccaaaaccagcccccctttcaggggttcagggccagcctgaaatggccgttaaactcctacccacagttacagccccaagcctgcctcctccccccctgccagcctatgagtttccaaagggttggggcagttccatgaccccatgttccagctccccacacagcgctgggccaaaaaggcattggtgcgagggattgaataaagaaaccaattga

SEQ ID NO: 704149 - DNA, 908 bp, Homo sapiens
  misc_feature (487)..(487): n is a, c, g, or t
gaggaaaaccgtgtgctattagccatggtcaaccccacgcgtgtacttcgacattgccgtcgacggcgaggcccttgggccggcgtctcctcttgagctcgtttgctagacttaacaggtccctgtaggcacatggccagacaaatgtttctgtggctctagagcagctggagcagaataggcatattggtgtatacagtggttccgtgctattcacgatgaattagtgcgcagggttctattggtgtcatggggtgtgattgacgtgtccacatcgcccatcaatgcgccagctgcgtgggcgaggctctcattcgattactcggtggaagcaaaactttcgaaggacttagagaacatatcattaccttaaatgcattcacgggatccatgcgcaatcgttggtctcgatgggcgacaaatggctagagactgccgaactaccacatgttggtgtcccgaggcttgttttcattcctatgcatcnatgccgaatgtacatgacgtggggtataggattgagccaatgcaattgtgtgtggtatttgtgcaagagctgcacgcggacagtgcacttgaattaccttgtcggtgaaggcgcattggagtcgctcttgcgggtcccagagaattgggcaaagtaccaagtcaagaagagatacgacctattgcgtgatcgtcgtaggaccacatcgtcctgagatagagttgtagacgttgttgtattattcttaaaccacacaagatacatttccgttctagtagcatcagggaagagccaccccgtccacccccatattgctccgcaaggtatccctaggaaatctttgttgcgtctcgcttgcaggtaccgctttggggttccatggtttttccttgttccctccccatgcctagcttggattgaa

SEQ ID NO: 704150 - DNA, 298 bp, Homo sapiens
  misc_feature (235)..(235): n is a, c, g, or t
tctgattggtgggacttagcggtcaggagttcgagaccagcctcaacatggagaaaccccgtctctaccataaacacaaaattagctgagcgtggtggtgcatgcctgtaatcccagctactcgagaggccgaggaaggagaattgcttgaacctaggaggcagaggttgcagtgagccgagatcacaccattgcactctagcctgggcaacaaggagagaaactccgtcttaanaaaaaaagggagagaaaaagaaatggggggggggggcctcactaagttgccccgccaatcgaa

SEQ ID NO: 704151 - DNA, 307 bp, Homo sapiens
  misc_feature (11)..(11): n is a, c, g, or t
  misc_feature (186)..(186): n is a, c, g, or t
  misc_feature (209)..(209): n is a, c, g, or t
  misc_feature (249)..(249): n is a, c, g, or t
  misc_feature (262)..(262): n is a, c, g, or t
  misc_feature (277)..(277): n is a, c, g, or t
tgttttgaganagtctggctctgttccccccggctggattgcagtggcccgatctcaatctcggcctcccgggtcccaagtgatcctcctgcctcagcctctggagtaaatgggatcacaggtgctggccgtcacccccaggctaacttttgtatttttagtagagacagggtttccccatgttgnccaggctgatctcgaactcctgncctcaagccatccacccctttggcctctgaaagtgagccnctgtgcccggccnggatggggtttcttnaaaagctgtagattctagcctttaggactt

SEQ ID NO: 704152 - DNA, 357 bp, Homo sapiens
  misc_feature (29)..(29): n is a, c, g, or t
  misc_feature (31)..(31): n is a, c, g, or t
  misc_feature (46)..(46): n is a, c, g, or t
  misc_feature (117)..(119): n is a, c, g, or t
  misc_feature (138)..(138): n is a, c, g, or t
  misc_feature (167)..(167): n is a, c, g, or t
  misc_feature (172)..(172): n is a, c, g, or t
  misc_feature (183)..(187): n is a, c, g, or t
  misc_feature (190)..(190): n is a, c, g, or t
  misc_feature (197)..(197): n is a, c, g, or t
  misc_feature (223)..(223): n is a, c, g, or t
  misc_feature (230)..(230): n is a, c, g, or t
  misc_feature (234)..(235): n is a, c, g, or t
  misc_feature (237)..(237): n is a, c, g, or t
  misc_feature (242)..(242): n is a, c, g, or t
  misc_feature (246)..(246): n is a, c, g, or t
  misc_feature (248)..(248): n is a, c, g, or t
  misc_feature (284)..(284): n is a, c, g, or t
  misc_feature (292)..(292): n is a, c, g, or t
  misc_feature (318)..(319): n is a, c, g, or t
  misc_feature (321)..(321): n is a, c, g, or t
  misc_feature (350)..(351): n is a, c, g, or t
cagagatgttgtaagtattgcacttaatncncacctatttctcaanagtgttagtttttggctagcattttctttaccactatcttgttgatagctttttgttctctaaggttgaannntgacagtgcttatctcaangagattacccatctgcagaactaaggaangcaanttatgtatgannnnnggncttgaantcgtcattctcaacctttgaattaangcttagnctanngngtaanatancntgggaaggattttggttttgtgatatttctgtgaantaaggaanagatgttaaccattattttgtacaanngngatttgtatgtggttaattataaataaanntgtacc

SEQ ID NO: 704153 - DNA, 435 bp, Homo sapiens
atggattgtgaatcacttaagagtagaaaccttatctaattgtaggaatggggggcaatactttaatggatgatcatgccactacctaggtattatggtattgttatagtaccatatcagttaattcgacaccagtgaccattctggtttgaactgaacttcagttatctattctttaatgtacaagtgtacccaggtttaatactacagctgttataccttcaacatttcctttccaggccaggcatggtggctcatgcctgtaatctcaacatcttgggaggccaaggtgggcacacattatggagctccataggcagggtaggggccaggcatggtggctcatacctgtaatccttgcactagtggggagccaaggtgagaggatcgctcgaggccaggagctcaagaccagcctgggcacacattatggag

SEQ ID NO: 704154 - DNA, 165 bp, Homo sapiens
ctttatcatcacccttacttatgagtagtgggggcggtggtggtgatggtgatgatggtggctgcgatggtgatggtggtggtggtggggtgctggtgatggtggtggatagtggtgatggtggtagtggtgatggtgatgatggtgatggtagtaattgtgctg

SEQ ID NO: 704155 - DNA, 164 bp, Homo sapiens
gctgtacgcttgtaggacgaccctacacgatccccccccgaaacccagtgttgcctcaaccggccctcgcgcagcactgtggtctagagccgccccctcatcctcacactcaaactcagagcagatggctgcctcctcttgatgtcgtgaaaattccctgcctg

SEQ ID NO: 704156 - DNA, 89 bp, Homo sapiens
gatggacgatcttaccctggtttggatcacagtttttgttcttgacttttgaatgcttgtaattaaaaatatctatttttttcctctga

SEQ ID NO: 704157 - DNA, 481 bp, Homo sapiens
  misc_feature (85)..(85): n is a, c, g, or t
  misc_feature (373)..(373): n is a, c, g, or t
ccagtttgcttggacacatcagagccaacaatccccatggcaacccccaatatctgcctttttttcaaaagcttggagagtcatngacacccatcccctgtgacgggcccacggatggcggccccttccgctggcagccctccacaatgatgagcttctgctgaggagaggtcctggcaaagacgatctctgtgtggtaccgcaagatgtcatccagctcctcggaggtcatgtccttcaggtcactgccgtggaccacacaggccttggcatcttctggggttcacctggttcactggaatgttgaggcgggcagcaatgtcttccacagtctcattgccttctgagataatgcctacccccttggcaatgntttcgctgtgattggatggtctcctgtaaccatgatgaccttaatcccagcgctgcggcatttgcccacagcatcggggacagcagctcggggagggtcaatcatgga

SEQ ID NO: 704158 - DNA, 357 bp, Homo sapiens
  misc_feature (59)..(59): n is a, c, g, or t
  misc_feature (72)..(72): n is a, c, g, or t
  misc_feature (199)..(199): n is a, c, g, or t
  misc_feature (245)..(245): n is a, c, g, or t
atctatgtcttcaatttttagtcaaagtttataatcttcaataaacacatctctcaccncctcggctaaatntactcctaagtatttcctatgttattgtaaatgggattgttattcccatttctctttatgatagctcattattaatgtgtagaaatacaagtgatttctgtattttgatttcgtgacctacaaattngtttatcagctctaacagacttctgtggtggagctttcagggtttnctgcatattagatcgcgtcaccagcaaacagagatacttccacttctcttctcatatatgatgtctttagctcattctcggctaaaatgctctcgggtaggattccaagcgc

SEQ ID NO: 704159 - DNA, 95 bp, Homo sapiens
tcaagcttctaacgatgtacggggacatgatgtttacaaaatatctggtattttcgcctatatggccattaaaaaaactagatttgtggataaca

SEQ ID NO: 704160 - DNA, 420 bp, Homo sapiens
  misc_feature (1)..(1): n is a, c, g, or t
naaatccacagacccatcctggcgcctctgaaacaccagccagccgcccccctcggtgtccatgtcacaaaagtctggaagggccctgccctcaggtaggcacagatggtcacagccgctcaaggtggcgccctggctcaacagctcccgccagtttctggggccttcctggcaccgaaccaggttcactggatctcctggctcacccttggggcccttcttgcctggtggtccaggtggcccttgaggacctggggctcccttctccccaggacttcctgagagctccgggacaactgggcaggagcacactctttgctggcttccagttccctgggtcctggacatctggggtgttcctgggtcctcagacagacaggccccacaagcaggagaagccacagagagcacaggatccac

SEQ ID NO: 704161 - DNA, 293 bp, Homo sapiens
gtgaacacctgcaggcttgcccagtataccatagagcggtatttcaccttagtcaccagcatcgcagactacgagacagtgaaattacactatttaggtctatacagtcagagcttcggacgaatgttctgtatttcatttgggaaacctacgatgccttccactttcctggtggagttgtcctgggtatcattttggatctctctcgattcaatccctgcaagaacctgcattgaggacaacaaaggtaatgtagaagaagtcagtattactaatatcatcaacagctccat

SEQ ID NO: 704162 - DNA, 1775 bp, Homo sapiens
caagatgattcactctggctgcacttctcaatgcctggaaggattttttttaatcttccttttagatttcaatccagtcctagcacttgatctcattgggataatgagaaaagctagccattgaactacttggggcctttaacccaccaaggaagacaaagaaaaacaatgaaatcctttgagtacagtgcttgtccacttgtttacaatgtcctccttttaaaaaaaaaaaaatgagtttaaagattttgttcagagagtaaatatatatccatttaatgattacagtattattttaaaccttaagtagggttgccagcctggtttctgaaaaaccaaatatgccggacagggtgtggccacaccaagaagacgggaagacctggcttgtgaccctggcttcccatgtccttctggtctcacccgcgaagtgccctatcctggaagtatgaaatgttagccaattaataccaagacacctcatctgctccttccccagtggatggggttcttctgtaaaactgtttgcacatggccaggggagggaactaggacccttgtgtcctgtctgagccttatggaggcaggacggtgtcattggcggatgtgtcctgctccattgagatggatggcaaaccccatttttaagttatatttctttgatttttgttaatttagaggtgtaggttttgttttttttttttttgtttttttttaagagaaacatttataactggatagcattgcagtgaaagcagcttgggatgttggagctaatgccagctgtttatactgctctttcaagacagcctccctttattgaattggcattagggaataaacaagcctttaaacgtgataaaagatcaaaaacctggttagacatgccagcctttattgaattggcattagggaataaacaagcctttaaacgtgataaaagatcaaaaacctggttagacatgccagcctttgcaaggcaggttagtcaccaaagactaacctccaagtggctttatggacgctgcatatagagaaggcctaagtgtagcaaccatctgctcacagctgctattaaccctataatgactgaaatgacccctccactctatttttgtgttgttttgcacagactccggaaaagtgaaggctgccaatctgagtagtactcaaatgtgaggaactgctggtcttggattttttttccattaaattcagctgatcatattgatcagtagataaacgtaaatagcttcaaattttaaaagtggaattgcagtgttttttcactgtatcaaacaatgtcagtgctttatttaataattctcttctgtatcatggcatttgtctacttgcttattacattgtcaattatgcatttgtaattttacatgtaatatgcattatttgccagttttattatataggctatggacctcatgtgcatatagaaagacagaaatctagctctaccacaagttgcacaaatgttatctaagcattaagtaattgtagaacataggactgctaatctcagttcgctctgtgatgtcaagtgcagaatgtacaattaactggtgatttcctcatacttttgatactacttgtacctgtatgtcttttagaaagacattggtggagtctgtatcccttttgtatttttaatacaataattgtacatattggttatatttttgttgaagatggtagaaatgtactatgtttatgcttctacatccagtttgtacaagctggaaaataaataaatataacat

SEQ ID NO: 704163 - DNA, 110 bp, Homo sapiens
cctgcggaggctaagacgggaggatctcttgagcgcaagaggccaaggccgcagcgagccctgatcgtgccactggactccagcctgcgaaacaaagcaagatcctatct

SEQ ID NO: 704164 - DNA, 121 bp, Homo sapiens
tcacatgacatctgcctacgacaaacagacgtaaaatcgctcattgcatactcttctacatccaaatgatcacttggcttcgaaggcaagtgttgttggatgtgaagtgaagtatgtagta

SEQ ID NO: 704165 - DNA, 476 bp, Homo sapiens
gttacagaagaaaagggagaagggagaaaaaaatagagaaaagagggaattattttaataaaatttgaatttatgccatgtctttagcttgaaaaactattctgagattttttttgcaggcttttttttttaaaagctaaaattctaaatagaaaactcctccctatctgcagattaataattaaggataatttgtaacttttcacaaggaaactttagacctggcttggacctgtgtttaggacaagagagccgaggagggagagctgtgtttttcgctaatcatatatttagcgttgcgggggttggggggggcgtttaaaaatacttctgggataaaatatatttttctaagtaatttccaagcgcaggaaagccgcgccgagggcatcaggcctccgcgggtctcggcgagcgggccggaaagcctcggtccttttcgggaggagtggaaccgggtccacacgccgttttcg

SEQ ID NO: 704166 - DNA, 290 bp, Homo sapiens
tacacacatgtaattgctcctaccatgatctcatacttcctgccagcatctcatcactccttccaacagtctcatgccatcttccaacatctcatcactccttccaacatctcatgcctccttccaacatctcatcactccttccaacatctcatgccgccttccaacatctcattcctccttccaacatctcatcgctccttccaacatctcatgcctccttccaacatctcatccctccttccaacatctcatggcgttggcttgccatgattatgagatgtaggagg

SEQ ID NO: 704167 - DNA, 217 bp, Homo sapiens
  misc_feature (20)..(20): n is a, c, g, or t
  misc_feature (62)..(62): n is a, c, g, or t
  misc_feature (69)..(69): n is a, c, g, or t
  misc_feature (83)..(83): n is a, c, g, or t
  misc_feature (93)..(93): n is a, c, g, or t
aaatatgcaacaggggaaantacagtttttttagataccaagaagttgcctataatcaagangaaagtnaggaagttggaagntcagaacgantatgattcccgcagcctttggaaggttgtcactttcaacttaaaattcagagacattgatgcagcaactgaggcaaagcacaggcttgaggaaagacaaagagcagaagcccgagaaaggaagg

SEQ ID NO: 704168 - DNA, 213 bp, Homo sapiens
ttacatacattacttactaccacatattatcttatacccagagagagaaagggcggggaggagtccatcaacagaagatacagtctatagatctaagaagaaccatcttgattaactctgcttgatatacacctagtggtaagtgatgcagtaactcatcttactgtggggttgcgcactcacacaattcctgaaagccttccatacatgaag

SEQ ID NO: 704169 - DNA, 173 bp, Homo sapiens
gtgtccgaggctaggaaacagatctaggacctgttgaaattcgcatcctccacttctatcaaaataggagccacacaaagatctaaaaagagtgctgactgcccagatccagaacagaggtacttaacaccttagttttccagtttagttatcaaagcgtgagagcaccacca

SEQ ID NO: 704170 - DNA, 295 bp, Homo sapiens
agcttaccttagctcggtgtatgtgtggaatgtgacgatacattcccagaacagtagcagatagattatcgctccataggattggccctcagccaaattcggccagcattatattcactgtgggttggggagctaattttaagcatgttcaggcagctcccctccagtttcagtgcctgttaaaatttatcaaaaacacttcctaggggttttcttaagggataaaggccttttaaaagtacccttccccacatgtggtagaatgtgctcttctatattctcctctaagtgtttc

SEQ ID NO: 704171 - DNA, 958 bp, Homo sapiens
  misc_feature (822)..(822): n is a, c, g, or t
taggtctacaagacgctacttcccctatcatagaagagcttatcacctttcatgatcacgccctcataatcatttccttatctgcttcctagtcctgtatgcccttttcctaacacttcacaacagagaactaaggtaataacttaacatcgtcagacgcctcaggaaaatagaaaccgtctgaactatgcctgcccgccaatcatccttagtccttcatcgccctcccattcctgtactgcatccttttacataacaggacgaggtcagggatcccggcccttacatcaaatctagtgtgggcacccaagtggacttgtgcctctgagtagcaaccgatgtacgcgggcggaatcttctactaactacttaattaacttccccccaatttaatacccctagaaagcggggtgaccttgcgattccttgacagttagaccacccgagatagtaattcccggatggaagccccatttgtatcaataattggaattcacaaatagcgtctttgcacttgaatgaagctgacccaaaatcatggctaataacacgcgatggcactctcccgggaggttaaaccggaacattatcagcgcaaccagcaacggggctataactacggtaatgctctcgggagactcgggagcagaccacagtgcagggcaattggactacgaataagtgccgctaacaaatgtggaaagcgcgcccgtattgaccctaaggcacccggtctaagtcctgtagaggtaaaaaacagagacaaaacaacgtggggcgcggccccgaagtaacacacggggggccggccccaataagcancgcacggcacaagacgcgaagcgggcgccccacaaaccgggacacggcggacacaggacgggtgaacacagcgcacacgccagggagcgagagacggcgcgaaccaggggagaggcgcgcagcagcaaagcacaca

SEQ ID NO: 704172 - DNA, 838 bp, Homo sapiens
aactacttcggctaggtacgaggcctggttcgaatgcggcggtgaagacctgaacccaaggcgatgtggccgagctgcatgctgcgctggcggtcaatatcagcgcagcgcgtggtctgcaggacgtgctaaggaccagcctggccccaagtgtccaccatgaagatgctcgtttctggcgctggatcacatcaaacttactaaagacggtaatgtgctgcttcacggaatagtgcaaattcaactacccaacagttccttactagcagaggtatcaacagcccagtgatgatataatcgtggtgatggtacgacttctaatgtcctaatcattgggagagctgctgaaacaggcggatctctagatttctgaaggccttcatcctagaataatcacgtgaaggatttgaagcctgcaacagggaaaaggcccttcagtttttgtgaagaagtcaaagtaatgcagatgagatggtaccaggtgagagatcacttataggatgtgtcccagcaatcgatctcttcgtactaaagttcatgctgaacttgcgagatgtcttaacagaggcctgtaggtgtgactccattttggccattaataaagcaagatgaacctattgatctcttcatgattgagatcatggagaatgtacacgtaaatctgaaactgatacaagcttaatcagagggcttgtttcggaccacggagcaccggcatcctgatatccgaacaggggttgccggatgcctagatctcacttgtaacgtgtcattagacgtattggacacccgcagtgaactctggcgtttcacacagagtgtccaaagacagaaaacc

SEQ ID NO: 704173 - DNA, 308 bp, Homo sapiens
  misc_feature (41)..(41): n is a, c, g, or t
ggggagtccgggcaggggacttttgggggttggggccatgnttagctttttggccccccccccaaaaaaagtgggggtcaggttttttttgccccttcccagcacaagcagaaagactccagtgggtccattgtcccctcctgccctggggacctgcttgcctttttcaactgccccccctcccctggggtgggcccctcacccccagtggaaggggccgggatttgcccttcctcccctttcccctacctggacccctaacctggccttagactgagctttatttaaaaataaaatcgtggtggtga

SEQ ID NO: 704174 - DNA, 167 bp, Homo sapiens
caccgcactgcttggtgagtggcagagttttagtctcaaaaaaagaaaagacattatcatgttgagtcatcaaattcactgttactgaaattctttgctaaacctggaggcataacaaatttagtctttttgtcttagaccaaaacctgtaaggttctttggtaggt

SEQ ID NO: 704175 - DNA, 255 bp, Homo sapiens
atgaatccttctcttctcttctcttctttctcttctctctcttctttctttctttctttctttctttctttctttctttctttctttctttccttctctttctttctttcatttttttgagacagagtttcgctcttctcacccagtttggagtgcaatggtgcaatctcggctcgctgcagcctccaccttctgggttcgggcgattctcctgcctcagcctcctgagtagctgggaccggagatgcacacctt

SEQ ID NO: 704176 - DNA, 1199 bp, Homo sapiens
  misc_feature (961)..(961): n is a, c, g, or t
agcggagcgtggcccggggaggccgaggacggaggcggaggcccggacgccctgggtcggaagtcccttgttcccctaagctacgtgcgctcgcgcccggtcaggtcggcgacgccgctccgatggggagagggacaagacctgggccaagacaagagaagcgtgctgagctataaaagggcttacaccagcaagcgggaaccctttgctcgccctagtcgcagtgggtagctctgagcaaagctgcgctcgtgttatcagaccgaccaatcgacgcaccttccccgtccgcctctgttgtgccttgatgcacgatacctcgtggtgacgaatgtcgctgatatgcatgatctccgtgtgtccgtggtccggctgaaccgtgggctatcgtagggtttacgctcgaacgtcagggcctgtgttgcatggggctgggaccacggaggagcgaggaccgaccgtgcggacttcgctgtccgggggctaggacgattgtgccgggacccggacgacacatccttaccagtcggatgtgcagcgttggacacggaaaccgccggatgggatctgaaacgctaaggcttgtcatttctaaaggaatagggctgggaggagggtcgtctcgtaaacggcagttcagcagggcgtccgagtctaatccggtgggcggagtaccatcgtcttagagttggtggaacggacccttaggaggggaacggccagagagaaagaatgctgacgtggagccttgtaaacgccggagcaaaccccgggtgttttgttgcaagcgcaataaacctgtgctgggggagctcctacctccttaggggccctcttgggaaaacccggatttgttaggctttgatgtgctttttccttgttctctccctaattttcccgaggcaggccggaaccggaaacgggtttccccttgggcgagtgggttctaactctaagaagngtcttaacccggagggtgcctccagttgagcttgaccgaaggcaaaccgggatccggccctttggcaatgggggaacggttaatttccgggtttacaagggaactcttggaatggttggatgttggtttagagttgagaattttaacacatgggcttttgtggtcttccatcttggggatatataactttacaaggttgtgcaaagatggtgttgacattgttggctgtttgggaggg

SEQ ID NO: 704177 - DNA, 710 bp, Homo sapiens
  misc_feature (44)..(44): n is a, c, g, or t
  misc_feature (82)..(83): n is a, c, g, or t
  misc_feature (86)..(86): n is a, c, g, or t
  misc_feature (102)..(102): n is a, c, g, or t
  misc_feature (115)..(116): n is a, c, g, or t
  misc_feature (122)..(123): n is a, c, g, or t
  misc_feature (125)..(125): n is a, c, g, or t
  misc_feature (129)..(131): n is a, c, g, or t
  misc_feature (166)..(166): n is a, c, g, or t
  misc_feature (178)..(178): n is a, c, g, or t
  misc_feature (180)..(180): n is a, c, g, or t
  misc_feature (204)..(204): n is a, c, g, or t
  misc_feature (219)..(219): n is a, c, g, or t
  misc_feature (245)..(245): n is a, c, g, or t
  misc_feature (247)..(247): n is a, c, g, or t
  misc_feature (249)..(249): n is a, c, g, or t
  misc_feature (282)..(282): n is a, c, g, or t
  misc_feature (285)..(285): n is a, c, g, or t
  misc_feature (287)..(287): n is a, c, g, or t
  misc_feature (289)..(289): n is a, c, g, or t
  misc_feature (306)..(306): n is a, c, g, or t
  misc_feature (321)..(321): n is a, c, g, or t
  misc_feature (342)..(342): n is a, c, g, or t
  misc_feature (354)..(354): n is a, c, g, or t
  misc_feature (362)..(362): n is a, c, g, or t
  misc_feature (364)..(364): n is a, c, g, or t
  misc_feature (368)..(368): n is a, c, g, or t
  misc_feature (400)..(400): n is a, c, g, or t
  misc_feature (406)..(406): n is a, c, g, or t
  misc_feature (408)..(408): n is a, c, g, or t
  misc_feature (411)..(411): n is a, c, g, or t
  misc_feature (423)..(423): n is a, c, g, or t
  misc_feature (446)..(446): n is a, c, g, or t
  misc_feature (474)..(474): n is a, c, g, or t
  misc_feature (549)..(550): n is a, c, g, or t
gaaaaaataaaaaatgaaaaaaaaaacctcccatcccccttagngccttctaaaccttccggcctgattttattcgacagcnnttntggccagggcaagganctgtggtgggggnngtttgnngnaggnnntcctttcccacagatgaggcctagggctgcaaaanggccccgtgaananaggagaaggtgacagggatccttntcctccccatatggngtgatgtggtcaaggctttatgggtntntncacctcaaagagaaagtgccctagggtagtgtnctntnangaggggccacgcctatntgcagagggcctctntgggaccaaagcagggcagtntccctcctcctnaaacccantntttntttttggtggtttattaactacagggtttgcncaagtncnagntacaataatttnacaataagatttttttgtaaaanaggtagaggtttgcaccacgagtttggnttcaggggaatctggtgagaaggtacgtgctgtggggcgatgggtgtgccacagcaagaccaggacagagttggnnttttcctccatcacgtggaaggcattcagcctaaactcctggtgagaggccagccagggttgagaaataaatagagggaccttagagccccggcagagctgagggaagagcagcaccagccctggacccccactctccctcctcagtccttcatggaagg

SEQ ID NO: 704178 - DNA, 412 bp, Homo sapiens
caccaaggaccagtttccatgtatttgtggggggaagtttcagtatgattcaagtgcattacatttattgtgtacttcatttctattgatatgaacattttaatatataatgaaatcattatacaactcaccataatgtagaatcagtgggagccctgagcttgttttcctgcaactagataatcccatctccgggtggtgggagacagtgacagatcatcaggcattggattctcataaggagcacacaacctagatcccttccacatgcagttcacaatagggttggtgctcctatgagaatctaatgccactgctgatctgacaggagacagagctcaggtggtaacgctagccatggggagcagctgtaaatacagatgaagcttcactcgctagcccactgctcacc

SEQ ID NO: 704179 - DNA, 225 bp, Homo sapiens
  misc_feature (82)..(82): n is a, c, g, or t
atttagtgataaagaagcatttaaaatcgcatgcagaaaacattgaaatactaagggacaagaaggaatttttcaacaaacnggaaaacacataaagctcttagatacaaaaattaacttcataagtgtaatagttatgtttgtttatctatattttaacatgatcccaagaaaaataccaagaggatttgtatactagataagctgattcaaaagtttgtagga

SEQ ID NO: 704180 - DNA, 204 bp, Homo sapiens
  misc_feature (55)..(55): n is a, c, g, or t
  misc_feature (107)..(107): n is a, c, g, or t
  misc_feature (137)..(137): n is a, c, g, or t
  misc_feature (160)..(160): n is a, c, g, or t
  misc_feature (174)..(174): n is a, c, g, or t
  misc_feature (190)..(190): n is a, c, g, or t
gaaacgggtggggggaaaaaaaaaaaaatgtggtgtgtccatacaatggactaanccatccaccaacataaaggaattactgatgcctactacagaatgataacccncagaaacattatgttaagtgaaaaaaaggnagataaaaaaattacatgtggantggccccatttatntgaaattcctagagtnccacctttcctaaa

SEQ ID NO: 704181 - DNA, 836 bp, Homo sapiens
  misc_feature (16)..(16): n is a, c, g, or t
  misc_feature (66)..(66): n is a, c, g, or t
  misc_feature (83)..(83): n is a, c, g, or t
  misc_feature (100)..(101): n is a, c, g, or t
  misc_feature (122)..(122): n is a, c, g, or t
  misc_feature (132)..(132): n is a, c, g, or t
  misc_feature (142)..(142): n is a, c, g, or t
  misc_feature (164)..(164): n is a, c, g, or t
  misc_feature (231)..(231): n is a, c, g, or t
  misc_feature (692)..(692): n is a, c, g, or t
  misc_feature (758)..(758): n is a, c, g, or t
  misc_feature (789)..(789): n is a, c, g, or t
  misc_feature (791)..(791): n is a, c, g, or t
  misc_feature (794)..(794): n is a, c, g, or t
  misc_feature (802)..(802): n is a, c, g, or t
tcaaactcttctcgtntctgagtatctagtctactgttggttgagcttcttggcagtacatcagtnccaactagaagtgggtnatagatagattaccagnnatgcagtggtgtttaggcagnataggtcttnactggccctnactgctgttaattattggcagnagtgctccccagatcccagaaggtccctgctggagtgtttccagtgcacctgtagggaaccaactanacttctctcctggttagtccagctctttactctaaaccctttctgtccaaaattagtcattttcagttgtaccttagatgtctggtgttgaggaacaagtgccatagcctttattcagggggcctataaacccttccagttcttgccccagggctggcctgtagcgcttcaaattcccaggtgtccctaatttgagaagtaaccttttggaatagcattagaccctggctgtcccctccccaccaaataaacatgatatttcattctctgtccaggagtcatgaaccccttcacctccaatgacctgatcatttagtttggtgggggtgggggtgggggtgggggtgggggtggaagcagccgcaggagcaagggcccctcccacatacacaggaggagtatttcatttctccttaatgaaggctctggccctaacccctcagcactgtctccagataggnacatgcacaaagcagttaattaggcagcctggagaaaaccagagatccagtacagaaaggaaaggntatttattgattaacagaagttgtctttttnanagngtttattnttggcaatcaacgaccacaacactaatctcacac

SEQ ID NO: 704182 - DNA, 216 bp, Homo sapiens
  misc_feature (202)..(202): n is a, c, g, or t
  misc_feature (211)..(211): n is a, c, g, or t
ctagaggatctccgtcgacggtaccaacacattggagacttgttagaagcttggcagcttgggttggcgcatcctccttggcggtgtctcggtacctgcaggcagagccggcttggggcccagcacctggagcatcgcctcgggctcaggggccttactcagacacgtgcactcgggcccggccactccgctcgttgccccnggatgcccnttgga

SEQ ID NO: 704183 - DNA, 1064 bp, Homo sapiens
tctttataaccctttaaagaactcacaatttattgggaaaaaacaaaaaacccacaacccaaagggagtgggatttcacatctcaagaaaatttctcccgagggtaatacgctcttccacgaatttacaaatctcatttccaataaaaaaatatttctggcgtccaaatctttacaccatgtgttattctcagggcagcgcggagacattctatatctccaactccgcgtgtgttctctatatttctctaacatgagggggggcacacacgcgtatagcggagacacgaggagaacacacaacacgtttgtggggcatcatatataacccatatattgtggcacacggcacagaacggtaacaaaccatgtgcaccacacaggcgcgcaaacaacccctctaagcccctctctaccatcatcatatctcctctaaccaatcctccacaataacgactgctgagggtattctccctctttctccttactaaaacaaaacacaaaaacacaacacacaacacacaaacaaaaacccacgaggcgcggcgcgccccgcccaccaacacacaagagacaccccccgcgccgagcgggggcgcccccccacaagacatcaaacagccggagaaatcacacacacaagacgcctcatcactgcgagacgacaacaaacgacgggcgcgacccccccacaaaaagaccagagagaacacacgcaaatacctataaatacacgcgacacacgacacccacacgtgcgccgcccgcagccagatcacacacacacaccacccgcggtgggccgcatacgaggggagaacacccgcgcgcgcggccccacccgggagggagaaaaacacactctgaggcacagaaaaacggagaagcacgcacccactcccaacccctccctagcgcggagaggggagagacggacgaccaccaacaacacaaacgaggggcgaaccaccacaaaccacacacaacaacgcaacaacagagagacacaataccatacaaacgcaccgccccaccactaacggggggcaaaccaaaacaaacaaa

SEQ ID NO: 704184 - DNA, 758 bp, Homo sapiens
ggacgcgtgggtcgacccacgcgtcggctctgctgtccttaagccctcgtgggttttttttttaagagagtctcgttctgtcacccaggctggagtgcagtggtgcggtcttggctcacttcaacctctgcctcccgggttcggacaattctcctgcctcggcctcctgagtagctgggattacaggcgcctgccaccatgccatggttggttattggtgttttggtggagatggggttttaccatgtggttggccaggctggtctcaaactcctgacctcaggtggtgatctgcccgcctcggctcccaaaatgctgggattgcaggcgttaaccaatatagttccgtctaagacgcctctgcttgtgttcgagaactcttgtcaagggctctgtctgaatgagttaccatctgattgtggggaccaagtccctgagtagagggccaagagctagggacagggggaagagactggcccaggtggtagggaggaaagaactcccagagtttcctttagccaggaaactgtctagtgaccccgtgacttggacagtcagacatcaccctgagagtgacaagtgtaaaagtgactcccttcctccccgccctcggaagtatataagatacttgaaagcagtccttgctaaaatgggcttacctatgttggctgaacgattagaagaaagaactcagaagtacaagggacaagaaaagagtcagggaatgaggctttcctgaatagactattaccactggg

SEQ ID NO: 704185 - DNA, 547 bp, Homo sapiens
tctggatgaagtgtctaagaaataggtacagactctgatacaagcatctataaaagattcctgcagccaagttggaaaaagaggatgccccatagcgaaggttcttctgtccaatctctacgaataatgatagcagaaatgaactatacccatgaacatcacataccattggttgtcagatttttgcaagcctaaagcagtctgcctaattgttaatcaagtagaaccttgcagtaaacagcacttgattgaatagatctggttacatggttcacatctgaaaatcagttgtggtccccatggaaagcctcatctgtctgcatacaggcatcatagtattacagtttgtggtgcatttgctcagctccacagcagtctagggaggtggcggtttgcagatgcctgggcagtaggtttcttacagaaacaacaactttcccaagctaaataacctactggtggcagtgctctagaaaggaccgcgagaaaaagaagtgctatggcatatctatcaagcaccgccttgagtgacacttagcatccagag

SEQ ID NO: 704186 - DNA, 154 bp, Homo sapiens
cttctgggacggtgactcagaatctttggttgaggcctttttttctttcttcttcttttcttttttttctttgtctttttttctcttgtcggatttcttcttctccttcttgatccacacacacacatccacacacacatacacagtatgcatg

SEQ ID NO: 704187 - DNA, 271 bp, Homo sapiens
  misc_feature (220)..(220): n is a, c, g, or t
ccccctggtcacgcctgtaatacccagcacttcaggaggccaaggcgcacggatcacctgaggtcaccagtgccccctctgttgtgatacctcaggatccgtggtactatttctataatgactgatcatttggtgtctgtattagtcaaggttctccggagaaacagaaccaataggatgtgtgtatacctctatcactatgtacacacagagaaagaanttgacgatgaggggacggaacgaaatttcctcctttccttttttttttttt

SEQ ID NO: 704188 - DNA, 380 bp, Homo sapiens
  misc_feature (360)..(360): n is a, c, g, or t
gaataactgaaatgagggtaagtgaagttaagacagtctaaggttcttggtgttttgttttgttttgttttttgagatggagttttgctcttgttgcccaggctggagtgcagtggcacgatcttggttcactgcaacctccacctcctgggttcaagcgattctcctgcctcagcctcccaagtagctgggactgcaggtgcatgccaccacgcccagctaatttttgtatttttagtagagacagggtttctccatgttaggctggtctcaaactcctgacctcacgtgatctgcctgcctcagccttccaaagtgctggcattacaggcatgaaccactgtgcctggcctcttatanatttttgagctctacagagc

SEQ ID NO: 704189 - DNA, 443 bp, Homo sapiens
  misc_feature (166)..(166): n is a, c, g, or t
acgacggtatcgacagggttgaagaagaccatgttccaatactggaggtctgacatgatcattccaagataccccggtcagtcgttcaactcaggcgtcctccggctgtacccgtatgtcatactagcagttccgtgtcattggcatccagcgaggttgggagcangacaacaccagcctcccgttccgaggctctaccgtaaccagtgtgtagcaccccccgagtccaactcctggtgacgtgaagggagaggggaccagaaagaacaacatggagatcacgtggacgcccatgaatgccacctcggcctttggccccaacctgcgctacattgtcaagtggaggcggagagagactcgagaggcctggaacaacgtcacagtgtggggctctcgctacgtggtggggcagaccccagtctacgtgccctatgagatccgag

SEQ ID NO: 704190 - DNA, 165 bp, Homo sapiens
aaggcttggcacagattagttgccggtcgctggaccgttgtgacaacagacggagggaaggcaacgctctggatgccgcgtccctcagagccaatccaggacgtctctaaacaagctcttcccctggggactttagacggagagttgtcaacgatggacacctgg

SEQ ID NO: 704191 - DNA, 1546 bp, Homo sapiens
  misc_feature (278)..(278): n is a, c, g, or t
  misc_feature (343)..(343): n is a, c, g, or t
  misc_feature (424)..(424): n is a, c, g, or t
  misc_feature (450)..(450): n is a, c, g, or t
  misc_feature (483)..(483): n is a, c, g, or t
  misc_feature (490)..(490): n is a, c, g, or t
  misc_feature (528)..(528): n is a, c, g, or t
  misc_feature (588)..(588): n is a, c, g, or t
  misc_feature (674)..(674): n is a, c, g, or t
  misc_feature (681)..(681): n is a, c, g, or t
  misc_feature (711)..(711): n is a, c, g, or t
  misc_feature (759)..(759): n is a, c, g, or t
  misc_feature (789)..(789): n is a, c, g, or t
  misc_feature (794)..(794): n is a, c, g, or t
  misc_feature (803)..(803): n is a, c, g, or t
  misc_feature (832)..(832): n is a, c, g, or t
  misc_feature (878)..(878): n is a, c, g, or t
  misc_feature (917)..(917): n is a, c, g, or t
  misc_feature (922)..(922): n is a, c, g, or t
  misc_feature (979)..(979): n is a, c, g, or t
  misc_feature (1021)..(1021): n is a, c, g, or t
  misc_feature (1026)..(1026): n is a, c, g, or t
  misc_feature (1058)..(1058): n is a, c, g, or t
  misc_feature (1089)..(1089): n is a, c, g, or t
  misc_feature (1113)..(1113): n is a, c, g, or t
  misc_feature (1152)..(1152): n is a, c, g, or t
  misc_feature (1202)..(1202): n is a, c, g, or t
  misc_feature (1254)..(1254): n is a, c, g, or t
  misc_feature (1426)..(1426): n is a, c, g, or t
  misc_feature (1546)..(1546): n is a, c, g, or t
agtctagttatgattactaaagatcaagccatgctatgtctaactatgcgactggctgagtaccttttgtaattgtgcgcgactgggcgtcatgccaatgttaatgtactaggttccattttggtattcagctcgtctccttactacttagtgtgtgacttaactcgatatgcgttgaagttaatacgaatgactgtaactaagggtagtcacggcagcgagagcggtcaatgcacgccacgcataatcggccagccgggtgcgcgaggaatggcggnatagctcactaggtgagtccaatgcattgctacgcaaaagctagatgtgtcaggtgcccgaagtnactcgcgttgcattcacagtgcccctcactgtgtcactgtgagcgtgatcccagtgagacggtctcatgagatagtgcctnttctaggtaggttggacctatcggtnatcgaatgtaaagtcccttcatgagtcgcgccnagcgatnctcgcaaagcttgctctacgcactcctgattggaggcncggcgaaggaacagggatcactccgaaatgtccgtggcatcaccttgtgatctccgcgcnccatataatacgaagatcattgtctacctcgccacttgggctcaatactactcgacacgtggtatgtgactataagttccgaaccnagtgttncgcactcagaacacgaggggtgtgcaccgngatgaatgtagacctttcatggtgggctcttcctagggcattgctccntagagaaaatgatcagggcgcataggcacngtagntacgaatanacaactcgtgagcttacttgcgaggtaanatacaccatgatggagtacaaccgtggcattacgttccatgagacntgtccagtcgtacaaacgtgttataggcctcagacggtntcacntcttgaactctctctggtgttagaacctgttggtacggattcgtccgctaacataanttagagtacccaccttactcgatacaagagagaagtcctccnttaangtaccggctaaagatccccggtagggtatacnttcttgcgttaactaagagcggattccaaancgggtgaaacaggaggtccctctnttatcattcgtgatgcaggaagtcactaacatattgcgnagggagaggcccagccgatccatgcggtttctcccacacagggaagagcncacgactagtggatgcacctataccctcatggacgtgttcccaaacagaatngtacggctagcaacgctcacaaaccagtagctaggtctgagcacgagaggacctacacaaagcagggccgcgagacacacctggtgtaatcaatatcggcggggacaagagcaagtgagcacggcggaaccacacgacacggcaaggggcggcgacatgcgacacaggaggngggcattctcatcggcgaagagagagcgttcttgagggcagagcaccccatgcagtagtgatgccacccacccacaagcaagtatatcacagggcgtgtgagcgcataccagcactcacn

SEQ ID NO: 704192 - DNA, 271 bp, Homo sapiens
gcattgcgcacgaggaaaatagtcggcagatttatagcgtcagaggggaacacctaccgacgctgccgacagcctcgcgttgtctaagatagaattttagctttaactccaacctttgcccaagaaaactctaacatcccttgtcaacttcaatgcttagtcaaagaggaacagctttttgagactaggaaccacctctctagagagagtaaaaacttccaaaccacctagtcaggctaaaagcagcaccaattaggacagcctcacgcta

SEQ ID NO: 704193 - DNA, 136 bp, Homo sapiens
gcaatggctctgttggaaaaactgcaatcagaaagaatgatttgagaaagaaagaaaaactatggtgtaatttaaactctgggcagctctgaatgaaatgctactttcttatagaaatataataggttgccttaag

SEQ ID NO: 704194 - DNA, 827 bp, Homo sapiens
  misc_feature (164)..(164): n is a, c, g, or t
  misc_feature (364)..(364): n is a, c, g, or t
gtctactttgctgacgactgactaatcacctagcagccgggagactgttatgaggagatgcagtctggacccgtggatgtctcaatgtggtcctgtggcgtgacctgtgtgggcgtgcctgcgattgctgatggggcccttcaggtacaggatcggccgggtangtggggcttcccaccacgagcactgggagcccagcgagggcccgttccctggtgggatgatggctgggatttgccggtggtgccctggtcctcgacgtagttagatagaggctccaactgcccaagttgtggattccaccgcgtccccggggggcacaacctggggagtagcagatcgttctgaagccaacttgtgtggnactaccctaaggtagcctttggagtcccacgggcctggcaactgtcactcgcggtacttggatgtggcatgtactcggtacagttagaaaaatccaatgtactgaaatgcaagtgatgggagactagactgcaggcgtgctagggggcccgagcgcgcctcgagaccacatgcaaatttgacggtgtgcactgtggcaggaccctcaaacaccgaataataacccaacgcaatctttttttgtcaagggcgatcatgaacccattgtggtgggggaagcgtggaagctcgctccaagggggcattgacccacgcgaggttgttggggtttattcccaaaaaggtcccatgaatctccctttctggggaggccccaatgagaacgtaggggctcccttgtcttgcgcccgcttctcaagggggggcaagggggccaaatgggctccccttgcttgcttgtaatc

SEQ ID NO: 704195 - DNA, 529 bp, Homo sapiens
ccggtgtcagagaggaagaagagacaaaaagaaacaaaacaaagagcacatgcaaacgacagaaagacagatgagatcagagagcagagacaaagacacacaatacgacaaacataccaaggaagacaaaagaatagtgaaagaaaaaagagaagaaaacacacaagacaacagcgaaacacaaagaacaaaaatgaaaagaaaagaaagcgcacaaaagacaaaaacacaaaaacaagaaccagaaacaccactgaaacagaagaaacaacaaaaaacaaaaacaaaccaaaaaaaagacacaaaagaaacacacacgatggacaccacacacaaaatacacggcaacagaacaacaagaaacaaaagaagaataacgcagaacaaaaaaaaagaagaacaaaagaaaacaaagaacgacaccacaaaaagaaaaagaaacacaaaaaaacacacaacaaacacaaactaacatgacaacactcaacaagaagaacacatcaccactggcgaagaaacaagacaagac

SEQ ID NO: 704196 - DNA, 125 bp, Homo sapiens
agtagtaaccgttccggctctattatcttcttacccttttctacaactttttcatctccatctgacatttgaggtcagttatttaccagttgccctattctacaaagtttaagccatagctatta

SEQ ID NO: 704197 - DNA, 408 bp, Homo sapiens
aatgatcttaaatgacgagtgaagatgatcatggggcatgtgccacagtaaagaactaaaatgaaatgaaaaagccatgactcctcacttaatgcgattaaaaaaaaatctgatgtggtaaattaacgccacatatcatagtgtaattgggtaatcaaagttcgggggaattcaggttctcatgggcaccctaatagtgtgtagggcagggggtcctgagaatgatggccgagtcgtagaagatgtgcatactgtgggctagtgatagggtaggagcccaaatcgtcacacatagtcggccctctctctctctctatctctctctctctctctctctctctctctatctctctctctctctctctctctatctactactctctctctctctctctactactactactc

SEQ ID NO: 704198 - DNA, 457 bp, Homo sapiens
ctcaggatggagtacagcggtcctatcatggctcattatagcctcaaactcccaggctacaagcaatcctaccatgtcagccttcccagtagctgggactacaggtaagcatcgtgacactcagtgaactttcgtttatattttgtagtagagatagggacctcagtatgttgccgcggctgaccttaaaactcatagcactcaagggatatttcctagccctaggactcccaaagtattggtattacaggcatgagccatagtgcccaccgtctctggttctataaccttctgacctccctctataccagttttaaagaatgcttgtaattacatgggctctcctagatactccaggataatcttgttttaaggtcagctgatgagcaacattaattttctctgcactcttaattcccccttcctatgtaattgtgctgtgtcacataggacatga

SEQ ID NO: 704199 - DNA, 836 bp, Homo sapiens
  misc_feature (707)..(707): n is a, c, g, or t
tgggtgccttaaccaagcgtcttttaattttctaaaatcggaaaaccccctgtcccacagttactgctgctgacccctttcaaggtgactcagtgaggagggagaaaagcggaagcggggtgggaagagtgcggggtctgggccagcttgcttgcctccgtgcttctcctctcccctccttcgtggccctcataggctttcccatggagttggtttttggagaccctgcgcacagtgtcgctcgtggaagcgctgtgcgaagggcaagggcgcgtctttggacaccttgcgccagtgtgctcgtgggggctgtgccaggacaagggggagctcctcgtgtcccccgtgcgcacaacacagacagataggcttggatccacccaggtggggcggctcgggttgccaggccagtgctatacttccgcctgtgttttgcagcccgaggccagctggtttgcaaggttgcaggactatgccctcaggggtcagggtgcacaacacccctgacatgtcatcggggcctccggggtagctcctggaagggcccaatatgtggcctgattggagctgccgaggcgtggaagcttctgggaacaagggaccccctccctagggggaggaaggtgctttggaacgctgtggccattgttcaggcggaccaaaaaaccgggccagggcaggagcaccccctataccgtgaacagganaagggccgccgacagagagtataaaaacgacgccactacacacagaggattttcagacacaaccgggttttgcccccgtggtgggggcgaggagaacaccccttaggaaaaccacgcagctacagaata

SEQ ID NO: 704200 - DNA, 536 bp, Homo sapiens
tacttttccgggggatatatgagtggctcttattggagcagggatgtgctctggaatattaagccacctctgatgacatgtgtcctggtgctctgtgatcaagatgcctgttgtgtatgtgaagtgtattatggtggctcatcttgttctctctttttaaatttatttcaaggcacaagccctttgtgatggaggatgtctagcttgaacatgctggtaatgtgacactatcctcagctccccttggccctgggttcataggaggcaagtgtttctaaatttctcgcccagtgagttgttgcatgttatttttaaccattaatattgtgtgtctattggaatgagaaacagaaggttgaatgggaaatagattcagtgacaagcagacaaaaagcttggttctgagaaatgttcttcactgagttgaaaaaaaaataatctagaaacaaagaagagggaaattggggtagaatggtttggtggtgaagagacgatgacacccacattcagatgctctggtgtattccctcagagat

SEQ ID NO: 704201 - DNA, 270 bp, Homo sapiens
tgttacctgacagtcggcctgccagagcattactgtgtgctccttctcttctcagagccttgccgtgagcgtccgccctccgccagagcattaccgtgtgagctccgcctcccgtcctctcatcaccgtgtgagctccgcctcctgtccgtgcatttccgtgtgagctccgtctccacgtcacagcattacggtgtgagctccgattcctgtcagagcattaaagtgtgagctccgcctcccgacagagcataaacgaatgagctcagcc

SEQ ID NO: 704202 - DNA, 889 bp, Homo sapiens
taacccctcccttaagtctttatgcgcggcagaaaccaaattaaaccccccccccttgtaaagggggggcagggaaaaaagaaaaaacgcaaaaaaccacctcgggaaacccccactgttctcgtgccccccggccattttattccgcccttgattgggattttggtatccaattcttgctcccttgtggctcgggtgtggagttgatgggtggacgccctcctgtggggggcgcacttgtgccagttgacgcccccttggtgaaaattcacgagggtgcgagtggacaagaggcaccaggtgtccgcagccgcgggtcctctccggggagcacagtgggggtgtggtctcccacagaatagtctccgtgagaggggagcgaaagcgggcgaggcgatgtggagccgaggggctccctcacctcgagggtgtacccagaggaggagtgtgcccccgtggaagagtcacccagaggagaggggggagcaccaagtggtaagaggcacgtgaagagatgtctgccgcggataggtggtatatagggggcttctcccgcgcggtgtctgtttacatcccgagagatggggttctccccatacgcggcgcgtgtggggcccggggtggggcaccggccttatccgccgaacatctagttatgggtctacgtggtgtgtgttttggaagccccaccacgatgcagggatgaacgtctgcgctgagtgtttgagccccattcgcgaactccatgtgtttcgtttggtgccccctcgggaaccccaacggtgcttctgctgttttcgccatcgagacagcacacaaccgggggccctaagagttcgcgcaagggctctcgcttgtgggagtgtcatctggcccacttgtgcccccg

SEQ ID NO: 704203 - DNA, 1288 bp, Homo sapiens
  misc_feature (695)..(695): n is a, c, g, or t
  misc_feature (701)..(701): n is a, c, g, or t
agctgtgtgtgatatctcttcatggcgtcaagtttatatctcttggtggtgaacatttcttccggtggacgatgccttggggatgtcttctccctgccggtcacgagtatagtagcgaatcacacgtgttgccccaccctagttgtgttatctagacaggtgtgctacccactggcaccgttgagagagtcatgccttatgattgcccgccatggctgccacagttttggagaacagggtcagttcggctccagccaattgcaagccgtgcgtacttccaggaggaagctaccatggtataccagtcatggacagtatctactaatgacttgtgggactcaaaacccagataatacttttgagcccaaaattgtaaatacagcaattgggagatgctgtaaagtctgcaactcacacgaacagcaaggattgctttaaaacacaaatgcccagagtttccattttcagaaaagtgatggtcagggtatgtctaaaacatctgtagagcctgggtgggcagatcacttgagatcaggagtttgagtcgtttggcaaacatggtgaaaccctgtctccaccaaaaatacaaaactagccaggcatgacggcaggtgcctgcaatcccagctacttaggaggctgaggcaggagaatcgcctgaaacctggaagtgaacagggagacaagcactgcanacaaanactttttaatggctttagtttttttttattttttacaaatatactggagaatcatgcaatgctgccagcattggatgcaatccggggccacaagtctgcacactcctttgctactggtcctgtaatggcagaacctttcatctcgcctttattgttcactatgactcctgcattatcttcaaaataaagaaacacgccatcttttctacggtatgactttcgttgtcgaatgaccactgctggatgtaccttttttctgagctctggtttgcctttcttgactgtggccatcaccatgtcacccacaccagcagcgggaagtctgttcagccgtcccttgatccccttcacggagatgatatacaggtttttggctcctgtgttgtcagcacaattgattacagctcctaccggaagacccaaggaaatccggaatttcgcaccagaggacccaccacgtcctcgcttcgacatctgggaccgaattcgcaagctgggccgaccagtgcacgggtctccagggcttctgggttttccacagcttgggggggggaacgggttcggggttcacctcgctgctctggaac

SEQ ID NO: 704204 - DNA, 964 bp, Homo sapiens
  misc_feature (504)..(504): n is a, c, g, or t
  misc_feature (507)..(507): n is a, c, g, or t
taacaggcttcgcctgtgcttcctgttcctcttttaccaaggacccgccaacatgggccgcgttcgcaccaaaaccgtgaagaaggcggcccgggtcatcatagaaaagtactacacgcgcctgggcaacgacttccacacgaacaagcgcgtgtgcgaggagatcgccattatccccagcaaaaagctccgcaacaagatagcaggttatgtcacgcatctgatgaagcgaattcagagaggcccagtaagaggtatctccatcaagctgcaggaggaggagagagaaaggagagacaattatgttcctgaggtctcagccttggatcaggagattattgaagtagatcctgacactaaggaaatgctgaagcttttggacttcggcagtctgtccaaccttcaggtcactcagcctacagttgggatgaatttcaaaacgcctcggggacctgtttgaattttttctgtagtgctgtattattttcaataaattctgggacnacnatacataatagatagaaacgaggaaccccgcgggcatctcaagtcgaggcggcgggcaaaaatggcgtgtgagtagagatgtggaccacttgggccaatgagcggagttgccctggaaccgcaagagttacctttggtcccacagtgggtgaaatctggccggagctcccataatgaggagagtcggtataaaatgcggcgataaaagcccgagggttcaccccggcgtgttagtgagaccggcgggaaaaccggccacttgtgagggagggtaatacccaccggcgtgaacccaatcagaccaaatagtccattggaccgcgcccggggatttcacagactttcagttaacaaacgatgcaagccctgggcttttgaaaacaacgccatgctgtgtgcccactgcacagacacatctcaatcccagcttcgtacgacgccgagaagggtgtatacc

SEQ ID NO: 704205 - DNA, 140 bp, Homo sapiens
gcatttgataactagaatcgaaataaatatgtacacgtggggcaaagacgagctataatatagcacataacagagaattccagaaatatctgattcggcaagcaccttgtttctgttgttcccaccaagcttgagggctg

SEQ ID NO: 704206 - DNA, 1353 bp, Homo sapiens
  misc_feature (45)..(46): n is a, c, g, or t
  misc_feature (60)..(60): n is a, c, g, or t
  misc_feature (893)..(893): n is a, c, g, or t
  misc_feature (896)..(896): n is a, c, g, or t
tacacgcacgtcatcgtatactttcgttgtcgaatgaccactgcnngatgtacctttttnctgagctctggtttgcctttcttgactgtgcacactcctttgctactggtcctgtaatggcagaacctttcatctcgcctttattgttcactatgactcctgcattatcttcaaaataaagaaacacgccatcttttctacggtatgactttcgttgtcgaatgaccactgctggatgtaccttttttctgagctctggtttgcctttcttgactgtggccatcaccatgtcacccacaccagcagcgggaagtctgttcagccgtcccttgatccccttcacggagatgatatacaggtttttggctcctgtgttgtcagcacaattgattacagctcctaccggaagacccaaggaaatccggaatttcgcaccagaggacccaccacgtcctcgcttcgacatctaagaaggcggcccgggtcatcatagaaaagtactacacgcgcctgggcaacgacttccacacgaacaagcgcgtgtgcgaggagatcgccattatccccagcaaaaagctccgcaacaagatagcaggttatgtcacgcatctgatgaagcgaattcagagaggcccagtaagaggtatctccatcaagctgcaggaggaggagagagaaaggagagacaattatgttcctgaggtctcagccttggatcaggagattattgaagtagatcctgacactaaggaaatgctgaagcttttggacttcggcagtctgtccaaccttcaggtcactcagcctacagttgggatgaatttcaaaacgcctcggggacctgtttgaattttttctgtagtgctgtattattttcaataaattctgggacnacnatacataatagatagaaacgaggaaccccgcgggcatctcaagtcgaggcggcgggcaaaaatggcgtgtgagtagagatgtggaccacttgggccaatgagcggagttgccctggaaccgcaagagttacctttggtcccacagtgggtgaaatctggccggagctcccataatgaggagagtcggtataaaatgcggcgataaaagcccgagggttcaccccggcgtgttagtgagaccggcgggaaaaccggccacttgtgagggagggtaatacccaccggcgtgaacccaatcagaccaaatagtccattggaccgcgcccggggatttcacagactttcagttaacaaacgatgcaagccctgggcttttgaaaacaacgccatgctgtgtgcccactgcacagacacatctcaatcccagcttcgtacgacgccgagaagggtgtatacc

SEQ ID NO: 704207 - DNA, 1706 bp, Homo sapiens
  misc_feature (530)..(530): n is a, c, g, or t
ccgctaccctcacagctcccgtcccgttacctgcctcctgggcggcctcgctgcctattcaccgtgcaccttgtcgtcggtacgcgccgatgggtgcctgctacctgcgcgcgtcgcacgcccctggtggctttcggcctccgggaacgggggtacgcagcccaggctttccgtgcaccgtgatggcccgctcagagccaaggcgctggccggcaagtaggggtagcactaactctactacccgagcgccaaaaaacgagtagaatgtagctaccggcgggaacggggagtacaggcggccacactggagacaatagccggatggcacacaaaacagggcgtaaacaatcacgcacaaatatggcaataggtggtttagggacgagcggatacattcccaagttggtctatgtgagtacgcgttcaccaagaaggttggtaaatatcacgatagaaggcacttgagaaacccagggtatgaaaggagacaagtggccaccagtattgtataaataccgtaggatacgatnagaaggagttggggaaccatattggcgacagtggcgagaagggaggaagatagattatgagcacgaatagggagttaagcatggtgtaggctcagaagaaattaagtacgttgtccccgtggaaagtaagttcagagtcgaaaaagatggattatcaagaagatgacggcacataacccagaggggggcaagtgtgtccaaagtgcgcataaagcgaggaaaaatggagccattataaagacaagaggggagtttggctccatacacgtgagggggggacatataatttgggcaatcgtgccgacaaagagaatttggtgaaccgcacaattcttggaaacaggcaagcagtgtatcacctataaaagagtagtaaagtgagtgttggggtgacgaaaacgaagatacaatagtgcatgatgtggggatagtgtagaaacaccacaaatgtggtaggaaatgaggggacgttgtggaaagagtcagatgtggaccatagtgacagagtgagacagcaagagggggataaagggtcatggtacggtggtaaatcgtacattggcacactttgctagtggccacccaacaactcgggagggagaacagtggcacatggcaaacccgattggtgctgtgcccactaattagaagagcgaaaggtgtggcacatacacacctaagagtggggcagcacaattattattggggacacacgaaggtgctaggtgccactgagacaacagcgacaccaatcaaagggcaggacacagtataccagcgtagtgtcgtaccatcaaagagggggaccccacagtagcgcacaaaaaaagcagcagcaaaatcatctgcgacaggcggcagtggcacccgggcggcaacaggaccagcccagaggaggctccacaagggggggcacatcaaaggtgggtggagcgcgcacagcgcgcaccagtagcgaggaacagcacagagcaagtaggggcagaaagccaccagtcgtacacatagagcaagcaagtggtgcccctacaaggtgacaaagagcctcacaacaacaggagagaggaaaaactcctgaacaaccgactggccagcgagggtgcaagtcagacagaccgctaccacaagaaggtcgatagagcctggaagaactcacaccagtgtagacagaagtag

SEQ ID NO: 704208 - DNA, 796 bp, Homo sapiens
taacaggcttcgcctgtgcttcctgttcctcttttaccaaggacccgccaacatgggccgcgttcgcaccaaaaccgtgaagaaggcggcccgggtcatcatagaaaagtactacacgcgcctgggcaacgacttccacacgaacaagcgcgtgtgcgaggagatcgccattatccccagcaaaaagctccgcaacaagatagcaggttatgtcacgcatctgatgaagcgaattcagagaggcccagtaagaggtatctccatcaagctgcaggaggaggagagagaaaggagagacaattatgttcctgaggtctcagccttggatcaggagattattgaagtagatcctgacactaaggaaatgctgaagcttttggacttcggcagtctgtccaaccttcaggtcactcagcctacagttgggatgaatttcaaaacgcctcggggacctgtttgaattttttctgtagtgctgtattattttcaataaactctgagaacaatcaaactaacatcttgatccaagacattaaactaaaataacacacactacgacaaagcacctagcaatagcaccccccagatgaacactacatatacaaactgtgtgcacaaaggaaacaatataaattcacatatcggccgtctgaacccgagcaactaccaaaaagcccaattgctaatatcattagagcaaccagagggacaacaaacaagagaccaataaacaacgaacaagccgatgaaccttatataaaaaaaaaaaccattaacaaccattccccagaataat

SEQ ID NO: 704209 - DNA, 387 bp, Homo sapiens
gagcagagtcagaggaggttgggaagcatggcgactgtggggggaagggaggcagccgggaagccacaaaagcctacagcaggccgggcgggcgcggtggctcgcgcctgtaatcccagcactctgggaggccgaggcgggtggatcacgaggtcaggagctccagaccatcccggctaacagggtgaaagcccgtctctaggaaaaatagaacaaagtagccgggcgtggtggcgggcgcctgtaggcccagctactcgggaggctgaggccggggaatggcgtgggcccgggaggcggagcttgcggtgagccgagatggcgccactgcactccagcctgggcgacagggcgagactccgtctggaagaaaaggaaagaaacagc

SEQ ID NO: 704210 - DNA, 1287 bp, Homo sapiens
  misc_feature (827)..(827): n is a, c, g, or t
  misc_feature (830)..(830): n is a, c, g, or t
tgagatggagtctcgctctgtcacccaggctggagtgcagtggcgcgatctcagctcactgcaacttatgcctcccaggttcaagcaattctcctgcattatcttcaaaataaagaaacacgccatcttttctacggtatgactttcgttgtcgaatgaccactgctggatgtaccttttttctgagctctggtttgcctttcttgactgtggccatcaccatgtcacccacaccagcagcgggaagtctgttcagccgtcccttgatccccttcacggagatgatatacaggtttttggctcctgtgttgtcagcacaattgattacagctcctaccggaagacccaaggaaatccggaatttcgcaccagaggacccaccacgtcctcgcttcgacatctaagaaggcggcccgggtcatcatagaaaagtactacacgcgcctgggcaacgacttccacacgaacaagcgcgtgtgcgaggagatcgccattatccccagcaaaaagctccgcaacaagatagcaggttatgtcacgcatctgatgaagcgaattcagagaggcccagtaagaggtatctccatcaagctgcaggaggaggagagagaaaggagagacaattatgttcctgaggtctcagccttggatcaggagattattgaagtagatcctgacactaaggaaatgctgaagcttttggacttcggcagtctgtccaaccttcaggtcactcagcctacagttgggatgaatttcaaaacgcctcggggacctgtttgaattttttctgtagtgctgtattattttcaataaattctgggacnacnatacataatagatagaaacgaggaaccccgcgggcatctcaagtcgaggcggcgggcaaaaatggcgtgtgagtagagatgtggaccacttgggccaatgagcggagttgccctggaaccgcaagagttacctttggtcccacagtgggtgaaatctggccggagctcccataatgaggagagtcggtataaaatgcggcgataaaagcccgagggttcaccccggcgtgttagtgagaccggcgggaaaaccggccacttgtgagggagggtaatacccaccggcgtgaacccaatcagaccaaatagtccattggaccgcgcccggggatttcacagactttcagttaacaaacgatgcaagccctgggcttttgaaaacaacgccatgctgtgtgcccactgcacagacacatctcaatcccagcttcgtacgacgccgagaagggtgtatacc

SEQ ID NO: 704211 - DNA, 1297 bp, Homo sapiens
  misc_feature (695)..(695): n is a, c, g, or t
  misc_feature (701)..(701): n is a, c, g, or t
agctgtgtgtgatatctcttcatggcgtcaagtttatatctcttggtggtgaacatttcttccggtggacgatgccttggggatgtcttctccctgccggtcacgagtatagtagcgaatcacacgtgttgccccaccctagttgtgttatctagacaggtgtgctacccactggcaccgttgagagagtcatgccttatgattgcccgccatggctgccacagttttggagaacagggtcagttcggctccagccaattgcaagccgtgcgtacttccaggaggaagctaccatggtataccagtcatggacagtatctactaatgacttgtgggactcaaaacccagataatacttttgagcccaaaattgtaaatacagcaattgggagatgctgtaaagtctgcaactcacacgaacagcaaggattgctttaaaacacaaatgcccagagtttccattttcagaaaagtgatggtcagggtatgtctaaaacatctgtagagcctgggtgggcagatcacttgagatcaggagtttgagtcgtttggcaaacatggtgaaaccctgtctccaccaaaaatacaaaactagccaggcatgacggcaggtgcctgcaatcccagctacttaggaggctgaggcaggagaatcgcctgaaacctggaagtgaacagggagacaagcactgcanacaaanactttttaatggctttagtttttttttattttttacaaatatactggagaatcatgcaatgctgccagcattggatgcaatccggggccacaagtctgcacactcctttgctactggtcctgtaatggcagaacctttcatctcgcctttattgttcactatgactcctgcattatcttcaaaataaagaaacacgccatcttttctacggtatgactttcgttgtcgaatgaccactgctggatgtaccttttttctgagctctggtttgcctttcttgactgtggccatcaccatgtcacccacaccagcagcgggaagtctgttcagccgtcccttgatccccattccatgtgcccaggtgttctcaattgttcaattcacacctatgagtgagaatatgcggtgtttggttctattcatccttagtagatagtttagcctgagaatgatggtttccagcttcatccatgtccgatacaaaggacactgaactcatcctttcttatggctgcatagtattccatggtgtatatgtgccacattttcttaatccagtctatcattgcatggacatttgggttggttccaagtct

SEQ ID NO: 704212 - DNA, 223 bp, Homo sapiens
  misc_feature (21)..(21): n is a, c, g, or t
  misc_feature (38)..(38): n is a, c, g, or t
tccgcgggcggcccctgcccncctcccctccctccccnccctgcaactccattttgtctgaccagggcagaagatggattagagcacccactagtcctctctcttccaagcaagaaggaccacccctgagctgttttccagctggacatgcctggacctgtattccacctcctctctaaaatgcaccttatttttcttcattaaattgtgttacttaaccctt

SEQ ID NO: 704213 - DNA, 278 bp, Homo sapiens
ggtcgacctggttgctggggggtgctgacgagattagcactagtaaagaaacactgggccgggcaaagtggctcatgcctgtattcccagcactttgggagattaaggcgggcagatcacttgaggtcaggagttcaagaccagcctggccaacatggagaaaccccgcctctactaaaagtacaaaaattagtcaggcgtggtggtgcacacctgtaatcccagctactcaggaggctgaggccgcagaatcgcttgaacctgagaggtggaggttg

SEQ ID NO: 704214 - DNA, 1200 bp, Homo sapiens
  misc_feature (740)..(740): n is a, c, g, or t
  misc_feature (743)..(743): n is a, c, g, or t
ctctatcaagagagaggagaaacacggcaactttactatggatagttgacttgcggggtcgcatctgaacactgctgggtgtaacttgaaagctgcgcgcggggtgagcctcttatagacgagcggccagcatgctgtcacccacaccagcagcgggaagtctgttcagccgtcccttgatccccttcacggagatgatatacaggtttttggctcctgtgttgtcagcacaattgattacagctcctaccggaagacccaaggaaatccggaatttcgcaccagaggacccaccacgtcctcgcttcgacatctaagaaggcggcccgggtcatcatagaaaagtactacacgcgcctgggcaacgacttccacacgaacaagcgcgtgtgcgaggagatcgccattatccccagcaaaaagctccgcaacaagatagcaggttatgtcacgcatctgatgaagcgaattcagagaggcccagtaagaggtatctccatcaagctgcaggaggaggagagagaaaggagagacaattatgttcctgaggtctcagccttggatcaggagattattgaagtagatcctgacactaaggaaatgctgaagcttttggacttcggcagtctgtccaaccttcaggtcactcagcctacagttgggatgaatttcaaaacgcctcggggacctgtttgaattttttctgtagtgctgtattattttcaataaattctgggacnacnatacataatagatagaaacgaggaaccccgcgggcatctcaagtcgaggcggcgggcaaaaatggcgtgtgagtagagatgtggaccacttgggccaatgagcggagttgccctggaaccgcaagagttacctttggtcccacagtgggtgaaatctggccggagctcccataatgaggagagtcggtataaaatgcggcgataaaagcccgagggttcaccccggcgtgttagtgagaccggcgggaaaaccggccacttgtgagggagggtaatacccaccggcgtgaacccaatcagaccaaatagtccattggaccgcgcccggggatttcacagactttcagttaacaaacgatgcaagccctgggcttttgaaaacaacgccatgctgtgtgcccactgcacagacacatctcaatcccagcttcgtacgacgccgagaagggtgtatacc

SEQ ID NO: 704215 - DNA, 204 bp, Homo sapiens
ttaaaacacgcatctcacctctgctggtatgggacagaatgatggcctcagcaggaccacccaacaagaggcagcagcacaagtcaccacctcctcagagaaagcacaaggacacccaacagtgatgcatccccctcctcctcaaggaaggccacaagggacatcccaacagtgagtgcatccccgtactacttcgagaaaggc

SEQ ID NO: 704216 - DNA, 990 bp, Homo sapiens
  misc_feature (24)..(25): n is a, c, g, or t
  misc_feature (78)..(78): n is a, c, g, or t
  misc_feature (86)..(86): n is a, c, g, or t
  misc_feature (89)..(89): n is a, c, g, or t
  misc_feature (530)..(530): n is a, c, g, or t
  misc_feature (533)..(533): n is a, c, g, or t
gagagagagagagagagaggagannaggagagagaggagagagagagagagagagagagagagagagagagagagagngagagagngangcgcaccaaaaccgtgaagaaggcggcccgggtcatcatagaaaagtactacacgcgcctgggcaacgacttccacacgaacaagcgcgtgtgcgaggagatcgccattatccccagcaaaaagctccgcaacaagatagcaggttatgtcacgcatctgatgaagcgaattcagagaggcccagtaagaggtatctccatcaagctgcaggaggaggagagagaaaggagagacaattatgttcctgaggtctcagccttggatcaggagattattgaagtagatcctgacactaaggaaatgctgaagcttttggacttcggcagtctgtccaaccttcaggtcactcagcctacagttgggatgaatttcaaaacgcctcggggacctgtttgaattttttctgtagtgctgtattattttcaataaattctgggacnacnatacataatagatagaaacgaggaaccccgcgggcatctcaagtcgaggcggcgggcaaaaatggcgtgtgagtagagatgtggaccacttgggccaatgagcggagttgccctggaaccgcaagagttacctttggtcccacagtgggtgaaatctggccggagctcccataatgaggagagtcggtataaaatgcggcgataaaagcccgagggttcaccccggcgtgttagtgagaccggcgggaaaaccggccacttgtgagggagggtaatacccaccggcgtgaacccaatcagaccaaatagtccattggaccgcgcccggggatttcacagactttcagttaacaaacgatgcaagccctgggcttttgaaaacaacgccatgctgtgtgcccactgcacagacacatctcaatcccagcttcgtacgacgccgagaagggtgtatacc

SEQ ID NO: 704217 - DNA, 476 bp, Homo sapiens
  misc_feature (23)..(23): n is a, c, g, or t
  misc_feature (105)..(105): n is a, c, g, or t
  misc_feature (140)..(140): n is a, c, g, or t
  misc_feature (427)..(427): n is a, c, g, or t
gttccctggaatcctgtctggtncccttttttttttgatggattctttctgatcaaatatcactggtcctgagtgggtgtggtggttcagccttagtccccagcnactcaggaggcagaggcagaggggccagagagagnggcagagagagaggcagagagacagaggcagagacaggtagatatccttgagtacagcctggtctacagatcaagttccaggaccgccagggctacacaaagaaaccctgtattgaagaagaagaaaaaaattccactggtcctgaaacaaaaccatggatatcattgtgttcatacagagagcaagtctgggtgggcccaagggtttcagctgcatttgtatgtatggatctaaacaaatgtatatttttcaagatgattttgcagaagttctattttaaatgttnatcaataaattcatattcatttaataaatgaaaataaatggtttctaaa

SEQ ID NO: 704218 - DNA, 115 bp, Homo sapiens
ggttgatgaaataccagggtgaaatgggctaaaccataagtgcccctttagtttttcggcagagtgcctactaaaggtttactccaatacccccccctcttgctcagcctatata

SEQ ID NO: 704219 - DNA, 413 bp, Homo sapiens
aatttggggtttggggggagtattatgtttaactggggttgtcaagtatgagtccctcaggaaaaaaaaaaaattttgttttaaaaagccatctggtttttagctcttggaactattggtacttaaatttcccataattaaaaatttaaaatttttaaattaggattgcccatacttttccctttgagaagggtttttttagaaatccctttagtaaagtcccccaggccttagttttacctttaaacttttttctttaaaacatgggtttggggggtaacttttacccagttttgaggactgttaatatttggaaaggatcttgagatatcagtggaaagctaaaccgtttaaattaacatgaaggacttccttttgattgggaaaataaaatcagattttttcaaagtcca

SEQ ID NO: 704220 - DNA, 668 bp, Homo sapiens
tgccccatgctgactccttgcttctttccagccggagccgctgccttgccccccggagactgaagacatggcacccaagagggccaagagaaggacagtagagggcggaagctccagcgtcttctccatgttcgaccagactcagatccaggagttcaaagaggccttcactgtgatcgaccagaaccgtgatggtattatagacaaggaggaccttcgggacaccttcgcagccatgggccgcctcaatgtgaagaatgaggagttggatgccatgatgaaggaagccagcggtcccatcaacttcaccgtcttcctgaccatgttcggggagaagctcaagggtgccgaccctgaggatgtgatcaccggagccttcaaggtcttggaccctgagggaaagggcaccatcaagaagaagttcctggaggagctgctgaccacgcagtgtgaccgcttctcccaggaggagatcaagaacatgtgggcggccttcccccccgacgtgggcggcaacgtcgactacaaaaacatctgctacgtcatcacgcacggcgacgccaaggaccaggagtaggggcacccgcgggcctccgctgcccgacgcttctgttcggcccgacctccaccccggctcccaataaaatttaactgatctttgtttctta

SEQ ID NO: 704221 - DNA, 769 bp, Homo sapiens
  misc_feature (688)..(688): n is a, c, g, or t
tgccccatgctgactccttgcttctttccagccggagccgctgccttgccccccggagactgaagacatggcacccaagagggccaagagaaggacagtagagggcggaagctccagcgtcttctccatgttcgaccagactcagatccaggagttcaaagaggccttcactgtgatcgaccagaaccgtgatggtattatagacaaggaggaccttcgggacaccttcgcagccatgggccgcctcaatgtgaagaatgaggagttggatgccatgatgaaggaagccagcggtcccatcaacttcaccgtcttcctgaccatgttcggggagaagctcaagggtgccgaccctgaggatgtgatcaccggagccttcaaggtcttggaccctgagggaaagggcaccatcaagaagaagttcctggaggagctgctgaccacgcagtgtgaccgcttctcccaggaggagatcaagaacatgtgggcggccttcccccccgacgtgggcggcaacgtcgactacaaaaacatctgctacgtcatcacgcacggcgacgccaaggaccaggagtaggggcacccgcgggcctccgctgcccgacgcttctgttcggcccgacctccaccccggctcccaataaaatttaactgatctttgtttcttaaaaaaaaaacaacacaaaanaaatctttgggggggccgcccccaaaaactttaaacactcgtgtgggcgcggccccaagggtaagaccaggggccagcggc

SEQ ID NO: 704222 - DNA, 295 bp, Homo sapiens
aaaggaaccaggaacccaatcgcaactccccttgtgtcacctctctccagcctggaggagctgctgaccacgcagtgtgaccgcttctcccaggaggagatcaagaacatgtgggcggccttcccccccgacgtgggcggcaacgtcgactacaaaaacatctgctacgtcatcacgcacggcgacgccaaggaccaggagtaggggcacccgcgggcctccgctgcccgacgcttctgttcggcccgacctccaccccggctcccaataaaatttaactgatctttgtttctta

SEQ ID NO: 704223 - DNA, 848 bp, Homo sapiens
atttaggcggtgacagacagcatccgcagtcaataggaagaagctgaagaattctttaggtctcccaaaatggcctttgctcaggccatgccctccgcccagcacatctgctcctccacctgcacctgactccctggccctcgtgaagccactcccatactcctagacagggctgctgcgccctccacttctgggctcctgaccagctctgccggagccgctgccttgccccccggagactgaagacatggcacccaagagggccaagagaaggacagtagagggcggaagctccagcgtcttctccatgttcgaccagactcagatccaggagttcaaagaggccttcactgtgatcgaccagaaccgtgatggtattatagacaaggaggaccttcgggacaccttcgcagccatgggccgcctcaatgtgaagaatgaggagttggatgccatgatgaaggaagccagcggtcccatcaacttcaccgtcttcctgaccatgttcggggagaagctcaagggtgccgaccctgaggatgtgatcaccggagccttcaaggtcttggaccctgagggaaagggcaccatcaagaagaagttcctggaggagctgctgaccacgcagtgtgaccgcttctcccaggaggagatcaagaacatgtgggcggccttcccccccgacgtgggcggcaacgtcgactacaaaaacatctgctacgtcatcacgcacggcgacgccaaggaccaggagtaggggcacccgcgggcctccgctgcccgacgcttctgttcggcccgacctccaccccggctcccaataaaatttaactgatctttgtttctta

SEQ ID NO: 704224 - DNA, 566 bp, Homo sapiens
  misc_feature (53)..(53): n is a, c, g, or t
  misc_feature (69)..(69): n is a, c, g, or t
  misc_feature (109)..(110): n is a, c, g, or t
  misc_feature (113)..(113): n is a, c, g, or t
  misc_feature (140)..(140): n is a, c, g, or t
  misc_feature (145)..(145): n is a, c, g, or t
  misc_feature (197)..(198): n is a, c, g, or t
  misc_feature (200)..(201): n is a, c, g, or t
  misc_feature (214)..(214): n is a, c, g, or t
  misc_feature (219)..(219): n is a, c, g, or t
  misc_feature (227)..(227): n is a, c, g, or t
  misc_feature (243)..(243): n is a, c, g, or t
  misc_feature (245)..(245): n is a, c, g, or t
  misc_feature (249)..(249): n is a, c, g, or t
  misc_feature (285)..(285): n is a, c, g, or t
  misc_feature (348)..(348): n is a, c, g, or t
  misc_feature (350)..(350): n is a, c, g, or t
  misc_feature (396)..(396): n is a, c, g, or t
  misc_feature (432)..(432): n is a, c, g, or t
  misc_feature (507)..(507): n is a, c, g, or t
  misc_feature (517)..(517): n is a, c, g, or t
  misc_feature (519)..(519): n is a, c, g, or t
  misc_feature (526)..(526): n is a, c, g, or t
  misc_feature (530)..(530): n is a, c, g, or t
  misc_feature (554)..(554): n is a, c, g, or t
ggccacagagaatggtatattacagatttacacacatgaagagaaggtcagancgcactgcaggcagcncggctctgggaagaacttcacggagccccttcttagagcnnggngggggctttctcagtgaaatgtttggntttcngctgcctcctctgccccaggcccccctccagggtcccgcctatcccagattnntnngtgcaccaggggnccggncgccagcnccgccgacccctcccngngtgncgcccttgttcactgacaaagagacctgtcccaggngtgtcctccaccgagccggtcagctgtgggtggttttcctgttacgacgctcagttgcctgtngngataacaaactcgtggctatgtttgctgatgctgtgttctcattgnttaactgttcctgcacttttacagacaaatcttcgncaaaaaaaaagatcaactttttttttccgaacaacaaaaaaaaatgaatgattacaataggaaagggaaaaattnaatagctacntntcatttncaantttttgttcttcaaaaaattcctnccaatttctctg

SEQ ID NO: 704225 - DNA, 282 bp, Homo sapiens
  misc_feature (66)..(66): n is a, c, g, or t
  misc_feature (73)..(73): n is a, c, g, or t
  misc_feature (227)..(227): n is a, c, g, or t
  misc_feature (232)..(232): n is a, c, g, or t
  misc_feature (265)..(265): n is a, c, g, or t
atgccaccaatgtgggtgatgaaggtggcttcgacccaacatcctggagaacaatgagggtcagtnctgagcncctgggggcaagacccctggctctccacatgggcaggggaggctgcagacaaggggcactggagtctcaggtcctttcttggtcctcccccagccctggagctgctgaagacggccatccaggggggcttgttacccagacaaggttgtgatcngcatngatgttggcagcatctgagttctattcgcaatngggaagtacgatcttta

SEQ ID NO: 704226 - DNA, 630 bp, Homo sapiens
  misc_feature (561)..(561): n is a, c, g, or t
  misc_feature (571)..(571): n is a, c, g, or t
tgccccatgctgactccttgcttctttccagccggagccgctgccttgccccccggagactgaagacatggcacccaagagggccaagagaaggacagtagagggcggaagctccagcgtcttctccatgttcgaccagactcagatccaggagttcaaagaggccttcactgtgatcgaccagaaccgtgatggtattatagacaaggaggaccttcgggacaccttcgcagccatgggccgcctcaatgtgaagaatgaggagttggatgccatgatgaaggaagccagcggtcccatcaacttcaccgtcttcctgaccatgttcggggagaagctcaagggtgccgaccctgaggatgtgatcaccggagccttcaaggtcttggaccctgagggaaagggcaccatcaagaagaagttcctggaggagctgctgaccacgcagtgtgaccgcttctcccaggaggagatcaagaacatgtgggcggccttcccccccgacgtgggcggcaacgtcgactacaaaaacattcttgcatggttccgggagagccagtntgccaaattntgagatcacaattcggtttttagcactgtttgggcttatatgtatcactctgtaggaaa

SEQ ID NO: 704227 - DNA, 656 bp, Homo sapiens
agatcccttagacctcagggcagcctcaccctttgaaagaaagtagctggtttccagtccaacaaaaagttaaaaggatgctcatctctttctcggcatcactgatggaaaacagactgtgtgatggcctaaaggatccaatcaatgtgaagaatgaggagttggatgccatgatgaaggaagccagcggtcccatcaacttcaccgtcttcctgaccatgttcggggagaagctcaagggtgagtggagtgtcctgggtccaaggccccggctgccttttcccagacccttcagggacccatcagcttcatgtgccctctgacccccacaggtgccgaccctgaggatgtgatcaccggagccttcaaggtcttggaccctgagggaaagggcaccatcaagaagaagttcctggaggagctgctgaccacgcagtgtgaccgcttctcccaggaggagatcaagaacatgtgggcggccttcccccccgacgtgggcggcaacgtcgactacaaaaacatctgctacgtcatcacgcacggcgacgccaaggaccaggagtaggggcacccgcgggcctccgctgcccgacgcttctgttcggcccgacctccaccccggctcccaataaaatttaactgatctttgtttctta

SEQ ID NO: 704228 - DNA, 141 bp, Homo sapiens
ggagagtgctggcgaatgctggttctgtgggccttgcaccacatcgtcaggattgtgacgggctgcatcacagattgtgggagccctctgctatgctgcactcggggtcaccatcccctaatctggaggtgactactccta

SEQ ID NO: 704229 - DNA, 393 bp, Homo sapiens
cgcagaaaggctgtagtgcgtacacctgttcaatgagatcatagtcgactcttgacgagcgtctctacaggagcccacgttcagaggcgtgtagaagatcacagacacatatggaggacgtacactggcaactgtagggcttaacgtggcctctaaggcacgagaaccaagaactggagcggcagcatgcgccacattggtggcaaggtggagttcaacatagccctgatgagtaagctggacgggattaacaggcacttctttaacttctttcggcttcgcgtgggcatataaccatgggcctgtgaatgctggagtgaatggggcccgcctcagaatgaaatatggggaaacactgtgaatgtggccaggccaatgggcctgtggcttggg

SEQ ID NO: 704230 - DNA, 81 bp, Homo sapiens
gatcggttcggttactatggttcggggaattattatggtcctgactactggggccagggaaccctggtcgccgtctcctca

SEQ ID NO: 704231 - DNA, 248 bp, Homo sapiens
ggtcaggggcccatgggagcgcccgaggtaagccacgatgagagtccctgagccggtactcgcggagcttggggacgagccgcccaccgggccccggtgccacgctcccgccctaaggaggccggcctcgacacaccacgccggccgcgactgccactagagcgaccgggggcgccaagctcggacggaattgggcccagctgaccaggccgacaggtaaggcaaccgctgggcattacagggtgacg

SEQ ID NO: 704232 - DNA, 641 bp, Homo sapiens
ctctgccacgcgtctttcctgcacttcgcccgcgtactactcctgccccgccctgcatacctctcccctatcatgtctctggaccctcctgtaggccgcagctctactccctcacaggtctctctgtcctggcctcaccgctatcctattcctctccctagccctgtgtctgtatcaagccccctcgggtggagtagtgtggacagaaatgcggctcaccccaaagcagaacttctcaatccatgaggacaatggggaggcctttaggccagcccacatgtgacaatggagggctgcggcttccttgcggagagcacaagtgagctcactgccctggactccaggaatcagagttctggccgccggggtgacccagctcctctgctaccatgaatagggcccctctgaagcggtccagtgatcctgcacatggcgctgaccggggcctcagacccctctgcagaggcagaggccaacggggagaagccctatactgctgcgggcattgcagatcgcgctggtggtctccctctactgggtcactccatctccactggtgttccttaataagtacctgctggacagccctccctgaggctggacaccccatctacgacaccttctaccagtgcctggtgacc

SEQ ID NO: 704233 - DNA, 779 bp, Homo sapiens
tggggaaaaaagccggggccgggggcaagagcctaccccaaaaaaaagggtgtctaaaatgttcacggtcccttctttggcctcaaaaagtgcacatttatctcaaagaaaaaaaaagtgcacaagaagtgtccactcccttgtggcccccctttcccctcccccctctcgtgcgtgcctcctctcaagcccccagaagaattgaacccctgtggctgtggggcgtgggcgtgcgcgagaaacagacgcgccctctcagagagagtgagagagtctccaagacacacacactatgtgagagaggcgcaatattctctctctcacaagagtggagagaggagtgtgtgtgtgtcagaaagaagagtgtcctctcacagaagtgtgtctctcgaaagagaaagtctccctctctgtgtgtgctctatttctcattcggatgttgtgtcgcaccccgatgtgtggtgttatcatttcgacgcgccacacaacacctcctcttttttaacggcgacgccccacaaaaccacccgcggtcggtccccagccgcctctgccgacgaagccgcggagaaagatttctgctgtggatggtggggacatcaatcattatgaagttgtttatgtttcatccccgccggtgttggtatgtgggggagatgggggggaaaaagaagggggtggcacccaatgattaacaggtgttgataaagaactggatgatacacccttcattaataagaagagaaaaaacacaccccctgttggggcttgttgggaac

SEQ ID NO: 704234 - DNA, 559 bp, Homo sapiens
  misc_feature (306)..(306): n is a, c, g, or t
  misc_feature (369)..(369): n is a, c, g, or t
  misc_feature (398)..(398): n is a, c, g, or t
  misc_feature (504)..(504): n is a, c, g, or t
  misc_feature (528)..(528): n is a, c, g, or t
  misc_feature (538)..(538): n is a, c, g, or t
cttggaccctgggaatcaggccgccgaggcgtgagctccagagccgcaccatctgccacaaacagaattcgagacctacttaattttgaaattcctccttgcacggtaaataaagccaaaagcagccgggtgctaattcgtggcaacacacttcactgaacccacttggttccaaaacgaatgcaagccgaggcactgctacggcagcaagctgcaaaatgggaatggtgggctcagggggcttccctccaaggaattccttgccccttgcctgtccaaaagactccttttgtgctggaaacctgngctcctcaagctgcaagcaggagtcggtaggactgtgcctgtgcctccctcagcggggcctgngcggggttccaaggcctgcgagctggganaggacagatgaggggactcgtgccttcttgctgtcatgcaatgaccccgccttatgttgccgagataagcaactcttaggtttgcctgactgccttatgctggtanagaaaagggattcagctgtctctnttgcaaatanaaaaaaagtcaagatttcaaa

SEQ ID NO: 704235 - DNA, 784 bp, Homo sapiens
ggttcaaacgacaactcagcacaaagccttgagtataaatggctggaatcaaaacatctcattctgatgacgtggtttaatttttcaattttttttttaaataggggtgggagggagggtacttggccccaaaagggagggtgtctgcactcaggatttagaaacacttgggaagctcataacctcatcagaaacggcctttagccacactccggaccttctagatgagtacacaaaaaattgaaataagttctgggaaattaagccatttatttaaattggctattttttacaaggtctaggtatcttcacactcggtcatgggggacctcattttcccggccagatacctttatcaaacattatgggctcatgagagctgaagtaagtcagctctttggggcacttctagtggaccttctgtgagactggtcgtggtacttggtatctctaaatctaaagatagtctttaaaaatcccaaagaaaatctgtctcctttctgatctaaaaatcatctgtgggtaaagagttacgggtgtccaaaggttgccacagtccatgagcgccaacgggagctagcctgcccctggactctggcccatccacagtgaaagattccacagacaggtcttcacatctccagtagaccacgccggcacggaggggacaggggcgggacatacgaacacggcgcggactcacacggcgtgggcaagggacctgggaaacaagctacccctttggccggcaccccctctgcccacatggccaccctgcctaccg

SEQ ID NO: 704236 - DNA, 205 bp, Homo sapiens
  misc_feature (22)..(22): n is a, c, g, or t
  misc_feature (152)..(152): n is a, c, g, or t
  misc_feature (169)..(169): n is a, c, g, or t
gcaggagaacctcttgaatctnggaggaggaggttgctgtgagctgagatcgtgccactgcactccagcctgggtaacaagatagaaactccgtctcaaaaatatagatatacatgtatagactggctgaatggattaagtacaggacccanctctatgttgcctacangaaactcacttcacttgtgaggacacatatagactg

SEQ ID NO: 704237 - DNA, 485 bp, Homo sapiens
acgcacttggactcctagctctcttaaattatatagccatcttgtgatattttttaaacatagctgaccaaaggaatggaacattttacaaaatgttggtttgagctattaataaattaggcgaataaaccagcattacaatgtccatcataacctagctgaagatacctcttttgtttctgatttactgtttacaggcaggttagagtggcttggaaaaaaaaatccatttaagagagtattttggtaaggggggtctttatgaaggatccacttctgtctacattgcatccaaaagagaataaacacagttgtgaaatatgttttatgtttgccatggcttacaaaaacatttcttggtttctttataaaccatacagataaaatgaccaatcaaatcttaagtcacatctagttctgcaacaaatattatgccctgcgcctgagaactgattatttataaccctgataaaaccagttgcgtg

SEQ ID NO: 704238 - DNA, 822 bp, Homo sapiens
  misc_feature (141)..(141): n is a, c, g, or t
  misc_feature (516)..(517): n is a, c, g, or t
tctgttagtagtgcttcatactctcattgagtctgggtgacctaagcgtatcaagaaagatcttcacctgtgtccagactgctttgtcctattctttctggagcaaggtgactgttctgatactattgattccatttgaanattctacactagcctctctacaaagacactgttcaatattacgatgcaggtgctaccaagtgagacggtagttagagattggtactccagatgccttgatagtcattgctgaatctaaggcgcatgaaaggcagagttatctacagacagactgaagcgtacttgtcgcttcaatcaagacggccattgtgtagcaccttgtctctttcagtgtttcttcgcaaattcgaaggtattgggcgatctttatgcagactagcgcaagaagtacttaagtgacactactattcgcccgagaaaggcagcatctacgtagcttggactagtgaccatctacaagcgggagacgtgggaagttctctcactatacctcgnnaacttggcgcaattcgaagcctcgaggtaactagcagattgcttcagcggaaagcaaaccttggggccttaccttcggggtatagcggtgaataaccgtaggcaattaggccttcatcggcccgtcgactgtgccatttgattcgatgcgctcaaagttcaggtttgggccaacgaaatgccacttttcgatatcagggggagccctataaatgggggatctctgatccccccacacgtaaaagggcacaccatttgtggaaagagtttccaggggccccctgtgcgggaaacggggcgcaaatc

SEQ ID NO: 704239 - DNA, 214 bp, Homo sapiens
acggccgtccaaaaacatatctctagaccagacagacatgctgaatataagaccaggaatataggaagtacacatagacatttacacttcacagcgtttcaaatcgaaaatttctaaactggactatggattccaggcccccacccccccacacacaccaactattcctctcctgcatttaaataacagaagattggccatggagtaaatggca

SEQ ID NO: 704240 - DNA, 528 bp, Homo sapiens
  misc_feature (38)..(38): n is a, c, g, or t
  misc_feature (43)..(43): n is a, c, g, or t
  misc_feature (339)..(339): n is a, c, g, or t
  misc_feature (362)..(362): n is a, c, g, or t
aagcactcgaaatatcttctatatgcgcgaatccgccnccaangcgtgccgtcggactttaaatagatcagtccttttgtaacggcccatgccacgagattgttgagaacaatgtcggaaaccatgcgcggggaaagtccgtaaggccgtcgcgggccggagaaatgtggggcagaaatcgttgcttgccagcttcgagatatcgcgctccgaccagatcttcgactcgccgtaagccgtcaccggattaagttcgccggtctcggtcgatgaaatcgtcccctgccagtccgtaattgctgcacgacgaggccatgacaaagcggcgaactccggcanctttggcagtctgtgcaacatgnaactgccgcggtgattgatcgcatacgtcgtatcgcggttcagatcgctcagcggatcgttggaaagcgccgccagatgaacgacggcatcgaacccggcaagatcagcgggttcgaggtcgcggatgtctttcctgagggagggaattggaactgatgcggtcgc

SEQ ID NO: 704241 - DNA, 434 bp, Homo sapiens
aacaacgggaatacttggaacgaatcgcgaaaacgaagaaaaaaatggccgaaaacggaatcgaggttcttttgatcaccaatccggccaacatgaactacttatctggttacgacggctggtcgttttacgttgaccaaatgctcgtgttgatcattgatgaagagcagccgctttggattggccggaagatggacgcggccggcgcccgggcgacaacatggatttatcatgaaaacattatttcctatcccgacatttttgtccattcccgggaaaggcatccgatggattttgttgcagagatattaaaacaaattggccagagtcaacggcatattggcgttgaaatggaatcgtattattttaccgcgctcgtctgggaaagattaaaagccgggcttccgataccaccaaaaacaggtgaccgagct

SEQ ID NO: 704242 - DNA, 1107 bp, Homo sapiens
ggcccggcgaggtgctggagggagcggggcgcggatccgggccacatgggcatgctccgtccgcggggtcagggccgggcttcggcttcaccggcagcctctgccttgagcgggcgcctcgtgcaagttggagggctgggcctgcctgtgtgccgcagtggcctcaggagaggatgtgtggcgccactggctgcgtctaccgtccagtggtttgctctgtctgcatccttgatgtgccttcgtagcatcagttacagggtactcaagcacttcgctgcaggccgctccagatgtgcccttctgctgagtgcacaggcgtcatgcatggacttactgctgcggcacttattgcgcgcaagggctcggtctccactgttgcatgggggaccgtggtgtcgatgcgcgcgtgcctcactgacccgtgcctcgctgcgctctggctgacatggggtcctgctttgcatgcgagcgcgcaggactgtgccgctgtgtggccctgcagtggatcaagcccgtccacccgtgaagctgaggaacctctaggggacggcggtctttcgctgcgatctcgcggcctacttgggcgtatcgcagcgcggttggcgtcctgttctgagtcgacaagtatcgtataccaccgcattacgcgtagcgtcgcatcttaggctcacgcacttcagcgctaacccttggacgtcccctaggcgatactgccagctccatacgtgagtcatcacaaacccggtggccatattcttgaagatatggcccaacctcgaaaagatagccttcatggggtccaataaccttaagcgattcgaagcatcataggggacccaacggtgagtgaccccaagataacgtcaccggcgacgtcggaaatcgtcgggcagatacgcgggagagcgggcgttattcataagcgtggaccgcatagttctatatgcggcgagaggactcttggccaggttgctccacctgcactggttgaaccagtcacgcccgagcccccctggtaggagaaacatcgagcgagacttggatgcgcggtctttcccacttatacaggggccacggggcatcatctttggggggggaacttgaccg

SEQ ID NO: 704243 - DNA, 187 bp, Homo sapiens
ccccccccggggggggccccccccccctttccccccccgggggggggccccccccccggggggggggggggggggggggggggggccccccccccttttgcccaggtttttggggggggcccccctttgggggggaaaaaaagggttttttttttttttttaaaaaaaattttttttttttttttta

SEQ ID NO: 704244 - DNA, 216 bp, Homo sapiens
cagagtgtccacgacgctggatgaagtccaagcggtgcctagagcagcaggtggatggcagatgaatgacgcagctggaagacgctggaggacgatgctgcaggccaccgacagatgccaatgctgcggtatggatggtcaaccgtgcatggccagtgacaggcccatgttctgagcgtggaccctgcatgtggccggggacgatgcatgacgcaa

SEQ ID NO: 704245 - DNA, 395 bp, Homo sapiens
ggcgtatttgtagttgggtaaatcacggtgacattctgattactataaaatacataggtacctgattagaataccacgcctatttggttaaatactaacaatacaggttgctattactcttgtcttactaccaattagacatttctcagaatgctaaagcaagaaggaaccttaaaaacttatctggccgcgcccagtggctcatgcctgtaatcccagcactttgcgaggccgaggtgggcagatcacttgaggtgaggagttcaagaccagcctggccaacatggtgaattatctctactaaaaataaaaaaaaataataataatagccaggcgtggtggcacatgcctgtattcccagctgcttgggaggctgaggccatggagtaaatggc

SEQ ID NO: 704246 - DNA, 182 bp, Homo sapiens
aatgtcattgtgctaaatcctgacaaataaggagatcattgaacatgctgaaaatattaacagtcttcttaacaatgtattgaggggggcaaaaattaccaattatggtctacaaaattaagcctatcaatgtgtttcacattgcacacacggtctctcagtggtacctgctctcgaacttc

SEQ ID NO: 704247 - DNA, 474 bp, Homo sapiens
gggatccccaccaccgtgggagtatcttataaattatgtccaaacatacttttgtctttcatcatctctatgtctcatgacttgaacgaagtccttgctctttaactggaagtacagctctgtcattccctccacacgacaaagtaccacctccagacagagtgttttcaacactccatgaaattttggcagcagaaagaacacagcattcatgaacctgtctgcaagaggagggaagctcttggtcactttgttcaagcacacaataaacttgtcctccatagtattctgatgttgcttcaattgtttcgcaaccagttcacacagagactcctccagtatgtattttctctccataacatatcgaagtataagtcctagaacttctgctgcagcggcatacacttctttatatcttacaaaggacatattattcaccaaagcctggaagtattcgctactctggatgcccca

SEQ ID NO: 704248 - DNA, 718 bp, Homo sapiens
ggaaatgtccagacttttccatatctcttatatattgtttccgttagtctagtatactatagaggaacaatgtgtatagtcgtgtgttcagctgggggtctacaacaacgaagtgtatcttgtacaaacaatagtgtaagtgatttaacaatttgggtacattcatatccaggcttctgcagcttgttgattctcactgtgaatccattgttctggatcatgcataagtgtatttgcaatagcaagatatacaggtttgagtatttctgcctgattatggtgattgtttcaccatgtgtaacgtgtatcggtatgagatgtaaataatggtggacgagatactgtggatgtgaaatgtgggaagtgaattttaatcatatgtaattggtcacagagggcctaactttgcaactaatctattggctgctatttatttaaccaagtgccttgttagctttgctatgcgagttaatgtcttcggagtgtaaatggattgtgtgtctagtctcaagcaagggagccacagtatttaagactagaccaatctacgtgttacaactacttccgaggtagagcaaatgttaactacaagccttaattaacagtcggtgcaatgttggtagtaatcgatgagtcgatccgatatgtgcacttaagatttggggagtttgccgatgtcaatggggcttggcattatacggctggaatccgacaatcg

SEQ ID NO: 704249 - DNA, 104 bp, Homo sapiens
tggccctggcatttaacgccgtcgggcattcaacgcctcgggccattcaacgcctccgggccattcaacgcctccgacctccgccgggaggccattcaacgcct

SEQ ID NO: 704250 - DNA, 133 bp, Homo sapiens
ctacaacttccgagggttattgaccacgccggggcacgatcaacctgaccacgagggtctgtttcctgcgagcaaacgaagaacaagcaagaaactgagattgcaatcgggatatcgcgaatataagatgaaa

SEQ ID NO: 704251 - DNA, 339 bp, Homo sapiens
tccaagatgggtagatggaccaagagttgtcacccaggctggagtacagtggcatgatcacaatgcattgcagcctcaacctccaaggctcaagcaatcctcccaccttaacctcccgagtagctgggactagaggcacacaccaccatgcctggctaatcttcagatttcatcatagaggtggggtctcactaagttgtccaggctggtcttgaactcctgggctcaagcgatcagcccgtcttggcctcccaaagtgctgggattacaggcatgagccaccacgcccagcctccctctttttccttctctagggaagaggtccatctgacccatctt

SEQ ID NO: 704252 - DNA, 349 bp, Homo sapiens
acacttcctgccctttccagcccgccatctgtgactccttccctctgagccaacatctgggtcctgccttcgacaccacccccaaggcttcctaccttgcgtgccttgagtctgccccaggtgcccttctcctgggccatggccctgaccgcggtcctggggcctggccagctggcccctgtggccatctctgctctatcttggattactccgcgtcggggacagcgagcggcaggtgcacgaagccccctgcgctgtggccccccaagccacgcatcacatgtagccccactgcagtcgcccgtccctgcccctgccgcttccccatcacctatcaaggcctccctgt

SEQ ID NO: 704253 - DNA, 408 bp, Homo sapiens
aagatccccactcttgcccctatgctgtaatgaacatgtagtgcagtatctcttttatgtgtgatttattatcatttcctttggcatatatacccggtttttgtgattgctgggtccataatatagaccatcgaaatccttctaattttaaattgagattaaaggaattgtatattagtttacaaaatccactctgatgaccaaaggaatttcttggagctattaggaaggagatggactttttcttacgttttgtttcttttaaatgtatagttttacccttttcccccatacctcttatgtccacagtctggtaaagtgacctgttctcacactaagacagggctggacaccaaccaaactttgacttatactgactaagggcaagggaattaggaagtcactatg

SEQ ID NO: 704254 - DNA, 85 bp, Homo sapiens
  misc_feature (17)..(17): n is a, c, g, or t
  misc_feature (19)..(19): n is a, c, g, or t
ggcacgagcggcacgananatgctccacccggccctgctcagaggataccttctggtacagggcttcatcttcatcttcatcact

SEQ ID NO: 704255 - DNA, 334 bp, Homo sapiens
  misc_feature (258)..(258): n is a, c, g, or t
ccccaattcagggtttttcaccccctggggggggggggggttcccccccccccccgggggccgggaaaaagggggaacaaagggggaagggggggcggcctttccccccccccccccctttttccctggggggggttttaaaaagggggttttgttggggttgggccctaacccagggggcggggcccccctttttttgggggtttttcccttttgggggcgggggggggggggggcccctaatttttggggccccanccccttccccccccccccccccaaaaaaaaaccctttgggggggggggggggggaaaaaatttttcccccttttga

SEQ ID NO: 704256 - DNA, 336 bp, Homo sapiens
ccctttggtacagggggaagtccacccccgggtggcggcggctccaaacgaggacttggccggtgatgatgaaaatgatgcagaacatgaaaatacccttgataacagacctaacttcgatggcccatttgcaaaacggccaaaaaccccgttttaacaaaagccttcatgccctttaaaaaatggctgttgtacccttattgtccccctaggccatttaaggaagacttatgctctaatttggaaaaagcatttgtgttgttctcctgggccaattttgtcaaaaaaaaaactggtttttctgtttctaccaaaaatagtaaaggcttagaaata

SEQ ID NO: 704257 - DNA, 387 bp, Homo sapiens
  misc_feature (8)..(8): n is a, c, g, or t
  misc_feature (12)..(12): n is a, c, g, or t
  misc_feature (24)..(24): n is a, c, g, or t
  misc_feature (26)..(26): n is a, c, g, or t
  misc_feature (28)..(28): n is a, c, g, or t
  misc_feature (31)..(31): n is a, c, g, or t
  misc_feature (35)..(35): n is a, c, g, or t
  misc_feature (37)..(38): n is a, c, g, or t
  misc_feature (65)..(65): n is a, c, g, or t
  misc_feature (71)..(72): n is a, c, g, or t
  misc_feature (83)..(83): n is a, c, g, or t
  misc_feature (86)..(90): n is a, c, g, or t
  misc_feature (93)..(93): n is a, c, g, or t
  misc_feature (113)..(113): n is a, c, g, or t
  misc_feature (126)..(126): n is a, c, g, or t
  misc_feature (136)..(136): n is a, c, g, or t
  misc_feature (187)..(187): n is a, c, g, or t
  misc_feature (230)..(230): n is a, c, g, or t
  misc_feature (239)..(239): n is a, c, g, or t
  misc_feature (241)..(241): n is a, c, g, or t
  misc_feature (244)..(244): n is a, c, g, or t
  misc_feature (268)..(272): n is a, c, g, or t
  misc_feature (274)..(275): n is a, c, g, or t
  misc_feature (279)..(279): n is a, c, g, or t
  misc_feature (298)..(298): n is a, c, g, or t
  misc_feature (316)..(316): n is a, c, g, or t
  misc_feature (376)..(376): n is a, c, g, or t
cctagganacantaattctgaagntnanganctananngtcagacctccaggactaagatgaagngagccnngaggagatcgnatnnnnngantgcttctgtcgttagccggntgcagtgctgtgngtatctagtnccagctacttgagaggctgaggcaggaggattgcttgagtccagaaagtgncagttgcagtgagtggagatcgcgccactgctctccagctggntggcagagngngancctgtctcaaaaaataaacaaaannnnntnnttcngtcagttaacaatctttantagagggtttttagtctntctttctcagctgtatgttaagttggttgacaaatgcaaataaacgtctttattatcctntctttctgaag

SEQ ID NO: 704258 - DNA, 771 bp, Homo sapiens
tgtagtggctcatgcctgtagtccgagcactttgggaggccaaggcgggcggatcacgaggtcaggagatcgagaccatcctggctaacgcagtgaaaccccgtctctactaaaaatacaaaagattggccgggcatggtggcgggcgcctgtagttccagctaactgggcggctgaggcaggagaatggcgtgggcctgggaggtggagcttgcagtgagccgagatatcgccactgcactccagcctgggtgacagagcgagactccatctcaaaaaaaaaaaaaaaaagaaattttttgaccggaaaattaagaggacggcttgaagggaacccagacaatgagaagggccaggaaaagaaagagctggaaattgggagaaagcccaagagctcagaacagttgggatacgggacgaagaaacaaggggtctccactacagacccagcccaggttcaattgtcctccgaaagattgaggttcttccccgtggtgattggctccccatgccctgttctatccaagattcaaattctccctttgtcctccggggggaatatctaagacaaggcaagcggaatcccgtaatagatgacgatgggattggttagcacatgtgaggggatccctccgaggtgtaactaaacgggtcgttttcccctgtttgaacattagaaaggcacggtggtgggccatgagcatgtatccccagttaaagagctggttgtccgtaaaacccaaatttccaaacagtttgtagaacaaccat

SEQ ID NO: 704259 - DNA, 302 bp, Homo sapiens
gccatgaaagacttttctcacagatggacacttcacagttaagtgccattagcatgttaaagctaggaacctacccaactgtaccaactcagtttactacatgattcccaaggatttttaataatttgtgctaaattccttgctgagcttagggtatatggtatatttatctattcacccatccaaccaaaccaaccacagattcttcactcaagaaaatcaggtaagcttggcatgatttgccgttttgcctttatgtttcttgctagtgcttttttataatatttattattttgctttac

SEQ ID NO: 704260 - DNA, 235 bp, Homo sapiens
gtaggtcgatctagagatcccagcggggaacaatcacttgagcacaggagggggaggctacagtgagctgagatccctccactgcactccagcctggaagacagagtgagagtgcagtggcgcaaactcagctcacagcaacctccctttctttcttttttttttttttgaaaaagggatttttgttctgtgcccagggtggatttgaatggtggaaatcgaggacccatggaaa

SEQ ID NO: 704261 - DNA, 657 bp, Homo sapiens
  misc_feature (1)..(1): n is a, c, g, or t
ntgaccgaacccttttattcttgtttttcctatttccctcgccgtttctaacctgggatctttttgctggcttttcacccccgcgtagagccttttgtcttctccgcaaattaacgcaccacatgtccgaaatattctcataagaacaataatacataaattcttgagggaatacttccgaaaatataagaagcgcacacttttctataaggttttcctcccactgaagggagttatgtataaagaagtcgtcgcccttcatgagagagtgacaagaactttgcgacgcgacgccccgcagagagagtgttatataatatatatatagcgcagtgtatagatggtgcgccacactgtttctatctaagaatgcccccacacaggggtgaataagacacccccgagacgcacacagctggagtgtctcttatgttcacaaaagagggaccattgacctctctatttgttttaaaagattcacgctctgggccgcaagaatgaggagagacagtgtccatatacaccacacagagagcgcactacacccttctcttaacataaattggcttcttgaggtagataatggtgaaagacaccactgcgtgagaagaaagccccacgaagatttgtgttctcgccccgtcaatagacgaaaaa

SEQ ID NO: 704262 - DNA, 86 bp, Homo sapiens
gcggccgcctactactactactactgctcgaattcaagcttctaacgatgtacggggacatgggcaacagagcaagactctgcctc

SEQ ID NO: 704263 - DNA, 984 bp, Homo sapiens
gatcaatgcactgttggctgctctcggggttagcaccctatggtgccttctctatgtgatcgcctgagctaacctgtctcttccttttcctcaacctcagggtggagccgcaccagaaatgcagagttttcgtgaaattcccttacggatgaaagtaccatcacccgtcgaggttggaccctccggataggatagaatagatgtaaaggcctaaggatccaggctaggggaaggagattcctcctgatcagctagcagactgtgtctttgctgtcaggcagactggaatatgggaccgtcctttagttgggactaccactatgcaaaaggacgcctagtgttcatcgttgttgtggacgacttttggagccgggtgctaagaaataaggaagaaggaagtgtttacaagcattcccaataagattaagcgcaaagatgaaagaaggtgaacgacttgatgtctttgatattattgataaggcggatcgagactggtcgaccacaaagtccgactaatcgttagagagatgtcgttcttgatgaatgtggggctggggtgttcatggcaagataatgtggccggacatatgtgggaactgtggtctgacttagtgggacaacaaaccccgaagacacgtacccgatcgcgtacttccaggagctgattcctggaccacacgcggaacacaggacaaaccttgcgacgcgcctgcacctccaaaggcccatgccaaccatgcggacaggcagcccagagccaccaactaaagggcaacccgtcgtcacacaggaaccggctaacacaagggggggcctgtcaacaaaaaaaccccggagagcgagatagccaacacagaccggcagcgacagcacacacgggcccgacgacaacacccacggggagccatacgggcacgaccgaggacagacgacacggagcacgcaatgacagccacaacaagactcaaccatcaccaccatatt

SEQ ID NO: 704264 - DNA, 731 bp, Homo sapiens
tgtgaaaaacccaaaaatcttctgtgtgcgaaaaagatgtgtgtgtgggggggaattttaaacccaaaaaatagacgggggggacagcgtgggggggggagacgagtgtgttgtttttatataaatcacccccattttttctctcttttatagagcgaaatattttttctttctccgcagggaaaaaatttttttttatcctccccgcgcggggggggtccgcgcggaacaaaaaaaccgcgagggggtgtgtgggccccacttctttggggggggagacacaggccgcgggggcgccacacacccccccactctccccaaaaagagagggttgagagacacaagcgcggagaaccgccgggaggaacaacggagtggtgggacaccccccacccacaagaaatatatttttcccaccggcggtccacacacaataatatattttattctcctcttcttctctctttatatttgtggagagagggaaggaaaagtaaaaaaaagagaggggcgcccaaaagagaaaaagaagaagcgcggcgagggggagggaagaaacttaatatttaataaatataaaaaagaagagaggaaaagaagaggggagagagaggacacccgagaggaagcagagagagaagaaggaaagagaacgaaaaaacacacaaggccagcccccgccccagccgggggaaaacaagaaaaagaaacgagagacaagacagccacaa

SEQ ID NO: 704265 - DNA, 119 bp, Homo sapiens
cgtctggatgcaagatgtctgtgaaggtgaacactgtgagatgtatcggccatggcatccagcactgtattatggaggtgtatcctagggtcctgacaggagcaatcttgttaccttac

SEQ ID NO: 704266 - DNA, 162 bp, Homo sapiens
cagagagatagagagagagggatagagtaactgatttgtctgtttctacagttaacacttcttgatggagtgtattgaagctgatgtatagcccagcagtgcgcacgtcggacttgtggattgcgctcattctgcaacaatcgcgtctagatacttgattcg

SEQ ID NO: 704267 - DNA, 250 bp, Homo sapiens
agatttccctgctgagttgaaatatttactgttattaaaacttgctttatgagaaattgtgaatatatttccatatacgggcactagtaacagtcagtgggcctgtcatccactatctcaggcaaaggaaagattgacttttttgaaggacattttacctccccatatgatttgactggctaggactttcttctgtaaagtcataccttttcacatcttaagtttatacattggccattttccaaatcta

SEQ ID NO: 704268 - DNA, 210 bp, Homo sapiens
ttaatcgctcacatgagtcaataagatccagagctggacactaactatgtggtggccccttcatggcaacatccctctcctcctctaccctcagtgacggtcccccgtcagataagtcccaggccaaaggataatggggacgttcgccaggactgcattcagatggtgactgacatccagattgacatgtacggaccaactccagcgtgt

SEQ ID NO: 704269 - DNA, 224 bp, Homo sapiens
aaaattgtgcgattgcactccagcctgggtgacaagagggaaactctgtctcaaaaaaaaaaaaaagaggctttggaccccctaagaggcttttataaaaaagaaaccatttggccatgtaaggggtgggcccttttaaaaaagaacagggccagtttgaaaaccaggcccctgggacccagggagattttggattcgaccccgactccttgactggaaagttt

SEQ ID NO: 704270 - DNA, 685 bp, Homo sapiens
tgggaactcgtactctttttttgaaaaaaaaaccacaaaaacccccaaaaggggggtgggcgccccggcccggggaaaaggggcccccccccgggtgttgtcgtggtcggggggggccgtgggtgtggtgtggccggcgcgcctctgtgttgcctcaatgggggctgccgccgatgctcctgcggggaatgggccccagagcaccccccattcggcggtccgagcaccatgcccgtgcaccgaaggggggcgccagacacacaaagttcttctgggtggacgtcaccccgcccccgccgaggagggaaacacatgggcgaaaatggtgggcacagaagatgtggtggcacccccacaagctccgccgcagagaaagatcctagtgacagggaatatacacagcggcccggagggagtccctactcaacgacaaggtcagaaaaaaattgcgccagaatccaccacaccaaaagaagagaccaatggcaggaacacacccccaggaggtgtcgcaaagaaggtcccaagaacccaaattcctccgtgcggggccacgggcacgaccacaggaggtctgctacagaggcccacaagtggctactcaaagatggagaccccttgttgttctgaccccgagggctcccgagaagaatcgcgcggaggagagggagagaacatggcacat

SEQ ID NO: 704271 - DNA, 296 bp, Homo sapiens
cagcgtccccacaccctctggtgaccaccacatggcccagcagccacacagcacccggctcccacctgggcgtctgaggctggaggaagctctgaccttacataaaaaaatggggtcggggcggtgtgcgtcactttgggcccatggatggtgggtgccttgtggccacatcagagcagggcttggtggggtgtgggcagggagcagttggaggtggccctgtgagagctggggaggtgtcccaaagtgccagcatgctgcggattgatggggtcgcacactccgtgcccctgggg

SEQ ID NO: 704272 - DNA, 805 bp, Homo sapiens
agatcatttatcttaggacttgcagattaagaatgttaaagatgctatggctaaaatccaagcaaaaatccctggatcgaagtcgcagaagctgaatgaataactgacccaaaggtaattagtaggagattcatctttaaaggggatattcatttgattatacgcggggagcggtcagggtaagtaactgataccttgtacgtctcgcgagtgcagctttcacagatcgctggttagactcttcattattagcccatgcactgtatgtgaggaagaattacctgtcttgactgccatgtgtccatcatcttacagtatagtaatgctgcgtatagtatggattctaagaaccgtatatcactcatctattttcctatgctgatggcactggttggacataatataacctgtatcttttacttggttgcagatagtcttgccgccatcttggccagttgcagcagatggtggagctagaacaaacaaaacataaaatcgccctctttctagccggtgcccggtgtttttggcgcccttgaacaatggactgcagacttctctttgaaacttgaacagtgttatggactgtagcactagtatctccacggtctaaggcccttcgattgcagcggatcccctttgcatattccggggtacgtaccctgcggcgttccctgtcgcactttcctcatggaccactgttttcattgggcacccttttccggtaagctgcgagacttggtcttcggttaaacgagttgtactcactgactggtcaaccttttgccctgcccgtccacccgga

SEQ ID NO: 704273 - DNA, 269 bp, Homo sapiens
tgctgcaggtcactctccaggattcaggtcttagggaggctgacgttgcagttagccgagattgtgccaacgcactccagcctggcgacagagtgagactctgtctcaaaaaaaaaaaaaaaaaaaaaaaaatggcaattttttccttttttttccccaaaaaggtaaaatcttaaagttggggttttttggcccggcaattttttttacacaaaaaaagttccgtttatgaaaattgataaaaggtaattattattaaaagtggaaca

SEQ ID NO: 704274 - DNA, 154 bp, Homo sapiens
gccgcctcctacttctcacttgtcacaaggctctgatagactctagctcatagttctgactcagccaccctgcgatagtgcacttgaggcccagggaaagacgggccacagatttaacttgtaggggggaaagcaaacaaattggacggtaaaa

SEQ ID NO: 704275 - DNA, 381 bp, Homo sapiens
  misc_feature (264)..(264): n is a, c, g, or t
  misc_feature (298)..(298): n is a, c, g, or t
  misc_feature (333)..(333): n is a, c, g, or t
  misc_feature (347)..(347): n is a, c, g, or t
  misc_feature (350)..(350): n is a, c, g, or t
  misc_feature (359)..(359): n is a, c, g, or t
cacgatgtgctcactgcacctccaacttccatgttcaaacgatatcctgcgtcagccttctgagtagctggacctcagccacacagtcaactgagcagggccctgttggcattcacgttgccaccctccacttaaacatttcttccatatgtgtggtccttggcactcaggtttaactttcccccccagaaaaggcaacttagataaaatcttagaggcctttcatactcttttaagtcctcttccagcctccctttgagtccnccttggggttgataggaattttctcttgctttcncaataaagtctctattcatctcatgtttaatttgnacgcatagaattgntgngaaataaantgttccattcaagcttacaaac

SEQ ID NO: 704276 - DNA, 163 bp, Homo sapiens
gacagatacgaatcgagcctgtacccatagcacaatctcgtagctggaggtcgtaccgagtctacctgggttaggtctacctgggttaggtctacctgttaggtctactggttaggtctacctgggttagagtctacctggaggtctacctggtgttaggtct

SEQ ID NO: 704277 - DNA, 272 bp, Homo sapiens
  misc_feature (101)..(101): n is a, c, g, or t
  misc_feature (117)..(117): n is a, c, g, or t
  misc_feature (122)..(124): n is a, c, g, or t
  misc_feature (135)..(135): n is a, c, g, or t
  misc_feature (137)..(138): n is a, c, g, or t
  misc_feature (145)..(145): n is a, c, g, or t
  misc_feature (229)..(229): n is a, c, g, or t
  misc_feature (233)..(233): n is a, c, g, or t
gagcgtccaatgaggagatttttcacctgaagtgggggcttggattcatgggtggtcccccctttgggatgtagactagagggattttggggggttttaanccaacccctttttccngctannngccggggggtntnntcgggtnaatgttttgaattttggggggcaacccccggttttatgcccttggtcctagaattaattcccctaaaattttttgaaatggggncggnttttcccctatggccccccctttcccccttttagggcca

SEQ ID NO: 704278 - DNA, 159 bp, Homo sapiens
tggtctattggtctgcttttaaatttcaaaaaaaaagcccatgaattcttggggacggggatacagagattgtttcccagctcagatcataatttctaccatctctgtgacaatcataatttcaaaagggccccactctccgcaccccgtgggggggag

SEQ ID NO: 704279 - DNA, 301 bp, Homo sapiens
  misc_feature (33)..(33): n is a, c, g, or t
gccccaaagccaaaaaaaaccaaatggccccanttgctccggatgtgcctgcccccattgggggacagggccgggcctgggctcggttcccaggtttaaactctccaccctctttcctggagtgagggggctgaagtcaaaccaaaaaaaaaactcaaaaattttttgtttatttgtgtttgtgaccaaacaccctcccccttcccccaggtttatggcctcgttttcccttgtatatttttccccctgtaaattttttgtccaaacccaaaaaaaaaattaaaaaaaattttttttttta

SEQ ID NO: 704280 - DNA, 832 bp, Homo sapiens
acggcgccggaagatggcggagtcggacatcgggcaggactgccaggtggagcattgccggcagtcgagattgtcttccatttgtgtgtgatgatagtccaggaatatttcgccttgaacacagaagcagggaggtctcatggatgtgtcctgaggtgactgtacatcaaatgagagactgaagacagatctacaacagtatcattcttacgccatgctctttcaatagcactgttgctgagagagaacttgttggcagttatactgtccttattgtgagaagaattttgcctgagacaccgtcatcagctcaagatcattgagtgtgaggaagtggaaatcccaaagccttcgaatggtgccactcagacactgggttattggacagttattgattccatagtacagggaggacagcagcagagataaaccgagtggaaatggtgccatgaagtagtgaaacaggtgcaagaggttgctagtcgatgaaattaagagatgcaattgctgaatggggataagtcgaattaccacagtaacatgaacagtaatgtcactcttcaggtgttcttacctaaagggagccggagagaggagcaacaccgaatgttctcttgagccaccgatggagcattggaaaaggccatagactttgtccgagttctctagccaggcgttcctatatgacgatgaacaatttacaggtaagaaattaaggctgtggtcacatttacttcaggagaaagcctttagccttgggatcactacttttggaatgcctgggatggctaaggggggatttgttccttttatatacatggtggggactata

SEQ ID NO: 704281 - DNA, 599 bp, Homo sapiens
acgtcggcgcagggagctggagggacgctaggatctccgccggcaggctcctgggggccggagcaccaaggtttaatataacatatcctatcatgatttttctctgccccttctcaaatcatcggcagtagaaaagagaagaaaacatgtcaggacacaaatgttattcctgggagttgcaggaccggtttgctcaagataagtcagttgtcaataagatgcagcagaaatattgggagaccaagcaggcctttatcaaagccacggggaagaaggaagatgaacatgtggttgcttctgatgcagacctggatgccaagctggagctgtttcactcaatccagagaacctgcctggacttgtctaaagcaatcgtgctctatcaaaagagaatatgtttcttgtctcaagaggaaaatgaactgggaaagtttcttcgatctcaaggcttccaagacaaaacccgagcaggaaaaatgatgcaagccacgggcaaggccctctgcttttcctcccagcaaaggttggccttgagaaaccctttgtgtcgatttcaccaagaagtagaaacttttagacatcgggccatctctgatacc

SEQ ID NO: 704282 - DNA, 858 bp, Homo sapiens
  misc_feature (378)..(378): n is a, c, g, or t
  misc_feature (787)..(787): n is a, c, g, or t
  misc_feature (834)..(834): n is a, c, g, or t
cccaaacaaaaacgctgtccggcgccaggcgcccacctgcaagcccaagccggtgctcggccagttacaaaagaaatggtcaggatctggacaacgataatgatagtattaatcctcctattaagaatcggcccaaacaaaccctcgctgtcagggcgacaggcgcccgcccaagcccagacctcggacctggttccaagcctgttcccgctgggtctctgggcgcccggtttctgcacctggagctcgcccgatgaggacaagaggccgaggaagccggttccggggacgggcaacagggactcagggaccagaaggcggctgcaggacgcgaccgagcaggaccccaggcccgggaacgacgtcgcgagcgctganactgccgggcctcccagcccatctggcattcgagcgcaggaccgggcgccccggcaccgccgcgcgccacccgctaggatgccggtggccccagcgccctcagccgacggaggtgagaggcgggcccgggcggggcgcggaaccagggtggggggctgggggccgaagacccacctttccaacaaaatccccaccgatcccgggcgcgacggggacttgggcgcgccacggcggccggagcgctccacatcagcacccctcccccagagccgctgcaggaacagggaggaggccttttccaccgcacccggagcgtttacaacgggctggagctgaatacctggatgaaagtggagaggctgttcgtggagaagttccatcagtcgttttccttggacaattaacaagnttaggcttccacagtgccagggcctggggatgctggacgtgggaganggttgtggtcgtagcctgggaaaa

SEQ ID NO: 704283 - DNA, 531 bp, Homo sapiens
ccattgggtcgggcgggtcttgaactcctgacctcaagtgatccacccgcctcggcctcccaaagtgctgggggttacggggcgtgagccaccggggctgggccatctcactggtttggaatcaggatgcctaggtcagtgagagcctgtgtgagccaaaaacagccacgttcatcttggaaaaaacttaggccgacaaatcaagtttttaattacgggaaataatcaccaagtaggggagatgcaattaagggcattttgctctgagagtagctggtgggtcttttatatttttccccaaagctcattataaaaaatactatgtcctttcatacttacagtctcaattctatcacttccggcggtgagtatggaaatgaatttggtggaaatcaaagaatttagttaataagattttttaagccggtaagtagaagtggcttaaggtttataaagaatatgggcttggctcataatttaacggaatgagacatctgacctctgctgtctatcaaattcattaccggtttc

SEQ ID NO: 704284 - DNA, 854 bp, Homo sapiens
gatctctacaacaaaaattacaaaacactgctgaaagaaatcagagatgacacaaatggaaaaacattccatacttatggataggaagaatcaatattgttaaaatggccatactacccaaagcaatttatagattcaatgctattcctatcaaactaccaataacattcttcacagaatcagaaaaaaaaagcattaaaatttatttgaaaccaaaaaagagcccaaaaagccaaagcaatcctaagcaaaaagaacaaagctggaggcatcgcattacccaacttcaaactatactacagggctacagtaaccaaaactgcatgatactggtacaaaagcatggtgctggtacaaaagcagacacatagatcaatggaacagaatagagggcccagaaataaagctacacacctacaaccatctaatctttgacaaagttgacaaaaatacgcaatggggaaagaattccccattcagtaagtggtactgggataactagctagccatatgcagaggattgaaactgaaccacttccttacaccatatgcaaaaatcaactcaagatggattaaagacttaaatgtaaaaccccaaatataaaaactctggaagataacctaggcaataccattctggacataggaacggaaaaagatttcatgacaaagatccaaaaataatgtacgaaagcaaaatgacaatgggactgattaacgaatacattgactcagcaatccatatggggttataccccaggaatctaatctcctgtctaagacttttacccaatgttccggggtataccatcgaagcgggataaacaagtccccggggaagagcaaaaagtggg

SEQ ID NO: 704285 - DNA, 544 bp, Homo sapiens
  misc_feature (41)..(41): n is a, c, g, or t
  misc_feature (44)..(44): n is a, c, g, or t
  misc_feature (118)..(118): n is a, c, g, or t
  misc_feature (380)..(380): n is a, c, g, or t
  misc_feature (411)..(411): n is a, c, g, or t
  misc_feature (441)..(441): n is a, c, g, or t
  misc_feature (443)..(443): n is a, c, g, or t
  misc_feature (504)..(504): n is a, c, g, or t
tatcttgagtatcccgcctacctgggacgatccgaccaccnagngagcgaacgcagtcaagtcaattgcctcgcccattggagaacgctttgaaagcaattatgggtatcgccttatngggcacgttgctggccggttgtgcgccgtcttactcggtatggacaggtggtatgaacgcatttgtcggcacgcgcttcgatgtccatctctatgacgattgcagccgcggctgtggcgattcctattggtcgccggtcaacaagaacaaggtctatgaccaggttgtgaaggagggcgacagccagcgctacttcctgacctggatccgcgactgtcgatactccgtgctcgtctcgggtgagggcattatccagtcgtgncgctacgagactgaagaccgtagcagctgtnacgttttttagtcggtctttgtacgaactnanatccactcaataaccaaacctaaacgcggtcaaatgtgggacgggcttgctcgcgaatgcngagtgtcagtcgccacatggggtgactgatccaacgcttt

SEQ ID NO: 704286 - DNA, 115 bp, Homo sapiens
actgatgcttattctgcaccacagtggcgcacggtagttacccggagacggatctgcagcctgagtccgagcataagcttggggtacatcctccttccctggatcactccacagt

SEQ ID NO: 704287 - DNA, 315 bp, Homo sapiens
  misc_feature (52)..(52): n is a, c, g, or t
  misc_feature (66)..(66): n is a, c, g, or t
  misc_feature (86)..(86): n is a, c, g, or t
  misc_feature (121)..(121): n is a, c, g, or t
  misc_feature (154)..(154): n is a, c, g, or t
  misc_feature (280)..(280): n is a, c, g, or t
  misc_feature (287)..(287): n is a, c, g, or t
atttcctctctacctcattttacataaagagttgtaggcccagcacggtggntcacgcttgtaatncccagcactttgggaggctnaggtgggcggatcacaagatcaggagttcgaccancctggccaatatggtgaaaccctgtttctactnaaaatacaaaaattagctgggtgtggtggcgggtgctggtagtcccagctactcaggagactgaggcaggagaatcgcttgaacccaggaggcagaggttgcagtgagccgagatggcgccactgnactccancctgggcgactgagcgagactctgtctc

SEQ ID NO: 704288 - DNA, 1276 bp, Homo sapiens
  misc_feature (143)..(143): n is a, c, g, or t
ggcggagaactccgtgtcttcttcactccctgtgcatacctctggcgtgtcttcctttcgcttgtgtgttgtggtcatgtgtggtgtggttgctgtgtcgtgctccctgactcgtgcacctcgcgtcattgattgtagatgantttgtttctttcactagctgagcagtccttgtgcgggtcgaacagataggttgttccccttctctgtgggccctccctcatgttgtttgactcgcctctttcttcccaccacagtggttgtttttttggtcgcttcttgtttgtggtccactcttcgtggcaccagggggttccctctcctcctttgagcgggggagtgttgtcgctaactcctcttcgtcccctctgttgggggcgccgcattctatttcacaggtgctcggcgcgccgccctgtgcgctgctaatgctgctcattatgtgcgcgagactgctcttttcacacgaggttgttcactcttcgtgcgggggtgggcccccttcgggttggttgtcccgccgcggcacgtggtgtggttcccacactgggcctttgccccggggcttgctctcccctatggagcaaagcctttcttttcttggggggcatcctcccggtggtcctcccagtcttgtgcgtccacagcgcacggttgagagagcacacagtgtgtgtgtgtcgtccacatagagcgctggcgcgcctctgcctcttttatagagggcctccgtcccatagtgggcgcctggtcttcaaacaggtggtttgttcgcacgtgcgcgcacacacttggaagtagtcacgtgatggtcgcccgcgtgcgttaggtggtgtagcaaacttctcctccaactcgcggccgcacacttgtgtgcacccgtcagtgatttgcgtcctcccatctgcccctgaccccgctcttgaggggccgccccacggtgagttctcgagtctccgccccgtggcgcacacaggacccccaggtcattggtgttcagctgtacttctcgtgggccataggtatgggtccagtaagaccccccttctaggcacttaagaagagggctggtacctggtcggctaggtatatcccaatagaagactgggccttaggcccgggagttccccaaatattcgtaggagggggagcaaacaaaacacagttcctcccttgagagattccctggtggattttttataacagatattatgttttattaagtattggggccaaatggtttgataaatggataattaaaatagaaaaagttata

SEQ ID NO: 704289 - DNA, 302 bp, Homo sapiens
gcctcccaaagtgctgggattacaggcatgagccaccatgcctagcctggtatttatctttgtaattctaactgtacaaagtcttatgactacagtggcatgatctctgctcactgaaacttctgcctcctgggttcaagcaattctcctgcctcagcctcctgagtggctgggactgcaggtgtgtaccactacgcccagctagtttttgtattttcagtagagatggtgtttggccaggttggtcttgaactctcctgacctcgggtgatccacctgtctcagcttcccaaagtgctggg

SEQ ID NO: 704290 - DNA, 476 bp, Homo sapiens
  misc_feature (367)..(367): n is a, c, g, or t
cgcagagacagagcccgcaccctggctgtctgtggtgcctgggccccagctcccgcccgccacccgccctgttgagtgcggcctccagactcgagtccagaatctgtttctgtcaagtcagtcgtccccagctgcacacggggactgctgagcgctgcgctctcacgggtctgttccggacagagggtggcaggggtgagccctgatcccttacaaaaaataccagcttccccattttaataaatggtcgcaacttctagaagtcctgctggtgccacctggtggggtggacgtctctcagactgcccttcactgaagccattttgtacatggggacggggtggggacgtctcttttttggtgttgnacgtttgaccagtggggaggggttcagaggcggcggtcctgtccttggctccgtctgtccgtgtggccttgctgccattccgtctgatcattaaacagagcttttgata

SEQ ID NO: 704291 - DNA, 473 bp, Homo sapiens
atctctagtctggtacttggcacagcgatgaagtctgagagtcatgcccatcgctgattataacattcactttgggcaaagcggttattaagcaaccgaatatgacatggtaaagctgcagacttccgccccgtcacttgtaatagcctcatttggaaccatttcaaggaaatttcatctgtcacatctatgacccctggccttctagaacagtaagattttttgcttttagttttatgctggtgattatcacaaggccttttcctggtgggtcactggattaaatatgaagtataaggttacatctggaattttcattacagtagggtcatgaacagctcattgtctgtccattcactgtccctagtaccgcaggaaatatgtagacagtacaggttatgataccgaaggccgggaaattagtgggtatttaatctggagtaaaggaaatatttggttccctccctgagtgg

SEQ ID NO: 704292 - DNA, 690 bp, Homo sapiens
  misc_feature (86)..(86): n is a, c, g, or t
  misc_feature (227)..(227): n is a, c, g, or t
gtcttagatcttacgagagtcagactcgtgtctagtcatgtaagtgagactgtgccactatagctgttatcctatgtgcacaatcntggcctaggaatcaggtcgcttatgctatcccttcgcacaactccagaaattgcctcaggggtgaatacaactcgtaatcgttttctaggagactagacatgccgacattgtctgcttcggacgagtcattacctgcgccntgaaactataggtatgccggatacttcaaggcgtagccatactgaatcatgcaatagttgagctggcacgccaggcgttgctactggagactaactaacatttttggcactgtcaaaaatacttgggttgaaggcaacacagataagcctccagggtttacttggctaactgggggcttcaaattgcaaccaagtcaagcaacaatatttttcactcgctctcccaatcggcgagaggttttgaaaaaaatttcaacatgattaaatttaacccccacacggaatcttttaacctgtgttgttcccggcatattcttttataatcccaaagcaactttaagaaaaaaactcttaacaaaattccctaaattttttgaattgtccaattggtttaaacgaagtgtgggttgaattcacgaataacctaatttttttgtgttatttgtcaattatgtggtaatag

SEQ ID NO: 704293 - DNA, 215 bp, Homo sapiens
tccacagctccagttcactcccaagcccccactccgctgtctcttcctggatggtatgtgcttgtccaaatggatatagccccgagatgactaagttactcaaacacgtgctggctccgcggaaggagttgtgacaggaattgctgcccaagaaatgggaaagcggaccagctccttggggaagggaggttgcttaacagggagtgacactcgag

SEQ ID NO: 704294 - DNA, 278 bp, Homo sapiens
ttgcaacacaggtttgttgcgcgttgcaagacaacaacacatgtcaaatccagttttagatttattaaataatcatcgttcaattcgtgcttatacgaatgaaccggtcaccgatgacattgtgacaacgattttatctgccgccaatgccggaccaaacatgaataattaccaaccggtcacctttattgaattacggaccaagcattgaaggcggaaattacagacaagtcgggatgacttatattgaagtgccgcccgttattttgtggtggccg

SEQ ID NO: 704295 - DNA, 948 bp, Homo sapiens
ctcgatttccttgtcgaaattctctggaggaatacttgtgtgtactccgcccacgtaccaaggatgatgtggcttgctctgtgtgtgtcttccttcttccatgcgtaggaaaggagggcactgtttgcgattgaggggatgggggggagcccaggaagcaacgagggccaggatacctcttctgccaaaagaagggtctcctctcgcgctccttctccacccctctttctggtgagccgtgtctttcagaattccacctcgatttcgtttcgagtattctgggacatgttattaggtaggctgtgagctcccaacccaccaccacctcgctcggttgccttgggtggaagtccgctgcaggatgtgaaccgaagagagcaaacatgtgaattcatggaccacgcacaggagctccaaagccccttccttggaatccctcctccttttcctgtatatacatggtatagccgcagggtacaaattacgcacacgacatctacaaaaaggaggcccaagctcaccacaataatactgaattcaccagcaagaccgaagataaccataggcacacattgcaacattgcttggacttgcgaagtgcagctttacactgtccacacagatctcaagcaaaatttcacactggaggacctgacacgaaggctcagacaccaatcctaacgcgtaattctctacaatattattaaaagaattgcccattggctgttcatgctggtcccattaagacgaatttggcaccgtgttagtcagagacgttggaattcgagaatctttaacgagctggaggagagatgggcccagttattgacgcagatcccgtattttaccaggatgcatggccgcaggctaccccaatcactgaacatggtgatgtgatgaggaaccgaaataccagcagcaggatctcactcgtgccataggcatata

SEQ ID NO: 704296 - DNA, 735 bp, Homo sapiens
gatggaaatgcagaaatcacccgtcttctgcgtcgctcacgctgggagctgtagaccggagctgttcctattcggccatctggggtctggattcggcattacatgtcttaacggaaaaatcaactcaagagtggattaaggacttaaacctaagactggaaactataaaaattctagaagataacatggaaaaacccttctagacatgacttagataagtatttcatgaccaagaacccaaaagcaaatgcaataaaaacaaagataaataactaggacctaactgaactaagagcttttgtgcagcaaaaagaacagtcagcagagtaaacagacaacctacagagtgggagaaaatcttcacaatctatacatctgacaaaggactaatattcagaatccacaagaaacacaaatcagtgaaaaaatcctatcaaaaagtgggctaggacctaatagacaattctcaaaagaggatataccaaacgtccaaataaacatgcaaaaaatgctcaacatcactaatgatcaggggaaatgccaaatcaaaaaccacaatgtgatatcacttgtgtcctgaaagaatggcataatcaaacacattggaacaaacagtagatgttggcgtggttgtggtgataggggaacactttctacactgtggtgggattgttaactagttcgcactgtggcaaatggtggggcggttccttacagatgaaagtgactccattg

SEQ ID NO: 704297 - DNA, 106 bp, Homo sapiens
ggtaagtttcaggcgcacaaacccgcaaagagtaagacggcagccgcagccttcttgaaaagaattcggggccccaagaaaagggcggtcgtttttatcggttccc

SEQ ID NO: 704298 - DNA, 535 bp, Homo sapiens
  misc_feature (130)..(130): n is a, c, g, or t
  misc_feature (146)..(146): n is a, c, g, or t
caaactataaaatggacttggctgacattctttgaacaatagaaatatctgcagtctttcacagatttgtattatgctgaagagtttcatctgacaacctgtttcctccattcccccgctatacatatanaatgtgtcccaggcangtgccccccgggatggaatattgagggtctcacggcgatagatatatcctgcgtatatactatagagagacggcccgtaatttccttagtgcacaagagaccccttactcacctccacagcttgtttcgggtgtcccctattcggtgtaaataatgcattcccctgtcgcacaccccacatggctggtgttgcccctcgactccctgagggctccgccctgcctcggcatggttaaaggcacccccccctattccccgccacggatgtgagtccctgcacccactatgtcggtccccccggctttgccctcttctcagaacccctccctctctccctcccttccccttttccacaacagcgtttcaccacctccctcttctgctgagcc

SEQ ID NO: 704299 - DNA, 267 bp, Homo sapiens
ggggccgggtgtcttttctcactgttgcttccccgagtgcgcagaagtccatcggcttcactaaatagcagcataatgttgggccgaaagcgcgaccttagagccagactgcttagcttcgaatctcagctcaccctgaggattcaacggtgaacgagacaggaatgatctcctcttatggggatttcattccagtggaagaactcacataactcgtaaaataacatatttttacacaaagagaggctaacagtaacctatacatgt

SEQ ID NO: 704300 - DNA, 774 bp, Homo sapiens
ggcaattcctagagagtgtgctgggtgggcagaaaacactgagacaggtgcccagcaggagggcataggtggcctctgcagaggggacctcagtcctgtcactggccctgaagactggccccacttctggtctctgtccctctgcctccccggaagaagatgagtgaatcgtgagtgattatcagaatctcagcatccatccatcagtggtcgcgagtccaggaacggtcatggggctactccagagagaagctatcccctggccggctgggaagcccagacagacgaggacggggaaccgtggattacgtgaatggggaggtggcagacgacatgcaagcgctagaggaagagcaaatcatcgacaggagccaatgctgaagatgggaacactgtgctcatggacccatcggatgcttccaaggagcatttcccagagactactcaagttttaagcccctgcatggttgctcctggatggagaacccaggcaacgacttgaggaaccaccgtgggcatgcagtggacatgccttggtgaacaagacagttactcacggggagcgtggaggtcccgtcacacaaagccctctccccgacgccaggctttgtggggcaggcacctggtaccaaggggaaaacgcgggtgctggtattggcaccggatgccccaggaatttaggataaggcgtgtcaccgcagtcccccattaacaaaaccaagtgacaacagttggatatctgagttcctttgtgctattaatttggattcctca

SEQ ID NO: 704301 - DNA, 733 bp, Homo sapiens
ggcacgaggaaaaaagaaaaaaaaaaaaaagcacagtggctcacaactgtaatcccaacactttgaaaggctaaggtgggaggatcacttgagctgaggagttcgagatcagcctgggcaacatagtgggaccctgtctccatttaaacaacaacaaaaaaaagcttatctacttggagagttcgcatagtagaaagaacaagtatggtattctgaaatttaggggctttagattgcaaaagaaaacctcttccagtctcgttagcaggtttagaaccagccaaatggctgttatttaattggatctcccattgtatcggcagtttttcttggttagcgcacattgtaattataacttatgtataaggtggtgctatatactataaggagttaacgaaattcagtttggaccctaacatacagttataagatgtatatagaaaatagccaggtgcggtggctcacgcctgtaatcccagcactttgggaggccaaggcgggcaggtcaggagatcgagaccatcctggctaacatggtgaaaccccgtctctactaaaaaaatacaaaaaaaaattagccaggtgtggtggcgggcgcctgtaatcccagctacttgggaggctgaggcaggagactggcgtgaactcggtaggcagagcttgcagtgagctgagatcacgccactgcactccagcctcggcgacagagcgagactctgtctcaaaaaaaaaa

SEQ ID NO: 704302 - DNA, 429 bp, Homo sapiens
ttaatttttttttgagacaagagtctcaccctgttacccaggctagagtgcagcggcacagttacgactcactgtagcctcagcctcctgggctgaagcgattttcccacctccgcctcctcagtagctgggactatagacacaagccaccatacccagctaatgaatgatatttttaaatgcatatgaaaatatgcatagaatcagaatagcaaaatattttttaaagttgtggaaaacagatgtgctttactgaggttttataaataataagatgatacacttaaaatgggtgtgttaattttttttaggagactggtgtgatggctgtataccctcagtactcacatgtgcgtctgtgttacagtagactccattgctctgcagagagagtaaagaattttcatttgaactgtccagtttgtcaaa

SEQ ID NO: 704303 - DNA, 228 bp, Homo sapiens
attgaggataaattgccataatatgatgcaaactgtgcttctgtatgataattacaatacaaaggttccattcagtgcagcatatacaataatgtaattgagtctaacacagttgaccctatgggtgacacttccattgtttaaaaatacacatgaaacgaaaccctatatgcttactgtcacctagagctttttataacaacgtcttttgttgttgttggattcttt

SEQ ID NO: 704304 - DNA, 895 bp, Homo sapiens
  misc_feature (51)..(51): n is a, c, g, or t
  misc_feature (167)..(167): n is a, c, g, or t
  misc_feature (193)..(193): n is a, c, g, or t
  misc_feature (252)..(252): n is a, c, g, or t
  misc_feature (267)..(267): n is a, c, g, or t
  misc_feature (286)..(286): n is a, c, g, or t
  misc_feature (319)..(319): n is a, c, g, or t
  misc_feature (352)..(352): n is a, c, g, or t
  misc_feature (364)..(364): n is a, c, g, or t
  misc_feature (369)..(369): n is a, c, g, or t
  misc_feature (391)..(391): n is a, c, g, or t
  misc_feature (396)..(396): n is a, c, g, or t
  misc_feature (452)..(452): n is a, c, g, or t
  misc_feature (575)..(576): n is a, c, g, or t
  misc_feature (578)..(580): n is a, c, g, or t
  misc_feature (590)..(591): n is a, c, g, or t
  misc_feature (626)..(626): n is a, c, g, or t
  misc_feature (634)..(634): n is a, c, g, or t
  misc_feature (875)..(875): n is a, c, g, or t
ccccggcgccgccgcccggagctgcccggaagtctcggttccgccgccggnctcgccaggggaagcccggggccgcccgggacctcggcccgttcctccggacccgagaggccgccgcacgggctgccgctccagatgctgctgctgccgccgcggccgccccaccntcggtcctcctctccggagccatggngcaccgggccccaaggctccccctttccccaaggcggaaggcccctcctccactccttnctcggcggcggggcnccgatccccgcgtgctggnccgccacctcctcatcgacgccaatggggtctnctacacatacacggtgcagctggaggaggagcnccggggctcgcnccagngcgaggtgccctccaggagagntcggntctcgtaagggctaaagctgcccggagtgcgcacgtgtctttgccagcactctgtngttgcagagccaccgcgtgttgcactcggatctcaagcccttcacgtgcggcgcctgcggcaaggccttcaagcgctccagccacctgtcgcggcatcggccacgcaccgcgcccgcgccggnntnnngcacacctgnncgctctgcccacgccgcttccaggacgccgcggantggcgcanaccgtgcgcctccactaagctcgagacccggcctgtgctgccctgcccgtctcagggccaccaagtctgacccacacagcgtcactcactcccacacacaccccctggctctgctgaggttactgccttaccctgggcctcagccccaccttccaaagggaggagcatcattccttccttaccccctttctagctgtgtgatgtagacaaagtcgttgcccctccctgggcctgggaacantcggaactgggttccagtcc

SEQ ID NO: 704305 - DNA, 132 bp, Homo sapiens
ccccccccccccccctggggggcccccccatcatggggggggggggggttttaaaataaattggggggcctttttttgaattcccccccccccgggccccccttaagggggggggcttttttccctttttta

SEQ ID NO: 704306 - DNA, 483 bp, Homo sapiens
  misc_feature (38)..(38): n is a, c, g, or t
  misc_feature (66)..(66): n is a, c, g, or t
  misc_feature (125)..(125): n is a, c, g, or t
  misc_feature (443)..(443): n is a, c, g, or t
  misc_feature (446)..(446): n is a, c, g, or t
  misc_feature (471)..(471): n is a, c, g, or t
  misc_feature (473)..(473): n is a, c, g, or t
atccaaaataattgtaaaaaaaatttgggtacttgcanggaacgcaagggatcatgtcctgcaaanctgggtccagaaaatgggtactgatatcccaaaaggaaacacaggggctccctcttccnattcccaggggcatcccacatgaacccgcacaaagttctgaatgatttcctgcatgtcctcgaactgaaacagtggctggaagcaagatttatagttaagtcccacatcgtggtaggtaaggatcgctgggcgtttgggtttgggggtgccatagacagtgaaagtgacagagccgtatggtgtctccacagagtgagtcttgggccctcaggcgtctgtcctggcaacagtggcttctcctctgtgatctgcacctcctgcagtccgccatggtggctgggctcctattggctggatgcagtgggattaggggtcanaantctcactccttctgaactctggggntnctctgccgcc

SEQ ID NO: 704307 - DNA, 252 bp, Homo sapiens
agagactcccgacgctctctctgtggggggctcactccgtttcttcttctgattctgcttgtggtccggggatagaccatgaggcgtctccagccacccactgacgatctccttggtctccgcccggatgaactgctccttctcaggcgtcagaatacacagggcgaacttctggcccgtgcggccctccccatccaccaccatccgtcactggcccggggtcacgcagctcgggggcgtcaatcatggtca

SEQ ID NO: 704308 - DNA, 145 bp, Homo sapiens
  misc_feature (83)..(83): n is a, c, g, or t
tgcctcctgcatgcacgtccagcaatgatgtacagcccatggcccatgccacccgtagtagcggtgagcagctcgtgccccantcagcgccagacgtgaagtgtgtagcacctttcccattccgtggtgacgaagcatgtggcgg

SEQ ID NO: 704309 - DNA, 224 bp, Homo sapiens
cctctcatacaagtgcgtatcctttatccaaagtgctaggaccagaagtgttttagatttggattttttttttcagatttttgaatagttgcattgtatttactgctgagccttcctaatgggaaaatctgaaatctgaaatgcttcaatgacttttttttttttttttttttttttttttttttttttttttttttttttttttttttttttctctcctcctt

SEQ ID NO: 704310 - DNA, 2305 bp, Homo sapiens
  misc_feature (21)..(21): n is a, c, g, or t
  misc_feature (70)..(70): n is a, c, g, or t
  misc_feature (1119)..(1119): n is a, c, g, or t
ggcttattactgtgatcaaangtcgaacgtgctacgacatccatggactactagagagctctctgtacgncaggacttgtgtgccgtacgcatgtgactaattagagaagtaagtctctatagtcggcgagatgcggccacaagtatgcgcagccagtgagtctacaggagatcctcatagcgtgcagagtagagatgggcatgactggtgctatcgcgtatacgctcgattgacattctggcaattctatcgtggggcaacacagtatagtagtgcacattcatcttagggagacttctgaagagagctggatcgcacgtcccttcgcacaatatcgtagccaccagacaagcgcacggcgcgccgcgcgctctctcgcagacggcaccatcaagcttcgtcgacgcattcacgggccacatggtgtgctgcgttggcatatcgctgaaagtagaccgcgtacgagccatggtgccgacaaccgacgttgacatagacaactaggatacaagttgtgcacattgaacctctacgtttaccagcattacattccaattgaggctcacccatcggttcggaaccctctcaacggctggaggatacaacaaacaggcggaacgaaggtacactatccctcttcaaagacgatcttgcagtcactgttcgggtcaaggactctgccacatcatttgctattgctgtactacgccacatagtgtagtagtaattttccttattgacaccctctcgataggcactagagacgatactacacaaacacaatagcaaataggacatacacggggtcagcatatactaatcgaccagacacacattagatcgctaagcgagtcatggctgcgacaaccatcacaaccaagacgcacaccgcttatggaataactcatttggggagcagtattgttcaccccaggttacgcccaccaacaggccgacatgcggtctcagcaatcggaccaatatacaactcgacaatctagtcacagagagacacaaaccacataagggaacacatagacagcgtacactgcaagcacaacagtcagccaactcatactagtaacgctaacagtcaggcaacacagactatgacacgngcacagagataagagcacacactacgtgactgcaactaactagctatagctacgaacgacgtcgctcagtagtacacacacagacagcacatcacgacaagcttaccacacaatcaagcagagcgccgcatagaccgaccagcaggataacagagacagccggtaactaccgaccacatcagcgcgatcatcaagcctgacacagcacgcgcaagacgagaccagacagcatgtctattcggagatacacccatccacgagcactaggcaagccacctatctcgtgactctgccagcacacgagggaatccagaccaaccgcaatagcgagagacgattgacagacagaagtagaccgcagacatcacatagagacagcaacgaacggcattgcgcggtaacagacacgccaagtgacaacaggcagaagcgccttagaccagtcagtacatcacgtctaggatccacgcgagagtaactgacccacaccatacgcgagactccacataggcacacggcaaccaatcacaacacttagagccgaacagaccccaccgcgctagcagctcagagcacacaccagactcacacaagcatgagtagatacccaccgagtcacgagcgctcacacacagcaaccgagagaacgacacacgagcaagatggaacaaggactgagaagactacaacacatatattaaatctatcaaaccaaacacctaataacctagattcgacaacccaaagtgtaagctgcacataaccacaacaacactcacacaacagtaacaatttcaaaatcacatacaaaattacatacaaaagataatatcaacatatcactcatatacacaatcaacaataacaaatcaaactaaacatatctatctcccatcaacattcattatcaatacacactaacaacaatgaaatctgataacacacacactaacatcaacacactatataacgcaacaactacacgcaaaccagaaacacacacaatctccacaatcataaacacaccgacaacatcaccaatcaacacgactgatcacacaggaatacaccacacacacaacagatttaaacaaaaattcaaataaaaacacatacacacaatacaataaacaaaatcacatcaaaaaaacaaatcaacataatacaaacacaaacatcctataaa

SEQ ID NO: 704311 - DNA, 707 bp, Homo sapiens
ctggctgttgggcccggagcgcttgagcgccttcgtcttcccgggcgagctgctgctgctgtctgctgcggatgatcatcttgcctgctggtggtgtgcagcttgatcggctggcgcctgccatgcctggacccctggcgcgctcggccgtctggtgctgcctgtggcgctgctctttttcctgtgtcagccactgcttgctttgctgtctgtgctgctctgtgatgtgtggcttgtgcgctgtgctcgtgcagcctgtgtgctgccgcctcctgcctgctcatcagactgctctcctgttggtgatgcctgcgttgcatgttgcctgaaaagtgcccccagcaatggaggtgctcgattcgttcctgtgatcttgctgagaaatatcttcccttccaacctaggtgtcatgcagcctttcgctcatactctaccacctatgaagagatggaatatcacctggaaccagggtgaaggtgccctgtggggcaggagtgtggagggtgatgaacatcctgggtgcttggtacgtgtttgccatcgtctttggtgttggcgcttgcggaatgcttggggcctgaattgggagcttgcttatcctgcttcttcaaactccttcaattgatgccaccatggttctggtctcctgggaatcagtgttggtacgccactgtggggcatcagtgttcctggtggcttggcaagga

SEQ ID NO: 704312 - DNA, 250 bp, Homo sapiens
ggcggtggtgagaggggaacaaaatatcccacgtgccaggataagaattagaactgtatgaccttgataaaaccagaaaatccaagttgcataagataattaggagtactaaatatcctgagtatcttacatctccaacatcaccatgtgctttagtacacataaagtgtctggaaggatacacgacaaattggtacccatggctcctatatggggaagaatcttcagtgttccgtgctgtggcagtatc

SEQ ID NO: 704313 - DNA, 197 bp, Homo sapiens
gaaaactggggaaaaattttagggggggaaggccgtttttttttcccttcccccctcctccagaaagaaggggggggcgggcagcccttggtgggcccagggttttgccccccccccccttcccttttggaagttttggggccccagggtttcccccacccggccttgggcaaaaaaaaaattgggtttttttttta

SEQ ID NO: 704314 - DNA, 81 bp, Homo sapiens
agcggaggggagccagagccggacacggctgtggccgctgcctctacccccgccacggatcgccgggtagtaggactgcgc

SEQ ID NO: 704315 - DNA, 327 bp, Homo sapiens
gtcggtacctgtgtgtagcacaacctagggtcagttttgcaggtgtaagccatttaccaagatagttgtaggtaaagaagggcagatttattagagaaatgtgaaaatatgttgcagtgggcagctcagcagagaaggggctacctgcaaagaggcaagggctggaggaaagttttatagggtcctgctgaagggtgctacgtgtggaatgaggtcattgtgcccgcaggttgtttgtgattagctgtctctaacaattgttcatacaataattgttcattattgttctcaacttggggctctccccaacctggggacccttcctta

SEQ ID NO: 704316 - DNA, 123 bp, Homo sapiens
agctcctggttagatcctcccaagtagctaggactacagactgtgtgtaccactcctagctaatattttaattattttgtagagatagggtcttgctagttacccaggctggtcttgaactgc

SEQ ID NO: 704317 - DNA, 122 bp, Homo sapiens
gtgtgcctagaggatccccgcgcacggggcgtcatcggccgagttatctagagtcaccaaagctgccgggccgcccccggccgtgccgaagagggctgaccgggtggtttgatctgataaat

SEQ ID NO: 704318 - DNA, 166 bp, Homo sapiens
gagcccccattgtctcctctcataccatctcaagctcaaactcagctcttcccagcacacactataagccaacattcattggtggacttactcatctctctcatccccaacagcttgtccaccaaaagtctccaaagaagagatttatttttttttagcatcacat

SEQ ID NO: 704319 - DNA, 379 bp, Homo sapiens
ccagaggctgaggcaggaataatcacttgtaaaccagcaggcggaggttgcagtgagccgagatcgcatcattgcactctagcctgggcgacacggagcaaaactctgtctcaaaaaaagaaaaaaaaaaaagaaaagtacagttactttaccaaacagttgggtcgttgcttattaattatacattacactgtccaaggtgataaaactgggtggccagtttattgcatttgctatgcatttgcttcacagtgcagttagcagcccgttgctgaaaatgattttaagccctgcataatgctaagctttatggtgattacctgtatgtgtcttctttcttttaagcagacccttacctttccagggtcaacgtacggaa

SEQ ID NO: 704320 - DNA, 208 bp, Homo sapiens
gacatttacaggcagcgcgacgtcaggccgcatgtgtattttcttatagatcatgtgtgacatttaagaacccatacatgtactaacgttctgttcttgaaattttctcttcaagtatgctatggcggcagcacctccgcgagaggggttagggtggaacccgatgtaggaacagtcgtgatggacttggggggatcacacgtcgtgt

SEQ ID NO: 704321 - DNA, 716 bp, Homo sapiens
  misc_feature (162)..(162): n is a, c, g, or t
  misc_feature (299)..(299): n is a, c, g, or t
tttggtgctagctgttctagagtatccctcttagtcctgctaatggtggtgttgttgcagaagaactcgaaggggctctcggtaggagcggtggaactcgatcagggcctcctcctccgccgtgtgtgctggggcgccgaagttcggggccccagcccttgntcctcacgcttgttcccctatcatgagccctggatgtggaccgtggagggctagagtcctgctcctccagctttgttcccctccatgagacctgttatgggctgcagaggtctagggtcctgctcctccagcttgtncccctggtctgtggcttccctctcttgcggcagtctcttgcgactttcttaaagtgaaagcgggtgtcacccaggattccaaaccagtgttcccttgcttaccttgatactgctcatgatacctcccctttgtaacgggacaggtggattttccttcattgggtcctaatgaagaaacttgacccttccccaaggataactcagtttccttgaggttagccacacaaaatagtgagcagagctttaaccagaattcagaattctcctcctcctctggggctattctacttagcgcttttggcgattacttcactgagacagactcatgggggatcggggctcaggtgcacccggatgtgaaagcgggaaaggctccttaaatccacaagagccgtggatcggctgactctggggcgc

SEQ ID NO: 704322 - DNA, 799 bp, Homo sapiens
  misc_feature (26)..(26): n is a, c, g, or t
  misc_feature (193)..(194): n is a, c, g, or t
  misc_feature (198)..(198): n is a, c, g, or t
  misc_feature (201)..(201): n is a, c, g, or t
  misc_feature (205)..(205): n is a, c, g, or t
  misc_feature (281)..(281): n is a, c, g, or t
  misc_feature (321)..(321): n is a, c, g, or t
ggagtctcttggaaacttctgcaggngaaaagagctaggaaagagctgcaaagcagtgtgggctttttccctttttgctccttttcattacccctcctccgttttcacccttctccggacttcgcgtagaacctgcgaatttcgaagaggaggtggcaaagtgggagaaaagaggtgtagggttggggttttnnttgnttngttntttaatttcttgatttcaacattttctcccaccctctcggtgcagccaacgcctcttacctgttctgcggcgccgngcaccgtggcagctgagggttagaaagcggggtgtattangattttaagcaaaaattttaaagataaatccatttttctctcccaccccacaagccatctccactgcatccgatctcattatttcggtggtggctgtgcggggtgaacaatttggtggctttttttcccctataattctgacccgtcaggctgaggggtttctccggctccgtcactgcgtgctacctgggctgcctgttcccccaacctgtgcaagggttaaattctggactgggacctgtcgcaggcacccagcctcaactctctctacattttgcagtgtctgggggagggactggtctacttggcagaaatttaaacaaaacaaaaaaaaaaaatttgggggcccgcccgaaaaatttaaacctctgtgggcggcccaggagaaagggcaagggtcagaaccggcacacgggggttcacaaaaccgggcgggttgaaccgggttggctggttagctatccccccccccgggaga

SEQ ID NO: 704323 - DNA, 211 bp, Homo sapiens
tcctctcggggattcccaggagagaagggcgaagtaggatgcaattggactggatggtctggactggtgaagatggagacaaaggattgcctggttcttctggagagaaagggaatcctggaagaagggggaacgggaggacgcgaaatctccgtttcatggaggctgaggcaagagaacatatcggagcctggatgtggaggagcccaat

SEQ ID NO: 704324 - DNA, 732 bp, Homo sapiens
ctatatctgaattctgtttgattttagcctgtaataccatctgaaaaccatgctttcaactctatacagtgatctttcaatgctaaacagcttaagtttgcttatgagactgtaagtacttttcaatcccgtcaaaaatctgagaatgaattaaatattacctgagtatacataaaacaccaaccatagctcctaaaacttaaaacaattgtagagacagctgactacctggctagcctctattccttctaatactggggcatctgtcctcaggcttctgccccagacatctttagagttcttgccaggattttggttccattttacaacatcagagtagcaaaacaaacaaatcactcttggtgttggtaaagaggtagaaaatgcagtgctcacagacagttatggtggtataagttggggcaaacaggtttttttttttttttaatttaaaattttcacacatgctgtgggctcatgttgggggtcattggaagagtggcctctggtgttctttcttgggacccttcctctggttgtgttcttgtcccatagggttgctgtatgctggagacaaaccgggctggaacgtgaatggagttccagtaaagggcctggaccctgtacaagtgatcccatatttgcgggtatgtcttggggtaacgaatcattgttcaagggggataccggtctctggccccgctgtgacacgcagaacatggtaaggacaca

SEQ ID NO: 704325 - DNA, 172 bp, Homo sapiens
  misc_feature (134)..(134): n is a, c, g, or t
actccagatggaacgactgttcgctcatatggagatcaggcgtgtccagtgtagtctagtgcgtacgaaatgatcttgggcattcataagtcttagagcgaaagcctataatcactgcgcccgctcataagggnatggccattcaacgcctccgggccattcaacgcctccg

SEQ ID NO: 704326 - DNA, 136 bp, Homo sapiens
  misc_feature (98)..(98): n is a, c, g, or t
tgtagtaggcgataactgtaggggtgtaggtgtccttgtggagaggatatttaatcttagagcgaaagcctataatcactgcgcccgctcataagggnatggccattcaacgcctccgggccattcaacgcctccg

SEQ ID NO: 704327 - DNA, 777 bp, Homo sapiens
  misc_feature (37)..(37): n is a, c, g, or t
  misc_feature (147)..(147): n is a, c, g, or t
  misc_feature (152)..(152): n is a, c, g, or t
  misc_feature (313)..(313): n is a, c, g, or t
  misc_feature (319)..(319): n is a, c, g, or t
  misc_feature (334)..(334): n is a, c, g, or t
  misc_feature (425)..(425): n is a, c, g, or t
  misc_feature (443)..(443): n is a, c, g, or t
  misc_feature (480)..(480): n is a, c, g, or t
  misc_feature (594)..(594): n is a, c, g, or t
  misc_feature (603)..(603): n is a, c, g, or t
  misc_feature (662)..(662): n is a, c, g, or t
  misc_feature (675)..(675): n is a, c, g, or t
  misc_feature (690)..(690): n is a, c, g, or t
  misc_feature (736)..(736): n is a, c, g, or t
agtgtcacaacaaaaccaatcactacactcatccacnctaagtagtaacagcttaggattcactcaggttttcacaagtcctgattcagaccttttttaaacaaagtagattggcataaaaaataaaacgcactactcacctcttanatggngttttatagccacgtgtccattttatatatatgagaggacaatttctaaaaactctgtaaaatatcaatgtccccttccaagaagggaaaacaaatcccaattttgttttaaacaaaaagtatgtggttttagagggactttacataaatggccatatgtnttaccngtaccaaattaagcngttttaaatttacagactacaagcaactcaacccaaatgtctaaatgtacatccttttctgttctacatttcagccaatattgcagaactnatgacaattttaaaagtngccattaccaatactgtttactgtggcaagacacctnaagttacaacaaaatcttaggaaataagactgaataatatctgttatagaaataccctactctttaccaactcccaccctccctgaccccttcaaaatcataagccgccctctnctgtcacanacaaataatgtaagactggtgaaacccaatttatgtggcgtatctctaggtccactgtntggccatactgtnatgtgctgctctctnggtcacatactgagtggcaatactccccaccaaggggtcggcaggnttacagtgtgtgagaagtgagcagagagaaaggaggactct

SEQ ID NO: 704328 - DNA, 1269 bp, Homo sapiens
ttccagtggtagcgagcagtaccaggtctcggtccagctcgagcgttccagctcaggctccagcaacgcagcacgtggcgtcaagcagtggcatccaggctcattccgtcaggcatccagccgcgtcaggaagctccagcacctcccgcagctccagcgtctagcagctcttcgtggctctccaagtccttctcggcgcagacagcgatgaacgaggaggcgctcccgctccaaatccaaaccactctaaaagagatgacacagggagaggaacaaggcggagcccatctcctaagcccaccaaagtgcacatgtgggagactcacccggaattgtgacgagaggatcacatcatggagatattttccacctatggggaaaattaaacatgattgacatgcccgtggaacggatgcatccccatcgtgtccaaagggctatgcgtacgtagagttggagaatccagatgaagccgagaaggcgctgaagcacatgggatggaggccaaacttggatggccaggagatcactgccagcggcgagctggccgccttgggcttagggcagcccccaaggaagattccagccttcccagggagaatggtgtgcacacaacggctatggtgggccgcaggtctcccccgaggtatgatgagaaggtcccggatccccagagggacacaagtgtcccccccggtgcagccggaaaaatcacggggtgcccccggtgccgtctggcagcaagaaggaaagcggacacaagaatccaaaagatcctcccggatagaaacaggggcccatgagagagactcatagcgcatggtaacatttttattcccccaccacaggaacaagtgaggggtgacacatcacccagcacagcaggggaaaaccaccaggagaggggaagaaccctaggtagaccgcgagcggcagataggaacgcgcgaacggggagggcgaacccaccacttatgtaacaaccgaggaggccacccggcgggcagagaagacaaatgacggacgggcccagcacaaacagatgatggccctcacaacaccaataaaaccccccgagcagcttgggtggacggacaagccaacacacaacgcgtgcctaacaacaacaaaaaacaggggggtgaaccggaagaaaagcaacacgctgatgttgttaccaacaaacaacgagcgacgaatgactcactacagacaaaacacgccgcaagcagaccgtagagtagtaggacagacagcaacaacagacaa

SEQ ID NO: 704329 - DNA, 302 bp, Homo sapiens
  misc_feature (244)..(244): n is a, c, g, or t
  misc_feature (259)..(259): n is a, c, g, or t
aagcaaggtgtctttccacatctccatgccttgtattttcattaaaaaaaaaaaaaaaaaaaagcatttcagggccaggctcagtggtttactcttgtaatcccagcacttttggaggcctaggtgggaggatcacttgaggccagaagttcaaaaccagcctgagcaacatagcaagaccttgtctccatgaaaaataaaaaattagccagaaatggtgatgtgtgcctaggagttccaactnacttgggaaagctgnaggcaagaggatccgcttgagccttagggagtttcaaggttgg

SEQ ID NO: 704330 - DNA, 563 bp, Homo sapiens
  misc_feature (330)..(330): n is a, c, g, or t
atctagaggaccccacccgggtccttctccaccctagtcttccatttcctccgcgccagtctccatggaatcaggggtgcaggacagaaagccagtcagactaatttctttctttcctcgcacttctccccactcgtcatctttaaagtagggtatcacaaggatcctctgaaaccctctcggggccccaagtacagatcccattagttcggctttcgtatctcctcaggcaaaaggggagggtgccttaggggccctcctcataggtggtctctgcatacacgaacctaacccaaattggctggggtgccagaaaaactgagctatgtnggaacaaagatgtcgtgcaaagggtacggtgaacaagggtgggtttaaaatatgaggggcagggaggaggatgcatttcaaaggctggatggatgtgtacagagctaaatgaagaggagtttacagatcaaggaggggttaccatgttgggtcagagggtcggaggcggccattcattgggctccccagatatcctagagggcgtaaatagggtcatatggtgacggtctcat

SEQ ID NO: 704331 - DNA, 100 bp, Homo sapiens
cctcctccttcatgtaaatgaaaccactcaatgtggtagtgactccagcagacttaattacattttaatggaacactgtctttccttttttttttcctct

SEQ ID NO: 704332 - DNA, 1006 bp, Homo sapiens
  misc_feature (14)..(15): n is a, c, g, or t
  misc_feature (19)..(20): n is a, c, g, or t
  misc_feature (22)..(22): n is a, c, g, or t
  misc_feature (72)..(72): n is a, c, g, or t
  misc_feature (161)..(162): n is a, c, g, or t
  misc_feature (255)..(255): n is a, c, g, or t
  misc_feature (451)..(451): n is a, c, g, or t
  misc_feature (468)..(468): n is a, c, g, or t
  misc_feature (543)..(544): n is a, c, g, or t
tgcaggctgtacgnnccgnntnctggggtggccagagcaaggcaagtttcgcccgggacccgcccagctggncgggagccagtagcagggaagggccggctggcgcgagcaccgccacgcggagccatgggggcggggcctgggcgggggcggggccgcgnncgagggcggggcagggaggcagcatgctaaaccgggtgcgctcggccgtggcgcacctggtgagctccgggggcgctccgcctccgcgccccnaaatccccggacctgcccaacgccgcctcggcgccgcccgccgccgctccagaagcgcccaggagccctcccgcgaaggctgggagcgggagcgcgacgcccgcgaaggctgttgaggctcgagcgagcttctccagaccgacctttctgcagctgagccccggggggctgcgacgcgccgatgaccacgcgggcngggctgtgcaaagcccnccggacacgggccgccgcctgccctggagcacaggctacgccgagaccctgttctgccccagagcccggaggcgnnagagcccggcgaaggatgagttggccagttccccgtcgcggcccggcagcttaaaggctaagggaaaaggggtttcacgaaggagcggggttctttttaataggggacatagcggttgggaagactcgctcacccgcttcccggctccagcgccccagttccctgtccctcttaccgtagttcccctccccctccacacccagaaatagcccgcgacaccaggaggccgccagcttccccaggagcggggagggggacgcccggggtagaggagggtcccatttagatgcccttcagcctgccaactcgtgctggcctggcaaagaagcggaccccctgcccggagcggccggctggcccccgggctgtgtgtattttaaatgcatctgccgggaacgcagagcaccgagggagatgggggcgctcagttcgctgaggaaggtggctggtggcccatggacc

SEQ ID NO: 704333 - DNA, 266 bp, Homo sapiens
agtcccagcactttgggaggctgaggtgggtggatcacctgaggtcaggagtttgagaccagcctggccaacatggtgaaaccccgtctctactaaaaatacaaaaattagccgggtgtggtggcaggcacctgtaaccccagctactccggaggctgaggcatgagaatcacttgaacccgggaggcgaaggttacagtgagctgagatcgaaccaatgatacttcagattggaaaaaaagagacaaaacaatgtctaaaaaaaa

SEQ ID NO: 704334 - DNA, 826 bp, Homo sapiens
  misc_feature (14)..(15): n is a, c, g, or t
  misc_feature (19)..(20): n is a, c, g, or t
  misc_feature (22)..(22): n is a, c, g, or t
  misc_feature (72)..(72): n is a, c, g, or t
  misc_feature (161)..(162): n is a, c, g, or t
  misc_feature (255)..(255): n is a, c, g, or t
  misc_feature (451)..(451): n is a, c, g, or t
  misc_feature (468)..(468): n is a, c, g, or t
tgcaggctgtacgnnccgnntnctggggtggccagagcaaggcaagtttcgcccgggacccgcccagctggncgggagccagtagcagggaagggccggctggcgcgagcaccgccacgcggagccatgggggcggggcctgggcgggggcggggccgcgnncgagggcggggcagggaggcagcatgctaaaccgggtgcgctcggccgtggcgcacctggtgagctccgggggcgctccgcctccgcgccccnaaatccccggacctgcccaacgccgcctcggcgccgcccgccgccgctccagaagcgcccaggagccctcccgcgaaggctgggagcgggagcgcgacgcccgcgaaggctgttgaggctcgagcgagcttctccagaccgacctttctgcagctgagccccggggggctgcgacgcgccgatgaccacgcgggcngggctgtgcaaagcccnccggacacgggccgccgcctgccctggagcacaggctacgccgaggtcatcaatgctggcaagagtcgggaacaatgagggaccaggcttgctgtgacagtgggtgtatgtggaaggtcggaggagtgttcagaggagttactagggagcttaggccgaggacgggagaatacttgtttatagttatggtggactaatttgatgggacatgcaagtgagccggagcatgctgaaaattggacatcacgggatccttgcattcgactatatccgagagcagctaaaggacctggtagagattactttcaggaacccttcggccaccatcccatttgactcgcaacacttcgggaccaag

SEQ ID NO: 704335 - DNA, 220 bp, Homo sapiens
aaaaaaagatcggcccgggaagggagcaacacctgtccattcagaaggctgttactgcctttggggaaggatttggcctagtatttacaaaattttacaatgttttcggcaaaacttgggattagggacctattaattggagatatgacacatttagagaagagttggacacattatattttacacactcttatattgagggatatatttagcacacata

SEQ ID NO: 704336 - DNA, 335 bp, Homo sapiens
tgcggcctggacccctacatacacagtgatctcctgaaaaccgtagagggccctcaaggcctttaatgcctcctaggtcaacagggcactcaggagctctcgggtgccctttctagacaccacccaacttcaaattttggcacgaaacaaaccgagacccgtaaatttatgcgcgaaatttcctccggacagggatcccagacatttgaagggatgatgatggattctgtgtgtttagagagcaacgcaacattgcctactatgtgagcaatgaggagctgcggggaagtactccagaggcagcgcgcaaggtggtgcagttggtgagtttgttg

SEQ ID NO: 704337 - DNA, 779 bp, Homo sapiens
tacagtttttttaaggccccctgtttttaagatttatttacgcggcatctgtcttcctttctgtggaaaaagttatacacaaatccactggtcccccctttgctaattctatactttaggaacgccaacttttttctaagcggtccttttctttaaaaaaggttaatacttctttgtcaccctccttggagagacatcatataacaatgaatgcacattgttcgcgagtgacacaatttcttcgcccccccccaccctccttgtaccaatactgaactatctccccttggatcatcaatcattatttatcgagattttccactccgtccaagtaaatatcatttgtgagtgaaagaaaagagtcccttctctgagaaagtaaacagaaatatatgtttttacatttctatgacaagaaccctgtattcacacagttcataatgctgatgttatttgacacaatgtttgtatctccttgttgaggcgcagaactaaattgtgtgttatcttatctccaagacttaaacattccccgctttacagaaagtgcgatagatacaacttctccccctcctcctatactggacagtgtcgtggattcttccccgctggcgaacctcctcttgcccccaaaaacctttaaaagacagcacagaactatttaaatagaaatgcgtactaatttgtgtagtcacctatatatgcagtgactcccccattgtacgctagacaccttcttaagaagtaaataaaaataactacgaaacctatcaatgtcc

SEQ ID NO: 704338 - DNA, 426 bp, Homo sapiens
gtgggcacaaactaaagctggccacagtcctcaccacacccactgcaccctgggcactaaagaagattacagtttctggctgggcgcagtggcgcacgcctgttaatcccagcacttcaggagggcaagggtgggtggatcatttgaggtcaggagttcaagacgagcctaacatggtaaaaccctgtctctactaaaaatacaaaaattagcagggcgtggtggcgcacgcctgtagtcccagctacttgggaggccgaggcacaagaatcacttgaaccgtggaggcggaagttgcattgagccgaaattgggccactgcagtccagcctgggcgacagagcaagactccatctcaaaataaatcaatcaattatacagtttctgtctatcatcacatgtgttcccacttgctttgcgggggat

SEQ ID NO: 704339 - DNA, 664 bp, Homo sapiens
  misc_feature (67)..(67): n is a, c, g, or t
  misc_feature (82)..(82): n is a, c, g, or t
  misc_feature (84)..(84): n is a, c, g, or t
  misc_feature (94)..(94): n is a, c, g, or t
  misc_feature (165)..(165): n is a, c, g, or t
  misc_feature (182)..(183): n is a, c, g, or t
  misc_feature (197)..(197): n is a, c, g, or t
  misc_feature (243)..(243): n is a, c, g, or t
  misc_feature (260)..(260): n is a, c, g, or t
agattacagttgcgggcacagaaatttaaataatggaactttctctaagagaaacagaaaggagacnactagcagcacttcncnacatctttcntaaactcaaattaactcatcctctgtgatcatacctgtgacctctgggtgcttcagcagagaaagagagcnatatctcagggtgtgcnntgtggtctctgtcncagctcaagctttcctaggaatgatttgatgcaattatctgacaanttatttaacagcatatntgatgacagtaaattcaaattactcaccattgtatacttaccaacatagaaactgtaaagtatagtactagaaaaaaatattgaataggagaaagaaattaagggtaatcaattaggaaaagaggaagtcaaattgtccctgtttgcagatgacatgattgtgtaactagaaaaccacattgtcacagcccaaaatctactgaagttgcttatcagcttaaggagattttgggctgtgacaatgtacaaaattcacaagcattcttatacaccaataacagacagagagccaaaacatgagtgaactcccattcacaactgcttcaaagagagtaaaatacctaagaatccaacttaggagtgatgttaaggacctcttcaaggagaactacaaaccactgctc

SEQ ID NO: 704340 - DNA, 204 bp, Homo sapiens
cgctcgtcatcggtgccgtcgccgtatggcttcacaaccgctatcacaacatcgagctcccgctttcctcgggttcttcggaggctcacgcttcgttcccattgttacggctttcgcgggaatcatcattggcgcattcttctttgtcgtctggccaccaatccaggccgggatggtgtcagccggcactgcgatcgcagactg

SEQ ID NO: 704341 - DNA, 1080 bp, Homo sapiens
  misc_feature (12)..(12): n is a, c, g, or t
  misc_feature (524)..(524): n is a, c, g, or t
  misc_feature (713)..(713): n is a, c, g, or t
  misc_feature (735)..(735): n is a, c, g, or t
  misc_feature (766)..(766): n is a, c, g, or t
  misc_feature (787)..(787): n is a, c, g, or t
  misc_feature (865)..(865): n is a, c, g, or t
  misc_feature (895)..(895): n is a, c, g, or t
  misc_feature (915)..(915): n is a, c, g, or t
  misc_feature (987)..(987): n is a, c, g, or t
  misc_feature (995)..(995): n is a, c, g, or t
  misc_feature (1008)..(1008): n is a, c, g, or t
  misc_feature (1016)..(1016): n is a, c, g, or t
  misc_feature (1076)..(1076): n is a, c, g, or t
ccatccgaacgntggccgatccgccacacaagctccggcgtctcgtcacccgggatcctctcgccttgatgttgagcgtcctgcctcccgagatttggggcgtcgtcctccggtctcacaaagtcccgatggctctcctccagagagcggatcacctgagccggctgtttcgtcgtcatcgtatccgggcggtctggcccagcctcccgctccgccgactcagacgaccgggtccggtgaggaagagcctcagtcgcctcaacaatcgtgacatccgtgactggggaatggtcgttgtccctccccgtcggacgagtgtcgtcgacaaggcccctcgcgtggaccgtcttcatgacgtctgggttttggccggagtgtctaacttttctctctgtctcgccaccctcgcccagattctcgggagggtcacccggctcatccgtcggcgggactgcccgaggggacctggcctctttctccacgtcgggcttcagctcgtttaggggtagttgatcctggacaancacatcctcggacggaacggagggaacccggtgctcccggcactcctgtggtcctatttacacaattaggtccggaaggtgtttcgaccacggtcccacggtgacgggcacccaggcgtcggggtccagatgggggaccgttggggcgacgaccttgacgcgtctctccacatggtcacggcccggaanaccggtgtcatcctcgtccccnctgaccgggtcgtgaggggaagctgtcggcngaacgttgcccgtcggctccncaggttccctcttgggtcgttggttccacccatccgagcccccgtcttaccggcgaaggagggggtggagatggcccncaaggcgactcgccgggtcaacaaccgccngctgattctggtacgaccangtctctctcagttggcggtatggtatccggctctggtgacggagacgacgaacatgatgatgctgaatgctnatgcccancacatcttcgtgnagtgacanatgttgttccacggggaccaccgtctcgacccacatctcccttggttgctcgtccacttnctcc

SEQ ID NO: 704342 - DNA, 926 bp, Homo sapiens
caaatcgcacggtgtgatacaccgtggaagcgcagtaccaaccatggagcttggcactcgaggaccattcacaaggcgaatgtcctgacacccagacgtcgccagtgtcacccccactgttagggtcgcgaaactcaggaaaggggcaaccaagggtcaaactccgcgggccaaagaggccgtcgcgaagaaatttaaacccgggcccgaaaccaccaaagtggggtgtgcacaggagaaacgcgccccgagggccacgaggtccccccaaggcgcaaccacaaaacccctgggggacaggccgccccaactttttccaaccctgtgggaggctgggtgagaaacaacggttcgcccacagaaggatttatattgcgggaacagataccccgtctcccgtccgaagttattatgcccgccccttcttggagagaaggaggaaggcgcccatttctaagcacagcccacttcgcacgcagtggttgaggcgtcctggtgaacaccacagcgctccacaggcgcctcccaaagagagccaactgtgtaacctgtttttttggagaggattgttctcccacgcttttgttaagagaaagagctgccacaaggcgctgccgaataataggaggcaccctcgtctttcgcgaaggaagggggtaaaacacctggttgctgcgacaaatcacaacgtgcctccttatggcgtgatgaaccattcgacccgtgttgcagcgcattcttcccgccgctccccctgtggaaattaaggaggagaagagaaattgaagagctgtccaaagcgttatattctaaactctgtgttttctcttttttgttggggttaaaccccccccccgtttaaaaaaaaatttttttatcctttccccttttttttttggttccaataaaaaaaaaacccaaaaaaa

SEQ ID NO: 704343 - DNA, 1018 bp, Homo sapiens
ggccaatactaccaagtcaatactcatcattaataatcataatggctatagcaattaaaactaggaatagcccccgtttcacttctgaggtcccaggaggttacccaaggtcacccctctgacatccggcctgtcgttcttctcacatgacaaaaacaatagcccccatctctaatctatataccaaatctctccctcactaattcgtaagccttctccatcactctctcaatcttatccatcatagcatggcagttgaggttggattaaaccaaacccagtctatcgccaaaatcttagtcatactcctcatattacccacataggatgaataatagcagttcgtaccgtacaacctaacataaccagttcttaatttaactatttatattatcctaactactaaccgcattcctactactcaaacttaaagcccccaataacccagcttccatccttactagccagagcaaccttaggcctatccatttagacatactaatgtaaaactatccgtagggcatttctatcgtgcggttgcggaagaaaacgtagcgtctgtgacttggtcgcatggttgcacagtctggcttttccttgacccaggtttcttctctcaaggggttagatgtgggcggactccctatcgggaacgggtcatgaatttgcgaataggcccgtttaccctggattcgattgttcgggaaaatggcccgaatctggtactttctaacgaagatcctgaaagagattgaaaaagaagaggcgcctgctgctgagaaagcagtacccacgaacgaattcaggctgatggactgctcccgatcccgaatgactggtacacagcttcgaggtgcgaccggctgaaggttaggtggctctgtgccttccgattgctcaggaccatggtccaccgccggaagttagcgccccgtcagcccgatggaggccggaggttcagacgttctagctcaccgaaactgtgaaacacttcacaaaaaacagctctgcgacagaa

SEQ ID NO: 704344 - DNA, 786 bp, Homo sapiens
ggcaccttggaaatcctctgtttagcttagttgcacaaaaggtagtatgtccagtggctagaggtggggtgggaagagaggaggccaggccaggccctcaggaattccctggtttccactgggccacccacttgctggacagtctgagccaagtccctcctgctggagaaaagcctggaactgccaaaacaaaaaaacaaatacaaacaaacctcgtcaccacggtcaggaggaggttcagacattctgcccagaggggctggggaaagggatgggagccaggaaagatttaagggcaggagacagacacgtaacaggaactccgaaggtagaacttagaattcagaacttgggtttcaattgtagaatttggaatctggaatacagaattgggaagaagaacagagatgacaaaagaccacttgaagagaggttcctaatactagacagatggagagtggcttggctggtttcccctgcatattggcgttgaaaactaaatgtggagtccagtccttctatgcagagtctttcctgcctaccttcttcctgcaggcaaatatccagctagaccctggtacttacctggatcccggctacctgattgccatttatcaacccaccctattctggaggcccccttggtgtggaggtgccgggaggggtagtgactcttggggtctctcaattaccccattcctaatcataacccttgggtagctgacccttctaccatccagaaaacttgcctgaaatgctgttggaacccttaaactttctataaaa

SEQ ID NO: 704345 - DNA, 103 bp, Homo sapiens
gctagctgagacgcagcgttgcactccagcctgggcagtacaagtgaaacgtctgtctcaaaaagaggcaaaaaaaatcataagggcaaatacattctccaga

SEQ ID NO: 704346 - DNA, 331 bp, Homo sapiens
gtacagactaaagaaatcactcaagcttcacattggtaaactgaactcagtttaagattaagaaactgatttcggccgggtgcggtggctcacgcctgtaattccagcactttgggaggcccgggcgcgtggctcacctgaggtcaggagttcaagaccagcctgactaatatggtgaaacaccgtttctactaaaaatacaaaaaaattagccgggtgtcgtggcttgtagctgtagtcccagctactccggagtctgagacaggaaaattgcttgaacccgggaggcggaggttgcagtatgccgagatcgctgcacttcagcctgggc

SEQ ID NO: 704347 - DNA, 132 bp, Homo sapiens
gtgcctatagtcccaactacttagaggaggatcgcttgatctcaggaggttgaggctgcagtgaattatgattgtggcattgcactccagcctgggtggtagatcaaggctatgtttcatttgaaaaaaaag

SEQ ID NO: 704348 - DNA, 286 bp, Homo sapiens
ctgacggcacctggcagtgcctgacatctgcgcccactgtgcttcaaccgcaggcttctgcggccgcaatgccacggtctaccgggaagggcgtgtatttcgccatgtcgcgcctccctgtcgtgtgcaggacctgctactctgcccccctagcgccgtatggccataatggcgtgtgttctgtggcaccgggtgctgacttggctgactacgggcaggtgccagccgcggtcttgcgggcgcccccttctgcgtgggtccttggccactgttgcttccttgcgct

SEQ ID NO: 704349 - DNA, 639 bp, Homo sapiens
  misc_feature (592)..(592): n is a, c, g, or t
tgggccagcatcctccgtgccgctgcgccgccaggtgctgatgagggatggaaaccgtggccgcctggtggtgcggggagaatgtgctgggccggcccgggagccgctcactttccctgggggggacctacgctgtgagacctctggctatcctggccttcctgaggcccacgaggatggctgcggcccaactgcctggggcctggagcattgagggccggaccctcgctgagacagcatgagcctggcctgacgctggaaaccacaccctggcccagagctgccaggccctgactgggacaggagccaggggcagctcaccatgtgctgcaaggaacagtgtctggggtgatgtacccccagcgtctggggtccattgtagcccgcctcaggtgcacagggcagagtgttgtggccccaccattgagctgagaagggcatgatgatgtgttgttgttgcccccggtgcccatgcgtcctgcccacagcgccctaagagccttgctcttctgctcttggtgcccccgcgcgaggttgggtgggagggtggggcccacgcgaaggagggctccttcggccggccctcagggcntgccaaccttgggttgtaccaaggttgatccaggcccttggggccca

SEQ ID NO: 704350 - DNA, 301 bp, Homo sapiens
ccaaaaaaaggcccttttgggtttttgggtcacgtggaacaccaactctgggcattgccacaaggcccaggccgtgttgggtgtgttttttaggcgcgaggcccccaagaagtttttggcctacaaaggggtgcgggcagcgcttaaggccctgttgccctaccttgaggggcccttttaggggctcagcaggaccctccaggcccccgcttttttggccttcttttggcccaacattaagctccctgtgccggcccccgccccccccccctgggaaacccataaaggggcgctgccctta

SEQ ID NO: 704351 - DNA, 245 bp, Homo sapiens
tgggaataggatctcgctgtgtatccaggctggctcgaactcctggctcagggatcctcccactttcagtctcccgagtagctgggacaacaggcatgacccacccagctggctggtttggggtaattagtttggtttggggttttgctacttttttggggaaacgtttgggcaagaacatgtgaggacagggataaggccgacagggggctatctggcatttagaatgtgttggggataacata

SEQ ID NO: 704352 - DNA, 221 bp, Homo sapiens
gagttcccacgcaaaatttactactacgattaacaaaaggggatgtcacaaatcagaacaataaacaagcgtagggcttatacactaaatactacgatagcactgggtcaccgtagacttagatcaaggcggcaatggcaatgccaacaacaccggcgaccacggcaggcacaccgctgaaggtagcagcaccatcattgccacccttctgtcgtcttctc

SEQ ID NO: 704353 - DNA, 104 bp, Homo sapiens
attgtaacacacgactcgtcactgagtcttccagtggctttgtacccactcccgtcattcaatctgcccgggggatcctactagagtctgaaccctgccaggcc

SEQ ID NO: 704354 - DNA, 316 bp, Homo sapiens
  misc_feature (2)..(3): n is a, c, g, or t
  misc_feature (36)..(36): n is a, c, g, or t
  misc_feature (58)..(58): n is a, c, g, or t
  misc_feature (77)..(77): n is a, c, g, or t
cnnacgccacactggtcaataaacccacagtagaancaaatttttttgttagggatgncttgtaaaattctgagcanatttttgcctgaacaagatgaatctcccttcctttccccaaccatctttggtaaagacaccaagcctggatgaaaataagctgtgataacccagtgtttccagttatttcactctccatcctctcaaaggtatagataaagcactcccattctgtttgagaatctggcctgatgaaatcaaaggtagattccgtgatcaaggaacggcacctgcttgagtcaagagtggctttagtgag

SEQ ID NO: 704355 - DNA, 229 bp, Homo sapiens
atttatttgaaacaggtggtgatgaaatttctgtgaaacctgtgaggctgaaagggggtgggatgggggtactcaatggagtatgtctgatggatccctgaagaatggatgaggaacacaatgcgctgagatatggcagcagcctgagagaccacaccccaccctgcaggtgcttgccctgatgcggcctggactttctgggttcgtgatgcgcaatactatgtcacgc

SEQ ID NO: 704356 - DNA, 599 bp, Homo sapiens
ggtcaggtggcggaactggtgctccggcgagtgtgaggtgtctgatgtgcgggctggacagtcgcctgaggttggtggatgagctggagtcatggagcgactaggcggtgtgtggagctgcctgtgaagagccgttcaggcggcttgggcgaggatcatcgaggctgaacttcggtccacgcaaggcacgtgggagcttactgtcgtgagggcgaggatgattgtgccgggagggcgatggcatgatggcccagtgtgtttcgaggcagttccctccagagggcctggcaccagagcgagcttgtatgctgacttggccagttgggaatatgttgggcgttcaagcaaagtgccaatggtcctaacaaagtaggattctggtgtgggataagagtagcttggtgacagggtccctggggatgttgccggagattggttgggacaaggcattgggaggaattgatggatgccactcagtgactggaatcatagccttgtgtcacagggggtgtgcgtacaagagtctagacgaaatgttggtgtgtgaggagaggcagcatgggagggagttgatcgaagagtggaggcagtgagagtga

SEQ ID NO: 704357 - DNA, 102 bp, Homo sapiens
aaacaaaaaaaaacaaaaaacaaaaaaacgaatctatgcactatataggcgccacgttttttacgaagacgagcgcagcgaagtatgtgagcgaggaagcgg

SEQ ID NO: 704358 - DNA, 255 bp, Homo sapiens
acgcgtccgcccacgcgtccgaaaaaggtccagatttctggcttctcttaaaaaataggaagatgtggccaggtgcggtggctcacacctgttatccctgtagtttgggaggccgaggcaggtggatcacccgaattcaagagttcaagaccagcctggtaggagaatcgcttgaacctgggaggcggaggttgcagtgggctgagattgcgccactgcactccatcctggttaacaagagcgaaactccgtctc

SEQ ID NO: 704359 - DNA, 520 bp, Homo sapiens
  misc_feature (390)..(390): n is a, c, g, or t
  misc_feature (392)..(392): n is a, c, g, or t
  misc_feature (398)..(398): n is a, c, g, or t
  misc_feature (416)..(416): n is a, c, g, or t
  misc_feature (423)..(423): n is a, c, g, or t
  misc_feature (451)..(451): n is a, c, g, or t
  misc_feature (470)..(470): n is a, c, g, or t
  misc_feature (477)..(477): n is a, c, g, or t
  misc_feature (498)..(498): n is a, c, g, or t
  misc_feature (512)..(512): n is a, c, g, or t
cacggcacccggcccttttgctttttataaattgatacataatatgtatcacttggaagtaagggaaatctgaagtgaactgctttcctatgctccagaaatatctctctacaaacacttaacacattagttacagatctttttcctattctttgaaataaggccccaaataatctccatcagaacagttagcttaatgtgaattactttatatatttgaaatttaaaaaagacatatattgtaagtaaggtatggctccacattttaattatgccaccctgcttcctcccttaattaaactgaagaaaaaaaaagtttaatatactggtgctaccactatatcctcttttccaaagaaaataataatatatttaaagttagtaatattntnttcccnaaacatgatttgccattncttacanatttgtaggatcccgggggaggattccnaaatccccaagttattatnatatccnaccccgggatcccggaacggnacctgccaggcttnccaccttc

SEQ ID NO: 704360 - DNA, 136 bp, Homo sapiens
cgtatataagcttatacgtatgtgctaggacacaacatgtgtcaaacagggcactttctgttccttttccataaatggcttataacagaatgtgggttgctatcgtgggagtggtatcacttagttcagcgtctga

SEQ ID NO: 704361 - DNA, 340 bp, Homo sapiens
  misc_feature (72)..(72): n is a, c, g, or t
  misc_feature (106)..(106): n is a, c, g, or t
  misc_feature (169)..(169): n is a, c, g, or t
  misc_feature (263)..(263): n is a, c, g, or t
  misc_feature (288)..(288): n is a, c, g, or t
  misc_feature (330)..(330): n is a, c, g, or t
aatcattgtttattactggtcacttagaaaattaaaagggatagggccaggcacagtggcttatgcctgtanttgcagcacttttagaggccgaggcaggcggatnacctgaggtcgggaagtggatcgcctgaggtcaggagtcgagaccagcctggccaacatggcnaaaccccgtcgctactaaaaatacaaaaattagccaggtgtggtggcatgtcctgtaatcccagctatttgggaggctgaggcaggagaatcgnctaaacccaggaggtggaggttgtngtgagccaagattgcaccgctgtgctccagcctgggcaacanagtgagactc

SEQ ID NO: 704362 - DNA, 669 bp, Homo sapiens
actttcagaggcagaagtgggagaatcatttgaacctaggagttcaagaccagcctggacaacatggtgaaactccatctcatatatatatataaatggccaggcatggtggcatgcacctgtggtcccagcaagtcaggagactgaggcaggaggatcgcttgagcccaggaggtagaggctgcgccaacccctgattgcaccactgcactccagcctgggcaagagagcacagcgcgtctcaaaaaaaaaaacaaaaaaaaaaaaaaacaccccagagaggcatctcatatgtgcgcgcggggcggacaaaacaagaggatcaacgtgaaacgtgggccacagagggcccatacacacgagacccaggacacccagccctactccgggctcccacggcggacaacacactccggcgcgaggcccacacacactaatgcgcggcagggcggacacatacaactccccgcgaaaaaaaccgcccaagcggcaccaccccccggcaccatcacacaggacaaccccggcgaccaacaccgcacaccccaagccgccaccacaccaccccaccgccagagcaccccacacacacacgcccccgctcccgtcgccaccgcacacaacagccacccacaccacaaccgcacccgcacagccacgccagcagca

SEQ ID NO: 704363 - DNA, 1144 bp, Homo sapiens
ggctatgtgccaagatcaatcctccatgagtagtggtggtggcagtggtggctggttatggcaatcaagaccagagtggtggatgtgtggcagctggtggctatggacagcagtgacctgtggaggactgaggcatggggtggcacgtggtggctggctgtgtgtgcgtgtggcgtgtggtggttagcaaccgaaagcagtgggtggctaatgaacccagaggtcgtggagggtggcgcgtggacggcaggaaggtgtgatgggcggaaagtgaccgtggtggcttcaatacacatcctggtggccctcgggaccaaggatcacgtcatgcactccgaacagcgatcaattcaggacaacgaaacaccatcatattgtgcaaggcctgggtgcgcacagtgttacaatatgaggtctgtggctgattacgttcgaatgcagcattggtactacgttaacgagcaaacgaaagaacacacgggacaatgtccaatgagtataagttatggtacaccagcacagtggaaaagctgggcaaagcttgaccagggcagagggccccacgcgtcgtcttcacctgagtcgaccacgaagctttcagcctaaaatgcacggttaatatcggactgggctctgacttctgctaccacgcaatatcttccgcgcacgagtccgtaatccacaagggtcatcatacttgagctcacgtcagcaccggacgccacagcaaccatactccaaagtccgcggcccggtagcgcatgcggcacaacagcggtccaggcagcgacaagcgcccagaagcggaccagcacgggaagcgaaccaccaacgcgacgccgcgataggcaacacccttacctcgcgcacgagcgtcggagctcgcggcaacgccagcccgaccaggcacacgcactgccgaaccagcaaacggcagaggggaaaaaaagaccgacgaacgagcgaaccgaacccgagcacgaccacgcgcacgcgaagagcgaccacagaccaagcacacgcacggccaccacagcaaggcaacgagcacaccaacgagaacgaccccaacacacaacccacacccctcagcagaccacaaccacctaacgagacatcgcacacagccgaacgagccacgccc

SEQ ID NO: 704364 - DNA, 172 bp, Homo sapiens
gaaggctgcaggcacgatgtagagagatcccctcagggcggcaggtattcctaggccccacaggtgccaaaggcctacgaggaatcccaggcttcgcaggagctgatggaggaccagggcccaggggcttgccaggacccccaggccccacaggtgccaaaggcctccgagg

SEQ ID NO: 704365 - DNA, 349 bp, Homo sapiens
cggtcggcctgctgttctctcctcggctctgctcgtcatttactatcacacccaactatctattaatctagccatggccgtccccttctgtatgtcgggcgcagggcattgatggctgtcgctctacgattaaaaatgccctcgcccacttcttaccacaagggacacctacaccccttattcccctactagttattctcgaaaccatcagcctactcattctaccaatagccctgggcgtacgcctaaacggtaacattactgaagggcacctaatcatggacctaattggaagcgccaacctagcaatatcaaccattaaacttccctctacacttatcatcttcac

SEQ ID NO: 704366 - DNA, 318 bp, Homo sapiens
  misc_feature (219)..(219): n is a, c, g, or t
  misc_feature (223)..(223): n is a, c, g, or t
gctagaatggctgcgggggccgtacgcggtgctcatacctttaatcccagcactttcggaggttgaggcgggaagatctgttgcgtccagctcaaggccagcctggacaacatagaccacccctgtctctacaaaaaaataaaaaagaaagaaaaaaagaaattagccgggcgtggtggcgcgctccagtagtcctagctactcccagctacgccggantganggcggagaggtcgcttgagctcggtaggtcgaggctgcagtgagccatgatcgcgccactgcactcagcctgggcgacagagtgagactgtctca

SEQ ID NO: 704367 - DNA, 672 bp, Homo sapiens
  misc_feature (162)..(162): n is a, c, g, or t
ggtccggaatcggtgtacgtcaggtgcgcgtgtatccgcgatcggctgctggtgtctctgggagcgttgcatgttccataccatactccagttgaggataactgtgatactcactaaagtgaggacttatcgactaattatcaacgaggatgtatccaagtntcttcactggattcatattcgccctctggtgcatgtataattccacttagtgatgcctgtcaatagatttatagtactaatggatcgttataaaatcaagatctgactggttgccaatctcataggagtacaccagtccatatgaacaatgtctctatgtatagactcgtttgaatctcgttacctgaggggaacacaggaggacaacacacgaatcgtaatggactgcagtggaaacgtagatatcgagaaattacgtttggtattgatccacgcccgctaaattcttaggaagccgtggacatcgaccagagtgtcggcaagagtacccagtcaagagagcttagggttactggtactcgatgtgtactgtgagcaaacgagcacaaagatttccacattggcctttcactacatcccaggtggaaagaccagggtggaggcctctaatggaccgcaaggtgaactggagtgtggttaccaacgacaaagatacagtcaatgtacaaa

SEQ ID NO: 704368 - DNA, 360 bp, Homo sapiens
ataaaggaagcaagtgatcccacaagatgaagctatatatatcatgctgcaccatgcatctatagagactaggaacggtgggtggtgggaccaacctactacctcagcaagcctgttagcagatgttaggtgttcaaggagcatgcaaagataatcctggggcaaatgcccggtgcttgcccgaaatgtgtgtggaaccgaaatgactggggaatcgtttttaatggcagcatcggcaacaggacatctagtcaaaagtcacatgatacacaacaggtcgacagatcaaataaacaagacctccaaggagcttgcaccaagacagacagcctgactcagcccgacagttctgaactggaa

SEQ ID NO: 704369 - DNA, 561 bp, Homo sapiens
gggaggggccccccccgcccctttaaaaaaaccaaaacccccaccaggtttttcggaaaaaaaggaacaatcgaaaggggcccctaggggaaaacctggcgcccaaaaacccatttccaaaaaaaagggcaaaaggcccctaaatttaccagcccccccccaaaagggcccaatcccggggccccaacaaaggggcgccccccccgaaaaaaaaaaaaaaacctccccccaacccggggggggggcgaaaataaggcaaaaacgcgtccccggggaaaaaactggcccccccccacacggcaaagaccctcttattttttgggcccgcggtttcccccacaaacccccgggaatttccccacgggaaaccccccgtaaacccccccccccgggggccccgcccaaaaaaacccccccggtatcttgggtatacgccccccccctcgaaaaaaaaaaaaaaacccctcggatttctaattgggcgcccaaaaaaggcgggcgcaaaactggcgacacgctgtcctccgggggaaaaactccccccccccacctcccccacac

SEQ ID NO: 704370 - DNA, 617 bp, Homo sapiens
  misc_feature (3)..(3): n is a, c, g, or t
gcncctttgcgggtggcggcgaacgcggagagcacgccatgaaggcctcgggcacgctacgagagtacaaggtagtgggtcgctgcctgcccacccccaaatgccacacgccgcccctctaccgcatgcgaatctttgcgcctaatcatgtcgtcgccaagtcccgcttctggtactttgtatctcagttaaagaagatgaagaagtcttcaggggagattgtctactgtgggcaggtgtttgagaagtcccccctgcgggtgaagaacttcgggatctggctgcgctatgactcccggagcggcacccacaacatgtaccgggaataccgggacctgaccaccgcaggcgctgtcacccagtgctaccgagacatgggtgcccggcaccgcgcccgagcccactccattcagatcatgaaggtggaggagatcgcggccagcaagtgccgccggccggctgtcaagcagttccacgactccaagatcaagttcccgctgcccccccgggtcctgcgccgtcagcacaagccacgcttcaccaccaaaaggcccaacccctttttttaggtgcagggccctcgtccgggtgtgccccaaataaactcaggaacgccc

SEQ ID NO: 704371 - DNA, 495 bp, Homo sapiens
ggacgagccgcccatagacttccagacgagatcgccatgcgtgtgaggtgaaggccgaccccgctgcgctcatggcctcgctgctgctcctgctgtcgcccatgcgcaagctcgagatcaagtacaccatgatctttattaacaatgaatggcagaactcagagagtgggagagtgttcccgtgtctgtaatccagccacaggagagcaagtgtgtgaagttcatgaagcagacgaggtggatatagacaaggcagtgcaagcagtccggctttgccttctctcttggttctgtgtggagaaggatggctgcatctagaaagaggacgtctgttggacaagcttgcagacttggtggaacgggacagggcaactcttgcaattatggaatccctaaatggcggtaagccattcctgcaagcttttaacatcgatttgcagggagtcatcaaaccctgaggtattatgcaggcgggctgataactcacggatgacc

SEQ ID NO: 704372 - DNA, 1869 bp, Homo sapiens
aggggtcctagcaggatgaagccatttaaatacaaccatcctcagggattcttcagtccatcgctgatcgtcccgcgcagaccgtaggtttcccccaaggccgtcaccctgagacactgggcttctgctttactgctacgtggacccagcatggtgagctctatgaagtagttgcgtccagaagtacgaaccaggcgcaacttataagaaggcggtcaccctgagaagaagagaatagaaacaggaagaaacaaagaaaaggagaaaacagcggagacagagaagaaacagaagagaaataagacacaaagagagggggggcgcggaccggccctggaagtctacctgggtggttctccggaggaggggacactcgcacccctatgctgccctctaaacctcggaggaaaggacaagcagggagacactcaacgagaacacaaaaacagagacggaacagagagaccacccgaccaggcacacaagaaaggggggcgcagcatccagacgcccaccgggaaaagcagaacagaggcagggacgcggcgtacgccgaaaaacaccacaagtggcagccgagcacagacgagcggtgtggggaacaacgcaccgaaaacaaacgccgaagggagaagcccagcgaccacgagaggaaacaaaggccagacagccggacgacacaacccccaaccccacagcggggcgtctcctccaaaaggaccacaccaagaaaggacgcaaaacccaccacaggagagcagcaccacagcaacagaaggcagagagaagaagcaaacaacaaggatctacaacacacaagacatcaacaaacagctgacaaagagcgctccaaacaccacagaacagcaagagacggacacagcaccacaagataaagacagggcgcagccacacaccaccatagcagaaaggtagacacacaccacagctgagacgtcacgaaacgacacgagcatcagagcgccggccaccacaacaagcacacaccgaaggagtgaataacaacacaccccccagcacgagtaggagagacgtgacggagaggaaacacaaacacgcgcacggcagcgaccaaatacaagccaaggcgtctagacagagccgacacacaaacagctgagagacagcacggaaagcacaccacaagaccagtcacgagcagcacagacgatagggcacaagagcgaaaaagacgcagctaacacgaccgaacgtcgcggagagcactgttagcacatgtcaacacagacgactacaccgagcgcacggagaaccaaccaaccggagcaggcgaacgaaccgaacgagcagtcggcacagcgaactacagagaaggggggcagagacaacacctactacaaagagaccactagcccaccagcaagagagagagggagataaacaacaatatgcgaccagagagaacaaagaaaggtggctgagaacacacaaaaagagacaccccaccccagggaggaggaacgactaatcactactggagaaagtgaaagtcaggactagacaacccacaaaaggagggaaacgggcagaccagaagcacaaaccatcagggaaggggaagagaggcatagagcgcagtagagcagaccacgcacgcgaataagagcgggacggccgagcagacaggaacgaccccgcgagagaggggaaggaacgcagagagcacgcggccaacccacagagccaacggaagaggcagtaggggtaggctcggagacgaaagctacagccaaccaccagcaagaatcgtgagagggcagagaaataactgacgtaggagcagccaagcgacagagacaacaacacacccgaggacgaggaagcaaa

SEQ ID NO: 704373 - DNA, 1089 bp, Homo sapiens
  misc_feature (3)..(3): n is a, c, g, or t
gcncctttgcgggtggcggcgaacgcggagagcacgccatgaaggcctcgggcacgctacgagagtacaaggtagtgggtcgctgcctgcccacccccaaatgccacacgccgcccctctaccgcatgcgaatctttgcgcctaatcatgtcgtcgccaagtcccgcttctggtactttgtatctcagttaaagaagatgaagaagtcttcaggggagattgtctactgtgggcaggtgtttgagaagtcccccctgcgggtgaagaacttcgggatctggctgcgctatgactcccggagcggcacccacaacatgtaccgggaataccgggacctgaccaccgcaggcgctgtcacccagtgctaccgagacatgggtgcccggcaccgcgcccgagcccactccattcagatcatgaaggtggaggagatcgcggccagcaagtgccgccggccggctgtcaagcagttccacgactccaagatcaagttcccgctgcccccccgggtcctgcgccgtcagcacaagccacgcttcaccaccaaaaggcccaacccctttttttaggtgcagggccctcgtccgggtgtgccccaaataaactcaggaacgccccgaaggtacaagctgctgttccggatgactttaaggacttcagtctgctgtaacgaggaggcgcgctaatatcagttcaagaccatggtgaggcgagcttggagcgctggcacgcatgacccggagaagagcaccggaaaccgggatggggaacggctggatgccaagtcaagcgccagaagatgggccaagcgggaccggaccacacgacgagcactgcccgcttaagaagaataccacagcaacgcgaaagcaacagtaaggcagaacaaaccgaggcgacaccagagcggcgcgaaagaaaaaaacgcagcacaacgaacacgcggcagcgcaatacgcagcgcgctctaaagagaccgacagaaagcaacccgtcggggacaaccaaggcgagacgaagcccccgggacgcaaacgggagggagaagagcgcaccgcaggtccgaataaagagaggaacagccgacat

SEQ ID NO: 704374 - DNA, 755 bp, Homo sapiens
  misc_feature (3)..(3): n is a, c, g, or t
  misc_feature (730)..(730): n is a, c, g, or t
  misc_feature (732)..(732): n is a, c, g, or t
  misc_feature (736)..(736): n is a, c, g, or t
  misc_feature (738)..(738): n is a, c, g, or t
  misc_feature (741)..(741): n is a, c, g, or t
  misc_feature (743)..(743): n is a, c, g, or t
gcncctttgcgggtggcggcgaacgcggagagcacgccatgaaggcctcgggcacgctacgagagtacaaggtagtgggtcgctgcctgcccacccccaaatgccacacgccgcccctctaccgcatgcgaatctttgcgcctaatcatgtcgtcgccaagtcccgcttctggtactttgtatctcagttaaagaagatgaagaagtcttcagggggacgatcgggcctcacgtgtggggcagggtgttttgagaaatggtccccccttgcgggttgaaggaactcccggggatcgtgggctggcggttatagactcccggagggggggcaccccacaaacattgtaccgcgggaaatacgggggacctttgaaccaccgaaggcggggtcaacccacaggtggcctaccgagcacaatggggtgtgcgccgcgaacccggcgcccagagccccaactcccattcccagatcatgggagggtggcaggaagatccggggccaggccaaggtggccgccgggccgggtttgggcaaagaacaggtcccaggacttccaaagatcaagggtcccccgcttgcccccaaagcgggtccctggcgccgccaggaaaaagcccaggttcaaccaagcaaggaggccaaaaacctttcttcctagggtgagggcccccttggtcgggggggtgcccaaattaaattaggaacggcggggaaaaaaaaaacaaaaananaaananaanantttttggggggc

SEQ ID NO: 704375 - DNA, 167 bp, Homo sapiens
ctctcggaaaatgacatagaggcagcgtcagggctggattcgtcatgtggctctgccggctccccttacccaagtctacgcatcgtcccatctctctgatcctgtaatcaacacctgtccccaaggtagcttaggtgtgtccaggcacgacggcacacgttgggtac

SEQ ID NO: 704376 - DNA, 665 bp, Homo sapiens
  misc_feature (3)..(3): n is a, c, g, or t
  misc_feature (640)..(640): n is a, c, g, or t
  misc_feature (642)..(642): n is a, c, g, or t
  misc_feature (646)..(646): n is a, c, g, or t
  misc_feature (648)..(648): n is a, c, g, or t
  misc_feature (651)..(651): n is a, c, g, or t
  misc_feature (653)..(653): n is a, c, g, or t
gcncctttgcgggtggcggcgaacgcggagagcacgccatgaaggcctcgggcacgctacgagagtacaaggtagtgggtcgctgcctgcccacccccaaatgccacacgccgcccctctaccgcatgcgaatctttgcgcctaatcatgtcgtcgccaagtcccgcttctggtactttgtatctcagttaaagaagatgaagaagtcttcaggggagattgtctactgtgggcaggtgtttgagaagtcccccctgcgggtgaagaacttcgggatctggctgcgctatgactcccggagcggcacccacaacatgtaccgggaataccgggacctgaccaccgcaggcgctgtcacccagtgctaccgagacatgggtgcccggcaccgcgcccgagcccactccattcagatcatgaaggtggaggagatcgcggccagcaagtgccgccggccggctgtcaagcagttccacgactccaagatcaagttcccgctgcccccccgggtcctgcgccgtcagcacaagccacgcttcaccaccaaaaggcccaacccctttttttaggtgcagggccctcgtccgggtgtgccccaaataaactcaggaacgcccgcggggaaaaaaaaaacaaaaananaaananaanantttttggggggc

SEQ ID NO: 704377 - DNA, 1039 bp, Homo sapiens
  misc_feature (172)..(172): n is a, c, g, or t
  misc_feature (440)..(440): n is a, c, g, or t
  misc_feature (780)..(780): n is a, c, g, or t
tatgcgagagagttattaatcggtgagcgttggcccgggaggaaagaagatggtgctggatctggatttgtttcgggtggataaaggaggggacccagccctcatccgagagacgcaggagaagcgcttcaaggacccgggactagtggaccagctggtgaaggcagacagngagtggcgacgatgtagatttcgggcagacaacttgaacaagctgaagaacctatgcatgcaagacaatcggagagaaaatgaagaaaaaagagccagtgggagatgatgagtctgtcccagagaatgtgctgagtttcgatgaccttactgcagacgctgttagctaacctgaaagtctcacaattcaaaaaagtccgactccctcattgatgaagccatcctgaagtgtgacgcgggagcggataaagttggaagcagagcggttngagaacctccgagagattgggaaccttctgcacccttctgtacccatcagtaacgatgaggatgtggacaacaaagtagagaggatttggggtgattgtacagtcaggaagaagtactcctcatgtggaccctggttggttgatggtagatggctttgaaggcgaaaagggggccgtggtggctgggagtcgagggtacttcttgaaggggggcctggtgttcctggaacaggcgtctcatccagtattgccttcgcaccttggggaagtcggggctacatccaatcttaccccttctttcatgaagggacgaggtcctgccgggagtggccagctccgnccaggttgttgaagacttattagggatttgtcaacggggaaagttcgatgaattctttgcgagcaatattgttgcgcctcaaacgagccttcggtctgccggaaatgggtcggcaagatgtgcacagaacaggcccccggtggggagggaccaggggacccggtcggcacaagaagacggttccccaatgggagattaaccgaatttgggagcgaattgtcacaaaacggcgcttctgtatgtcagtacgactgagtcc

SEQ ID NO: 704378 - DNA, 436 bp, Homo sapiens
  misc_feature (3)..(3): n is a, c, g, or t
gcncctttgcgggtggcggcgaacgcggagagcacgccatgaaggcctcgggcacgctacgagagtacaaggtagtgggtcgctgcctgcccacccccaaatgccacacgccgcccctctaccgcatgcgaatctttgcgcctaatcatgtcgtcgccaagtcccgcttctggtactttgtatctcagttaaagaagatgaagaagtcttcaggggagattgtctactgtgggcaggtgtttgagaagtcccccctgcgggtgaagaacttcgggatctggctgcgctatgactcccggagcggcacccacaacatgtaccgggaataccgggacctgaccaccgcaggcgctgtcacccagtgctacgcgagatatgggagcccggacagatgctgcacgggctcagtccatgcacatcatgaagcatggaagat

SEQ ID NO: 704379 - DNA, 565 bp, Homo sapiens
  misc_feature (172)..(172): n is a, c, g, or t
tatgcgagagagttattaatcggtgagcgttggcccgggaggaaagaagatggtgctggatctggatttgtttcgggtggataaaggaggggacccagccctcatccgagagacgcaggagaagcgcttcaaggacccgggactagtggaccagctggtgaaggcagacagngagtggcgacgatgtagatttcgggcagacaacttgaacaagctgaagaacctatgcatgcaagacaatcggagagaaaatgaagaaaaaagagccagtgggagatgatgagtctgtcccagagaatgtgctgagtttcgatgaccttactgcagacgcttcatcaatgaggagtcggacttttttgatttgtgagcggcacgaggctgagtgctgcggcgcgatccgttgacttccctgagcgttggccgggaggaaagaagatggtgctggactctggatttgttacgggtggataaaggaggggacccagccctcatgcgagagatgcaggagaagcgcttcaaggacccgggaggtagtggacagctggtgaaggcagacagcgagtgg

SEQ ID NO: 704380 - DNA, 940 bp, Homo sapiens
acgactcgatctgtgctagagaaagtaactggtcagcgcgtttggcaggagtgtttctcgaaaggttgcttcccccaagggcttctggggccccacttatcttggcagagtacttcctgggcgaaaaattgttgtccgaccaccgtatttctgggttatgcgggtttccccccaaaaagttggggttggagcccttttaatgcccgctgttgacaggcgcgcgtgtgagtaacacgtcgggggcgccgccacgagcatagtgtgcgagctgtgtgctccgtccgccaagcaagatgatagtcggttgagcgcccccatacgggaagtgtcgcccccccctccgtggacaaaggttgtggccgcccaaacgaagacgtcctccctctacgtgaaagaatgcaaatcctgtgcgcgaaagccaggtttcagcgcctgtaaccttctatacatccccgtaccatgcaccctgtgaaacttactatgcgagcgagatgctaacagtggcgtgtgattcgcccccccccttgccattgaggtcgagaaacaccaacaatgcttacttatttcctagctgcataatgagtggtctaataattacgcatagactccgcatcggaggaagtcttacatttctgtctgatacattcttggagtggtggatcaatcatctttccctagagaccacctctgggccccgaaaccatgaggggcagcctgaatatgtgcgtggtacttgcggggataggcaaggaaaacctggggttaccccattttataccgtgtggaatattgctggacagcgttagttgtagtgcatgagcaagacatatagatttcaagtatgctacaaggggagaagaatcactgtagtggtttccaaaacattcaaatgttatgggagaaccccccccaaaattcagattcttcgccaacatgacaa

SEQ ID NO: 704381 - DNA, 163 bp, Homo sapiens
ttaggcatcacatatggtgaactcaccggaagctgtgggaccaccaggttgactagagatgggtatcacgcatatgttgcccaggactggagtgcagtggctcttcacaggcgcgatcccactactgatcagcacgggagtatcgacctgatccgatatccgg

SEQ ID NO: 704382 - DNA, 470 bp, Homo sapiens
  misc_feature (161)..(161): n is a, c, g, or t
  misc_feature (230)..(230): n is a, c, g, or t
  misc_feature (236)..(236): n is a, c, g, or t
  misc_feature (257)..(257): n is a, c, g, or t
  misc_feature (295)..(296): n is a, c, g, or t
  misc_feature (307)..(308): n is a, c, g, or t
  misc_feature (312)..(312): n is a, c, g, or t
  misc_feature (366)..(366): n is a, c, g, or t
  misc_feature (369)..(369): n is a, c, g, or t
gggtggataaaagaaagtactgatggcagactcctcccagaaggcctttgtgagcagacgaaattggcatgcaaaggcagtggtgtggcccaacgactctcccatgtggaagtttgggaagtgccctagctaaaatatagagtaccagtctggaaaagatntcattacgatagcttttgatgtatgtacttgtatgctatttttagaagcagtttgataaatcagtgatnatacangtgttgctcttaggagtactntgaataagttggactcacttgccaaatactttgttctnntggttgttatnntctntgcaacaaatagttgcttttgatttttaagatctgtgaataataaataaaatcnaangtccaggcaagctgacataccgttcattctaggaggcaagtgatatttgaggtcaaggccagctacattagtgacaccctgtcttaaaaagtacatttaaa

SEQ ID NO: 704383 - DNA, 215 bp, Homo sapiens
gtttgccgccagaacacaggtgtcgtgaaaactacccctaaaagccaaaattgggaagggaaaggtacttcatatccaccattgttcgttcattggaccacgtaggattccgggccaggtccaccactactggccatctgattctataaatcgcggtggcatcgcacacaggacccattgaaaatatttgagagggagtcttgctgagatgggaa

SEQ ID NO: 704384 - DNA, 390 bp, Homo sapiens
  misc_feature (199)..(199): n is a, c, g, or t
  misc_feature (201)..(201): n is a, c, g, or t
  misc_feature (207)..(207): n is a, c, g, or t
  misc_feature (227)..(228): n is a, c, g, or t
  misc_feature (237)..(237): n is a, c, g, or t
  misc_feature (257)..(257): n is a, c, g, or t
  misc_feature (267)..(267): n is a, c, g, or t
  misc_feature (279)..(279): n is a, c, g, or t
  misc_feature (288)..(288): n is a, c, g, or t
  misc_feature (290)..(290): n is a, c, g, or t
  misc_feature (302)..(302): n is a, c, g, or t
  misc_feature (320)..(321): n is a, c, g, or t
  misc_feature (325)..(325): n is a, c, g, or t
  misc_feature (327)..(328): n is a, c, g, or t
  misc_feature (332)..(332): n is a, c, g, or t
  misc_feature (334)..(334): n is a, c, g, or t
  misc_feature (339)..(340): n is a, c, g, or t
  misc_feature (342)..(344): n is a, c, g, or t
  misc_feature (346)..(347): n is a, c, g, or t
tcgtctttgacgtcacagaagcgatactccaaattgcctggtcggtcattgtcatatccacagaagtgcattctgcccccagaggatcccgttatccccaacactccccaatcttcataaatttctcttgtggggctttttgagttccaggagggcataatcataatccatgccgatgtcattggcattgcccttgatncnaccctngggcacatgggtgcgtttcnnccggatccnctgaaatttcatgtgctcgngcatggctgnagtggagtcgtnggcccctcnancaccatctttanccttgggctttaggaagnncacntnntaancntctgnngnnncnnttcactatagagtttttccactcgtcgtatgcatgtgggcagc

SEQ ID NO: 704385 - DNA, 187 bp, Homo sapiens
ggtcaagatgaagaaccatttacttttcttgggagtctggcggtttttattaaggctgttcatgtgaaacccaagaagatgaaaggattgttcttgttgacaacaaatgtaagtgtgccccgattacttccaaggatcatccgttcttcccaagatcctaatgaggacattgtttgagagaaacata

SEQ ID NO: 704386 - DNA, 932 bp, Homo sapiens
  misc_feature (616)..(616): n is a, c, g, or t
accatggttgctgtctacctgtcgactagatcaacgtcgaatggccggcttggtggtaaggtctgcgcgcacgctgtgtcggagtatggtgcggtaggccctggatgaggatgttcctggtccttccccaccatcaagatctacttcccgcacttcgacctgagccacggctctgaccaggttaagggccagggcaagaaggtggacgacgcagctgagccaaacgccgtgtgtgcacgtggacgacgatgctccaacatcgctgtccggaccctgagcgaccttgcacgtcgcacatagctatcggtgtgggaccacggtcatacatcaaggctccgtaaagccactgagcatgctggatgatcactgggtcggtccagcctcctccgctcggagttccaatccccatgtcggtggcatggcactcccgtggcacgaatgttccctggagttgctgttgaggcacacgatggctggactcgttacagagataccctgctttgaagctcggaagctctcgggtaggtccatgcaatcgtagtcaccttgagaggggctatccaagaaggctgcatcggggggacgcggggtggagggaatggggaacccccccggngactcgggctggcatcattacaatgcgagacgcgtacggccaaagttcggaaaacgaaaactcaacacaaaggaagacacccagtaactctcagaacataacgggtgtgtatcctacatcgttacgggcagggacattggaccaggggttgagcacgtatctgtcgcatttgtgccagtgcgcgctatcttcacggacacttgtgtggttcttttctacacgcggctggattccctgtataccctccgctagcacatacttctgcccgtttatcctagatatcccagcgatgtctaaatgcggtcgcgctcccgct

SEQ ID NO: 704387 - DNA, 186 bp, Homo sapiens
tgctcacctcccattccgtcacatccccttccacccttactccccactcaccgccgcctcggttccttctcttccttctctccttaatgccacttacactcttctcacccgacctcctaggcgacccagccaattataccctagccaaccccttaaacacccctccccgcgtcatccgggataccg

SEQ ID NO: 704388 - DNA, 610 bp, Homo sapiens
agcggctgatccacaattaaccagtgcattcttcccttggattccctaagcttgtgtgcctgatgagctgctctccagttatgccaccatgatttccattcctgagggaaggctgtgacgaagagccaggaaaataagagcacccctcctactctcatagtgcagtggttgaggatccttttttctatacaattttaaaactggaaatacacaaaatacgccaacataattaaaaataaaactaccatgaaatagcacaaatattctgcacatgaaatgttaagaactaaaatttaaaaatctgcttttagtaggactacataaaactgaagaaaaccagtcaatacagaattgggccaatgtacaattattcttgaagtaatccaaacacattaagttctctaatatatctaaaataatctatgacaaaggaaataatctgaaggaaagaaagaaaagataatgtgggaaattcttatgtgttatacttttactgtgtagataagctgaatggacaaaacgaacttattgtaaaatattgagaacagattagaagatatgaaataattaagaaacaagagaataggtaaaaggagccatggtgatgaaa

SEQ ID NO: 704389 - DNA, 379 bp, Homo sapiens
atttcccaaagtttcataaagcccctaagctcatgattttcatcaactttttgcccccaaagtcatttacccccccaaccgtttgttgtcataaaaagggggggggggtttggattttatttttttcaacctccagtgaaaaataggataggggccaaaaccttacttgtttttttaaaacaattcagggcttgagcatttctgtcaaaaaaggaatgaaaaactgttagcccattaaaattattttatggattggtattgtgttttgctgatttttaaatgaaaaaaaaaatattcatttttgatctctggaagccatcattattatgaggatcctttttctttggaaaccccttcataataaaaataaggtttaaga

SEQ ID NO: 704390 - DNA, 1009 bp, Homo sapiens
  misc_feature (880)..(880): n is a, c, g, or t
cccaacgtccagcgttactaccagcacaaccttagccaaaccatttacccaacataaagtataggcgatagaaattgaaacctggcgcaagtagatatagtaccgcaagggaaagatgaaagattataaccaagcataatatagcaatggactaacccctataccttctgcataatgaattaactagaaataactttgcaaggagagccaaagcgtaagaccgcccgaagacccagacagagctacctaagaacagctaaaaagagcacgacccggtctatgctagcaaaagtagtgggaagatttataggtagaggcgacaaacctaccgagcctggtgatagctggtggtccaacgatagaatcttagattcaactttaagattttgcccacagaaccctctagaagttccccttgtaaatttaactgtgtagtccaaagaggaacagctcttggacactaggaaaaaaccttgtagagagagtaaacaaatttaaccatgccatagtaggcggctaaagagcagccaccaatgaagaaagcgttcagagctcaacagccgacgtaatctaagaagaatcccaaatcaatataactgaactcctcacacccaatgggaccagtctatccagcctatagaagaactaatgtgagtataggttacatgaaaacattcttctccgcataagcctgcgtcagattaaacagtgaacgtggcaagtaacaagcccaatatctaccactcgagcaacaggtgaatatgacctcagtgtcagccagagaaacatgctcatagggaagttaaaaagtaaagagtgggaatttaccgctgttacaaaaaatccttagatacagttaagccgcgccaagagcaatgtnaggggacctacggcagggaacagggctaaaggcggataaggcaggaggcgaaaaaatacgcgagggagaaaaagacacggatgagcaaagaaatattggggccaacactatccccacacgacacaccag

SEQ ID NO: 704391 - DNA, 283 bp, Homo sapiens
gtatgggcgtcgtgtaaagaagcttagtatactagtacaaggcatgctgtctcatagaatgagttagtgtttccttctcggccgggcaccgggtggctcatgcctgtaatggcagcactttgagaggccaaagtagatggatcccttggagaccaggagttccagaccagcctggacaacgtagggaaaccccatctctactgaaataaacaaatatataaaaaataaaaattagccaggtgtggtggtggggacctgtagccctagtcactctgtgactcca

SEQ ID NO: 704392 - DNA, 321 bp, Homo sapiens
ggatccccagtacctacttgcactctcccaaagtactgagattacagggtgtagggccaccacacctggcccaggactccttgggatggcgtggccaggaaggtctctctgagtgacagacattggaaagatgacagagaggctgctgtgagagggtgtggggcacggacgctccaggcaaaggcaacagcagagacaaatgatttccacgcaagaccatgctcagtgtgggctggagacagtgttaggagacacggtgcatccacagaggtctcctgcaggtgcactgaagagacgtggcccagatgctgggttggtggt

SEQ ID NO: 704393 - DNA, 440 bp, Homo sapiens
ttatgccactgagtcctgtattttttctattttcacaaattggagatgagttttttttctcccatcaaagcttaagataccataggaatttaatatggaagtcctgtccccacagaactaccttaccaaatgtaaagctggggcagagtttgagaacattggtaacgtgatagattccgtaaaacgggtagaattttcccatggccttacactttggaaaattgtatagtggtcacatgcgaaaggcttctaagtaatggctcctaagatgttataatcctggacaaagtcccctaaagtcttaaaataagtcctttatttttcctaaaaccggactttatgaaaatttcgcctcagttaaatcacggtctgggcatcccatgagatggaagcataggtcaaagctgttgggagaaaatcagaagtccagtttcatctag

SEQ ID NO: 704394 - DNA, 395 bp, Homo sapiens
  misc_feature (21)..(21): n is a, c, g, or t
  misc_feature (26)..(26): n is a, c, g, or t
  misc_feature (28)..(28): n is a, c, g, or t
  misc_feature (66)..(66): n is a, c, g, or t
  misc_feature (71)..(71): n is a, c, g, or t
  misc_feature (85)..(86): n is a, c, g, or t
  misc_feature (237)..(238): n is a, c, g, or t
  misc_feature (251)..(251): n is a, c, g, or t
  misc_feature (386)..(386): n is a, c, g, or t
ctctgtgtttaaccttttganaactnanacatggttttccaatgtgactgcactctagcctggtanaaagnaagacctggtctcnnaaaaaaaaaaaaaaaaatccagggggctaggcgtgttggctcatgcttgtaatcccagcactttgggaggctgaggtgagaagatcacttgagcccaggagttcaagaccagaatgggcaacatagtgagatcttgtctctacagaaaatnnaaaaaaattcgcnaggtatggtggtgcgtgacatggtggtgcatgtgatcccagctactcaggaggctcagggggaggatcccttgagcccaggaggtcaaggctgcagtgagccatgatcacaccactgcactctagcctgagtganagagtgaga

SEQ ID NO: 704395 - DNA, 156 bp, Homo sapiens
tggcctgggacgtcctctgcacgagacctgcccctgtgtcggtgtcctgtggacggtgacgacgccccctggatgggactctgactcagcgacatcaagacaagaccagccgtgctcaccgcaactgacgtacagacttacgtggtaccgacgctc

SEQ ID NO: 704396 - DNA, 512 bp, Homo sapiens
  misc_feature (410)..(410): n is a, c, g, or t
  misc_feature (423)..(423): n is a, c, g, or t
tcggctcggtccactagtcacggttggctcacctccatggcttgttaggaactgccacacagcaggaggtgagccaaaggcaagggagcaaagcttcatctgtatttatagccgctccccattgctcacattacctcctgagctctgcctcctgtcggatcagtggtggcattagattctcataggagtgcacaccctattgtgaactgcgcatgagagggatctagattgcatgctccttataaagtctaatgcctgatgatctgaggtggagctgaggtggtgatgctagctctgaggagtggttgcaaacacagattaacattagcagagaggtttgactgcccagagaccataataaatcagttgcctgcagacgcatatcaaaaccctgtcagtgagtggcaggntgataattcagcntgcatctggtggctggctttatagtggcaagtgcgttgatgtacttcaactgtacagctgcatctggttgctggctttatagtggcagt

SEQ ID NO: 704397 - DNA, 139 bp, Homo sapiens
tattctggctagctgcagttgtctgtgagcacgagcaatgctgggagctggtgccctgtctggtgaccattgacggcccctccaaggtgaagatggattgccagtgagtgcccatgagggctacctgtgtcaccctata

SEQ ID NO: 704398 - DNA, 723 bp, Homo sapiens
  misc_feature (498)..(498): n is a, c, g, or t
agactagagtgtgcaggcatgagtcaaggtttactgtagacttgacctatctggctgaagcaaatactcgacctcagacttatgagtagctgatgctacaggcatgtaccaccatgcccacctaattacgaccattttgtggagagataggagtctgactgtgctgcccatgctgatgtcaaagctcctagacatcaagcagatgccttccaccgacagcgctgccaatgtcgctggggatcacaagcgtgacctatcacacctggtcggtttttgattcttgaaacgtgaaattacaaggctactcctctatgatgcttagatcgcatgtgatacttagataaccccacttcataactataaaaatactgtaccatgtgttcttatgatattgcatttgtaatatatgaatcatttatcaagttgaaatctcctctgatgtggagagcatgatacggatccagccttttcttttttgcaaatggctgactaagttgnctgcaacatgattgattaatcataaaatggcatgtttatcatatatttaatgcatatgtatccttgggctatacctagattatctttatgggggcatgatcattttggttctgaggcattacaaaattgtggtattaccatatcggtggtgccagttttatatctatagcccattgctatagtagctaaaggtctcattggcaaggtctatgggatataatggaa

SEQ ID NO: 704399 - DNA, 429 bp, Homo sapiens
gcagaaggctgttgctaattggagaagccccactaagcagcggcagcttcctgcttcggatcctctctctgctgcttgcatttaaagagcaaactcgtcttgtctaccactctccatctccccaaaatagcctcgtgatctcggaagtatggacgtagagatcacgagctcttcctataccttaccgcgtggactctgtgtggctcccaactcgccgtcagacacccacctgccccggtggtggaaagcgcctgagacagaccatgaacacacgccaagtgagtcgagcgcttcgacggaactccgtgcagcagcacggaaccaggagctggtggcggagataccctccgcaccaggaacttggaaaggaactagcccattgctacatgcttgtcattctggtcatctgctcactgactcgctcactcg

SEQ ID NO: 704400 - DNA, 176 bp, Homo sapiens
cgctagcggcattcatgacgcgagcagtagcccaaacaatctcatatgaagtaacactagcaatcatcctactatcagtactcctaataaacagatcatatactctatcaaccctaatcacaacacaagagcacatttgaataatctttacatccgttcacttaatgccgctaggg

SEQ ID NO: 704401 - DNA, 1045 bp, Homo sapiens
gcgtggtcttcacccttggcgtgttctccgccggctctcggatcctcaggcacatgcgaatgacccggagtgtgtgacaacgtccatttacctgtcgctttctcaccacgggaagtctagtagactcttgggctggctgagcttatcgtgggccttcgacagaggacgactggcgaatctctcatcgtcggtcaacgacaagatggagtagctgacgcattcaagagccatggtataatcttagggcactactcttgcagttagctggccttcgggagagcctgtgtggtgcgtccgtacagactgcacatccgctgcgtaggggtccgttctccctgcgcggttactgcgctgacttttcgcgctcgctgtggtacctcatgccgcgtggaggcctcgggctttctaggtcaggtttgcggcccgtcttctgcactgtggttcttcgctctactctagtccatgtaaccttctacaaccaactgggcttagacatatgcggttcactggtgcattcgaaatacgtcacattccaacctcggaatgtcgtcgtccttacacgcatattcgagcgattgcttacctcggtatctctaccatcgttgctcatccataggttggcctcttcattgggtttccgcacatcagcagatacgcctatattatcgatgcgtgtctcaacgtttaccaagcgaatcgtgcaaccgagcttttgatccggcgttcattggccttctgctggaagtaactcccctaggagcaaagacaggaacgtactggctcctagcgagtacctgagggctagctcagtctgaaccactgggtcaccttaagtgaccaagcctgtaacctaaagagaacctcccttggtttggcaggcagtgggcctgctggtccaagctgttcccaggttgcaggggggtcgtggggaacaagagatgaccttggggggattaacaggatgcaaaggaaaaaggctttacttagatgattgacttgggagctacggagaatgaacatccacttttgaatgttaagcaggatt

SEQ ID NO: 704402 - DNA, 543 bp, Homo sapiens
  misc_feature (532)..(532): n is a, c, g, or t
acatgtcgatgcttatatcttttcatatgctgaatttgatttgctagtattttgttgaggatttttgcatcaatattcatcggagataatggtctgaagttttcttttgtgtgtggtgtctttgtctggctttggaatcagggtaaagctggcctcatggaatgggcttggaaatgttccctcctcttcatttttttggaagagtttcaggaggattggcgataattcttctttaaatgtttggtagcattctccgatgaagccatctggtcctgggcttttctgtgttgggaggtttttgattactgattcaatctctctcattattggtctgatcagactttccatttcttcatgattcaatcttggtaggttgtgtgtttcctctagaaattggtccatttcttctaggttattaaatttgtaggcatacaattcttcataatattctcttataatcctttttatctctgtcgtattgggagtaatgttccctctttcatttctgattgtagttattgaatgtgctttntttttcttaat

SEQ ID NO: 704403 - DNA, 467 bp, Homo sapiens
ctaaatactaacgaatggcccagcataattacccccgatactccgttacagctatttcctcatcagccaattaaaaatattaaacacaaacttactcactcctaccgtcctcgtcacacgaataaccacactaacaatataagaagaattatagcaaagcctgagaaccaaaatgaacgaaaatctgtgcgcttcattcagttgaccccacaatccggtaggccgtacgccggccgctagtactgatctagttctatttgcccctctattgatcctcgcagactgccaaatatctcatcaagcagaccgactaatcagcaaccaacaagtgagctaatcagagctaacctcaaaacgaaatgataaccatagacaacactgatggatcacctagtgatttgtggtagagaatcattaaagttaaaggtggatagcaaatgcttgtacactatgagtcgagatgggta

SEQ ID NO: 704404 - DNA, 770 bp, Homo sapiens
ctgcgaaggaaatgggggggtgctgcaggtagtagaggaggacctggacctgtggggagacaggaaggctggaggctgggctccctgtccttggactcgtccttgctgactccagcctgtgttgcccctcccactccctagactggctccgagcaccgccccttcctggggagcccaggtgtgtttgccatttcttgcagccgtggaaggtgctacggggcagagggtcgggggcctcagggccacttccccaacctggccataacttctgtctgtctgaggcggcaagtcggccctgctctgggtcttgcaggaatcccaggaagctcccgccttgaagcaactcagagcttccaccatgaggacaagggcccagatctccccacctgggttgttctgagactgaggccctcctgagaatgcagcagcatctctgggcctggtctagctcacatgttgtatggcctggaggggcagaagtgtctgagtctgctcctggtgaacccatagcatcaacccagttcccagagggagaggtgtggggatctggctgtcttctctctaggggtgtctcacctcggcagacaagcccagggcaggtactgtgcgatgctggacgcacctcgcagacaggcggcgtgcagtctggccgagtatggactacctcgagaaggccgcggccgtctggccgcgtctggcgccccgcacggccgggcgggaagcaaatggacacaaaaaagcgggcgcactcgctgacaacgcggcaaacg

SEQ ID NO: 704405 - DNA, 1495 bp, Homo sapiens
  misc_feature (882)..(882): n is a, c, g, or t
  misc_feature (1495)..(1495): n is a, c, g, or t
ggagagaactagtctcgagtttatgatgttatattgtgtggtatttaacctattctattaacaaacaaggcctacaaactaattccttcttggacacacccacgtgtgacggccacgggaggccagggagtcttgggagtgctgggcctcggactaccgaagggctccaaaatgtagacgcaggccctctatgggcccgaatcttcttacagtcagctccaggtactatacacggagcttagtagtccacaaccatagggtctagagacctggctagtgatttagccaatcctattaaatccttactagtactggatctcaagaaacctcaagccttgtggcgaactctttgatttcagtggcgtgtggaaattcgtgacattagcgtgcgtgtagatctcagcagcgttctctcaccttaacaaatccgtcaggagagtagaattcttccgcggcccattatatggtatgaagagcacaaagaagactcaatgtatgaaactaccatcaaagcaacacaatcatgttgaagccttattatctcttttgccgtagactcccgaaagagcccccgttattacacgttggaccacgggttgacatgttgcgcacaaaggagggctgctaatcttctacccgctgatccgccggtccccacaacttccgataagtctgaatgtagcgacgatcgtctagtggaaggaattcacccctgcggcccaacaaacagcaacgtaactagtcccggtgggcgacaacacatcattatatcaatccgacggggggacaacttccaccctataagaacaagacacctatagtggaggactatgctaccagaacacaacaatcaatgccaggaggacggagggacaacaaganacagcaaaggacgcctccccgagagcacgctaaactgcgacgatgcaatagtcgaccccggatgccccttattgagacaccgaccaactcagtggcgccaagcacagcaccacgacgaccagtacgaaacaccgagggatattgaacaagaacacagagttcatacgataggtatcgaagcccgcgcatctgcataacgcaattacactccatgaatcgtcgttataacaacaccaatccacagaggcaagctaagcaaaccaataaaaatgaggagcggagccaacaacagagaagagccacactgaatggcatgagaaattgggttgaaatatccacacgcaaagactatgtacaactatggaaacgacccccggagaacaacaatcacatataccgccactaaacgatcaagagaaagcagaaacagagctaccaagcgagggcaaaaatgatccccggacccccactgaacaccagagaatcacgccgacagaacacagaatctagtacacgcagacccactccatcacaatgtgcagtagcaccaccctgtagctagagcaatcaaccagtaaagagcgagagcatagacaccaacaacaccagaagn

SEQ ID NO: 704406 - DNA, 808 bp, Homo sapiens
  misc_feature (105)..(105): n is a, c, g, or t
  misc_feature (256)..(256): n is a, c, g, or t
tgtgcctatcgtaggtccgcgccccttaaccaaaaaagataaaatggccgccgtcggtttgcaaccgctctctcggtagtatcgtcagagaagatgcttattccncggttctgagtcgcaagacgctagcaaattccatgtgttatgtagtccactatctaggagatcaagtaatctaataactgctaggctgacactatgagtcacagctctaatctactcgcccacagtagtagtaaacaagcactctacacanaatgtcagtcatgttgatcacatgtcatcccaccctatcatctgctaactacatcagctccgtaagatctcttctaatggtggacagggccccgatcatctccaggagtcatagaagtagtagttatgcaccagtttatacgatcatgtagttacatatgacatagctatatgcaccacccatagttcatacgcacgctgtcatcatgctacaacatgacagtatcacagatgtactattatcccgacaagaatgtcgactctgcacttggttggtcattcatctgaccagagagtctgatctctctcgccaccaggaatggagtagtcatggcagcgatctatggcaccactacacctctgctctcacaagaggctcccagtgattgtcctgacagcagcctagtagagtaggtggaacatcaggcgcttgtctccacgtccagccgtcatttgtttttattagtagacatgggctctgaccacaacgaacagacatggtctcgagctcagtgacttttagtgaccaacgtgcgtagacctcctgaagtac

SEQ ID NO: 704407 - DNA, 407 bp, Homo sapiens
cacgcgtcggtggggggtgtgtgtgtgtgtgtgtgtgtgagagagagagagagagacgtttacaggttaagacttcagtgttgttactttagaaatgggtaaattcagctgggtgaagtggctcacgcctataatcccagcactttgggaggctgaggcgagcagatccctgagcccaagagattagagaccagcgtcgggaacacatgggaaaacaacataccacacaacacacatcgacacaatatcgacctgagggtatagtggcgcgtgcctgtaagtcccagctatacagggaggctgaggtagggaaagatactatggacaccacaggtgccacagaaagacgggaccgtcgagcacaatgaagtgcacacggagacactcacaacacgaggtgcacaaaa

SEQ ID NO: 704408 - DNA, 481 bp, Homo sapiens
gtatcttgggttctcttccttgaccttgacatgtccatttaatgaaacctgctcaaatttgaggctcatttaatttgtttctcacaaaccttctgtatctacttttacatatgttcttacgcctgtgaattctcatggccgcttgtcctagggcgcctcagcataaccctcctttattagtaatatattatatatgttacattaatgccttaaggccttgaactattcacttatcctgaaatactttcttcagatctttctgattggctttttcttgttatccaggtcttagtttatattctaccgctgcaaaaagctctctgatcatctaacgtaaagtaacttcccagttactgtctattttattgtcatgttttactttcttcatagcactatttaaagttattttatgtatgtctctcattaaaatgtaagtttcctggagacaaaagatgctcaataaatatgtaatgatgataaa

SEQ ID NO: 704409 - DNA, 81 bp, Homo sapiens
ggatttgctggtgctgtacaactaggcttaatagggagcttgaattcgagcttctaacgttagaagcttgaattcgagcag

SEQ ID NO: 704410 - DNA, 417 bp, Homo sapiens
tgctctgggatagaggaactgctccttttcatcagctcttccaatgccgtgggagaggtgatcccagtcttctctgtacatcttgtgcttttccattaagacttgttccagtgggaaggagctttggaaaaattgcacaggtctgaatcttcagggcatcttcatgacaggacttgccaataatcataataataataataataataataataataataataataaagctccagaggcctaactggcttctcaagtcatttcagtgatatcattgaaacgtttttgtggtacttccctttgtctttcactgctccacttctatatcgcttcattctacttcttctgcttctggctttgctcttcgacaaaacaattatgacgcctcttctgcatcgttgactgcgactactacgttac

SEQ ID NO: 704411 - DNA, 1323 bp, Homo sapiens
  misc_feature (1323)..(1323): n is a, c, g, or t
taaaggaagcacttttatttttccttacacaaggacgtcgtggctggggcctaaggttctcacataacagtagaaaaccaaaattgggtggtcattctcttcaaagaactcgagaatggcgttacaaaaaaaaccttacattaaatttaagaagtgaatacattttacagggggtaaagtgcaaaccggcttccaaactcaaagcaaggtaacaggcccacgggggtctctgggccaaagagacattcaggcataaagaaagggaacacggggctccatacgggcttgggcacttctccagacccggacaagacccggcaagagacaaacacaaccgggtctctgggcacagcctcttagagagaaaactcccagaaacacttcgagccccgtgacagcgtttaattaccagaggggaacacgaggtataactttcaattacagagggtcaaaattcgagcaacagagtttttacaactccaggtggcgtgatatcagaatccaagccttcagagggacaatttctttccgaagaggctaatcccagttccggagagaggctagctatgagggggtgtgcattggccgaggggccaaattcctatcctcaattaaacccaggcagcaaatggctaacgcatctggctggagcccgtctaaagaagctattggcgggggacgatgcgaggggcccgatccgtagaactccgggtggcaaatccaaatctggtgggaagggtggacagtgaaggccgtgtttgagccaacgatcaacacccgaggtactggagccctggagggaggacagaacatggagactacaagggggcggagcgccaggggggagaaccctatgagaatcctgaaggacaagccgggtaacatgggtgtagcggccggaaaaaaccgctgtgggaggcacacaggtcctaggggagaaggtcccggtcaaacctccagagaggaacacaaagggagcaccaggatagaagcccaagttaaacccaacaacagggaagagaagtggagtacaagaagactctcggagaacaggataaagctcttattggccaagtgggtacaacaagcccactgatggcagaggaattactcacccagacagaaagacgagaggcagggaggactcatcgtcagacacaagcagaagacacaatatatacataacagacacacgacgagaggagaagaaaaccaaaacaagataagataggcagcacagcacaccagacaagcgtgagagcagaaggaacataatgatgcgtggtcgtggttgtcgctcgctgcgctgctacgcgagagacn

SEQ ID NO: 704412 - DNA, 681 bp, Homo sapiens
cctgcctcagcctcctcagtagctgggactacaagtgcctgccaccacgcctgggttattttttatatttttagtagagacggggtttcactgtgttagccaggatggtctcgatctccaggatggtctcgatctccaggatggtctcgatctcctgacgtcgtgatccacccgcctcggcctcccaaaatgctgggattacaggtgtgagccactgtgcccggccaaaagaacagaaattattttatcctgaagtaagctgtttatatttgggattatactgaacctatttgtccaataacctgagttttcaaataattttagttctataagtactataattatataaatattaatgaattcagattagctgaaaggaaaaaaagtagaagcctgactacttggtgctaactactaaagattttggcagaatcaatgttggatttggctttcctgtcccttccccatgccagccccccagagtgttctgccttgtgctgcctcccttcacctggagtgccacacccctctctctgccagttcagctcttcattcttcaaggcctgaccttgtctgacccttgtgcctctaaacccagctatctcaggaggccaaggctggagaatcgcttgaacctgggaggcagagtttacagtgagctgagatagcaccacccagaac

SEQ ID NO: 704413 - DNA, 310 bp, Homo sapiens
gttcgagaccagcttgggcagcaaagcaataccccttctctattaaatattaaaaaaaagattagccaggtgcagtgtggcccgtgcctggagtctcagctacttgggaggctgaggtgggagaatcccttgagcccaggagtttgagctgcagtgagctgtggtcacaccactgtactccaccctgtgtgacacagcgaaaccctgtctcaaaaagaacacacacacacacacacacacaacaccaaaaccccaaaatgttgttgtgttgtttcttttgaattttctgcgtccactatcattacctaca

SEQ ID NO: 704414 - DNA, 979 bp, Homo sapiens
ccacgtcgtcgcattcgcgtctaggactccagtactcttgactcaggtggactacgctggtagagaggctaggtggcacggctgcaggcccgttttgtcactacgggagctggcggtgaccgtgaagccatccaagatggacgtctaagagatggtaacatagatttctggcgccagcatgcctctggacttgtctgtgcccgacgcctggggacaggatgctcattcagtctcccactgattctcttcgggtcctgcgtctgaacagttgcactgaccgcagctatgtccgggtgtgatggtgcagcgtgctgtgcttttcgtgacgtaccgttcacagaggcttggtcacggaggcgcctgctgagggacccccttgcctgtccccctcgaggtcccctccgtgcggagccgcactcgccagtgctcccgagggtgccagggggggtcgcgttgccgaggcggaacgctccatgggtaaccgtctcctatcgatcgcaaccaggtccttcgcccggggtggtggtcgcccgtgttcctgggtgtccgtcgggggggcctgggtgggtgtcctcgatggtcggccatggaagggcgagggcctcgcgctggcggagttcgcttcttgtctctgatcctggtcgcggtcccgagggcccgcctggcgggcctcgtcgtgagcccggcttcgacgctgataactccgtgggcattaggcgagcgcctattacgccctctaggcacctgtgcaagattagcttgcaggttggtgaccctttcctggtgttacatggttctgtggaggatgaaagagaggtacacgcttttataggaaaggcgggcccaaatgagaggccaaaaaaaggcggcggcgggcgaagattccctaggggggcgggaaaagtgcaacgtgttttggaagccccaatgggggtaaaaggccggcgtaaagggtggaactaattgtgtgggccctggg

SEQ ID NO: 704415 - DNA, 2025 bp, Homo sapiens
  misc_feature (1504)..(1504): n is a, c, g, or t
  misc_feature (1521)..(1521): n is a, c, g, or t
  misc_feature (1524)..(1524): n is a, c, g, or t
  misc_feature (1527)..(1527): n is a, c, g, or t
cctgcctcagcctcctcagtagctgggactacaagtgcctgccaccacgcctgggttattttttatatttttagtagagacggggtttcactgtgttagccaggatggtctcgatctccaggatggtctcgatctccaggatggtctcgatctcctgacgtcgtgatccacccgcctcggcctcccaaaatgctgggattacaggtgtgagccactgtgcccggccaaaagaacagaaattattttatcctgaagtaagctgtttatatttgggattatactgaacctatttgtccaataacctgagttttcaaataattttagttctataagtactataattatataaatattaatgaattcagattagctgaaaggaaaaaaagtagaagcctgactacttggtgctaactactaaagattttggcagaatcaatgttggatttggctttcctgtcccttccccatgccagccccccagagtgttctgccttgtgctgcctcccttcacctggagtgccacacccctctctctgccagttcagctcttcattcttcaaggcctgaccttgtctgacccttgtgcctctaaacccgtggccccacctctcttggttcctatgtcaggtgatgtttgtgtttttggttatgcccatctccatagccagaccaagcactctggaagccagggttgggtgcttatttatctgtttgccatgcagaaaatatcttgcacaaaattacctctgttaaggaatctgaagctgaatttagtttggctgagtcagggttgggttttttttaaggggctgtggggtgaaatgttgactggaagccacccacaaacacacacctgctggttaggaacccggctgtgggtggttctgagctgtttggcttcagttgacagtttctgattgccctgagcaccaggtctcatcttgcatctcatcctggcctggagaacattcagtttccttccaacccttcccacctttcccccactcccttggaggaactgaagttggggttgaggagagccagatggctggagtgggtatttgaaggtctttctgtcacctgttcagtgtggtctgccccacccctgctgaccaagactgactgaaatgtaaaataatacagaccatctcacactcagaaagctggcacatttttgaaagcccaagtgtgggtaagtgcgtggaacaacgataattcacactgctttatgagtagaaattgtgagaaatattgtgccaggcaatttgcaaaatcttggaaggttgtgtgcacttaaccacccagcaactactcctggatgcatcctagagaagtgccatgtgaacagagaatgattttaagacttcactgaagtattgtttaggtagcaagattgggaaaagcctgcatttcatcagcagaagaatggataaataaatgggttgtttttggtccttggaaagtgaatatgaaagagttacgtctcaacacagatagatgaaanattatgctgagaaagtnggngangctacatacaggtacccttagtgtaaagttaagcatactgtgtacctgtgggcacgttacttcaacttgtttttcactttttctgtaaaatgggatagtagtggcaatctcacagggtgattgtgggtgggggggtggtcaatgaagtaatgcatgtaaaatgcttagaatagtgtctagcatgtaagccttgtggacatatagaaagtgttattgttttgcacagtaatctattttctgtggattcaaataatatgaaatgagtataaaatcatgtattggaacgatgtgtgcaagtcaccattctgccttcctaaggcaggagacctgatggatttggggagggtacatggggccttcagttgtgttttctttgtttttttctaaaaattgatgcagaggcatcacaatgttaagattttaacagggtagtgtggtgggtactttttaactgtttgcttaaagtgtttcaaagtaaaaatatttcttaagcataga

SEQ ID NO: 704416 - DNA, 914 bp, Homo sapiens
atgggtctatcacaaatgtgtcgagggagtcttgcggcaccctggtgggcgcccatgtgggcccgccgggaacccgcggcgtgcccgtccccgggtgttcgcggtcccgcccgtcgccgacttgcgcccggctatcccgccgttatgggggttgcccccggcgtttcacatttgccagtacagactgtgtcgtgtatgtcttcaggagaagtcgctgttccccctcttctggttcaaaacgcgtgtggatgcgggcgcccaattgtttaagagcttgttgcgggcagccgtcgccacgtggtcgggtaacaggtctccggacgaagacccccggtctgtgtgtgagaccttctccacgcaggcgcacccacctccatggaggcagccactgtccggtcgctgagatataacaccaccaacaccatgccgcgcggggaggttccttccaacaggcacccgtgggccaccaacgggtggatcggcgcacaggccaagtggcccctacttcggcccccgtcagcgttcgtgtaaaagaggcttcatagcctgattattcatccccgctaactgatgctcgccccccccccccttattacatagacactgcggggcaaacacggctatgtacaccacacatctgtttgatttcaacagccccctttcatcatattactattcaataaatctggttctctgatgcccaacagcactcttttagacccggtctcgaacaggtaaatagataatcttttccggaaccccaccttgtgctattttctatcgactgttgaccactgtattcatagtcactaatctgctttatagaccctatacggtttatagtggagaaccacatcggccccaccaagttgtcaccaaccaaatttttagaagcccccctcaaaaaacataca

SEQ ID NO: 704417 - DNA, 950 bp, Homo sapiens
  misc_feature (429)..(429): n is a, c, g, or t
  misc_feature (446)..(446): n is a, c, g, or t
  misc_feature (449)..(449): n is a, c, g, or t
  misc_feature (452)..(452): n is a, c, g, or t
gggggagctgtctgtccatccaggccttggcccccagcccatgtgtttttgcagcaataagggatatggggtaatggcccaaaaaataaaatggtttgtgtgtctatggggaggaaagggttgcaaagctgtggggaccgctgaaggggaagggacagacgaggtcagtactgggaacaccgaaggtgggagcccatttcataacatttcttgttgatcaaaccacccagcaactactcctggatgcatcctagagaagtgccatgtgaacagagaatgattttaagacttcactgaagtattgtttaggtagcaagattgggaaaagcctgcatttcatcagcagaagaatggataaataaatgggttgtttttggtccttggaaagtgaatatgaaagagttacgtctcaacacagatagatgaaanattatgctgagaaagtnggngangctacatacaggtacccttagtgtaaagttaagcatactgtgtacctgtgggcacgttacttcaacttgtttttcactttttctgtaaaatgggatagtagtggcaatctcacagggtgattgtgggtgggggggtggtcaatgaagtaatgcatgtaaaatgcttagaatagtgtctagcatgtaagccttgtggacatatagaaagtgttattgttttgcacagtaatctattttctgtggattcaaataatatgaaatgagtataaaatcatgtattggaacgatgtgtgcaagtcaccattctgccttcctaaggcaggagacctgatggatttggggagggtacatggggccttcagttgtgttttctttgtttttttctaaaaattgatgcagaggcatcacaatgttaagattttaacagggtagtgtggtgggtactttttaactgtttgcttaaagtgtttcaaagtaaaaatatttcttaagcataga

SEQ ID NO: 704418 - DNA, 1132 bp, Homo sapiens
cctgcctcagcctcctcagtagctgggactacaagtgcctgccaccacgcctgggttattttttatatttttagtagagacggggtttcactgtgttagccaggatggtctcgatctccaggatggtctcgatctccaggatggtctcgatctcctgacgtcgtgatccacccgcctcggcctcccaaaatgctgggattacaggtgtgagccactgtgcccggccaaaagaacagaaattattttatcctgaagtaagctgtttatatttgggattatactgaacctatttgtccaataacctgagttttcaaataattttagttctataagtactataattatataaatattaatgaattcagattagctgaaaggaaaaaaagtagaagcctgactacttggtgctaactactaaagattttggcagaatcaatgttggatttggctttcctgtcccttccccatgccagccccccagagtgttctgccttgtgctgcctcccttcacctggagtgccacacccctctctctgccagttcagctcttcattcttcaaggcctgaccttgtctgacccttgtgcctctaaacccgtggccccacctctcttggttcctatgtcaggtgatgtttgtgtttttggttatgcccatctccatagccagaccaagcactctggaagccagggttgggtgcttatttatctgtttgccatgcagaaaatatcttgcacaaaattacctctgttaaggaatctgaagctgaatttagtttggctgagtcagggttgggttttttttaaggggctgtggggtgaaatgttgactggaagccacccacaaacacacacctgctggttaggaacccggctgtgggtggttctgagctgtttggcttcagttgacagtttctgattgccctgagcaccaggtctcatcttgcatctccatagccagaccaagcactctggaagccagggttgggtgcttatttatctgttttctttgtttttttctaaaaattgatgcagaggcatcacaatgttaagattttaacagggtagtgtggtgggtactttttaactgtttgcttaaagtgtttcaaagtaaaaatatttcttaagcataga

SEQ ID NO: 704419 - DNA, 328 bp, Homo sapiens
  misc_feature (242)..(242): n is a, c, g, or t
actggggctgaagcagttagtcgtgtaggcggtgatcagatgaacgttagcagcatgtggggtacataatatggatgcgaagatatcagttcgctacttcaattcctctacttcccttttttccaaaagaataatcagaaggattcaagaacaaataatacccattttgaatctcagagaaaaccttaggtcttatcactacacacgcctttgtaagacaacatctttaacttcctctcagntttctccgtttttttttgtggtttccagtattcccctggccgtgcgttcccaggtggaattttaagccatatcgggggtctcatag

SEQ ID NO: 704420 - DNA, 123 bp, Homo sapiens
gcgtcataaaccaaacaaagggactccttaatattaatggccaggttattataaggaaaaattatcatttcccctggagggggaatggttacattaactttcacagccaggaaaaccaaacct

SEQ ID NO: 704421 - DNA, 259 bp, Homo sapiens
caccagcatggcacatgtatacatatgtaactaactgctcattgtgcacatgtaccctaaaacttaaagtataataaaaaaaaaaaaaaaggaatgggaaatttggggggggggccccagggaaggacaggaaaggggtttggggtttttttaaggggaaacaaaaaggctcaaacattgatgggggggagggttgcacaatcctgggagtttcctaaaatccaatgaattatttactttaaaggggggggctttcaca

SEQ ID NO: 704422 - DNA, 253 bp, Homo sapiens
cccgtgccatgcaataacctcccctttaacccttaccaatctcctatgcatactacagagcccactcccaagtggctctttcacccagagaaagccttccctgggaatggagggtggtgcaggcagaggagcactcaccagatagttgagggcataggccagctgtttgaccacctgcagcttccagctggctggcaccaggtggccacgttttcgcagatacatgtctatggcccccaggtgtacaaattct

SEQ ID NO: 704423 - DNA, 644 bp, Homo sapiens
caggttctccggtgctccccggggccgcggggctgcccagggtgttcgaagtctgttcccctgttgcgcaggctgcccgtggtatgccaagtcgtgtccccgagatgtcctcggctgtggcccacggcgcaacggcccgacggtgttccccgggaatagttggcgctcggtcccccgttttgctatcgatgtgttcccgctgcgcgatggcgtgttgttctcccgcagagggaattacccaccggggtgtgtcctccgccacgacgcacttggggtttgtctcccccgggagacaattgccccgtgtgtgtggctcacacgaccgtgtacagtgcttgtccacgacaacagtgacatctctttggcccacccagtcaccgggtgtggtccaccatcagagcgtccacaatgtctccgacgaaggatccccgtggtgttccccacccgataaatacggggttttcccgctgaggagcccaccggctgtcccccgagcatctcccgatgcttcccacgagaatcatcacgtgtctctcccgagacaccatccccgattctcccagatgacccctattctttccccgcccatcaccattttccgggcaatttgggggttccataaaataacttcgcccacatacaaa

SEQ ID NO: 704424 - DNA, 124 bp, Homo sapiens
atacttgaaaatgaaccctttaaaatgtggatcaatctgtatttctaaaattaaggaaaacgtacttgtttctgaatcacagttggcattgaatttatgcctaaaatcactggtctgtatagca

SEQ ID NO: 704425 - DNA, 276 bp, Homo sapiens
ggctgtggcctgcagcttatggtaccctgctgggagtcagctcccatgtgggtcagacctacgagatgttctcctggttcctgctggcccctgccaggccctggctgccagtgagagccctggcttgtgctcactcgtggaagtgaatgagctcttccacgcaaccctatgcccctataccactggtgacctatgacttgtcacatgtgacctatcagatgcacatgaccaatgtacaccccacactccacccggtgtgtgtgtacctgatgtctt

SEQ ID NO: 704426 - DNA, 219 bp, Homo sapiens
gctatcatatagtaaaacccagcccatgaccctaacagggcctctcagccctcctaatgacctccggcttagccatgtgatttaatttcattccataaggttcttaatattaggcttattaaccaacacattaccatatacaattgatgcgggattgtacaagaggaagcacatacaaggccacaacaacaactgttcaaaaggcttgttagggatatc

SEQ ID NO: 704427 - DNA, 809 bp, Homo sapiens
  misc_feature (68)..(68): n is a, c, g, or t
  misc_feature (120)..(120): n is a, c, g, or t
  misc_feature (213)..(213): n is a, c, g, or t
  misc_feature (363)..(363): n is a, c, g, or t
  misc_feature (507)..(507): n is a, c, g, or t
  misc_feature (525)..(525): n is a, c, g, or t
cccacgcgtccgggatgagagctgcaccgcgcgggacaagtcgccggcggcgcccgacggagcagaanagagagcatggagctggagaggatcgtcagtgcagccctccttgcctttgtncagacacacctcccggaggccgacctcagtggcttggatgaggtcatcttctcctatgtgcttggggtcctggaggacctgggcccctcgggnccatcagaggagaacttcgatatggaggctttcactgagatgatggaggcctatgtgcctggcttcgcccacatccccaggggcacaataggggacatgatgcagaagctctcagggcagctgagcgatgccaggaacaaagagaacctngaacggaggagactctcggtgtgctcccggtgctcgtgtgcatatctccacgcagagcctgctgcaggcgggccgatgattgctcagaagagaagaggtaggttcgcggttgttgttgttgcagacacccaagatgaggcaacnggcgctgaggaggagctnctgccagggtggatgtactcctggaggtgttccctaactgtgtcgcggggagcaggccccagtgggtgctggccaaagctcggggggacttggaagaagctgtgcagatgctggtagagggaaaggaagaggggcctgcagcctggggagggcccaaaccaggaactgccagaacgcctcagaggccccccaaaggatgagctgaagtccttcatccggcagaagtacatgagggtgatagcgcaaaggatcaaaaatcaccggcccaggtcccaagaagccca

SEQ ID NO: 704428 - DNA, 812 bp, Homo sapiens
  misc_feature (68)..(68): n is a, c, g, or t
  misc_feature (120)..(120): n is a, c, g, or t
  misc_feature (213)..(213): n is a, c, g, or t
  misc_feature (363)..(363): n is a, c, g, or t
  misc_feature (510)..(510): n is a, c, g, or t
  misc_feature (528)..(528): n is a, c, g, or t
cccacgcgtccgggatgagagctgcaccgcgcgggacaagtcgccggcggcgcccgacggagcagaanagagagcatggagctggagaggatcgtcagtgcagccctccttgcctttgtncagacacacctcccggaggccgacctcagtggcttggatgaggtcatcttctcctatgtgcttggggtcctggaggacctgggcccctcgggnccatcagaggagaacttcgatatggaggctttcactgagatgatggaggcctatgtgcctggcttcgcccacatccccaggggcacaataggggacatgatgcagaagctctcagggcagctgagcgatgccaggaacaaagagaacctngaaaacgcaagagactcatggatgtaccaacggtcagggtgcccatcatccccagaagccccatgacaagcggaaccgaaatggctcacagaagagactaggtctatcggctgcatgcatgctgaagacacccaagatgaggcaacnggcgctgaggaggagctnctgccagggtggatgtactcctggaggtgttccctaactgtgtcgcggggagcaggccccagtgggtgctggccaaagctcggggggacttggaagaagctgtgcagatgctggtagagggaaaggaagaggggcctgcagcctggggagggcccaaaccaggaactgccagaacgcctcagaggccccccaaaggatgagctgaagtccttcatccggcagaagtacatgagggtgatagcgcaaaggatcaaaaatcaccggcccaggtcccaagaagccca

SEQ ID NO: 704429 - DNA, 530 bp, Homo sapiens
gagacgggtccaggatgtcaagcacagcctgggtgaccacgttggccgggaagctacagacggaggatttacacatcagacaaagggctgagtatagatcacacctttaagatggtcctccaaacaaaagattctacaactttagttatttagaattagcttggagacttggggcaggtcacaatttttctctatctcctatcctgtaacttcagaaccagacacactactaacatcataacatccaaactgggttttggtttttttaaacagataaaaaatgtgacggggcacaggggctcatgcctgtaatatcagcatttggggaggccaaggggggaagatcgctggaggccaggagttggagaggggccggggcaacataatatgatctcatctctacaaaaaaaaaaaagggaaaaaagggcaccatcggggggggggggcatggagcagggtagccaaagttatccgggaaaccgaggcaggaggactgcttgagcccaggagtcaagaccagcgtggggaac

SEQ ID NO: 704430 - DNA, 855 bp, Homo sapiens
acactattgcactaaaagtatggaatagtcgctctatcgactatctgaattgcaagtaggatatccaaagagaaactcccatggtgagatccggccatgtattatctcttgacatggtatccaagtagcaccccatctcaatcatataccaaaatcctctccctcactaaacgtaagccctatctcctcaactctctcaatcttagtccatcgagtagcaggcaagttgaggtggatgaagaccaaaacacgcagcatacgacaaaaaatcttaggcataacatccatcaaattagcaccacataagcgatgaaataaatagcacgcttgactaaccgataccaaacacttaaccatacaacatatcttacagtgttaaccttaatgatactactatatccgtatactaacttaaccgcaattcccttacgtacgtcagacatataagacctcacagaaaaccacaaagaccttgaggtaacgtattcattcgacaaccctggagaagcagaagcataaaccaatgacgtaaacaaaccctttaaatttccaatccgacaccatacgctcttccgagtaagggaggacctgacaaccacggataaaccggaaatttatatggccaccaagagtggtgacacagtataatcgcaaagaacatttctcaacaaaaaaaaaaacaattaggccccttcatcgattcccaccaacccaatcaattaggccaccaattcagcccccttaccatttacaccgttcttaaatacctaaccttaaggcacttaaattcttaatcacagcatccaatcaacactattcccccaatatattaccaacgttaacaaatttaaatga

SEQ ID NO: 704431 - DNA, 968 bp, Homo sapiens
gagctggtggcgtccgcggcatgggtggtaaaggtataggttgatagctgtgagaagggacagctgctgccaatcctgagggtgtaggagtggagatgaactgtaaggtcgtgatgcactctacctagcaagttgatttcatgtattcaacaggggcctttggagttcatgacaagagatggaccgtggcagagctgagaaacgggagcaacatccgtgaatggttctaaccgctgtcgccaaggtctctcactcgaacgctgagcctcccactcgagtgtgcctgcgctttcagaacgggacattagacctggcagcttcatcgaacaagtagcagtgtccatgtacatagtacctgccttcctctttgaattcttccgcgggaaagggtgactgaactgtgagtccagggagggagctgaggagcccttatccgctcccacacagtcccctcccaagatccagacgacgccgttgagggctgagatccttgctgtgggatgtgccagtgttcccaccaagagcaggaatttagacctttttcctggacccactctcttccatcctgggggctctgttacactaactttgaataaactctccctttctttgcaactttcgcacgaacaataatgatttttattgccagggcgtctctgctgcctaattcatttcccaggaagctgtgatacaggctgaaataaagtcgtgtcttagaaaccaggacctaaacccccacagtatgttgtagaaacacatgtggtccctgttcagtaaactatttttttcaacacagaaaaaccgggcttattggtggggggacaagtataaaggggagggttaatgtttccgccccattctgtcacatgcaatctcgggccaaagggacgaaatagagcagcacgatgacgtaaaggaaggagagagttcgaaccgaggaaaggaagcatcaaggaagataagaggaa

SEQ ID NO: 704432 - DNA, 216 bp, Homo sapiens
ttgtagcagcgcacactcatatatacacagctctctctctgcgcgcgcgagtagagctgtgatatcttatgtctgcggctgctctatgagagatatgagagtatcgctctctctctcgcgcgcggcgcccgcgcgcccctatcatacagataaagatgatatatcatatatcacatctcccgccacacacacagaagatacacagagaggacacaa

SEQ ID NO: 704433 - DNA, 150 bp, Homo sapiens
atacagcctacagtgcaaaatatttaatggtataatttagatcaagttaaaaactacatacaaggttgtgatcaacagcatcctaacgataaatataacaaacggatatactttgcggtgtacaggttagcgcatataaaaatattacgg

SEQ ID NO: 704434 - DNA, 202 bp, Homo sapiens
acccctgactcttgggacgctctagtttgttgaaagtaaacgctacgacccccgcgttacactcagctaacagcatggaggagacaccgagagccagggggcgcctacgggcggtggctcgcctcgcggcggaccgcccgcccgctcccaagatccaactacgagctttttaactgcagcaactagcgtccaaagcacaggt

SEQ ID NO: 704435 - DNA, 274 bp, Homo sapiens
  misc_feature (55)..(55): n is a, c, g, or t
  misc_feature (82)..(82): n is a, c, g, or t
aaattggtcttcattgtttcttctgtggagaatctgtgctaggtactgtatattngatttatattggtttgtttaattgctnaggggtatttggaaaggcccactgaatacatattgaatggggggccggcttttgtggttttgataaagacattgtaggcaaggaattgtgccgggaaatctgatttcgggacaaaagaatacttaccaaggcctaaagctaaagatacttattggaaaacatcctcaattgcaataaaaacattataacatg

SEQ ID NO: 704436 - DNA, 227 bp, Homo sapiens
  misc_feature (5)..(5): n is a, c, g, or t
  misc_feature (60)..(60): n is a, c, g, or t
  misc_feature (63)..(63): n is a, c, g, or t
tgggnaaacatgggatttccccatgttgcccaggctggtctctaactcctgggctcaagnganctgtttacctcgacctcccaaagtgctgggattttttttttgagccaccatacaccacagattgttggtaatcttggcacacagtttggtgacatagtgcaaacaaaagtccagttgagatagattcctgagaaactaaagacaagtaggggacagtgaattga

SEQ ID NO: 704437 - DNA, 414 bp, Homo sapiens
acgggcgtgatggcacgtgccatgtatcacagctactcaggaggctgaggcaggagaaccacttgaacttgggaggtggaggttgcagtgagccgagatcacaccactgcactccagcctgggcaatagagtcggactcttgtctaaaaaaaaaaagaaaagaaaagaaatgacctgctaataaagtaatagaatggaaaaaacaaaacaaaacgaaacaaaaaaaaaacaaaaaaggaagcataaagtatctagacacggggtcatctggattcctgggtactggttgaccataattagatgtcccatgatcagttacaatcaaaatctcttttggggtgatggagtttggctttagaatgctaatatcatggcatttccatattctaggttatctgtataagcagtaagatg

SEQ ID NO: 704438 - DNA, 360 bp, Homo sapiens
cgtttagagcaggctcgtgtacttgcattgcgctctctctaagcagctgataaacagctctcataaaacgcttagagtgtgattgatatggtcctcagaagcctgttctctcatgcatatcatgggaataataatagctatcccatggataggctgtgaaatacaaatgtgtataaggaaagtaaagagcagaatagagagtttgttacccaagagactcacaatacatgggaaccattgctgctactgaggctgcagaagccaccactggaaatggaaaccaccaccactcactgtagatcagcatgtccactggtctccaggctctgagtctgtattaacgggctggggtaccgagct

SEQ ID NO: 704439 - DNA, 1038 bp, Homo sapiens
gaaaacctgttcaatctggtggtgcgctctgtgtactgtcacacttaacccacaggggctggactttgttcaatacaaactggcagagcaaatatgtgaaacaaggccgaggacgcagtggcctctcaccatgaatgcagcattccccattgcagcatgtggcatccgggcatctgggagctccaccccagagtggcgggacctcattctatgctcatctacactaacaagtgtccttactctgcttcctttctatcccacatttcacggacgggacactggctttggaagactatcagcaggatgctatggttacccaagtacacggcattcccaaacgtgtgagcagccacacgacaacttcactaacaacgcatgtcagcggcatgatccgtctctacgctgctatcatccagctccggtggacactatggaaaccgaccaggagattcaccctacatggcttcacatcatggcatggcgctgcgcttggcacagatacttaaacatggcagcaccgtttcacgaatgctgaccagccacccctacctactcatgcacataaccttggaggtcgtgatgcggacatgccccacactgaaccaactaccaacgccatcagcatctaggaaccactgcctcacattcctcactccaaacgaggactactccaccccacaatcgcccccctctcacaccgcctccagggaccgacttcgactccttcatacgccctcaacgccagtcttgcgacaccatgtctgaacacccttgaacactccctatgccccaacagggcaaacatcactactctacctaatgccagcctcctgtgaatctgcacatcccatccaccccaccaatcacaagaaatggactgcaaagcacgagccagtacctaccagggacacttgcaccaacacacgctcgacattacccagcaacacctaccatcctccgcactacccgaaacgatggctcgttatgttcctctccacgcgtacaaacagcgcaaccgcgtcaagccgctcgcagaca

SEQ ID NO: 704440 - DNA, 280 bp, Homo sapiens
tttggggggggggggggggcccccgggaaaaatggcacccccccttttttttaaccccttttgggaaaaaaaaggggttgggggccggggttttttcccccaagggggttttttttcccccggggggggggggggcccccccggttttgtttttttggccaaattttttttggggaaaagggggatttttttgggggccctttttttttttgggttttttttcccccccccgttttttggtttttttaaaccccccccgggggtgggggttttcccctta

SEQ ID NO: 704441 - DNA, 799 bp, Homo sapiens
agccatgtacccctaatcgggtgcctctcagtcctcctaaggaccgtccggcctagccatgtgatattcacttccactccatgacgctcctcatactaggcctactaaccaacagactaaccatataccaaggatgggcgcgatgtaccacgaggaaagcgagcataccagggtcaccacaacaccgaccatgtccaaaaaggccttcgatacgggataatcctattgtaatatacgctcgagaagtgttgtgtgtctgtgcgcaggatttgctctggagcgcttttacgcactcgcagcctaagccgcctaccccgcacaatggtaggagggcacgtggccccgcgaacaggcatcgaccccagcgtaaatcgcccgtgagaagtccgcacgtcgctaaagcagcactcgcgtgattacgttgcgcgatcaggagtatcgaatcagcctgagctcagccgatagtcgtaagtagaaaaggaaagccgaaagcgaaataaagttcgaagcactgctgattacaatttgactgggtctctattgtgaccctcctacgagcctcagagtactgcgagtctcccttcaccatttccgacggcatctaccggctcaacatgttttggtagccacaggcttccagcggacttcacgtcattatcggctcaacgtttcctcactatctgcttcatccgccaactaatatttcactttacatccaaagcatcacttgggcttcgaagcccgccgctgatactggcatctgtagatgtggtttgactatgtctgtatgtctccatct

SEQ ID NO: 704442 - DNA, 435 bp, Homo sapiens
  misc_feature (369)..(369): n is a, c, g, or t
  misc_feature (427)..(427): n is a, c, g, or t
ggcagggatggagtctctctctctgttgcccaggctagagtacagtgacacaatatcagctcactgcaacctccacaccctgagcagtcttaactcatcccagcactttgggaggccgaggcgggcggatcacaaggtcaggagatcgagaccatcctgggacagagtgagacccttgtttcaaacaaaacaaaacaaaaacaaacaaacgaaaacagcaggaagtgataggtgctgtcaacggaaagccaaactctaaaatatttgaagagatttattctgagccgaatatgagtgaccatcgcccgtgaaacagccctcaggaggtcttgagaacatgtgcccaagggtgtccgggcaccgctggtntcatacattttagagaggtatgagacatcaatcaaatacattaaagaaatacattggntaggcccg

SEQ ID NO: 704443 - DNA, 145 bp, Homo sapiens
tttttgttgggttttttttttctttggttttagtctttgttgcttgttattgtaagctggggaagaactttatttatcaaagcggaaatcccctgaaattgtttaaaagcccctgattacccccttgatgccttttgggatattg

SEQ ID NO: 704444 - DNA, 632 bp, Homo sapiens
ttataatttaatctaagggtcgcccccgtgtccaaagtgtttgcgccccctcaactgatgccccccacgttgtgttatttagttcccccccgtacttttcaccaaaagacggtgctctttctgtcattgtatcttttactgaaccgcaccactttattttttggtcatacatgggacgaaaatctttcaagagattattttctcacccccccctcctcaccactcgttgtccacatactgtttattacaaggcgtgcaccacacggcgcttctgtttaattatggttgcgccgcggtctgtataagtctgcacctcctgtgtcgagagttttcttacaccactgtgtctagtgtcccccagctgcaggagtattcattctttatggggcttggttgttctgtaacccacccctcttcgctggcctcccctcgcactcgctgtggtcgctctctctaggtgttagcattgtggagaaatttctcttttctccccactttaacaagagctatcaacacgtacaccggtgaaatcacccccaatatttttcaaactatcttgctggactacccccaagctctctaaaaatcaattattaaaacaacaccccccacctccccacattaacaaacaa

SEQ ID NO: 704445 - DNA, 177 bp, Homo sapiens
taaatagcgacgcccatgaaaaggcacatggggtggagctggggtcgtcagcactggtcctgacggagacatagtggcgccaacgtaagagcttgacttctctgcaggttcacagaccgtgaggctcatgatacttagaaactcaggcggtggaacaggaacggtttaagaggcatc

SEQ ID NO: 704446 - DNA, 240 bp, Homo sapiens
  misc_feature (107)..(107): n is a, c, g, or t
aagctgaggtgatctcagaggatccctatacacccacacctgcagagttctcccctctctctgatccaggcggctatcggtgctgctgcttgtacattcttcccccntctggggggctctacctctccacacttccccagaaggaaaagggcaccctggattactctttggaaatcactccttggtggtatcaggctataccacccctagtcagtcatgagccatgggtcacagagggag

SEQ ID NO: 704447 - DNA, 221 bp, Homo sapiens
ggtcagcacgtgtgctcacgatgttgaccggtaacttgttgcagtgcaggcatgcagccggattggtgaatacacgtcgaccagagtccatcttaacgatatttggcgtgtcgagcagggtgctcaagtgatcgacggatcttgttccaaggaggcatgcaccgcaagtggtgaatacacgtcgaccatggaggcatgcatgcatgatcggggtactgcac

SEQ ID NO: 704448 - DNA, 1430 bp, Homo sapiens
ctgtacagccctctcccgcctatccttccccaagtgacgtcactgccttgtcaccagcgagcatgcctgtcatgcccactcccctgaggaagcatggggacccatatacaccctggttgccctgcaccagacaggccggtggtcaggcccaggccgacggctcgggttcgtgccacagctttcccacgttgcttcgctttgaacattgcgtgtgcctgctgctgtggtgctctgtggcatgtgctcgtgaaacttgtgacccattcactcacgtccaaacaagctgaggtggcccttcgaaggccaacaggttattgcagacttgacagctgtcgtctcagtagacgacggttcaccatgctatgtcaaaaccttcgagtaaccctcgttgattgctcacgttacacatttgcccagggaggttccttgaaagagacttatcgccgggaactttggccagaacggcttaacactcaccgtcggcgccatttacgaactcttggcaaccaacacttaagcgaggcacccgaggcccccatcggccagcaagccccttcgggaaccccgggaataggcgttttagccttcaagccggactactgctttattccaccgagtgaacctcattaacacagtgtctagaaagtacctatagagacgcctttacatggcctatactttattgttaccccccccaatttcatcacagcctttccccgtatcctcaccgagtaacccacaaaccaccccgcataatatacgcctaacatgtcgtccaatttaccgcgtgactacccaagtaaataaatagctcacaaacccgtaaacgagggacaacagcatttaaccgatgttttcctacagcatcacaagccatatctaacacaacaagtggcctgctcgtctccgttaccttaagtagcgacgataatctaccgcacctagaagggagtgactcccacaaagcctattctacgccgcgtaccccccacgccgactttacttgatcgtgcatacaccaacgtggttgggacccccctatatatgcggacgtaaccgccgcacaactcatcaatagacgggctcaatggcacacattgctcaccaggttgtgttacttcaaacacagcagtggcgccggtgtgcacctgggcgacaacaccacccgcgcagactacctgactggagacactcccgtgtggttcaaaaggcaaaccccatgataaattcccgtgcgtgaggggtgacccaacaattggagcacacaaccccctccaacgcacatatattactcgctggtcacgggctatcgataacaaacctcctcaacccgcggcacaatctgcggtcaccaacaccgccccatatttacgtaccgcccaagacttttgctccgcaattgttagattcgccgaccaatgacgtatccg

SEQ ID NO: 704449 - DNA, 776 bp, Homo sapiens
  misc_feature (116)..(116): n is a, c, g, or t
  misc_feature (630)..(630): n is a, c, g, or t
  misc_feature (674)..(675): n is a, c, g, or t
  misc_feature (680)..(680): n is a, c, g, or t
  misc_feature (691)..(691): n is a, c, g, or t
  misc_feature (695)..(695): n is a, c, g, or t
  misc_feature (702)..(704): n is a, c, g, or t
  misc_feature (707)..(707): n is a, c, g, or t
  misc_feature (711)..(711): n is a, c, g, or t
  misc_feature (727)..(727): n is a, c, g, or t
  misc_feature (729)..(730): n is a, c, g, or t
  misc_feature (733)..(733): n is a, c, g, or t
cacactccacataaccacacaaacatacacactcacaatcacaacgctcccaacacccccacaacactcaacaaaacccccacccaaccacacacacattaccactccacaggttntagctagtcctagtaatcgttaacgtgcacggatcccacgtttgtggtgggaggacatggtgctgcagggcggtatgctccgggctataaaaggttaggtagtggacaggctcccagtgctgacctgcgtggtcaaggacaatgaagtgcttaaaggcatggtggtatgatagctgctcggaacagtgacagagggtatgcagcctagttgattccagttggtggagcaggcaggatggggaagtaatctgggaagggttctgcacgatctcaagcctaacacagctatatcaggaatgagtggagtgccaggcgcacaacaaagcgcagtgcatttgcatctatcttaggcaaagaggcctcttaacatccgaactaaacagattcagcaaatgaggcaacaacaggggtggtgtttctatcttttcctttcccaaagcagcgtcctcccaccacaaacgtgggatccgtgcacgttaacgattactaggactatgcagaaacctttggagantacttcgccattctgtctgctccaccaactggaatcaactaggnngctancctctgttacngttncgagcannnatnatancacatgccttaagcantnnatnttccttgaccacgcaggtcaggacgggagcctgtccataacaa

SEQ ID NO: 704450 - DNA, 100 bp, Homo sapiens
ctgtgacatgtcacgcagcagatgagacagagctagaaccctggaacaggctatgtgttgagggagggagaggaagaaaccaaggaccccctggtcctgg

SEQ ID NO: 704451 - DNA, 639 bp, Homo sapiens
  misc_feature (20)..(22): n is a, c, g, or t
  misc_feature (28)..(28): n is a, c, g, or t
  misc_feature (493)..(493): n is a, c, g, or t
  misc_feature (537)..(538): n is a, c, g, or t
  misc_feature (543)..(543): n is a, c, g, or t
  misc_feature (554)..(554): n is a, c, g, or t
  misc_feature (558)..(558): n is a, c, g, or t
  misc_feature (565)..(567): n is a, c, g, or t
  misc_feature (570)..(570): n is a, c, g, or t
  misc_feature (574)..(574): n is a, c, g, or t
  misc_feature (590)..(590): n is a, c, g, or t
  misc_feature (592)..(593): n is a, c, g, or t
  misc_feature (596)..(596): n is a, c, g, or t
aggtgacgtactgtggaccnnnttgtgnggaggacatggtgctgcagggcggtatgctccgggctataaaaggttaggtagtggacaggctcccagtgctgacctgcgtggtcaaggacaatgaagtgcttaaaggcatggtggtatgatagctgctcggaacagtgacagagggtatgcagcctagttgattccagttggtggagcaggcaggatggggaagtaatctgggaagggttctgcacgatctcaagcctaacacagctatatcaggaatgagtggagtgccaggcgcacaacaaagcgcagtgcatttgcatctatcttaggcaaagaggcctcttaacatccgaactaaacagattcagcaaatgaggcaacaacaggggtggtgtttctatcttttcctttcccaaagcagcgtcctcccaccacaaacgtgggatccgtgcacgttaacgattactaggactatgcagaaacctttggagantacttcgccattctgtctgctccaccaactggaatcaactaggnngctancctctgttacngttncgagcannnatnatancacatgccttaagcantnnatnttccttgaccacgcaggtcaggacgggagcctgtccataacaa

SEQ ID NO: 704452 - DNA, 679 bp, Homo sapiens
  misc_feature (44)..(44): n is a, c, g, or t
  misc_feature (533)..(533): n is a, c, g, or t
  misc_feature (577)..(578): n is a, c, g, or t
  misc_feature (583)..(583): n is a, c, g, or t
  misc_feature (594)..(594): n is a, c, g, or t
  misc_feature (598)..(598): n is a, c, g, or t
  misc_feature (605)..(607): n is a, c, g, or t
  misc_feature (610)..(610): n is a, c, g, or t
  misc_feature (614)..(614): n is a, c, g, or t
  misc_feature (630)..(630): n is a, c, g, or t
  misc_feature (632)..(633): n is a, c, g, or t
  misc_feature (636)..(636): n is a, c, g, or t
aaaaaaaaaaaaaaaaaaaaaaaagacacatagacatacgaaanaaaaggttttctgatagtcctagtaatcgttaacgtgcacggatcccacgtttgtggtgctataaaaggttaggtagtggacaggctcccagtgctgacctgcgtggtcaaggacaatgaagtgcttaaaggcatggtggtatgatagctgctcggaacagtgacagagggtatgcagcctagttgattccagttggtggagcaggcaggatggggaagtaatctgggaagggttctgcacgatctcaagcctaacacagctatatcaggaatgagtggagtgccaggcgcacaacaaagcgcagtgcatttgcatctatcttaggcaaagaggcctcttaacatccgaactaaacagattcagcaaatgaggcaacaacaggggtggtgtttctatcttttcctttcccaaagcagcgtcctcccaccacaaacgtgggatccgtgcacgttaacgattactaggactatgcagaaacctttggagantacttcgccattctgtctgctccaccaactggaatcaactaggnngctancctctgttacngttncgagcannnatnatancacatgccttaagcantnnatnttccttgaccacgcaggtcaggacgggagcctgtccataacaa

SEQ ID NO: 704453 - DNA, 84 bp, Homo sapiens
ggggacaggcggactgccgcggggcagtcagcggggccacggggcacggaggggagtgcacgggcggaagaagggccggggccc

SEQ ID NO: 704454 - DNA, 2489 bp, Homo sapiens
cttattttcaactcccgagtggctagacaggaaaaagaaagaaatgatgtgaggaaagttgggaagctctgcacagtgatccctgagagccctggcaccactttaggagacgtggtaggtcactctgtacatgttcttcctcagcaaggggggttttcccaaaagggacacaagaagaaatcttactcagtggagtaaatggaaagaagagggagcatgtctgtctggttccttcctatttctcctttcctcagagtcaagtttcaccccacagggagttcacgcttccatgttgcctcatccagcccttcaggaagccagagtctgtgctccagtgtggcatttcagccaacctagaaatgaagggtgacttagcacagagaggttcaacaagtggggcatgcaggccactgatctctgcaagggcagcagtgccggggtgctctgggatacaggcagtgccttcggaaagaagggcaattgaagacagttgagaaggtgaacaaagtttacatctaacaaattttaaagttttattatttttatttttatattcttggggtctcactattttgcccaggctggagtgcagcagctatttgcaggctgaatcccactactgatcagtactggagttttattttatttaattaacttatttattttgagacagagtcttgctctattgctcaggctggagtgcagtgttgcgatctcggctcactgcagtctcgacctcccaggctcaatcgatcctgccacctcagcctctggagtagctgggactacctgtaggtgcgtgccaccacgcccaggtaatcttttattttttgtagataccagttatcctatgttgcccaggctggtctccaactcctgggctcaagcaatcctcccacctcagcctccctaagtgctgagattacaggtgtgagtcactgtgcccagccaacctggactattctaaattttaacagtgcctaagagaatcatgcttaattaaaaactagctggacgtggtggcttacgcctgtaatcccagcactttgggaggccgagatgggcggatcccttgattccaggagttcgagtccaacctgggcagcacgaagaaaccctcatctctaccaaaaatacaaaaattagccaggcattgtggtgtatacctgtagtcccagctgcttgggaggatgaggcaggaggattgctggagcctgggaggtggaggttgcaaaaaaataatgacttttagtgttactgcagatgcaacgcatgttcactgtagaccaatttaaaactatagataaaccaaaacaacaaactttttcttttttttaagagacggagtctcgctctgttgcccaggctggagtgcagtggtgcaatctcggctcgctgcaacctcagcctcccaggttctagcaactcctgcctcagcctcttgagtagctgggactacaggcgcacaccaccacacccatctaattttttgtattttagtagagacggggtttcaccttgttatccactgtggtctcaaactcctgagctcagacaatccgcccgcctcgcctcccaaagcgctgggattacaggggtgagccaccacacccggccaagaaactttaaatactacctagagacaatcccttttaaaactttagtgtatgtctttttataccattttctaggcttctaggctcatttgcaaaaatgagataccactgtaaatacttaatctgtaaattatctttttcaggagtctctctgagtcttctggctcagggagctgtcctataacataaataagtaaatttttttttacaatggttgttgaagatactaataaatattcagggctgggcacagtggtttatagctgtaatcccaccacttcgggaggtcaaggtgggaggattgctttagcccaggagtttgagaccagcctggggaacataatgagacccatctgtaaaaaaagaaaattaaattcacctttagtattatcttattaaaattccattgtgcatttacacaatcatttaccttatcagtcccttcagaagaacatttaagttgttatcacttacatccttgcagctaaatctttgagtacatcctaatacctgtctgtttttaatgacctatctaaggaatcctttgaaacctatacacttaaccactgtgttagctaagagcctccaaaaaggctgggtgtggcggctcatgcctgtaatcccagcactttgggagtccgaggcgagtgaatcacttgaggtcaggagttcgagaccagccgggccaacatggtgaaaccccgtctctacaaaaaatgcaaaaattagttgggcatggtggctcactcctgtagtcctggctactcaggaggataagtggaaggatggcttaagctcaggaggtagagattgcaatgagccgagattgtgccactgcactacaacctgggcaacagagccagaccctgtctc

SEQ ID NO: 704455 - DNA, 597 bp, Homo sapiens
  misc_feature (451)..(451): n is a, c, g, or t
  misc_feature (495)..(496): n is a, c, g, or t
  misc_feature (501)..(501): n is a, c, g, or t
  misc_feature (512)..(512): n is a, c, g, or t
  misc_feature (516)..(516): n is a, c, g, or t
  misc_feature (523)..(525): n is a, c, g, or t
  misc_feature (528)..(528): n is a, c, g, or t
  misc_feature (532)..(532): n is a, c, g, or t
  misc_feature (548)..(548): n is a, c, g, or t
  misc_feature (550)..(551): n is a, c, g, or t
  misc_feature (554)..(554): n is a, c, g, or t
gctctcgtctgaagcatagcccggcaataaaggcagtactagacaggatcccaccgccgacctgcgaggtccaggacaatgaagtgcttaaaggcatggtggtatgatagctgctcggaacagtgacagagggtatgcagcctagttgattccagttggtggagcaggcaggatggggaagtaatctgggaagggttctgcacgatctcaagcctaacacagctatatcaggaatgagtggagtgccaggcgcacaacaaagcgcagtgcatttgcatctatcttaggcaaagaggcctcttaacatccgaactaaacagattcagcaaatgaggcaacaacaggggtggtgtttctatcttttcctttcccaaagcagcgtcctcccaccacaaacgtgggatccgtgcacgttaacgattactaggactatgcagaaacctttggagantacttcgccattctgtctgctccaccaactggaatcaactaggnngctancctctgttacngttncgagcannnatnatancacatgccttaagcantnnatnttccttgaccacgcaggtcaggacgggagcctgtccataacaa

SEQ ID NO: 704456 - DNA, 1474 bp, Homo sapiens
  misc_feature (251)..(251): n is a, c, g, or t
  misc_feature (1474)..(1474): n is a, c, g, or t
ggtagtggtgtgatcgtcaatggtgtggcacgagatccttagctcacttgtatctgcttcggatctagctcgtaccgagttctttaaggcccagccaagagtcgtgcacagtggagctgacgaagactgcagcagtgcgggaacccgtgcgggcgcataccgtggtcaagggaggtcagaggtaccatagctgcttggtatctctacattcggatgatgggatctgaggtcctgatgtccggttctctctngtcagttacctgcacctgattcgcgaccgtgaccccatgacactctgcgcgttacgactcctcaacggtgagtctggggatgagacagaagcttaagcagtactggtacaagtattcgcgcatatccactactcattgcgctcgtgtggggcggtgtctgcgccaggccgcatttgtactaggcgatgcaaaccacagggcactccaatagcaaacgcaatgggataggattggcattgcgagtcgtagcgcgtagtgtttggaactatggggtcgtgaccgactcatcccggggggcgaataggccggtaggcgcttgtacccatttgatagaggcacagagagcctcgctagggggttcgaaacgtagttcgagtcgctagggggggtcttcaaccaaatgggagtcccacacgttttgactcaaactggcgtctccattttcaccacgggaaaactgcaaaggcgttttgcctcaagggaagaccaaatgggaaacgcccaatcttgctcggaattgtggcaacgacgactcgcttttcggggggactttcaaagttcccgaccctggtatccaaattgcattgttaccccttgtcgcccgagtccccattgacatggacatcctatccaatccggtccagcatagcgaacacgtgggtgggcggtcgtccaccaatacccaagtggtatccagaggtggacttcgcaattgcgatcctttgttgggaaccgaaccagttgggtactagcggcggtggcaaccgaaagggcccgcggcggttctatgtactcccttcgattgtgggcacttgtgcccgtggacgttcctccatatgggctagaccattttggcagccaaagagctggcgggggtctctcccttctgggtgcggaactccaccaatctcgtgtggggttgcgcggtcccctttgtccacgctgggcctaggtcgacgatggagcgaatttcgcatcccaggttgttcgtggccgtggtgcgcttccccattacctcctgtagaggcggtccatcggccacagggaatcgcgaactgtacacgttcttccagtggttcccaggcgcgggtacccgatcggcgtggttaggtctgctgcacaaggaacgcgggagatctcacgcccggccgcatagttccggcattccttctcgggtgtctgcctcgatagagcccccggcgttttttcataacttgtagtgn

SEQ ID NO: 704457 - DNA, 266 bp, Homo sapiens
agcctcgacagcatgttccccacagcatgggactaaattcagtcatcgggcggtcgggggaagcatgctgaccgggctgggtgttttttgggcatctactcgaccatctggcccaccattcccatggctccagatatgagaggacaggcaactatggtcctgagctccgcacacttctggtggggattatttctggttcctactgccggtcgggctagtcggggctcgcgaacgtgttatcccccccactgtcgggctagtcgggg

SEQ ID NO: 704458 - DNA, 240 bp, Homo sapiens
gcccccagggccctgaaggccacacaataaacccttttggccacgttgaaatttttgggaaaattttttttgggccctttgcccgaaggcctggttaatgggttggggccaaaccccggtttttgggtccggttaacccttttgccctttcccgtttggtaccgggaccaagcccccagcccctttttttaaattaaggggcgggaggggccaaaaaacccacaggggcctggggtttta

SEQ ID NO: 704459 - DNA, 1151 bp, Homo sapiens
  misc_feature (434)..(434): n is a, c, g, or t
  misc_feature (455)..(455): n is a, c, g, or t
  misc_feature (1005)..(1005): n is a, c, g, or t
  misc_feature (1049)..(1050): n is a, c, g, or t
  misc_feature (1055)..(1055): n is a, c, g, or t
  misc_feature (1066)..(1066): n is a, c, g, or t
  misc_feature (1070)..(1070): n is a, c, g, or t
  misc_feature (1077)..(1079): n is a, c, g, or t
  misc_feature (1082)..(1082): n is a, c, g, or t
  misc_feature (1086)..(1086): n is a, c, g, or t
  misc_feature (1102)..(1102): n is a, c, g, or t
  misc_feature (1104)..(1105): n is a, c, g, or t
  misc_feature (1108)..(1108): n is a, c, g, or t
agggacccagtacttaatttctgaaggttctccggaggctcagaattcagcaaacagggctgccacaaatgcaaggagggcaagatgatctgcatctgcaactactgccaatgttcggtgagtcacaggtgtcacgtgctatagttgttgaacagttaatacttacaccttcttctagcctgagtaaaatcctgcttgtgatgggagctaggcaagttattgtggtttctgccgaactcccttctaaagcaaaagcacaagtggtggggctgtagccttctaggttgctgactttggaaccagtccaagatctagttctgctggcagaagctaagattcaagaggcagagctaattgtagaagcagtggtaagcgttcaccagctgctataaatatcagaggttcggagcggtctgctggtgatgcagctgcgncagctgcagctggtcgaggtncctaagacagagaagtagagaatgcttctcgcagagaagtctagtcacgagttccagagttgttgcaggacactatgatcatttaggaggacatggtgctgcagggcggtatgctccgggctataaaaggttaggtagtggacaggctcccagtgctgacctgcgtggtcaaggacaatgaagtgcttaaaggcatggtggtatgatagctgctcggaacagtgacagagggtatgcagcctagttgattccagttggtggagcaggcaggatggggaagtaatctgggaagggttctgcacgatctcaagcctaacacagctatatcaggaatgagtggagtgccaggcgcacaacaaagcgcagtgcatttgcatctatcttaggcaaagaggcctcttaacatccgaactaaacagattcagcaaatgaggcaacaacaggggtggtgtttctatcttttcctttcccaaagcagcgtcctcccaccacaaacgtgggatccgtgcacgttaacgattactaggactatgcagaaacctttggagantacttcgccattctgtctgctccaccaactggaatcaactaggnngctancctctgttacngttncgagcannnatnatancacatgccttaagcantnnatnttccttgaccacgcaggtcaggacgggagcctgtccataacaa

SEQ ID NO: 704460 - DNA, 952 bp, Homo sapiens
  misc_feature (434)..(434): n is a, c, g, or t
  misc_feature (455)..(455): n is a, c, g, or t
agggacccagtacttaatttctgaaggttctccggaggctcagaattcagcaaacagggctgccacaaatgcaaggagggcaagatgatctgcatctgcaactactgccaatgttcggtgagtcacaggtgtcacgtgctatagttgttgaacagttaatacttacaccttcttctagcctgagtaaaatcctgcttgtgatgggagctaggcaagttattgtggtttctgccgaactcccttctaaagcaaaagcacaagtggtggggctgtagccttctaggttgctgactttggaaccagtccaagatctagttctgctggcagaagctaagattcaagaggcagagctaattgtagaagcagtggtaagcgttcaccagctgctataaatatcagaggttcggagcggtctgctggtgatgcagctgcgncagctgcagctggtcgaggtncctaagacagagaagtagagaatgcttctcgcagagaagtctagtcacgagttccagagttgttgcaggacactatgatcatttaggaggacatggtgctgcagggcggtatgctccgggctataaaaggttaggtagtggacaggctcccagtgctgacctgcgtggtcaggttacatgcatagtgcctagataatcgttgaacgtatcactggatcctcgtagggagtactatcttgtgtcaggccccgtgacatctctgggttcttgtgtaggcttgatgcatgtgtcatatactggggctcatggtaaggggttgtctcaagacagcaagatactgtggaagttctgatatagattgctccggagctctagtgagcgagatcgagcgatgactccaggacacgttcgctagtggacctgccactaattctacgtcacagcagctaggaggaccgttcataactgctcctctcgagtgggcctccccaagacgg

SEQ ID NO: 704461 - DNA, 1032 bp, Homo sapiens
tttgggataaactgggttgctgcagagttggtccacactaaccatcctaagtgaagacttagataagtctgaggatctccaggcactgcaaaagagtgaaaagctgggagtgaaagggttagtagtttaggtgttcattgtgttcgggttctctgtatcagtagggagtcgctgagtgtgggtaacctgcaaacatcgttgtaaacagtgtgaagagatcatcccattcctatccccagtaaaaataggcctctccaggcagatctactaccagttcaacttagcttctgtcttgtcttggtgcgccttgattagcagtctccatgcgtgtgatgaccacgagaaggggagcgcgatgggtcgagctgggtccgagtgtactccgctccctccggggttccccagcgtattgatccgggtctcctacaggctcccaatacaggtaagacgcgggaggatttacggaggtcagtcacgtcacacgcagtgctcccattcttcaatgcttaggattctatgtaatagctaaagggtgaggtgtaccatcgcatcgtggagactcggacgggtaatctatggccttagtaactcagggatacaggcaggcgtaagcccttccaaccgtgtcggggcattggtggctatgagaatgcacccgaggtcccctccaatcgagcaatactgctagggctgaaaaatctcggtgtaagcctgaattcttgagtgagaacccaggacaagctgtcagaccacctgttcggcccatgggggaagggcacgagaccttggcagagttgttttactggaaaaccgacatttcgccctggtgggcgtcgaaagagccacacagggccagaaagaggggcatatgggcgaaactggtcccgagaactccccggacagtgtagaccttgaaggtgtatccaggtcgaagcgtctgacgtaaaaaccaacgaatacaccatcggggaaccgttgtaaacccaagcggactagaccacaagagagccttcaaagcggaacaagtctcga

SEQ ID NO: 704462 - DNA, 1029 bp, Homo sapiens
  misc_feature (3)..(3): n is a, c, g, or t
  misc_feature (91)..(91): n is a, c, g, or t
  misc_feature (112)..(112): n is a, c, g, or t
  misc_feature (185)..(185): n is a, c, g, or t
  misc_feature (210)..(210): n is a, c, g, or t
  misc_feature (218)..(219): n is a, c, g, or t
  misc_feature (236)..(236): n is a, c, g, or t
  misc_feature (251)..(251): n is a, c, g, or t
  misc_feature (256)..(256): n is a, c, g, or t
  misc_feature (258)..(259): n is a, c, g, or t
  misc_feature (261)..(261): n is a, c, g, or t
  misc_feature (269)..(269): n is a, c, g, or t
  misc_feature (271)..(271): n is a, c, g, or t
  misc_feature (274)..(275): n is a, c, g, or t
  misc_feature (289)..(289): n is a, c, g, or t
  misc_feature (306)..(307): n is a, c, g, or t
  misc_feature (357)..(357): n is a, c, g, or t
  misc_feature (477)..(477): n is a, c, g, or t
  misc_feature (528)..(528): n is a, c, g, or t
  misc_feature (664)..(664): n is a, c, g, or t
  misc_feature (705)..(705): n is a, c, g, or t
  misc_feature (738)..(738): n is a, c, g, or t
  misc_feature (816)..(816): n is a, c, g, or t
  misc_feature (839)..(839): n is a, c, g, or t
  misc_feature (885)..(885): n is a, c, g, or t
  misc_feature (911)..(911): n is a, c, g, or t
  misc_feature (934)..(934): n is a, c, g, or t
  misc_feature (937)..(937): n is a, c, g, or t
  misc_feature (956)..(962): n is a, c, g, or t
  misc_feature (964)..(966): n is a, c, g, or t
  misc_feature (993)..(993): n is a, c, g, or t
aangcaaacagtactccccgctgcccaagaaggcggaaggagacctcggccccagctggttctgcggtttctccaacctggagtccccaantcttggagaagagagccagcnagttgcaccagcgcgacgttcttttgaccgaactgagcaactgcacggtcagactgtatggaaatcccaacancctgcggctaaccaaggcccaaagntgcaagtnntctgcggtccggtgtcnaccttgttttcctgnagaantnnantaactgcntnctnnaagtggctgcaaanagtccgcatacacagtnngaaaaacacccgcatcttcctgcaggtgaccagcagggccatcgtggagnactgcagtgggatccagttcgccccttacacctggagctacccggagatcgacaaggacttcgagagctctggtttagataggagcaaaaaataactggaacgatgttgacgattttaanctggctggcgcgcgggatatggcgctccccacactggagtattcttcctgnagaggagcgaaatatccagtgggactaagcagttgtcactctgttcttcactcctaccaaatactttccacgttggactttcccccttattgggtctcgcacacgttcactcattgtcacactgtgtatgttttcngcattttaaggctagacgattgtaatgggctcccacttgtnatttccattaaattcgttacaggtatcacactnaagcatttttgctattttcgtcatgcctttgagcactgactgctcactccgtcccccagcgcgctcgcgcgctgggancacaggcgcgcgccaccacgcgnacttgtatttttagcagaaacggggtttcgccatgttgtccgcgcngctctcgaactcctcgaccacaggtnatccacccgctccagcttcccanagngctggcataacaggcatgnnnnnnnannncatgagctttatttatttatttttacnacaatagtttgaagcagtaagggggaaggaggtgat

SEQ ID NO: 704463 - DNA, 1021 bp, Homo sapiens
  misc_feature (388)..(388): n is a, c, g, or t
  misc_feature (551)..(551): n is a, c, g, or t
ggacgcgtgggtcgacccatgcgtacgataaactgacaagctgcagcgtgaacgtggtataaccattgatatcgtccttgtgcgcacacattagagcactcgacgcgaagtcactatgtgcactagtcattcgatgcccctaggacatcgaggatggacttgtaatcaaaccataggctatgcattacagaggcactctctcgaggactgatctgtgcgtgtcctgatttgtatcgcttgctggcctgttggctgaactttgatacgctggctatcttccaatgaatgggactaccacccagagaagtcatgtcgccctgtactggactctactaccaactcgtggctagtgaatagctacatcatagaattgctcagtgcttagttnatagcgaagaaactgcgagttcacaactagtaggtcctagcaccctagcgaagtcgctagcacacgaagtagtagtcgacgtgcaccaattctgtctaagacggaaaagttgccatgccaatcttataatcgaatttgaaagcatagaatgttggcttacccntagccccgagccacaagtagacgaattatggtgggccgaatgtctcctcggctatgggaaagtggctagatcggaacaatggctgagagccgagagtgtcgtaacatggccctgtggatatcaatgggcatggcaagagtgcaccacgtaacgaatgggcaatgtgccgactggaaaccaagcgtgctttgaggggtcgtggactgcagtagctaccgaacagactccgttacccgctgacaaggcccgtggtcgcctgcgctcgtcgcgcgggttgtctgaccagatgtggtgcttattggtgcctgttcgctgtcggcccgtctggtagactcggtggtcttcaaccccggtttggttgctcactttggccctccgtcactttgcgtctggagtagttctggcgaatgcaccgggggactttgagagaaaatccttcccggggccatttgtggttacggaaattgtcg

SEQ ID NO: 704464 - DNA, 308 bp, Homo sapiens
atatcataacctaggagatattattctcaggtaccatatataagactcacaaatactagaaagaaaatagaagaaggcaaacctatataataatacctataacatacatgcatacaaaatccattaaacaaatggcctaagtatacaatctaatactttcagggaagggatctgaaaaaggaaaagggtagccaataatgaatttatagtaagatggtggtgtgcataagggaacaggttaactttgtcaaataaaaggtgtgaataaaaaccattaggtacgattaaatatctagataattcaagca

SEQ ID NO: 704465 - DNA, 162 bp, Homo sapiens
cagctcgtatttagcgaggctggctgtaatccgaacagatcgtatcgcgtactgtagcgcccagaccgcacgccccgtagttgctctccactgactgtgtgtattccgatgccaggtagtggatgctgatgactatcacaatgattcgacgattcggacgtg

SEQ ID NO: 704466 - DNA, 533 bp, Homo sapiens
ccctcagtgccaagtatgctgtgaattcaccctttggacttgctgcccaaccctttggttgctcccctgactattgtaagaggtaaacttccttggtttgtttgagaatgcccattttcttaatgtgaaacccttctctctccccccttttattagtagggctaccatttttttccgttataaagggttgaccaatttgaatgacttaccccagtgtcattatcttccaatataaactggtaccctcccaactccccatttcatccccatatgaagtaaatgaagctagttaagcggatgctgtatcaactagtaccttcccattaaggattattttatagcatgaatttaagcctatttattcaaatgatattttactctggtatcccctttgttttagatttgtgccatgaatattccagtgctgcttaattttgttctgaattcttgtttctggcttgtaaagggcttttttagggtataaataaagccaatggccattcctgtttgtaaataaaaatgctgctagacca

SEQ ID NO: 704467 - DNA, 394 bp, Homo sapiens
  misc_feature (224)..(224): n is a, c, g, or t
acaacatggtgaaccctgtctcaacaacaacaaaaaaaatactaaaaattagaatttttgtatttttagtggagacggggtttcactgtgttgggcaggatggtctcgatctccttaccttgtgatctgcccacctcgggctcccaaagtgctgggattgcaggcatgagcactgcgcctggcccatccattcttgatatgtgatttatttggggctctgtgancaaaatctgttttgaaaacaaccttttattttaggctaatcacattttatgaaattcatggaaactcttaactatttgaactattatttcttagtcctagttaggcttctggggcatcttttttctgctcttgtgctctgtatggagttgccaccactgttctatttctt

SEQ ID NO: 704468 - DNA, 242 bp, Homo sapiens
  misc_feature (91)..(91): n is a, c, g, or t
gccggagccaaagcaagccagaagactaacagtactaactacaaatattcgcacctcgatcgcagtacccaggttctcacgtagctgaagnaatgtattactctgatagtcttcattcggatagactaaagcgtgtgctgactggagatgaggtaaagaagatatgtatgcaacgtccagtcaaaacggatggcaaggttcgagtcatgtcatataccttgctggattaatggatgtcatta

SEQ ID NO: 704469 - DNA, 177 bp, Homo sapiens
  misc_feature (7)..(7): n is a, c, g, or t
  misc_feature (44)..(44): n is a, c, g, or t
  misc_feature (75)..(75): n is a, c, g, or t
tcctcanagacgcagctcaggaggtaaggtggacatcactgagntggtacaggtcttacatgcaagacagaagcngtgttctggagatttgctgctcttctttggtgttaagcctcttgctttattaaacaactaagtcatgatgaaccattggaaggagctgcgtctgctgaggag

SEQ ID NO: 704470 - DNA, 811 bp, Homo sapiens
  misc_feature (526)..(526): n is a, c, g, or t
ggcgcgcaccaaggctgcgatggggctggagacggacgaaggcggacgtacagctcttcatggacgacgactcctacagccaccacagcggctcgagtacgccgacccgagaagttcgcggactcgcgacaggaccgggatccccacggtcaatcgcatctcaagctgggccttcgaggatgtgatcgcagagccggtgactacgcactcctttgacaaagtgtggatctgcagcgcatgcctctttgaaatcagcaaatacgtaaatgtacaatgttcctgacggtgtcctggcccattcccctggccttcatcggcgggaatcctcttgcgccaccctcagctgtctgcacaatctggatttcaatgccttttgtaaagacctgcctaatggttctgccttcagtgcaagacacatatggaagcaagtgtgaccagatgtcatcattgctccatttgtgtacgacgcgtaggacgatgctctcttctgtcagcctgcgactgagccaggattgatattggaccncaggtctggagatgggatactgtgatacttcttgtgtgatttataacattaagagcaccagtgtccttgtgcatttcctagtgttctaattacgaaacttattaggatgaggagccacttttagaaatgtgtatggacggtgcttccaactaatgttttctaattaattgacaagattcatatctacgttggaccagactatacggaggttgaccattagattcacggcgcaacgttgcgtcggaacggttacttttaggggacttacagtaggggctttcacac

SEQ ID NO: 704471 - DNA, 92 bp, Homo sapiens
gcgagactggtccccgccatgtctgcggccatgagggagaggtcgaccggctacctgcacgagaagaactgcatgactacctctggccaagc

SEQ ID NO: 704472 - DNA, 150 bp, Homo sapiens
agtactgacatatattaaatgagatgcaaagagctatgcagcattcatgggcctgtattggtgaaagctgtgcctcaatacttactccttgcattctttttataggcatcactccagaatctacttgaagtggatgacactgacttccat

SEQ ID NO: 704473 - DNA, 421 bp, Homo sapiens
  misc_feature (243)..(243): n is a, c, g, or t
  misc_feature (399)..(399): n is a, c, g, or t
aaattcaaccctgtgcctaatatggaatgacttcctaaaattagtatgtgaaaaaaaataccccgggtatatgcatgtatttttggaaagacagacacacacacacaccccctataagcacggaaaaactcaccctggaataaagcataagaaattggtaactgccgggcacagtgctcatgccctataatccccagcactttgggaggccgaggcgggtggatcacaaggtgaggagttcanagccagcctggccaaaacggtgaaaccccgtctctactagatatacaaaaattagccaggtgtggtggcgggcacctgtaatcccagctactcaggaggctgaggcaggagaatcgcttgaacccaggaggcggaggttgtggtgagccgatattngccactgcactccagcctgggt

SEQ ID NO: 704474 - DNA, 355 bp, Homo sapiens
ggtttccttctagtattttcttctatgaaaacaaacataaaattggatgggggccgggtgcagtggctcacacctgtaatcctagcacttttggaggctgaggtgggtggatcacctgaggtcaggacttcgagaccagcctggccaacatggcaaaatcccatctctagtaaaaatacaaaaattagctgggtgtggtggcgcgtgcctgtaatcccagctgcttgggaggctgaggaaggaattccttgaaggaggttcaaggaattgcttgaacccgggaggcagaagatgcagtgagccaagattgcaccactacactccagcctgggagacagagcgagactccatctca

SEQ ID NO: 704475 - DNA, 186 bp, Homo sapiens
gaccgcagttgctccatcaggacacatggagctttgcatgaccgctccaggtctccgcgtttccttaagtgccttatcttggtgtttccctactgttttgttagactgatgggaggaagaaatccatttcaaatctgctgaaacctgttaccaagcaacagcagtgattaaaagcaacctgatggg

SEQ ID NO: 704476 - DNA, 818 bp, Homo sapiens
gagacgtgaagcactgaataaatagatcagaatgactgatacaaatgccccagagccacatgtggaggaggatgacgattatgagctgcgacagctaagctcaaattataagcctccaccacagaatgctccctgaaagcagctgcgatgaagatggcacaagaagatgactgagcacgctctaacttagagtacacagaaatagcgctgctgaggagcatggtccctggtgtgttgactaggatcctgcaaatgacttcccactagagtgtccgttgctctaccgcgggctcagccctggtttttgtgacgagatgccccggtgtaccagatcagccattggaaccctttcaccgtaggaacggactctggaaggcccgctcaatacacaggaataccacttgctcgttcacacacggaacgtgttcctcgtagattagtacgtagggtcaaaaactgtcatctgtgcataacgtgtacacctagcggaatagttgcttgtcatggtcctgcacaaataccgctttcaagcacagccatacgaggcaccttgaggagatgcaaaagctggtataaaagtcgaatcagtttactagcggttgcgcatgctagtggtacctcgcgaactgcagcgagctattgaggttcctcgaatccagcttgaggaggctcccaagggcaactgtcctggcgcgaggctagcgtaccataactagttccttcttcaccgacgatgaccagcaagaccatctcagctggggcagctggaacctgtcggattaaaacggagtgaccgacctgatgcattcacccttttc

SEQ ID NO: 704477 - DNA, 637 bp, Homo sapiens
  misc_feature (556)..(556): n is a, c, g, or t
atctccccgttatgcggcaagaatgattggagtgactctctacagcgtatctatgtagaagtcacctctatgctaaccagaatgattcccgcccacaccatcttatactgaccttatgattgctaagcacagtatgtagagtgacgtctcttgcacagctctgtctgatcaagcaaaatgctgaccatgcatcaggcattgtgagtgtagtgcgctctatgctaccaatatacgaattgtgtgtccacccctccagacagcgaaccatatcttaacacactgttctgacacctaccataatctcagaagcacctgccgttgtacttaccctgctaccctgaaacttctcggaccacgccttctgacgacctggccctacaaacgatatactaacggtgagttgcactaacaggttctctcttttatagttacaacgctctctctgtctcataacattttacttgatgaaacagacacttgacatggatgacaacaatcgtcttggaattacgggcacactattgtgcttaccagggttagatcagagaagtctggntccaggacacatatggtgtatacacactctctctatgactctgaatataatcattacattggcgatcatgacctatacttt

SEQ ID NO: 704478 - DNA, 1092 bp, Homo sapiens
cctgtcgtgattccgaccagccgagaggaccgcagtgagtcatagttctatatactctctcgcgagactatatttattacctaacttgcgtgatcgtcacccgatggaggcatccgaagtgaacaatgcctgtgaggcacgcctgaggagcctcccagaaatttaatacaatccccctaggtagtggatacctaaatccgccgctagatacaattcgaataaataaattttaacaggtgcagggaataatcgctaggagctctagattgcaccccatgtcatatctataaccagaatccgcgaactggcacaagggaaagctagtgcaggactcgggtgagagcgctaggcacactatagtttagttgagcataggggcgttacaacgaataagctatagagtagtccagatacctcttttcacggcaaccttttgaatagatgtcctcgtaaagcccattggttgataccccctctgagtgggctgggtcattatacgatacattgaacgggagctaaatcggtgagaacgtagtggggtgcaatggtcataagtacggctcttcaaggatcaagtactcaagcaccctgagaaggaaagaatagggaacccgattgcactgggtgacgagtcgcctaatggtgaccataatctttaagaatagtcttcgaaactgcggtactgaccacatgggaggtgaaaagtcggctatcgcatgactctaacgttacagtcaggatgaggcctcgtgattgatcgaggatgtctcattcaaaaaggcctcgtgagtggcttcaccggggccgtcattgctccatgattcgtcccaaggagtagactacctcacttgcacttgtgggccatgcaaatgagataacgagcgaatcaaggcagatgaaatcctacttggaggggttcaaatctaattccaactaggttggaggacgtaattccaaggcggagaagagtttcacacttaagcattggggggctcttgtgaaccggtccggaaaagctcttcaagggaacaagtagtatatctcgtatacacaagggtgtcccgcagaaaaatcaataagaagcggtgttcc

SEQ ID NO: 704479 - DNA, 485 bp, Homo sapiens
cgtgactattgtggctgctgcgtatttgttgcataggctagactaccattccatttggccaaatgcacttcccccagtaaacttaaaacaacaacgagaacaacaagaacaagaaactccctgtcctttcatttactaggaaagaggatgggctactgaaccagttcattgcatgacacatgaagacaacatactgtggcatgagtggtgtcggtatagaattggttgtgctgtgactaaagtactgagggctgcagtgaaaacattccaattgctcccttccttccatcttactttagtggattgattctcaagatttggcacagaaaactctttgcgggctagaacagcagtgatggcatcgcactgttttcaagactacaggtctcaaaagcaaatcattaaataaaatacagtccctgatttgagttagatccagggcccagaaagtagcactatactttacggttacgtggtcaacaaat

SEQ ID NO: 704480 - DNA, 394 bp, Homo sapiens
aaaattaaggtgtagagtttttattcatttttttcttggcttgcttgtttttggaatcagggttcagctatcagcctaaaatagtgggttatgttatttgcaagcctcatggaaacttcaaataaaaaaacgccccaacagatacgcaccctcacagaaaagaatgtaaaacataccgccagagaaaatcatcttcataaaaaggaaaacaagaaggcaagacggaaggaagagcacaccaccaaacaaccagaaaacaccaaaacggcaggagtaagtccttacttatcaataacaccattgaacgtaaccagactaatctctccattcacaagacagagcggctgaatggccaaagaaaaacaggacccagcaatctgttgcctacaagaca

SEQ ID NO: 704481 - DNA, 119 bp, Homo sapiens
cgtgttcaccaccacgtattccacctgacgcggagaatttaatagagcaatagatgcatttaatgctgccttaactgttcggccagaggtaagtgtacgatggtcgtcaacacactgcg

SEQ ID NO: 704482 - DNA, 314 bp, Homo sapiens
ggaaaaaaccccccccccccccaaaaggcccttttggggggggggggggggggttttttttttggttttggggggttttccccccccccccctttttggaccccccttttgttttggggggggggcccccccccaaaggggccccgcccccccattgccctttttatttggggcccccccccccaacccccccgccttggggtttttttgggggcccccccccccttggggggccctatttttcggttttgccccgggggttttttaaaaatttttttttttttttttttaaatttaccccccccccggggcca

SEQ ID NO: 704483 - DNA, 423 bp, Homo sapiens
aaggtgggattgctcaaaccccgagaagtagacactacctgccctgcacccccttcccaggcatgttaggatattgccaatctccaggcttcctttagcaacacctagaaaagtcactgaatggctgggtgtggtggctcatgcctgtaatcccaacactttgggaggctgaggcaggaggatgatttaaggcccaggagtttgaaaccagcctgggaaatatagtgagaccccatctttaccaaataaataaataaataaataaatagctgggcatggtggcacatgcctgttgttctgaatactcaggaggctaaggtgggaggatcacttgagcccaggaattcaaggctgcggtgagctgattgcactactgcactctggcctgggcaacagagtgagtccctgtctcaaagcaaaaca

SEQ ID NO: 704484 - DNA, 213 bp, Homo sapiens
gacatatctaaacataaccggtccggagcacgtctgactggaatgtgggaacttaaccagcaggtattacttgcttgacaacttctgacctttagcgtgatactaaacgtatcggacaatcaacgaagaactcttgcggtagacccatttatctgtgaatacaatgctaccagagttccccctctctatgatcgcggcaacttataccgctag

SEQ ID NO: 704485 - DNA, 601 bp, Homo sapiens
agatagatcgcggtcatgaacgacaccgtacctactccgcactagagagtacatgagcaaccgactatttcagaggaaacacatggtcatagctgtgctctcacacaggaagccgagagcgcttagacgaaatcgggaaaactagcctaaatgtcaagagcaccggatgtcatcttgataggatcgaatcattggaggtggcaagacaagtggctttggcctgatttatgattccctggatgtatgcatagaacaatgaaccaaacatagacttacaagacatggcctgtatgagaagaaaaagacctcaagaaagcaacgaaaggaacgcaagaacagactgacagaccagtcagggggactgcaaaggccaatgttggtgctggcaacaccaaggtatagttcacttacggacacaatatagaaacgtcattaattgtaggtctttagtttctaggaaagaagggatcttattaatttttaaaataacttttcttaatgtttcttcttttccctcttcttctggattaccgacggtaacatgttttaagaaactatgtagcatagtgtcttaacacctcagtaaagtaagctggccacc

SEQ ID NO: 704486 - DNA, 1231 bp, Homo sapiens
aactatacaaacagaaacttacttgcttttagaaaaacattatatatatatattaacattttgacaaccttgcatttcttcctcatcaggcaactgtaaacgaatgtaggcttctgattgtcctaaccactcttgaacttggtattttctaactaatctctaacttgaactagttccttgcaaccatttgccacctagatactcatctgacttagcaactatctttgactactttaacttctcactctttttattataccttgagctagacgaatgcaagtgcgacacatgatagctcaacgtgtcacacttagatctattacacaaccacgactctggcgcgaacttataatttcgtatcctccacaatgtgcgccattaggtccttctctcgtataagccactccacgctctttgcacacgcctctctctgcttcataggaacatttagcgccttgaaccatatgttggggcaacgcctgtgcacgccaaaccggcataccaaacaccacacttaaactccacattggcttctactaacaactttgagcccaacccaactaatacgttgggctcataagcccctctcaccacacctctaaaatacttaaccatcttcctttgcacccaactgctcccaatatgcgacccaatttaaccccttaattggcgcgcactttctctcacccatcgcaagtctcgaatcacaaggcccctttacacatcacttgtccttaattgcttccttccctaacttccccaacttccaccgcaccacacttaccgcttctcctttactttctccataactatttctcaacaagcgtggccaaggcccactctccaatctcgaacgaccatcgactccaaaaaaaccaatcttatatatccccttggaacgcggcccgattcattcctacagctcccatctgttcattacttaactttccccatccccccacttagcggcgcccacgggaaactaagcggctggttattgcccattttacactaggcctaccacctttcctactactctaaacgaaacaacaacagaccccttgtgaataaagccttcttggaacctatctttcaaccaggcagttggtcgatcttgcgcagacggggcataccggagctttggccgccacatataccttaacttatcccccgtcggctggtactccttgcgaccaccgtaactttcactaaacgtctgaggcatatacct

SEQ ID NO: 704487 - DNA, 175 bp, Homo sapiens
  misc_feature (25)..(25): n is a, c, g, or t
  misc_feature (36)..(36): n is a, c, g, or t
  misc_feature (78)..(78): n is a, c, g, or t
  misc_feature (173)..(173): n is a, c, g, or t
ggtaagtaaaatgtaaagaagagtnactggttcccntcagtaagtgaagtatttccccatagtgccagctttatttanccccaggatgtttttgtggctgtatttgattgatatgtgcttcttctgattcttgctaatttccaaccatattgaataaatgtgatcaagtccangg

SEQ ID NO: 704488 - DNA, 144 bp, Homo sapiens
atgctaatacacctagtctgtcccgtcttcacatgaattcaatgaacaggggaataagacagtacacgagactgaggcgtcgcagcataaaggtcaatgttggcgctgatggacagctacagaaggatgacgcagatgctgaca

SEQ ID NO: 704489 - DNA, 187 bp, Homo sapiens
cagagtcttgtcatagacctcagaaacatcaggccactcatggttggaatacagcatatgcattgactagcaccatattcccgtctacatgtcaggatcacttgtgttgcccactttagagcagaagcacaactatcaataaaggaagaaccatcatcataaccattgggtacattagaacgtctgt

SEQ ID NO: 704490 - DNA, 928 bp, Homo sapiens
ccaacttctacactcttcaaaacttgaaaagaaattgacttgcaccttagaaagtggcagtgttgtctcttaggctaatattttatgggagtaagcagattgcagctacaagttatgttattatagactgttatactcctgttcagggagcaaaaaatctgctagggattaagcagaattgggttcacatctttgctttttcctgctctcgttctacaacaagtaattattatttctctcgtctgttccggatcttcgctttccagctgcttgttgccttttaactccatggagagaccgaactggagctgagcccagcacgggcatgctgggcaagagaggtcccccgagtcccaaataagcaatctcaactcagtataacaacgaggcagcgaacccacacgtggaagtctgcataccgcatgcaacaagggaaccgcaatagcatgctcctcccctcatggtcaaggcactgtgcgttcccactcgcgcaccttgcaacatacaccaaagcccgcaaagctacaccaacctgacccatccgcgcggcagctgccacaacggaactaattcgacgcactcattccagaccacagggcgaaaccactggctctttcagctctttctccccagattccaacagtcagtgtaaccagcattcccacctttcttcacctccctgcaaacgacgttcgagctcactcaccccagatgcggcactgaggagccctctgctccaggtgcgcgagacagatgccccccacatgcacatcctggacgtccatcgaacgcagatactcggggctccactcgacacaggaaggggcacggaaagccacctcaagggcataccgagcgagccccctgcctcacagtagctcgcaagaccctgccataaagccaatccctggagcactgcgccacttag

SEQ ID NO: 704491 - DNA, 447 bp, Homo sapiens
tttttttttcagacagactgctactctgtcatctaggttggagtgcagtggtgtgatcttgtgtcactgcaacctctgcttcccaggttcaagcgattctccagccttagcctcccgagtagctgggattagtgtatatttagtagagacagggtttcatcatgccggtcaggcagttctccaactcctggcctcaagtgatcagcccgcctcggcctcccaaagtgctgggattacaggcgtgacgagaaaatgtttttaaatgttaaaaatgttagctggaactttttctagctgtgacaaactctttctaaagtgattacgggaaagttagtcattgaaaagataagtcaatttcaaaaaaggaggttaaaaggggaataataggccaggtgtggtggctcacacctgtaatcccagcaccctgggaggccgagacaggcggat

SEQ ID NO: 704492 - DNA, 167 bp, Homo sapiens
ggttccccccttagttttagaaggttttcagttagctttagataaaaaaaacaactttgggccggtttgtttgccggtgtccctgggggttcacccttttatccccggcattcgggggggtgggggcagggggttggttggcccccggggttgggagcccggggttc

SEQ ID NO: 704493 - DNA, 393 bp, Homo sapiens
ccccaagtaataatgttgaaggtagatctcatcattcccatacacagtaaagcacataaacactttgtatcgtatacttattatctatcacaagccaatattaacttgcagaataataaagccactggtttatatgtttcctcaagatatgtttcatgtgtaagctagtatccgtgtgtgtacgtagaaatgattcaatacctgcagctggtgaattaggaattgtatttgttgccctttttatattagatgaggtgcaaaaattttaatgctagtcagtatgcaccaccacaggaaagttagatcccattagcacttgaaactacagttttggaaacttaggctaagttaatttggatttgttacttgattcacctactgaccttttctttt

SEQ ID NO: 704494 - DNA, 704 bp, Homo sapiens
aggaaggatgggtcagggtcaggcctgaagaggtgccctggctgcagcctgccacagccagtgtgttgcactttaggggacacatcttgagactaagccctccagcctccctggctttagcaggggaaagtgcagccaggagctgtagagatggatgctgtccttcccctgcccagggggcttagcatgttagttgccagacccagtgctggctgctgctcctcccccagggagttcaaagggcttagacagcatacagccgcagcattggtgccggtttccccttccgctgggagttcagtaggctccagctgagaggctgttgagaatctgcacagctccagggttgggatgctaggccctggtggcgtgggttcgcaagtggaatctgatccatgagttgcacaattccgtggtaacagcacggtttccttggctgggtagcatgctcactcgctgccttccttggctcgggagagggggctcccctgcccatgtggctctcagacaggcttccgcaccacactgttcttcctctctatggatcgcaccagccttctagtcagttctgatgagagaacctggataccttgcttgccagggagggattcacatgcttattatggtacttttttgagaaatttaaactttatcaattttgtctctttatatgaaaattgggaactgctatctgcaatacaatg

SEQ ID NO: 704495 - DNA, 249 bp, Homo sapiens
cttggatggttgctatacaaggcatgctgcagctgtggtcattgataaagaacacgggttcgttaatcgtcacaaatatctgcaggctgtacagtgaagcaagggcatcgtagcatgtgctcagttctggtgagggttgtagtcgctgcatcaaggacatgggcggaggaacgtcaggaaaagtgtctgtgtccatgccacgagaaatcacacccgaggtgagtcctggtctttacaaacaaccaagat

SEQ ID NO: 704496 - DNA, 873 bp, Homo sapiens
gcaaagggacaccaggactccaaaatgcgtcagttgtaccagtgaaggacaagaaacttctgaggtcaaactgggggagctgccaagctgatctgatgcgggactcagtccctagtgccattcggagcgtccaaagaggttactaccgtactacaacaagtaccatcaatgtgaagaaggggagcatctgcgcggataccatgtgctgcaatgcaacgtgctctttaagctactccttttcctacaagcatctcaagcacgagggttccggaaaataccattgaagaggacacatttctgaaccccccaaccaaagattgtggccgaggccctcggtgaggacacacaatctcacttcggttggtggaaattctttttacattaattccttaattaggaaattaaccttcccaaaattaaaacattgcttggtttcaccaacacacgaaacacacccaagaagaaaactcttttttggggcgcccggccaagaaaagttttaaagacaccacttcgttgggggggcggggcccaatatatgtatgacacatgtgcaaaaggtgtccaaagagaagaacctctgggcacagacaagggtgtgggttccccccaaaaaaaacgcggggggacaccgcgggttttgacaaaccaagggtgggctggggcaaactggcccatcaggggccacagaggcagaaaatcacgccggggggaggcgaacaacaagagagatgagagacaagtaagaaaagaaagacaagaagacaaagaacagagacacgcaaagaagaccgacagaaaagagcgacaaggacagaaacagagcacagagacacagagagggaagaagacagaacagagcagcaacagcct

SEQ ID NO: 704497 - DNA, 348 bp, Homo sapiens
  misc_feature (32)..(32): n is a, c, g, or t
  misc_feature (44)..(44): n is a, c, g, or t
  misc_feature (141)..(141): n is a, c, g, or t
  misc_feature (181)..(181): n is a, c, g, or t
  misc_feature (314)..(314): n is a, c, g, or t
ggtcctggttttcggcgccatgtgtatgaganaaagaaataaanagaaaggaagaggactggtcccaggaggaaaaccaaatagccttagaactcatggaatttgtcccaccggttagcacaaccacatcaagaggcaganccccgactgtcctgaggacttcttgctgttgtggagtttngctctgctcaccgtcttcaagatcaccacatccctcttggtccgtgagttgcatgaaaactccaaaaaggctgccagccctcactggacatgtatcattggtatcaagaatagtgattgctctttttcaagtnttgcagctggagcagattactgtttcaaccacca

SEQ ID NO: 704498 - DNA, 1660 bp, Homo sapiens
  misc_feature (444)..(444): n is a, c, g, or t
  misc_feature (473)..(473): n is a, c, g, or t
  misc_feature (488)..(488): n is a, c, g, or t
taatggggcttgggggagggaggtagggggtagtgggggtttaatattttaagtggggtggatggaggaatagtggtgaagggagtatggggggtgaatttatgggggggcctagccctaactaagtcctcaatctcccaacactattatgggcctaaactaacgtactataacctaaacctaactcccaaggcgtcaaacactatatactcggtgccccaacaatattatattattacactacacccacgtgggactatggacttctccaagaaaacaccactataatattgtggatatccacaccacaacacaccacccacacagagcctcaatattatattaaaggtatctctactccccctcttcactttatatgttttttaacacccacagtaatctaaacaaaacaacacctatatattaaccgtgtgtgtgtctccncacaaacacctatatctcctctcgcgagnaccccactcttaaanacaacacccccgcctctctcgtatatatttacatataactatagcgcgtgagaactctcctaatatcccccctctctacaagatctcgagtggggcgagagctcccacagcgcccaactttatatctcgcgacggtgggaacccccagctatatatctagcgaaaagaaaataaaactctctatacgctgctcatctcttatatatactataatatttctctcctcttctaaagcaaagaatctcctcctcttataatacttctataaagcctatttgcccaacggagagccccagcgaggaaaaattctacaaagtcacgaatatattattgacaatatatcatctctctgctgtctagccggagaaaagccccacaacatctttattattccgcgccacaactctgtgtggggggtataatttctataaacagcgcgcgggatgtgttgaggtgcgaacaccacagagggccgcgaagaaagagagccgcctgtagaaaaaacagaccgaggggggccacaacatataaatcattgtcccttaaattatgcactataacacacccccccctaaaggtgttgaggtggtgctcccccccatatacacccccttaaaatctcaattcgcggcccactgcgtggtatttttaaccactcttcccacacagaagaacccccccttaaggggggtctccacttaaaaaaacaactgtctcctatgataaaatcatgcaaacgttcccttcaaaggtgggccccccaagggaaacagcttatttctgaaaaagtctcccgcgtggtagcgcccaaacaacaaacctttctaaatggttgtgtgcacgatagggcattaatcaccaccagagaaagagccgttgttaaacatagaggcagacgaaaggagaggaagcaccgccgttatgagggggagagaccaccacagtagtagtgaagagtcgcccttaaaaaggcccccgtgtgtgttgataagggcccccccacagtggcgtgggggcgcacacaataaggaatatcggggcccggaagaaacaaccctaaacacaagtggcgggcagatgggagaaaaaaacgacgcgccaaaatagtgattttcaataccccccgtggatagaaaagagagatgcagcaccccgcgccgtgtgagataacc

SEQ ID NO: 704499 - DNA, 115 bp, Homo sapiens
gagctcggtcacccatcccccttcgtgtgtccatccccgtgcgtgtgtccatgtcaacatttttattaaccatacattttgtgcataaagtgtaagtcctaagggggatggacgc

SEQ ID NO: 704500 - DNA, 743 bp, Homo sapiens
gcactcagggaccggacgagtcctcaactcacatctgtcagctgccgctgctgtgttagcagacgcacagatcgctccatcatgtccttcagagctgaccagatagctgtaatttactaggggaggtcactttctacgtcgcctgtttgggcagaacaggtgagtgtccagaggatcacactttgaagccaggttcgcgtgatgtccttcgagctctgggacacgatatcccaccagtgcagagcgtcaaggagagttctggtgaaaccccaggaaatgatacagctgaagtgcgcctacgaatagttgaggtttatgacacgagatgtaacttggcctatagatggccatcggcctagttgtccaaacaactagatggacccatggcgcgacctttatggaaagactgtgctgtgagaagggggtctaagctggtagttcattgcttgactacatgcggaaaggcaatttggaggctaccattggacaatagagtgattgtctgggacaccatcgcggccctatgttttcatatgacccaaaacacattgggagatgtgctcatccatggaaccatgtacggcaagttgatgttggccacagatccctttgtactgtgacgaagtgcttccagtaaccaggacccatcacactttggggcatgccattcaaattgtaacggaaagacgtaattagtccaaggcagcggtcagtgctctgaatcttgaaaatgggttaactta

SEQ ID NO: 704501 - DNA, 1306 bp, Homo sapiens
  misc_feature (916)..(916): n is a, c, g, or t
  misc_feature (1254)..(1254): n is a, c, g, or t
  misc_feature (1266)..(1266): n is a, c, g, or t
  misc_feature (1270)..(1270): n is a, c, g, or t
  misc_feature (1275)..(1275): n is a, c, g, or t
tctgtgtcattggcgtaccagtgctacacgggttagcctggactaaaggcatccttgtcttgtgagctatacacctcagtagaaagaggatctaagggaatgatcactgtagtttagttctgttgacctgtgccaccttacccctttgtgaattgtctgcttggtatttactaattccacagggtcatcagatgcctgcttgataactatatacaacaataacataacatactttcacttcttcctattgtaatcgttgtgccatggatctgatctgtaccatgaccctacataaggctggatgtgcaccatcacgtgctgagtggccccatatgtactgtgtggctgtgggtgtgggtgggagtgtgtctgctagagtcacacggcaacacgattttcaagattctaaagctcaattcaagtgacacattaatgataaactcagatctgatcaagagtccggatttctaacagtccttgcttggggggtgtgctgacaacttagctcaggtgccttacatcttttctaatcacagtgttgcatatgagcctgccctcactccctctgcagaatccctttgcacctgagaccctactgaagtggctggtagaaaaaggggcctgagtggaggattatcagtatcacgatttgcaggattcccttctgggcttcattctggaaacttttgttagggctgcttttcttaagtgcccacatttgatggagggtggaaataatttgaatgtatttgatttataagttttttttttttttttggggttaaaagatggttggtagcatttaaaagggaaaattttctcctgggttggctagtatctggggggtatcctcgtggtaagtgtagcctcaaataggtcatcatgaagggttaaaaaagcgaggtgggccagtgtnagtgcgggggggtaaaggccagggcctctccaaccacgggtgccactgacttgctgtgtgacccgtgggcaagtcacttaacctataagggtgcctcagtttcccttcgtgttaaaaggggggataataatacgtgacctacctcaaagggcagtttggaggcatgactaaggcttttaagaaagcattgtggggatccttcagcacaggaattctcaagacctgagtatttttataataggaatgtcccccatgaacttgatacgtccgtgtgtcccagatgctgtcattagtcttttggtcctccagaactgatgatccctgggacgggggtactngccgacattggntctnacagntgcggctcggggccttggggggttcccttgg

SEQ ID NO: 704502 - DNA, 350 bp, Homo sapiens
aaatttttaaaaaaattttttgggggccgggggcagggggccccccccccccccaagttttggggggtttggggtgggggttggcccccccccccccctgttgggccccgggggggccccccccccccaaaaaaaaaaaaaggggcctttttgttatccgggggtttgggggggggtttttccccccgggtttttagggggggggggggggatttccagggatttccttttttagtttaaaggggggggggagggggggttttttttttttttcccccccccgtttcctggggggatttttttttttttttttttttttttccccaaaaaaaatggggggttttttccca

SEQ ID NO: 704503 - DNA, 104 bp, Homo sapiens
tcgggccctgtcgttcaggctagtagcaaagttcaggcagtccaacaggtatgggcgccagggtacagggcagagggagctgaggctcccaggacccgagagta

SEQ ID NO: 704504 - DNA, 1307 bp, Homo sapiens
gtggcaacaacagatttcctggctcaggtatgcaccccagctgctggttcagactgaagtgctgagacactatttagaaaaagcgctttaaaaagcatctagagattatcatgaaaataatgtggagacaaagtcactaggctgcttgtgtgacgaggcagcatacccagttggctctaaacccgttcacaaaaaaacaagtgttacgagaccttacggacttccaggtttggaaaactcttaatatatccgacttcactcggtaactttacattaccaaaaaaagcacttttaaaatagtcctcccttcaacatggctatcttttttcaagcttatatgcatagctctctcagccacttgcactggacacacactggtcacagcattctgggagtggtaatactttctagacattggcagatctaatctcaaggtgactaggaacccagagctacagtactctgtgacggcaatctctgcagaacggttgaactttacctagttgggttctatgacactttgtacgcactgccttgaattacgccattgtcacccaggtactataccgggtttggggccttgtgtgcagcggagtgtcctgaccatgttttggccacccctcttttaataaggaggagcactgctttggaacgtattcccaacaatgattggtccgcggctacgtgcgccacatcatcatggtggaaagtaataactgaacacataaggcacttgagatttaccgctatacaacggcacagtacattttgtaccaaatgttgcagacctcacactaaagtcggctatatagaactcggagttcttcatctgcctctcattctttccaaaagaaatactagggggggggagggagataggaggtggagcgggcatgggaggaggcggaagcaggagggaggaggggagagatgcgcgaaggaatgaaagagcggagagggagaggagatgagtggtggactggcgggagggagacggcagctaaggcggggagggagagatcggcggaggaggaggggagagatgacgggaagaggagacaaaacaaagcagcaggaccggaagaagaagacgccagagggaaaagaagagaaaggagagaagcgagcggagaacaagggaagagcaggagggagggaggaacaacgggagagggggcaggagaacaaaggagagcagaaggacaggaagaaaaagaagagcgaagaagagacaagacgagaagaagccgcaagcaggggtgccaagagacaagaaagaaacgaggagaggcaagccacgcagacag

SEQ ID NO: 704505 - DNA, 176 bp, Homo sapiens
aaagacccaggttattatttttttatgaaccacagaggaattttctctatgtaataacactgtttcagtatttcagtagactactgtggatgataatacaagccacgggaagacttgaacttaccactcattgaggatgaagtgtcagatatttaagtaataattaaattaagaca

SEQ ID NO: 704506 - DNA, 1051 bp, Homo sapiens
  misc_feature (37)..(37): n is a, c, g, or t
  misc_feature (58)..(58): n is a, c, g, or t
  misc_feature (83)..(83): n is a, c, g, or t
  misc_feature (111)..(112): n is a, c, g, or t
  misc_feature (189)..(189): n is a, c, g, or t
  misc_feature (219)..(219): n is a, c, g, or t
  misc_feature (262)..(262): n is a, c, g, or t
  misc_feature (272)..(272): n is a, c, g, or t
  misc_feature (336)..(336): n is a, c, g, or t
  misc_feature (347)..(348): n is a, c, g, or t
  misc_feature (355)..(355): n is a, c, g, or t
  misc_feature (385)..(385): n is a, c, g, or t
  misc_feature (440)..(441): n is a, c, g, or t
  misc_feature (491)..(491): n is a, c, g, or t
  misc_feature (503)..(504): n is a, c, g, or t
  misc_feature (508)..(508): n is a, c, g, or t
  misc_feature (516)..(516): n is a, c, g, or t
  misc_feature (626)..(626): n is a, c, g, or t
  misc_feature (690)..(690): n is a, c, g, or t
  misc_feature (736)..(736): n is a, c, g, or t
  misc_feature (770)..(770): n is a, c, g, or t
  misc_feature (787)..(787): n is a, c, g, or t
  misc_feature (794)..(794): n is a, c, g, or t
  misc_feature (812)..(812): n is a, c, g, or t
  misc_feature (820)..(820): n is a, c, g, or t
  misc_feature (887)..(887): n is a, c, g, or t
  misc_feature (1025)..(1025): n is a, c, g, or t
tggcgcgtttgcggcggagtcgcgcgtgaggggtagnagtggcctgggaggggccgcngtcatggcagccgtgcgcagcgatnagttcaccatggggaaagcatgtgttcnnagccattctgatggtcctagtggcccttatcctcctcgcacgtgcagcgattggcccagtcccgtcgaggctttgcnccaccaggccaacagaagagagaggccccngttgatgtcttgaccgcgagataggtcgatctgtgcgaggganactggatgcntggattgggccagagaccatgcacctggtgtgcagagtcttcgtgcgcgcgagtgttgtggggnatctcatcagnnatttgcngtggccttctttgctctgtctgggatcgcngcgcggctgctgaatgccttgggactagctggtgattacctcgcccagggcctgnngctcagccctggccaggtccagaccttcctgctgtgtgggagcaggggcncgtggtcgtctnntggntagctgtntctgctcctcggcttggtgcttggccttgctggggcggatcctgtggggcctgaagcttgtcatcttcctggccggcttcgtggcactgatgaggtcggtgcgcgcgacncttccacccgggccctgctactcctggccttgctgatcctctacgccctgctgagccggctcantggctcccgagcctctggggccaactcgaggccaaggtgcgagggntggaacgccaggtgggaggagtagcgtaggcgcnagaggggagcggacaanggggccngcagtgtggaggaggagngagccggntgccccacacaccgccagtgtcataccaaagagctgagctgcttcggggccatgcagccctcctgcnagccccctgcccttttcttgccctgtctctgaaccttcagaacattgatcttgccgcagcccactagccaagagaacagagaagacattcccctgccctccttgcggcctgtcttctgaggtctctgtctgggttggnctttaaccttctctgctccagctgct

SEQ ID NO: 704507 - DNA, 608 bp, Homo sapiens
tggaacttgcctccgcggtttcaagcgattcttgtgcctcagcctcccgagtagctagaattatcggcgcccaccaccatgcccggctagtttttgtatttaatgtagagacgggggtttcagcatggtgggcaggctggtctcaaactcctgagctcaggtgatccatccgcctcggcctgccaaagtgctgggcttacaggcatgagccagcatgcctgagctctctttaaacgactttttgcttacacactgctttaggaatgaaaagcaacaaggagcattcagtcatatcctccgggcatttgcactgctcaaggcagctgcgtacaccatttctgcacatcttcccatgtttcatcaatcaagcagcactaattctcactcacttgtagggttacaggttgcagtacgatcagcatggaagactttgtccagcacctagtaggctgtcagcgcctgttacctttcctttccccaatgctccctaaagctaagttcattggcccatcatgtagagtactgggtccacaggcggtgaattacttgtgatgctcttccaaggactgcatgaggagcgacctttcactcaaagcaccagcaaagta

SEQ ID NO: 704508 - DNA, 1199 bp, Homo sapiens
gaggctacctatgtctagaacctgttgccagcctgatgtcgcgatgctgtgacaggcattgtgctcttcgctcgtgtccgtcatgagtcatatatgctgggatccgagcaacaatcgatggactgagttggcctgggttgtaaccactgttttgtaatgaacattcaatataacgagcaggatgagggtgcttatacgactggtggattgaagcgtgtgtcggtgattgttcgaagacactgtgcgatactaccataaactatcgtgaggatagagtaagagaagcgtaattatacaatggttgtgtcggcagtaaataacaccgtaaggtactcatcggctatgtatgcgtcgatttgtctcctggtagaacacggcgtcaaatccgtggcattcgaaattgtgccatcctacgtaataatcgtataacgcccacaagtgacccatgtggcatgctattagggtagtgtcgaggacctttgcagcgtctgaattgactcgtggaacacctggcgtgacttcttacctccacgagggctagggctcccgtaggagaatgcaaaaaaaaaccccacacgtttggtagtagccgatagcggtcgtaaggcatacgcattcgtggtggtacagcgttcatgagcgcaaagacggacgggtatagggtcttgccctggtggaggaaaccgccaaagcagtgcatccgtttgcaacgtttatgctagccgatggggcacccgttgcggagtgaccgtaatcgtgttaccgcaatgtacccagcacggaagcgaccatgtccttgtatttgcctgcggtgttgaaggaattggccttgggaaccgtcttcgtaaatcaactgtggtgaaaacgttgggcactcagggaatgggctcgtcgcggccatattgaaacctttgtgaggccctgggtaatgtttacaccgtatttctttactccacaaaattcctatcggaattaggcgggaaaatatcaaactccgagggcgctgtgaataagtcgcgattgtgacccccataattaattaccgctcgaatcagccgatgtgggaggaggtgtggacctcaaggtccaagttggtttactcccagtattatcaccgagtgcgataatcccttttctagcagcatacttcctggatggtgtaacgccctaatgtccaatacaaagttggaggccaccgt

SEQ ID NO: 704509 - DNA, 158 bp, Homo sapiens
cacatgcccagcacacgatggggagaatgccgcacggtgatgtgtggtttacatggaatgacttctctggaacatggctcccagtcttggaggaggcagaatgggtgactaactggggggctggcttcaccaacttcttcacagactcataattgcac

SEQ ID NO: 704510 - DNA, 109 bp, Homo sapiens
ataactatagtgcttgactgaccctgcccctgctactacgtttgcccatttggagtgctaccactgtaccgtcgcgtgccattgctgagctgggcatctatccagctgt

SEQ ID NO: 704511 - DNA, 680 bp, Homo sapiens
ccttatccctgacaaggtctaatatccagagcctcaggaacttaacaaatatacaaagaaaaaataaacaaccccattaaaaagtgggcaaaagacatgaacagatacttctcaaaagaagatattcatgcgaccaacaaacatatgaaaaaagctcaacgtcgctgatcattagagaaatgcaaatcaaaaccacaatgagataccatctcataccagtcagaatggcaattactaaaaagtcaagaaacaacagatgctggcaaggttgcagagaaaaaggaacacttttacactgttggtgggaatgcaaattagttcaccattgtggaagacactgtggtgattcctcaaagatccagaagcagaaataccatttgacccagcaatctcattactgggtatacacccaaaggaatataaaccattctattataaagataaatgcacatgtatgttcactgcagcactattcacaatagcagagacatggaatcaacccaaatgcccatcaatgaaagactgcataaagaaaatgtggtatatatataccatggaatactatgcacccatgaaaaggaacgagatcatgtcctttgcagggacatgaatagagtgggaagctgttatcctcagcaaattcacggcaagaatggcaaaccaaacagtgcatgttctca

SEQ ID NO: 704512 - DNA, 400 bp, Homo sapiens
atacccatctgtcgatttcaccaaaagggcctacagaccatcgtaaacaagctctgctcatgcagtcttcttagaccaacacactctccatataacacccctatcctccctgttaaacagtctgatggctcataccgactcgttcacaacctccgagccatcagtcaagctgtcctccctattcatcccatagtccataacccctatccacttctctctctcgtcgctaccaacaccaccctccacactgcaattgacctgaaggatgccttcttaaccatttccctacaccctgattcccaaaacctatttgctttcacctggactgaccctgacaccctccagtcacaacaactcacatggactgtcctctccatcccatccatccatccttcctcat

SEQ ID NO: 704513 - DNA, 315 bp, Homo sapiens
  misc_feature (166)..(166): n is a, c, g, or t
  misc_feature (203)..(203): n is a, c, g, or t
  misc_feature (232)..(232): n is a, c, g, or t
  misc_feature (262)..(262): n is a, c, g, or t
  misc_feature (285)..(285): n is a, c, g, or t
  misc_feature (298)..(298): n is a, c, g, or t
  misc_feature (311)..(311): n is a, c, g, or t
ttatgtagtattctgtattttaaactattagctgaaactgtgaagataaagatacagaggggagaaacatttacagcatatatcaaaacccttaatatatgtagtatttaaagatcttctaagtgtgaaaaggaaactcaaaaatgggaaaatggaccagaaaatncaagtggttcagaacaattatagtttggaaagaaatncatgaaaaaaatacatcaatatgtaatcnagaaatacaatttatggtgaatgacaaaanttgtttttggtctgaatcacccnggttgttatgggnttggacataggantttg

SEQ ID NO: 704514 - DNA, 397 bp, Homo sapiens
attagaggcataagccaccatgcctggcccaggatggtgagggggatggttgctaggtgattcaagtgcattacatttattgtgcactttatttctatcattacattgtaatctacaatgaaataattttatacaactcaccataatgtagaatcagtgggagcccagagcttgttttcctgagactagacggtcccatctgggagtgatgggagacagtgacagatcatcaggcattagttagagtttcataaggagcatacatcctatatccctccaatgcagttcacaacagggttcaagctcctatgagaagctaatgccaccgctgatctgataggaggcggagctcaggcagtaatgctagcaatggtgtgcggctgttatactgatgaag

SEQ ID NO: 704515 - DNA, 166 bp, Homo sapiens
cacacaaggcatgtcgcaaagctggccaccctcaaagctgcatatcaaggcctgaataggtgatgaaaattaagaagttgtgaatatgttggattggaaagaaaggtatctcaagtaagacctgctcaatggggctgtcacctctgccacataaactttacaagaa

SEQ ID NO: 704516 - DNA, 146 bp, Homo sapiens
atgcgttgtcagtgaaatcggtttccagatggttagtctcttcatgccccgtccatttttcggttttctccagtgtacagaattcagatgattacttctggaatgttcgttattccattcaatgttactactctgtgacttaaata

SEQ ID NO: 704517 - DNA, 240 bp, Homo sapiens
ttgctgtcggctgttatcggcgagggatggggagagagatgccggtcctgtctggccgctcgtgctgctagcccgaggtctccaatgcctggtgctgcgtgctccatcctcggctcctgggcacctgtctgcgatggctccgccgaccagagtgagaaagccgctgggcggctgaccgcctggcatcatgtcagccaaggacgagctgggccagggagatcctgaggggcttcaaactaa

SEQ ID NO: 704518 - DNA, 176 bp, Homo sapiens
ggctgctgctgtatcgatctaaggatccccacggcatgtagagaggacaagatgggcaggtcagattgctcgagtccaggagtacgagaccagcctggtgtgaacatggccaaagaccccgtctctacaaaatacacaaaaattagtaggggcaggggtggcatgcctaatagtcc

SEQ ID NO: 704519 - DNA, 115 bp, Homo sapiens
actgtgacggaagatgacgtgactgtctagaagactataggagaatgatgctgtactgctggggaagtagagcatcattctcctatatcttctagacatcactcatcttcatcgg

SEQ ID NO: 704520 - DNA, 219 bp, Homo sapiens
ccgtacctagcaaaaccacaggtcctaaactagccaaactcgcattaacatttgcggtggggtgcgacctcggagcagagcccaacctccgagccgtacatgctaatgacttcacctagtcacagcgaactactatactcaattgatccaataacttgatcaacggaacatgttaccctagggataacagcgcaatgagagatttgggtaccgagctcg

SEQ ID NO: 704521 - DNA, 192 bp, Homo sapiens
gctttacctatcacagcactttcacagagtctgccatccggcagactgccaatttacagctgctttaagtcctcccacagttttaaattcagaaggttcaaacaacttcctttgtcggcaaggtttgtatgtacctccggacttccatcaggtgccaccttacaatttaagacaacggcagtgcccgccttc

SEQ ID NO: 704522 - DNA, 522 bp, Homo sapiens
  misc_feature (381)..(381): n is a, c, g, or t
ccgtaagttatatgcaaatacaacaccatgtatatcagggactttagcatccctggatttgggtgtctgtcagggggtcctgtagccatcccccatggacaccaagggacagctgtacctcaccagtagaaaaatataaaagggaggtagaagaggatacgctgcatgaagttgccacttctttgtcacttcttctgggctaacacagaagatgtaaaaagaaacagggggtcctatgtgttcatcccaatatgagcatttcctgggtgaaatttctctaaatttaagtcgcctctcaacctgaccaacagaaagtgtgtttgtctagggagggaggaggatggctggtcatgagcactataaaatctatgggagaactgnaaatcaacaaatctggaaccatctggctttccataccaatttatatccatgttttctttttttttttttttgggaaaaggtttcttttggtccccagggtgggagcgcggggaaagacgtggtcccacggaacctcaacct

SEQ ID NO: 704523 - DNA, 103 bp, Homo sapiens
tgttactgtactgtactctctgactcttcactcaaccaatgcaatttgttacatcatcttctcacatgtatgcatttgtgccactgatcttaaacctatgatt

SEQ ID NO: 704524 - DNA, 275 bp, Homo sapiens
tcgtgatccacctgcctcagcctcccaaaatgctgggattacaggcttgagccactgctcccggctgatttttgtattagtagagacgacagggtttcaccatgttggccagggctggtctcgaactcctgaccacaggtaatcagcccgcctcggcctcccaaagtgctgggattacaggcgtgagcacttagtattttgtaaccataagagaaagtatattttaacagcattacattttcatgccaatttgacaagttttggccaatttttaa

SEQ ID NO: 704525 - DNA, 220 bp, Homo sapiens
actcagttcggctcatggataattatcttttattttctaataatatgaaagaatatagtactttcacatttacttgttaaggtgttgaataattcttcatagttggaatgaatatgatttcttcaattgtccaccctggacacccagctcctcttgacaggacctgaccctctgttgcccagcgtcatgacgtgggaacatctctgcgctcaccagcctt

SEQ ID NO: 704526 - DNA, 167 bp, Homo sapiens
accacacgcacgctcatcgtagccacaggacaaaggcagcagtgtttatgcaaatctagaaacaaaagaagctagaatccaaagctattaaaagtaacatcagcaattcaatacccagaagtgattacaggcccagtaccagcatgaaacagaaaacacccgaagtc

SEQ ID NO: 704527 - DNA, 198 bp, Homo sapiens
tactgcagcaacttccttaccttgcactacgcacagaacagaggtagatttaaactccttacactcacttctcagatcaatgaatgggccaagaaacacctctatggctctatggagggcatgcgtgagacccgtcattcgcgagtccttgaggaatgtacagaatatcgcgtgccaggtatccccatgtcctagggc

SEQ ID NO: 704528 - DNA, 110 bp, Homo sapiens
aaattaaaaaacaattaacaagtgtatatttaaattccctctctcttgctcacttcttcctttcacaggtaaacttaattcttggagggtcctgctgcagtccaaccagg

SEQ ID NO: 704529 - DNA, 265 bp, Homo sapiens
cagctctgcctttaactctgcccagaggctctgggcgggctactgtctttggtgcgacctctggggcattttgcaagttttcatggcagatgggtgggggagcagtgcaggcaggaggcactaagacaaagcacaaggggaaccggaaatgacctcgctaccttcctgtgccttccctgccgccccactccagctagctgtcactaaacccagtgcacttcactctagttgacgggtatctctcaggcctctggagtcgggggta

SEQ ID NO: 704530 - DNA, 184 bp, Homo sapiens
aagactgcaagaccaacgccttctcttcctccccatctttctccgcctctgcctactcaatgtgaagacaatgagaatgaagacttttatgttgacccacttccatttaatgaatagtaaatatattttctctttcttatgattttctaaataacattttctctagcttactttattgtaggaa

SEQ ID NO: 704531 - DNA, 893 bp, Homo sapiens
gctccgggatcttcaggacacccggcggccgccaatcgccgtcgcttggcttcttctggactcatctgctccatttgtccgcttcacactccgccgccatcatggtgaagctcgctgaaggcgaggtacataaatcaaggtgaaccccaaggatagaatggctcctccatccaagaggaagtgctagcaacgaacgataccgtggatacgatgcatggatacacttgctcaagagacgcatgagacgcacacgatcgcatacgcaagtgggcaccatagccaggtcagtggtacacgtacaggatacaccaggcggcgcaagacgctggattgcagctgtacctgctgcacgacagcgatgggctcagcattaatcccccttgattaaaacaaaatgggtattgacctggtctggcaccatcacacaccgacccgacaagacaagagaccagccttgatacaggttcccttgtgacacatagccacgcgcccactgcaacacctgacttgatcgcgtcgctttcatgcgaaactgtcaactacggacttactcccctatgcccgcaatatcacatggcttttaccccacccgaacctcttgcgcacatgaacacggcgcggacggccccccatcaaccaccaacgcgcctgaatcaaagccattctgcagctacagctataacacatcctccttgtcgcctcaaaagcaacacgacgcgttgcccatcgcgcccaattcccacctaatctccccaaatctgtgagacgacaacacacgcacaattggcgcccactcagccacactcgacgaccacagcacctccgggccctcaaccacaagctctcgactttggaactcagaacgtcgaatcgcgatgtgtcactctacacca

SEQ ID NO: 704532 - DNA, 313 bp, Homo sapiens
gaatccgctcggcatatcttctcgccgcccgtggaaatcacttcccagtcgtggagcacagcctgggacagcgcctgtaccggcctctactgcgagggcctgaaggtcgggttcatgaattcggtgaagatcaccataccgagcgtcatcgcttcgatcctcatcgcatcggtcaatggctatgccctggccaactggcgcttcaagggttcggaggtgtttttcagcatcctcctgttcggcgccttcattccctatcaggtgatgctgtatccgctcgtgatcatcacccgcaatctcggtccgtccgccc

SEQ ID NO: 704533 - DNA, 1426 bp, Homo sapiens
  misc_feature (405)..(405): n is a, c, g, or t
gatgaagatgcaccagtgcagcctgatccctggggataggctagaggccattagctgtcttagacgctctggttggagatagcccatatggttaggaatgctggctgtccagggctggtggtggcagagttggtgatctgtcgagcgaggtgcctcagtagtctgtgctttgtccatgaagggttatcgaaggcgcgtgtgtggatggtgggtagatcagcgagtcaaggaaatgccaagccgtaggcgagaatgcgtcgtcgcacttgatgcgttcatgccatgggtagggcacgtgtgtattggaatcgtgccctgggtgctaagggacgtaatgtgcggggaaacggattgaatgggacggagctccaatgactgttccctagcaagcctgggtgaatgcgntgtgagtatcagccaagtgctgctggtggttccagattgggcggggtggatggggcaaaggctcctacaatcgtgggggtgcgttgaacaagccgtttcacggttactgaggagtgagactggtcgacgtttggatatagacagcttgaccactcccgagtagaaaggcagcagcgtaggggactcagcgcaggacctcgacgggatgggcttactgacagaggatcccaagcataacacttagaaagacaatttggctcggggccatgggctatcgagcgtccaaattgtgaacgaagatgtgggaacacttcattggtgagtccaacacaggaataataggaagccatgttgggacaacattgaaccgttcctgtcccccgtggccatttcgggaagtccacatgggcagaaattgagctaaagaagtggcacaaagttcgaacggttaaccccagcgtgggccacaacgtaaggcaccaacacgagcaggggagcaaattatataggtatggtctcacaggaacagcggtaatttggaggagccctagaaccaacatggtatgagacttacccgttgaggccccattttggttcaacgacttacctccattggttacccattggttgagaagcgcccctagaactcttggggagattatgtaaagttctcccgttcgacatttgtttccaaccaacgaaattgacaccggaacttctgggggtaggggaaactacacgcgttctttaggtctggccctggcaacttcataagtccggaagcaacaaactgggaccccccggctgggagttatcctctccggagttcgagaaccaatttcaaatccatttttgtagtggagcttcgatagcggttactgccgacttcgcagcgaaagagacatggggtgcacaacaccccaatttcagacctcttcatgaagagagaaacatttcatcatgagaaatccatcgggtgagggagaaaacacgccctttcgtgggagcataactagactac

SEQ ID NO: 704534 - DNA, 470 bp, Homo sapiens
agaaggggagcgcgctgcgcgtcgcaggagtaacctacttggtctcctgctttcgcgacatggccttcaattttggggctccctcgggcacctccggtaccgctgcagccaccgcggcccccgcggttgggtttggaggatttgggacatcatctacaactgcaggttctgcgtccagcttttctgctccaactaacacaggcactactggactctttggtggcactcagaacaaagggtttgcatttggtactggtttgggtacaccaccggtacctagtactgatttaggtactgctttgggaactggactggcatttgctggatttactacacaccagcagcagcagcgatctacattaggtgctgtcttcagccagtctacgcaggctcctacccagcccaaccagctgttaaacaccgcgagtgctctttctgctccaacgcatgacgcagatgagagagcccct

SEQ ID NO: 704535 - DNA, 852 bp, Homo sapiens
ggctcaaagcgggcgccgtccgggagcggaggttgtctgtggacggagcgctgatcagtgttctagaacagtatcagatatatgtaatgatgcctgagaatacaacactaagccacgctcggacaaggcaacacggttcaacttcctggcgaagagtagtgtgtatccttattcgtatgcacaaatgagcaatacatacattggagtctgagagccaatgaacgcaacttgtcaacctgaagcgagaacatgtgaagcaaaggattattgcttcgagctatttagatgtcttcttattcaacaccgaaaatagagcttctgttgcaagcatagatcagagtgctaagagttaccttatccaggcttgattattaccgaatacggtagtggtatgctcaatccgaattaaagcatatccaaggccgtaggcttttgaggagaaccagtgaacgcgccttgcgaggtgatgcgtcgagcagacatcgagagagcggtcgtgagacatgctggaggctatgagaaaattcgccttgtgaatgaaggcttcctcactagagagaacacttgaatgttaattgtaacagcgtaattcgacatacgaaaggctcagatgctgataggtgagtctgagggatgatacctattgaaaatttgagtatacagtttagtagcgtgaggacagacatgtagacttgtgaagtccaggaatcccaagtgagaattacaaagctacttgttactgtggtcaacaggatagacactaagaagaaactttctgaagagaaaagcagacaggtgggtgaaaattaaggatgagacgcccatgggtttaaaacattatttgcaggcgaa

SEQ ID NO: 704536 - DNA, 107 bp, Homo sapiens
cccaaacccacttcaacttactaccagacaaccctagccaaaccatttaccccaataaagtataggcggtagaaattgagaccttgcgcaatagatatagtaccgca

SEQ ID NO: 704537 - DNA, 192 bp, Homo sapiens
ctgctgtcgatctagagatccccctagtttaagaatgttgcatggctgctacaataatatccatatagatatgtagctgctatagaatgtataggagagctaatggctttgaattttttaattgttttttatttttcttttagttgtaaattaaaaaaatttaaaaattttcaaaatttttcccaaattttt

SEQ ID NO: 704538 - DNA, 580 bp, Homo sapiens
  misc_feature (4)..(4): n is a, c, g, or t
tttnatttttttgctttattttattttctctttatttggacaactttttgtctttggggacaagggctttaaaaatgagacttctccacattttaggggctcaacaggcccccatggttagggtttcctttttccaaaagccccaccctccaagcctattgcaatattgaaaaaaaccactatttctctcctcttgagagtgggaacggcagggcccaaaattttccttatttttccaagaaggttttaaaacccgttggagaaaaaacctttattcattttgggggtttttttttccccttttaaaaaggacagcttaaaatccagaaatttggttaaacatcaataatggcaaaaaaaaaaaaacgggaacagttttccccgttttcggataaaccccagccacccgggggatttttaccttagagagtgttggccaagctgttggcacaagcaaaattatcagacttttgtggtttaaatgaagacaagtataaacacatttgcttttatggcggaattaatgctaaaaaaagggtttctggaaaaaaaagaaattttcatttttgtcgccatttaa

SEQ ID NO: 704539 - DNA, 570 bp, Homo sapiens
gaattccaggcctggcagcattcatcacaagctgaaggtagagcctttgggcctttttggtgccagctcagctgcagtagaaagagcactggctagattcctaagatttctgactgtagaacctggctccctgatggcatctctggacctgactggggctgcggggaacttgccaaactgaatggaaagacacaaacctggctggctctgccaacttctgattgcagaggcctaggaccttgtgtgaacaggcagtggttacccgaggccttgagcgataccaagtaccatgctggcttcaggtctgacccatcacacaagtccatgctggcttcaggtgtgacccatcacagtcccagtggtgcgggaccacagtagtgcttgtgtcacccctcatccagctccaggtggctaatcacagagggagaaagaaagagagaaagagagagagagagagagagacagagagagagacagagagagagagagagagagagagagagactctatttatttgggagaaagtaagggaagagaacaagagtccatgcctggtaatccaaagaattc

SEQ ID NO: 704540 - DNA, 326 bp, Homo sapiens
tcacagccccagggctgatcatattttatatcttcttcgaaagcacgctaatccccaccatgactgtcatcaaccgaagagggcgagccgccagaccgccttaacgccggctcatacttcctattctacatcctagtaggctcccttcccctgatcatcgcactaatttacactcacaacaccctaggctctctaaacattctactactcactctcagtgcgcaagatactatcaaactcctgagaccaacaaaccgaagtatgactagcatacgcaatagcttcgatagtaaggatacctctttacggactcctcttatcactcc

SEQ ID NO: 704541 - DNA, 1029 bp, Homo sapiens
gaccatcctctcgtagcctgatcgccgtcgtcatgggtctgggatgcatgctcccgagaaggcgtgctgtcccactcggtgtgtacctcctgatcgacgtcacacgtaccctcgactgttagctgcacagtatgacctcttgacggaccgctgcaggagcttcgagtctagcaagatctggacaagaacgggctcgttaccatccttgtgcgagcatgatcgcgcgtaggtaccctgagacgatacaccatcggtgattgctctaagatacagtggtttgtgcctatggcgtaggtgctcctttgttagagaatctctattacaagtcttcaagggacctccgctcgctgaagtcttcctggaatatgctcgaccaattttccgtgaacgaagaggctggtcgcatgttccgtaaaggacactccttgtagggagtccactatggatcaggagtgaatggactgctcatccctatcccggactgacttctagtagacgagccgtgcattcatcgttgggctcgagattagctgagcttagcgagtcgcgctcctcccaataggaatgtatgaatcagtctagcagccctcgtgccgctggtcgcactagattatgttctgtgtacctcctacgcaattagaatgatgtgtttagccaagccacaaaagtttaaattaaactggaattccatgatcgtcgtacggatgcgccacaaggccctgaatctgctcagccaggagaggccttgcacccagaggtctgagaccaggctctaagtcgatctgcagaaggatgtagaaggaaggctgtggtcgccacaaagaacagccggggaggacggggttcaaaacactctagacctttggggctcggggtggcaagcgggtgcctgtgatagacacgggcacggggggtgatggagcaagccccgggggagcaagcgaggagggacaacggggccacccaacaagagaagaacacccgggaaaaaaaaaggctcaaagcgcgaaacgagtgacacacaggcca

SEQ ID NO: 704542 - DNA, 290 bp, Homo sapiens
aagcttcgactgtggccttctcggcatgtggcggagtgctccgtgtgtggctactacttctaggatcgctacgctggtacttgctagcagccgctactcggccctagctgccgaagctctagcaggtcttgtcagtcagctccgagtcagctgttgcatatgctccagtccatcggtcatgcttgactctgctggctctctgcaagtctgtctctcgatcaggatcagtcggcgatcggtatcttgttcctgcccagccatcgatctcctggcaatacgcctcagccaag

SEQ ID NO: 704543 - DNA, 345 bp, Homo sapiens
  misc_feature (271)..(272): n is a, c, g, or t
tctagaggatcctcacactggttcgagtcaagacagcctggtaacatggtgaagccctgtttctactaaaaatacaaaaattagctaggcatggtggcatgtgctgtagtcccagctactcgggaggctgaggcaggagaatcgcttgaacccgggaggcggaagttgcagtgagccgagattgtgccactggaatccagcctaggtaacagagcaggaatcccatctcagtcaatcaatcaatcaatcaatctcagcggttgaactaccnncttgacatggttcaagctctgtatccagcacccaaatctcatgtcaaatttgtaattccccagtgttgtaggg

SEQ ID NO: 704544 - DNA, 156 bp, Homo sapiens
cgagtccaccactactggccatctgatcgatgaatgcggtgcatcgacgaaagaaccattggaaaatttgagaaggaggctactgagattggaaaggctccttcaagttacctggtctggataactgaagctgactgaactgtttccattgatttc

SEQ ID NO: 704545 - DNA, 124 bp, Homo sapiens
acacacacatatctcacatccctccccagactccagaacccctgacctgtccatcacccctccagaatctccactccgtccgcggcttggagctaaggaatccagttcatcaaagaaggtagac

SEQ ID NO: 704546 - DNA, 474 bp, Homo sapiens
gaattatttgtatgtcaatcattgaaatatttgattccatagcatatgaatttataggctatcttatacattagcatatatgtgcccaaccttttctttctttcccaaccattagaattgaacttaaaccataatgaggctctagaacttactttacaactttaaatagattcaagagtcactgtatttgcaagaaagctgagggtgtttaaaacttctccaacccttcaaaaagtttctccatggcgctggagaccccatccaactctcagtggctatattagggaatcatccggactgctcatcttattctaaaattaattcttattctgttgatatattctaataacttttatcttaatttggaatttaattgcttgtatatttatataaccctaagacatgaattcatgtattagtttatgaatacccaggatctcatggaaggtaagggaaattttagaaaaaaaaaaa

SEQ ID NO: 704547 - DNA, 404 bp, Homo sapiens
aaaaaattttttaaaatggggggcccccaaaaaattttttttttaaaaaaaaattaaaggtttttacccccccccccatttcccccctcccccccggaaaggaaaaaaaccccttggtctccgggaaccaaacccccccgcccctttggaggggggtttattttaacccggtctttaaaagggcccggggtttttaaaaaatggagggcaccctttttttttccaaaaaaattttgggggggggggaaaagggccaaagccctttcccaccccccttaaccgggggttttttaaaaccaggttttttaaaaaccccaggtttttaaaaaacaaggggttgggggttttttttggggtttttttttttttaaaccagggcccccggaaaaaggtttttaccaata

SEQ ID NO: 704548 - DNA, 699 bp, Homo sapiens
  misc_feature (699)..(699): n is a, c, g, or t
gcagacactgaccttaagggcctgggttccagggccatggggccttccaggaagttctgggttgggggaaactggaggatgaccggccggaagcagagcctggggaagctaatcggaactttgaacgcggccaaggtgccggccgacaccgagggggttggggctccccttactgcctatatcgacttggcccggcagaagctagatcccaagatggctggggttgcgcagaactgccacaaagggactaagggggctttaactggggagatcagccttggcatgaccaaggactgcgaagccacgtggttggtcctggggcactcagagagaaggcatgtctttgggaagtcagatgacctgatgggccagaaagtggtccatgctctggcaaagggactcgaagtaatcgcctgcattgggaagaagttggatgaaaggaaagctggcataactgagagggtggttttcgagcagacggtcatggaagataacgtgaaggactgaagcagggtcgtcttggcctatgagcctgtgtggcccattggtacctggcagactgaacaaccccaacaggctcaggaggtcacgagaagcttcgaggattgctgaagtccaccgttctgatgccgtggttagagcacccgaccaattatggaggctttgaactggggcacctggaaggttggccgccgcctn

SEQ ID NO: 704549 - DNA, 385 bp, Homo sapiens
  misc_feature (192)..(192): n is a, c, g, or t
  misc_feature (198)..(198): n is a, c, g, or t
  misc_feature (338)..(338): n is a, c, g, or t
  misc_feature (360)..(360): n is a, c, g, or t
  misc_feature (368)..(368): n is a, c, g, or t
gcagcgacgtgggccatggacaccgcagcccgcgccttctgattttggtgcagctcaaaatactttctggttaccgttgggttcccgacccatgggttccatggacgtgcattttaacccctgctcccccatcagccgccccgtccgattcctgccaagcagcacagggcccctgcggcagcgcctgggctnctggtnctgtgtgtccgtcctcctcgtggtcattgtttgcacggtggctctgacctgggcagccaacctctgggtccccacaacttcccagtcttttgccttctcctgttcgggacaccctaagggcagctgtgggcccccagacntagctggggatggggtgttgtngcttgttncccaccaacgttttgtt

SEQ ID NO: 704550 - DNA, 645 bp, Homo sapiens
  misc_feature (640)..(640): n is a, c, g, or t
ccggcgacgtcacgcggccgttacggcgctcaggcgtctcgacgcgcgcgatttaaaaccagctcaggagacgccaaggaaagatgggacctcccggcccagagacgcgaggacacccccacagcgcctcctctccttcagagcgagagttcccgatgcccctgcccaggaaggcgcctgtcaatatttctgggacctcagtcctcgaagactttccttagaatgactacgagaaggagcggttgcagcggaggcgctcgagggtctttgatctgtagttcagcactgactcacctggctcattggcctccagctccagcaggagtattgacatttcagctactattcccaagtttacaaacacgcagtttacggaacattactgcacctgtatgaaactgtccactggtacatcactaccaagaatgctttcggatagcacttgcatgacatgatgtcagagactcattaacagaaagacaccgagccaaccaactgtgtggctgcggctactatggatgccagctatcagatctatgctgcgcgcgtggatgcacgccatgccgatgaatacagagtcctagacgggcttgtcagagctgcacccgtatttgtaaggagtctggctcatgttgctgantgccc

SEQ ID NO: 704551 - DNA, 823 bp, Homo sapiens
tagacatattctctacaatagacagaaagacattggaacactatagcctattattcggacgcatgagctggagctccgtaggcacagctctaagcctccttattcgagccgagctgggccagctgaggcaaccttctaggtaacgtaccacgatctacaagcgttactcgtactagcgagcccagtgcgattggtgaataactcttcttgcagtagctaatacccatcagtaatcggaggctttggccaactgacgtagttcgccctaataatcggtgcccccggatatggcgatttccccgcatataactaacataagcgttcgtgactcgttaccatccactctcgtcctacgtcctgactcgcgatctgcgtatatgtggaggccggagcaggaacaggttgaacagtctaacctccgcttagcagggaactactcccagccctggagcctccgtagacctaagccatcttctccttacacctagcaggtgtctcctctagtcttgaggggccatcaattgtcagtcacaatcaattatcaagtattaaaaggcccctggccgataatgccgaatatccaaaggcccctcttcgtctgatccgtccataatcagcaggcagtccttacttctccgtatctctcccagatcctagctgctggctatcactatactacatagacagacggaatcgtcaacacaacgttcttcgaacccgaccggaggaggagaccccattctagtacaacagcatattctggatttctcggtcacctgaagttgatatgcttatcctacaaggcttcggaattaatctccat

SEQ ID NO: 704552 - DNA, 2077 bp, Homo sapiens
ggggcttattaacggtggtatctggtagagcccccataaagtaccaccgtggggaagacaatgggacccgaaaacgagagccccgtggggggggagatgtgggggagagtgtgtgtgttcagcgctagacaaaagagaccgcgatgcagcactttaaatagtcttctcgttgctagaacatgctataacatgctggcgctggtggattggatcgagcaggatttcaagagcacttggcgaaaggctcacgtttccctccgcgggttcctcgatttcgagctggggagacgaaaagaggttgccggggcttttctgggtggggataccagacctgaccccaaaaagccgcggggggggtccaaaaagaacgtggaggtgtatgatgatgacgtaggctctcaggctgcggacagccccgggaaacgcatggccccgaaagggacatttagagataaggacaaatttgaagggctgtttaagctcggggcgctggtggcaaaaaaagccttgaccccagcattttcttgttcccccaacagggggtcgcctctacacgcccattatggggatgaaatcctctacaaggttgaatccgggcccgtcaacatttgcgaggggggcaaaagaggcgtggggatccaccccccagataactacggcgatacccttgatgaaaatcttggccttccccaaaaaattgtgattaaggtgaagccccaaaccgaggaagccaacacttggttaaggcaggatctgaaaaatcataacagtgcaaaggaggccgggggctccgacgagattaaaacctttgtgacaggatgtaaaaaagatgggcatagtgggcgtaaaaatatgaccacacatgacagaaattcaaaaaagtggcaacgggtaaacttgtcccttatggcctccctccagctagattctaggggcggacgcgcggggccccggcgcggagcgcggcgcctgtgcctggtgtgtgaggactatgccagctgttcaaacacctgtgtctggtcctgtgaagcctacaaggtcttctttcgccgaagtcaaagtttcacagatccagcctgtttcacaaacgattgcaacatctctaagaataggtctaagtcttgcccagcttgcctcctccgttgcctgcaccctagcattaatgagatccgaaaagacaagcgagcagcgctgaaagtgcgagacaacgttggtgaagaggtggatatgaccggtcctagctggacctgcctgaagctacttttttcagatggggaaaaagtgatacccagattgggccatgaactcccagggatcaaggggggccggcaggcaaaacagcagtcccaccgaggaagccccatccccaaaaacaggaaaggttggccccccggacatgtcctgtcaaatgacggcggagctggtggcagggtatggaaaaaaaaatcctgtaaaccaattcgccgagaaggccccaagtggtgggatcggctgaatgaatctacacctttgttttgggggtctcgagccaacaagagtttagggaagggaggcaccagggggaggattttcatcaagcacccacacctctttaagtttgcagcagatcctcaggacaagcactggctggctgagcagcatcatatgcgggcaacaggaggaaagatggcgtaccttctcattgaggaagacatcgggcagcatcatggccaggggttcccagttatgcttctcaagattagccatattaggcacatggttgggggagtggctcattgcttgtacgacatgaaagaaaagaagtttgttctgccatcctggaaggttgagaagttggggaaatacgtggagacactacggacagaaaaagagcatcgtgctgctgaagcaagtccccagacctgactttcccggcccggctgaggccatcatggggatgcggtctagttggctcttagcagcatcaagctgtacatgagctagtttgtagtgactcactgcagagccccccagactggcttgtggttctgtttctaaagttattggaataagaagcaattaaacaagtttgtaattt

SEQ ID NO: 704553 - DNA, 248 bp, Homo sapiens
cccttgaaaggtgctgaccaggagtaccagcgagtttaattaagaagcctctgggattgcctgaaagggcccctttgttctgacctttgaaattgaaagggggcattgttaacattcatcgtgggcacatttggtcagggaccccttcacccttgcccctttggcactactgcagctgacatctccatggatggaaggcacagcaagcccttcctttggtttacacaggcgatttccgccgggttggc

SEQ ID NO: 704554 - DNA, 220 bp, Homo sapiens
ccgtaccaacaggatgagtaggtaaacaccagattaaaagacttaccaagcagtccatgattctagcatactcatctatactgctggatatgtgatgtgatttgattaaagagacaggccaggcacggtgactcacgcctgtaaatcccagcactttgggaggccgaggcaggtggatcacgaggtcaagagatcgagaccatcctgttggctggcgaca

SEQ ID NO: 704555 - DNA, 704 bp, Homo sapiens
  misc_feature (295)..(295): n is a, c, g, or t
atatcatgctatgatttaccgtctcagttctattgatagtctgagatatatcgcatcagatgctcaatgaattcttccctaggtatgtcctgagaagcgtaagtgagatgacgtatcgacttgtctgcagtgtagtaggcgtaacgtcgtccgaatgagaacaccattcacaccatgcacatctcctgtcgggagtccaattatatgtcgcctaatggccattacatagtcttttcgaccgtgctgcagagatcctagtgctgggatggagccttagcgcggtaacataagttcntcgaatcatcgccaacagggtcatgggcataatacttaccgttacgagtagagccttgataaccattacgtcacgagatagcataggacccatcacatcgtccctatacgatttatgtttgcttaagccaatggaccgactgacttgtgtgcccaaccacaacaagcaagcagataggtctctggagaaattcaagggcatgcgagacccaagcgcgcaatctatggccctgaaaggtgtcactttcaacggcccttctatttcgcgcatgcttaacgatgactcctctgttgcaaaaggcccgacataggttctaaacgaacagcgcaagccacttgaatcgataaccgtctgggataaccggcgccttataccgcgtttattatcgcacgtgactcaagaaggaccg

SEQ ID NO: 704556 - DNA, 315 bp, Homo sapiens
  misc_feature (41)..(41): n is a, c, g, or t
  misc_feature (60)..(60): n is a, c, g, or t
  misc_feature (158)..(158): n is a, c, g, or t
  misc_feature (271)..(271): n is a, c, g, or t
  misc_feature (304)..(304): n is a, c, g, or t
tgcctgtggcagtcaatggctccagggctggcaaacctccncctagccagtcagcacggncctgttccttatcaggaaccacaaaggtactacatcttccccagccatcagcacgttgccacaacttaactttttaacatagtccgtctgtttactgnggcactggcgagtcccagggctgatacagaaccttccctagagggaataccagagttagctgggtatagaggtggctcaaaggaagtgtccgtgggcagggggtaggaatgancaaaatggcgctggtttctttgggcttcagacnccttagaatgg

SEQ ID NO: 704557 - DNA, 812 bp, Homo sapiens
aaggctaggtataggacccgtgttaataggccgaggcgcaggcccagtgtgttccgggctcctgacccgcacgacgcggcgggacttgggagccccgaaccctccaggtgacgctgacctcgtgaggagcgctgttcgcgccactcggcctggtggactgtgatgctgctggaaacggggctcgagcgcgacgagcgagtgccctggggacctgcctgcctgtctgcaccttgtgtgctgtgtgactcgtggagatccctgctgtgcgctgtgctgtgaccagcctacatcctgtgacctgctatcatcctcaatgtgctctgtgacctgccactggcacagcaatgtgtctcaatgtgcagctgacttgccatcacgccactggccgagctgctgcttcagccgaggggagagcgtttacttgcaaggacgactatatatatcaaagtggtgctgcctgcgcccaggacttacgtgtaccacctgcacttgctttgcctgcggatcgtgtgcaagctggcaagctggccacgggacgaaagaagttctacctcatggaggacagcctggcctcgttgtgcaatggctggactacgaaacctgccaagcagatgacgaggccgagtcctactggccaagcgagcgtgcacgaccatcaccgccaagcaactggagacgctgaagagcgctaacaacacctcgccaagccgggcgcacgtgcgcaacagctctcgtccgagacggctgaatcgcgtgtgcagttggtaccagacgcgggccagcgaaggctgaacgaccgcgaagatgggaga

SEQ ID NO: 704558 - DNA, 745 bp, Homo sapiens
  misc_feature (319)..(319): n is a, c, g, or t
  misc_feature (365)..(365): n is a, c, g, or t
  misc_feature (575)..(575): n is a, c, g, or t
  misc_feature (620)..(620): n is a, c, g, or t
gggagctgaagtgtagaggactcctttaggacagcagaaagggaatagccgttgagcaagttcccttcgaaactccagctgcctcctctccaagttcaagactccacgtcccttctccaaaagttaaaacggaaatgccagagtttgcacctagcggcgtccgcgctgttctctacgtcaataagatactgtcgttctagctccgcacgactcggtgaagaacagaaatacacaaaacgtaagcttccgttcccagagtacttagaggacttaggaagatagctcgtcatgggtccgcctgacaagtgtctggaaattntgtacgtcctcacggggatactcatagaactagttgaagtggaggncatgcttactccttgtgatttgcacttcttgtacaagatagtaccgcaaacgaaaccttcaattccgtatcgctggtgctgacgggccgtggttcgtaatccagggcaatttggtcgtaaggtgttcatactggaacattgcgttgcaggtagtcctattcgctcggtgttggcagaactatctccgtaagaacagacgtagcgtcaagncatcatctaggcggacaattgacgagggcatggtttgattgcctnggggcatggagtagctgtggataagtatggagccgtattgtgctcatagctaagaaacatactcgcatacgcatatccagaacgccaggtggaaccttcaacctggggaaagatgggctacttgc

SEQ ID NO: 704559 - DNA, 484 bp, Homo sapiens
ctgtaagggtggacacagtatgcaggagggacaaatcttcctcaccggacaggtggggatccctgcggtgcactaggggaatgcacacagggggcactatgacctggcggcccacggggcacggggacgcaccaggtagccttgggatctgcaagtccctcccggaccctggggagtgccatgacggcttccagcagcagtcactgtcctgggcgcgtcccgcgctctagcccaggtgggtcccacaacggtgtgaccaaggacgtcctatgaccaccccttgtcaggtaaggaaactgaggcaggagaggcgaagcaactcgcccaaggaatgggctgtgccggtagcttctccaaggcctggtgcgccctggcctgtgcgcgtgatcccgggcggggtctcagtgcgaacaggggcttcgcgatgtggccagcgcgggcttatctccgtgccgtgacgacaaggtcgaggcctgggcggccg

SEQ ID NO: 704560 - DNA, 1274 bp, Homo sapiens
tgggagatgagctgactgagacctggagcctacagacgatggaagaattctcctgcttgtggtaggaatgtggcttctgtcctctggacaattctgctgacctcatccgccatgtctacttccactgtctaccacaccaagctgtaagacaggtagagcggagtcttgcagggccattattcaacagccacggctcgagcctatgtggccactccctgactagtccatgcgactatccaaacagcctgtgaacgtacacttacctcgttagattatccgctagaactcaatctatcctgtgttctgtaggagcactgtgagacttccttcgtacaattcctgtagtggtttgtatctagcatagatgcgagagcagcacctaagctctgctgcatgatgacctactaaatcgcaagtccgagcaatagagacaatccaccggatgagattgcgttgtggttggccttgtggatacatggcataggttaccttagacacccctatcaaaaagtggagccgactacgtaaagatctcttcagcatgagccagctcgtgccggcaagcctcgattaactcgcgacgggaatgcatatacgcttgcgctcaacgttcctagaatccccgagccctttgactcacgtagtgggcctactcgtgttggcgccatactaggagtacccacagtgtctcctatggaaatcaacgagttccgttacggccccataagcgcctctattttagagcaatcccaatttgcgagcgtgcaacaacctttgggtggcgctttccatggaaggaacaggggttctacaaaatgttgcccgtctctgtgaacccctttccgcacagagaagttccgaccaagcgacgcctttaacacggggctaacgggctaccctttctcccccatagtatggggtcgccattccacgccatatggtcacccaccaacgtggaaggggacttttgagccccgatcgcggacgaaaggcccgcggcttcgatacccagcccgtggggtaacgccgtagccttctaggccgggtcctcactgctctactttgtgtgcgaccataaccagtgttggcattcaccatggttttgcgccctcttccctaggtcggttgcgtacccctctggaaccccgtatggcccacctgggctgtagggcgctatacaccggtgtcctgctctaccccgggctatagggccacagcgatttgggcccggcttctcggcggtacacctccctagtactgttgtagtcccgccg

SEQ ID NO: 704561 - DNA, 859 bp, Homo sapiens
  misc_feature (601)..(601): n is a, c, g, or t
ctgatcgcagtccggaggttgaggcggaactctgagtcaggtggtccattatggctgacaattgacagagatctggtagaaagattggagaggggagagggccgcctggaggcgagtatctcatagctttgacatgcatcgcgggtatgcagatgagtccttcaaatagcaggaggcggtctcctatgatgtgtcaaggcgattatgatgtgcgcatggcttgtatggctcacatgtgagtcatgagctacatgggaagatcaagtaaaggtagattagggggtaagacgtgcaagataatatgcgtgaagatggttccagaggagtgtttgaaggttaggtatgctgatgcatctgctgggattactaggattcattcagtgtactagaggaagcggcagctagaagaaatagaagcgtattcctgatcttggtgtgggcacctctagtctctagtagccacgactcattaggaagctgattaactcattgtcggagaggatcgaaacacgaagagacaaagctaagggttgtggtacattcaacgcgtgatcagtaatggtcatgcgaaaagttattcgcaagggccccgtggcgtcgnagttgagcttaattggcatcctggaagccattggccctcgttactgttgaaccagacaaatgagagtgatttgcgcagcacgatggtgttttgatagcaaagagcctgatgttcctttctaaaaaggagataccacaatgagtggtaggcactacaatgggaacgcaatagtagggagatgggagtcaataatgcgtttagttataatggtatttattggacgtagagtcgtgccaggtgtataatattaaggaggga

SEQ ID NO: 704562 - DNA, 166 bp, Homo sapiens
  misc_feature (166)..(166): n is a, c, g, or t
cccagctgacacagaggtggtggaagactccttgaggcagcgtaaaagtcagcatgctgacaagggactttagatttaatgatgcgttttcaaggatacacacccaaacaatatgtcagcttcctttggcgtcaggtttttcccaatccttaaatttttcctgatn

SEQ ID NO: 704563 - DNA, 112 bp, Homo sapiens
ggatcctccccccttacctctcccggtcaagcagctatcatttccaggtggaagctgaccgcacagtgcacctcaacccttgtccatactgtcttgtcgtcacttccatgtg

SEQ ID NO: 704564 - DNA, 362 bp, Homo sapiens
cccttccaaattttagaaataattaacgtttgtcacgttaataaatatcaagtgtcacggaagggtctggaaggtggaatccaaggacgacgtttttcgtggtccattcgtgttggattctgtatatatttatttataagttatgtattacaaccaggacactccaaaaaacaccaacacataagtttcctgtatatatttatttataaagttatgtaattacaccagggacactccaaaacccaccctagtttccgttagacgatgacgagggttttacataaaacataaatacgatgtagaatcaccttcagacatcacattcgtgagcaaatgtgaaagagcccattacaaaaataaat

SEQ ID NO: 704565 - DNA, 898 bp, Homo sapiens
gagttctcgggtgccgccctgtcgagccggggcgagcgcccacggggggacgccgcgcacccggggtcggggctaagttctgtcccccgggtgtggggcgtggtcccccggacgccgcaggtggtgggcggaccgtagtggccgtgagttttttgggggtaaccgcccgtgagtgggtacccgcggaggagtgtctgttgccaggggcgtattcttcgcccccagttgacgataccgagtgcgcctctgtgtagcttgttgcggcatgggcggcgtggtgacggggacatagcccccgcagcttggtgctctttccccgactcttgggggaaaagtggtgctgagctctcatgcgctccctccgcccttgtgccgctcatgtcgagagagcccgagggcccccctggtggtgaaagccgggcggcccctcttcgcggcccgcaggccgaggtagtgtgggccccgtccccaggctgtgtcctctggtatgccgggctgcctagcaattggggtgtgtgtgtgtgctgtgtgtgcgtgtgtgtgtgtgcggtgtttaatttttataaaagtttttacttgagataccagtccataccctcgagctctcaccctttctacaagggtaccattcagtggtgtgaggaatattcagtaagagttatacgtggtgtctattcataagacttatatcccgcatattcatatactagagccctatcacagagcattcatcataatattccagacattttcatcaccctaaaaggaaaccctgaacccattagcagtcattccccattcctcccaccccttatctccctagatccctaggaaccacccatcctgctgtgtaattcatctattgcccacatttcatataaatggcatcataccacta

SEQ ID NO: 704566 - DNA, 458 bp, Homo sapiens
  misc_feature (385)..(385): n is a, c, g, or t
acacgcgatgacggactagggcggctgtagagatccggctgatgccacttgggcgtcagccgtggtccgatgcgactggtccgtgagctgccgagcacctcctagattgagcgggcatcgcttgcttcgaggtatcaatcgaatttctgatgcacgcgggtttcaagccggcctgtcagccacagtcaggggcccattgatggtccaccgtgatgtcgaaaggggtggatggttttatagggacgacgatcgtatcgggagctatcgctgaaagttggtgacggcgggaatcgggaaggcggcatatcgtgggggtgtttgacgcctccacttctccaccgaaggagcgatatgccgtgtccaaagataacatcatcaagctgantcagccaggaaacgtcgacgatcaactcaccgaaatcttgcgcaatggagcgcgtgctctgttggcccaggcg

SEQ ID NO: 704567 - DNA, 2481 bp, Homo sapiens
tccataaaggggttgcgggggccgcgctctcttctgggagggcagcggccaccggcgaggaacacggcgcgatgcaggttcagtgccagcagagcccagtgctggcaggcagcgccactttggtcgcccttggggcactggccttgtacgtcgcgaagccctccggctacgggaagcacacggagagcctgaagccggcggctacccgcctgccagcccgcgccgcctggttcctgcaggagctgccttccttcgcggtgcccgcggggatcctcgcccggcagcccctctccctcttcgggccacctgggacggtacttctgggcctcttctgcgtacattacttccacaggacatttgtgtactcactgctcaatcgagggaggccttatccagctatactcattctcagaggcactgccttctgcactggaaatggagtccttcaaggctactatctgatttactgtgctgaataccctgatgggtggtacacagacatacggtttagcttgggtgtcttcttatttattttgggaatgggaataaacattcatagtgactatatattgcgccagctcaggaagcctggagaaatcagctacaggattccacaaggtggcttgtttacgtatgtttctggagccaatttcctcggtgagatcattgaatggatcggctatgccctggccacttggtccctcccagcacttgcatttgcatttttctcactttgtttccttgggctgcgagcttttcaccaccataggttctacctcaagatgtttgaggactaccccaaatctcggaaagcccttattccattcatcttttaaaggaaccaaattaaaaaggagcagagctcccacaatgctgatgaaaactgtcaagctgctgaaactgtaattttcatgatataatagtcatatatatatatatatatatatatatatatatatatatgtatatatgtaatagtaggtctcctggcgttctgccagctggcctggggattctgagtggtgtctgcttagagtttactcctacccttccagggacccctatcctgatccccaactgaagcttcaaaaagccacttttccaaatggcgacagttgcttcttagctattgctctgagaaagtacaaacttctcctatgtctttcaccgggcaatccaagtacatgtggcttcatacccactccctgtcaatgcaggacaactctgtaatcaagaattttttgacttgaaggcagtacttatagaccttattaaaggtatgcattttatacatgtaacagagtagcagaaatttaaactctgaagccacaaagacccagagcaaacccactcccaaatgaaaaccccagtcatggcttcctttttcttggttaattaggaaagatgagaaattattaggtagaccttgaatacaggagccctctcctcatagtgctgaaaagatactgatgcattgacctcatttcaaatttgtgcagtgtcttagttgatgagtgcctctgttttccagaagatttcacaatccccggaaaactggtatggctattcttgaaggccaggttttaataaccacaaacaaaaaggcatgaacctgggtggcttatgagagagtagagaacaacatgaccctggatggctactaagaggatagagaacagttttacaatagacattgcaaactctcatgtttttggaaactggtggcaatatccaaataatgagtagtgtaaaacaaagagaattaatgatgaggttacatgctgcttgcctccaccagatgtccacaacaatatgaagtacagcagaagccccaagcaactttcctttcctggagcttcttccttgtagttctcaggacctgttcaagaaggtgtctcctaggggcagcctgaatgcctccctcaaaggacctgcaggcagagactgaaaattgcagacagaggggcacgtctgggcagaaaacctgttttgtttggctcagacatatagtttttttttttttacaaagtttcaaaaacttaaaaatcaggagattccttcataaaactctagcattctagtttcatttaaaaagttggaggatctgaacatacagagcccacatttccacaccagaactggaactacgtagctagtaagcatttgagtttgcaaactcttgtgaaggggtcaccccagcatgagtgctgagatatggactctctaaggaaggggccgaacgcttgtaattggaatacatggaaatatttgtcttctcaggcctatgtttgcggaatgcattgtcaatatttagcaaactgttttgacaaatgagcaccagtggtactaagcacagaaactcactatataagtcacataggaaacttgaaaggtctgaggatgatgtagattactgaaaaatacaaattgcaatcatataaataagtgtttttgttgttcattaaatacctttaaatcatg

SEQ ID NO: 704568 - DNA, 398 bp, Homo sapiens
ggtcgactcgctccatagccatttctccataactcccaacatggggcttaacgccaacactagtcgagttgccggggattttgaggtgctggaaatcgaaggcaaaacgcgctgcggctgcgcaggaaaaatcactgctggcggcgacggtgagtaaacgttggggatcaacctgcggtgcgaaaagaggccgtatttttcttcaaccagaagcgaaggataagactcgacccgctgcaagaaccacccggcaagcagacctttcttccatcacctggcgactctttcaaagcggccccattgcggggcacctctgttcaggacgcgggtttctcgccataccaacgtggcgtatacacccattcgccgcccccggcccgtgggaatacacgtcgacg

SEQ ID NO: 704569 - DNA, 218 bp, Homo sapiens
  misc_feature (33)..(33): n is a, c, g, or t
taaagggggaaaaaaaaaaggggacccctttgntttcccggggccccttccaaaaccttccccccccaaatttgggggttggggttccggggtggggggtttcccagggtaagggaaaccaaacggggcccccccccttaagagggaggggattttttttccccctggggggcccccccggcgccttttattttccctttttgggggggattttttta

SEQ ID NO: 704570 - DNA, 120 bp, Homo sapiens
atagattcctagttttcctaaacttcctcatagtcaacaatgatcaaaccaaactgacagcggtagcacgagtgcgggcagcagcagccccgtgggctcggagatagacaaatgcatgga

SEQ ID NO: 704571 - DNA, 334 bp, Homo sapiens
atctcctgtatcttcaaaataggaaactacgttccccagaacgacattatttatgcctccctaataaggatattctacttatgacagatgaaaaggaaccagcgagtatatgcgaatactctgactttcttagtctgtgaccaggaatgtagaaatatcatctagagtggaataggcacttacatgtactcatagtgctgaacctacttctcaatgcctcttgtaaaggtaagtgggtctagagatcagcatattaaacagtcacaaaatgtcactgattcctacagtgtatacagaggtcttcctggtgacatcgttaagttaacatggcaac

SEQ ID NO: 704572 - DNA, 1696 bp, Homo sapiens
  misc_feature (38)..(38): n is a, c, g, or t
  misc_feature (670)..(670): n is a, c, g, or t
tctccttctttgcgttgccttcgttggtgtttcgttgncgttctccactacgcaggggagggcgttggtcttttcacagcaccgtacactgttggttggtaggtagtgtgtgtcgatcccaccagccttgtgcttcgtgtggggccagctctgccgctacggagtctttatcaattcgtcccgcttgtctgctgtgctcctctgggggactgactccggtcggcagatgtggtgatctctcccgttgtgggcccccccctgtttgtttgttcggtacgtacttctcgcggcgttttgtttttttgtgtattgcttgtcgagccaaacaacatgtatggtgtgttaacacaagtttcgggcgtctttcgccccccgcgctccccccctcggtagtgtgccgccgggttcttgctcttttgatcccctcggtctgttcgagccacccaacggggcttcgtgggataagtttattatatagttggcgcacaaatattgatttctttccgcgggtatttcacgtcaggacagaatatattctgtattgcgcccccttcccccccgggggtgtttctacaaaagcgctctgtgtcgcaccaaggcggtgtgggaagttgctcgtgtgagaagactgtctctctcgagaccctctttccgctgcttgaagttgatngtataactgcgcccaccacctcctttcggggcccccttgtccccccacaataagtgttggcccttgggggggagctataacacacacggcggcgtgtatgtagacccacccaacccggttggaccccccaaacacctcttataacacgtcttgccgtctttgtttaatatcccctctatacaagactttctcccttccactgctcctccccacagatgtagagagacccttgtgtccaccacacatgatacactccccccccccatatttctccccccttagccagcttctgtctcccatcatttggaccccctctaatagcccccaacacatgtggcgtcgcccacatgtctcacacctgttctcccacaggtgttacgagaaacattttcactggcgcacataacaacatgtgtccacacacaaaagggttacacacacaaggtcacagccgttatacacataccccgtgtgtttctcttgtttatatacacgcccccacatatattcattttatcccccgctgtctaatgtgtctcctatcaagagaagacacaatttttctctcttctagaagaaattgtctcacaatattgtagactgagtagtctctgtgtatataacaaacaaatctcttgtggtgtgtgtatacacttgcctctccgcatctcttttttcatctgtggtcgagggacacaccctcacgcgagattgacccctctcttgtgtgtctaatgagatgttcgctcgttcgaccacacctcttttctctgaatatgggcctaagtaccacaattcttgggagacacacggggttatccgtgataacactcgaaaggttctgaccacgtaggcttcttagagctcgccctcaattcttaaggtagtcacatgctgtgcacattttttttttcacttggtgtacctgtgatttgaacttgtctcaaataatttggaagtttttctgaaaaatggagccagtcaatgcagcatcaacctattaaaatacattttaagccctcttta

SEQ ID NO: 704573 - DNA, 782 bp, Homo sapiens
gtcatagagcagttcgtgtggcgcgcgttcccaacgcactttccgtgcacatgatcatagcgtgtctctgtagtgcgatcctgtaacctgagtagtgcttgatgctcatgaataatgagaccgcctgggagagaatcgaagaggtttctgaagtagaagtccacgagtcgagtactgaggggtcagtcatctggagtctagtcaagcaaagagtccacagcggaggctcggcagtatcgaaagatagtcgccccgcgcttgaagaggggaagccctgcatcaagtgtaggcgccagcacaatccgggtggaataatgtcaatcactgggcggaactccacaaggtcacacactatacaattcacctctttctggaaaaccaggaagtgagtgctttctggtgacgcaggtgaacggtgattatctggatgactaggacagtgctctgtaatggaccctactgggtgacagagcatggtgagggtgccggtacaaacactcttccactggaggtactgcatgtctgtcacaggacgaacactatggtcgacctaatcaagttgggccaaaaagaggtgcaatggcaatggcccaacgcaaggtcagaacaactacttggaaaagcacatggaacggcatctatcatggaacgcccaagatgagttgtagaaaggcaagaagcccacaatgcagagactgatacaatcttagaaggctctgtgccactgttaaacgcacaatgttcacagaacatctgtatgcatggctcaccttgaggaatcc

SEQ ID NO: 704574 - DNA, 158 bp, Homo sapiens
gggactataacttccactttacaaatgcggcaacggacgctcagagggccccagatcacaggcaagaggcacacgatcagtagatggctaactcatctactatgtcaatgacgacacaccaagctgaacggacctagaacctttggggcctgacacga

SEQ ID NO: 704575 - DNA, 128 bp, Homo sapiens
tgtactgggagcctggatcttgcctccagtattagccaggtggacagacccccagataatcacgtctgactcagagttcccgctacagtggaaactggatccctggccctgaggccggacagcctgca

SEQ ID NO: 704576 - DNA, 186 bp, Homo sapiens
ctctcgtgctgctatcaaaacatacttctagtgcagagtctgagagaagttataaaaagtcaaaaaagcatagaggaacagtaagaagaggagacataaagtctgactctccagaatccgatgctgagcgagagaaggatagacaagaaaaagatcgggaaagtgaaaatgacagaactagacaaa

SEQ ID NO: 704577 - DNA, 784 bp, Homo sapiens
agtctagctttgtaccaggctgcagtgcagtagtgccatctcagctcactgcaacctctgcctcccgggttcaagcgattgtcctgcctcagcctcccgagtagctgggattacagccacatgccaccacacccagctaatgtttgtatttttagtagatacggggtttcatcatgttgcccaggatgctcttaatttcctgacctcgtgatccgcccatctcggcctcccaaaatgctgggattacaggcatgagccaccagaaccggacatgctttgcttaaaagctaaatattttaggcttgagtgccattaggctctgtaacaactacttaattctgcttttgtaattctataacacccattgataatacataaacacatgagcatgaatgagtctcagcaaaaatttatccacataaacaggctatccacccatgaagctatagctggctgacccctagattaaacaatccattgcattcaatcagaagtaataggatcttatatatgtaaaccatttcgatcccattttcctgagtttgatattcttttattgtcatcccgattttctgtttaccttattatactgatgactgaaacactcatatctaacgctgtttttggggatgagatactgttgtttaataatatacacgcgcccaatttcctgatcataaaacccattacacataatcgtatataagatagtattggatcgtagtcacgcaatattcaatgccttgttattatatacccgccccacatacgtaattctttttca

SEQ ID NO: 704578 - DNA, 242 bp, Homo sapiens
  misc_feature (20)..(20): n is a, c, g, or t
  misc_feature (158)..(158): n is a, c, g, or t
  misc_feature (172)..(172): n is a, c, g, or t
  misc_feature (197)..(197): n is a, c, g, or t
  misc_feature (206)..(206): n is a, c, g, or t
  misc_feature (236)..(236): n is a, c, g, or t
gcaagccggtgggcaagatncggcgcccagtgaaggtgtaccctaacggcgccgaggacgagtcggccgaggccttcccctggagttcaagagggagctgactggcagcgactccgggagggagatggcccgacggcctgctgatgacggcgcagggnccaggccgacctgnagcacaagctgtggtggcggccganaaaatgacnagggccctacaggatggagactttcgtggnagccgc

SEQ ID NO: 704579 - DNA, 223 bp, Homo sapiens
aagggagatgagccggtacctcataggtcgcaggcacactagatgataatatactcttttactaccccatgtttcctttctatctcaaacccatctcaagtcaacaattagttatagagcatctactaaagagcaggtgcagctgagaccattcagttttcactccctgaccccaggaccctggctccatccccctatctcgttttcccctgcgaacctatga

SEQ ID NO: 704580 - DNA, 1129 bp, Homo sapiens
tccaaactcgtttaagtatttaaacatctgagccaaagcagatagaagttattgtataattgttaatcactttgcaaatcaggggctatcaaattacctcatattggcattgctaggattcatacaactctatatctgtaatatcaaagtgtataagcagtataccatttagggctgtatatgatccagtcagtttgcattttgagcaacagctctatgagctcgtaaagtaactgcatggttattatagttatacatcgtacatataggagaaccttcacattaccacaaggaatatattccaaaaccattataacgtcgcaatatctaagtttgtgaaactactagggcatgactacacgtcaaggtgtaattaacaggaaatttacgaacatgtaaaatgtgcctctaaccagagtactcatggcaaatacctgggtactcaacgtaggcaagcatgcaaaaacacaaaactgaggttcacagctgttcagcccattcatcattcctcaagataaacttggccttacactatcagggaccgctccaccaactttcgtggaaagttttccaaaactatacgtgccattcggaaacaatggtagaacgtctaataaattgcgggtcagtgcaggcaacatcagcagcaactagacatattgaaaaaaacacgatagacacctattcaaaacatgcacgagaaatgcaccagggagatcaggcctaaaagacaaacgcccgacagaggcagacgcagacgagcaaccaagacaagcccacccggcagatgaaacccgggagaagtcccaccgacacacaagacaatagactcacggaaaaacaacagcacacaaatcaaaaaaaacgacaggcccaaaaataagtcaaaaaagcagcagcaaaacacaagaacgaggacagaacccaataacgaccacagacgagggaacgccaacgaggacgagaacacgacaaaaacaaaccaagggcaacaaccaccccagcacaaagaccccagaagagcaaaaaagacaaatagtaaagaaacacatcaaagagcgcccacaacgaatgatacaaacgccgacacacaaaacgcagacatcaagcgcaatcagaagacagccca

SEQ ID NO: 704581 - DNA, 459 bp, Homo sapiens
aaggcccaggagaacccggtgagtccgtccagttgaggcagaggcaataacctcccattgctcggccctgcgcctgccccagtcctggcagggggcaccggctcaggaacatgcggcctcctggcatttctcggtatttaactgtctcgctgtcttatccgagtcccccccccccccttttttttgagagggagttttgttctttttgcccaggctagcgtgcgatggcatgatctcagctcaccacaacctccgctccctggcttcaaacaattctactgcctcactctccagagtagttgggagtacaggcatggtggcagatgcctgtaatcccagctactcaggaggctgaggcaggagaattgcttgaacccgggaagcggaggttgcagtgagccgagattgcatcactgcatgccaggctgggcaacggagctagactccaaatgacaaaaa

SEQ ID NO: 704582 - DNA, 351 bp, Homo sapiens
  misc_feature (90)..(90): n is a, c, g, or t
  misc_feature (103)..(103): n is a, c, g, or t
  misc_feature (211)..(211): n is a, c, g, or t
  misc_feature (283)..(283): n is a, c, g, or t
tcggggcgggggcgtggtcaagcaccacattgccaatgccaacctcaaggccgggagtttgatggccctgacccaggggcccgaccagangaggctgtctctnggggcaagatccgggtggaggcacagcccgtcaaggtctatgctgacgcctccctggtcttacccccggcttgtggctgaaacctttgcccagaagatggatgccctnacgaataaaaagaacgaggactgaaaaaaagcggtcccaggaaggtcttacccccttttcaatttattaatnggcagacccagcccctccccgactttttgggcagcaacgtctctagaataacatggaatctgaagtca

SEQ ID NO: 704583 - DNA, 155 bp, Homo sapiens
gcgctctcagtcatgctctgcctatgggtcatttcttcgggaatcactgtgatcatgatatcttcattaccctgcggaccaccatgttcagtgtgctttcccttttaatgacgtcgctgacatcattggctggagaccacggactgtccattgat

SEQ ID NO: 704584 - DNA, 727 bp, Homo sapiens
ataggtatggcccccccttccccctcccagtactagttaatttgagtaatgtatgtcagaaaagtgatagacgtattttttattggttgtttcaacaaaaaaattttggtgtgtgtgtacattatattcatacgtatctatattttatgtgggtgtgtgaaaaaacgaaagggactagtattggtggcaaggcacatgggaaaacaagcaataaatgtggagaaaatgtgtgaacacgcggtgaccccgtgggtcacacaataggacagaagtcattgggggaacacacctaagggtagagtttaggaaggaaaaccgacctcacacactttttataggggggaggcaaaggcatggacgcaggggcagcggacaacacaggcagtggtaaaaagagatcacaacagaaacaaacgggggaacgaccaccataggaggagacgcaggaaagggaatgggcgaccaccacgcccaaacgaaccagaagatacagcttaagaacacacaaattacggcccacaacagcggggctcacaagacaaacggacagactaaaaacacacagagcccatcatattaacaacaagcacccacccacataggagcaaacgttatgccatagtccacacacacagctggagcaagacaacacaaatcaggtaccaacaccaaaaacgacggtggcggccacgcagcggccaccctcgtgacgagcaagcccactgtg

SEQ ID NO: 704585 - DNA, 456 bp, Homo sapiens
gcacgaggctgcggcggcgcacacaatgagctaattttttcttttttttcctttgtagagacagggtttgccgtgttgctcaggctgatctcaagcgcctaggctcaagcaatcctcctgcctcagtctcccaaagtgctgggattacaggcattatccaccacactagaacaagaaattagagtagggactctgccagggatcgtagctcatgcctgtaatcctagcactttgggaagccaaagcagaaggataacttcaggccgggagtttgagaccagtctgggcaacatagcaaaaccccatctctacaaaaaatttaaaaatcagctgggcatgatggtacatgcctattgtcctagctactcaggagactgaagtgggacgaccgcttgggcccaggaggttgaggctgcagtgagctgtgatcgcacaatttcactccagcctgggcaa

SEQ ID NO: 704586 - DNA, 456 bp, Homo sapiens
cctgcgctttgatagttcccgcctgctacatcccttgactttggcttcagctgtcgcgtgccggacattcgcctgagctcgtcatgtactagaacaaccctggcgacatggtgacaccctgtctccactaaaatacaaaaaattagccaggtgtggcggtgtgcgcctgtaagacccggctactcaggaggctgaggcgggagaattgcttgaacccgggaggcggaggttgcagttagctgagattgcgccactggacgacagagcgagactcagtctcaaaaaaactatagaactttaacaaaataaaacgaatccaaccccggcagggcgtggaggctcacacctgatatccagcacttagggaggccacggctggaggattgcttgagatcaggagttcaagaccagactgggccacatagttagaccttgtctctctcattaaaaatataa

SEQ ID NO: 704587 - DNA, 682 bp, Homo sapiens
  misc_feature (108)..(108): n is a, c, g, or t
  misc_feature (125)..(125): n is a, c, g, or t
  misc_feature (179)..(179): n is a, c, g, or t
  misc_feature (209)..(209): n is a, c, g, or t
  misc_feature (256)..(256): n is a, c, g, or t
  misc_feature (273)..(273): n is a, c, g, or t
  misc_feature (276)..(276): n is a, c, g, or t
  misc_feature (283)..(283): n is a, c, g, or t
  misc_feature (286)..(286): n is a, c, g, or t
  misc_feature (294)..(294): n is a, c, g, or t
  misc_feature (297)..(297): n is a, c, g, or t
  misc_feature (361)..(361): n is a, c, g, or t
  misc_feature (378)..(378): n is a, c, g, or t
  misc_feature (413)..(413): n is a, c, g, or t
  misc_feature (416)..(416): n is a, c, g, or t
  misc_feature (465)..(465): n is a, c, g, or t
  misc_feature (495)..(495): n is a, c, g, or t
  misc_feature (501)..(501): n is a, c, g, or t
  misc_feature (523)..(523): n is a, c, g, or t
  misc_feature (528)..(528): n is a, c, g, or t
  misc_feature (558)..(558): n is a, c, g, or t
  misc_feature (592)..(592): n is a, c, g, or t
  misc_feature (613)..(613): n is a, c, g, or t
  misc_feature (652)..(652): n is a, c, g, or t
tcacggtttcaatggacacttttattgtttacttaatggatcatcaattttgtctcactacctacaaatggaatttcatcttgtttccatgcggagtagtgaaaagtnacaaagctaatcataanaacctacatcaaaagagaactaagccaacactgcccactttctttttaacaggnaaaatataaatatatgccctctagaatgcncaatggtttagtcactaaaaaattcaaatggggtcttgaagaatgtntgccaatccagggggcngtnaagaggngcngggaggcngtnccactgtttaagggttcctggcactgcatctcttggccactagctgaatcttgacatggaaggntttagctaatgccaagnggggaggcagaaaatgctaagttgacttaggggcngtncacaggaactaaaaggcagggaagttctaaatattgctgagagcatccnccccaggaaggactttaccttccaggagcnccaaantggcaccacccccagtgctcanatggntgaatttatcctccgtgttccatttggcanagcaagtggcagtttctccaccacctatgatggngatgcagcccctagaagtggntttcaccacctcatccatgagagctttggttccccgggnaaaagcttcccatttaaatacccccacagg

SEQ ID NO: 704588 - DNA, 140 bp, Homo sapiens
tacgcctgtagtcccagccctttgggaggccaaggtggggggatctcttcaggttaggcattcaagccaaggttgggcaaaatagcaagacccaatatgcaccactccagtgtgggtgatagtacaagagcgtgtctcaa

SEQ ID NO: 704589 - DNA, 116 bp, Homo sapiens
tatattttattttattattttttagagatggagtcttgctgcgacacccaggctggcagtgcaatggcgcaatctcggctctccagtcctgggtgacacagtgagaccctgccacc

SEQ ID NO: 704590 - DNA, 296 bp, Homo sapiens
cctaagatcacactatctccactttctcatccctgttgaagattatcgtccgtgtattacaatgtgattggagctgtgacactctggaagctgagacgataaccatgctgacatcagcacagactatcctcgtaacattcccatgaatcccatgtgcatttaacggttcgcggataagaaggcacatgatcatgagggctcagatctgaagatccctgttgcctccaaccgtcgtttctgtctgggcacggccaatttccgatctgctaccagtctctatcaggctgggagattac

SEQ ID NO: 704591 - DNA, 128 bp, Homo sapiens
attgatagggtgatagctcggccatagggtgtgaggagtcagttatatgtttgggatttttaggtagtgggtgttgagcttgaacgctttcttaattggtggctgcttttaggcctatcaaaagacga

SEQ ID NO: 704592 - DNA, 400 bp, Homo sapiens
gaccagcccagagacacgagacactgtggcagactgcacggacctctgaccacgccaggctatgcatgacggaacagatatcctatgattctccttactggttaataaaccttaatcaagtcttcagcctgacaaggatcactatcagctccagtggcaaggagacaagtccttcatgaatgctctgccttcactccctgaggcagagctagagtggctgccatgcttctgagctcagccagcatccatagagagagtgtgatacaggctccatttattgcagcacccacttctaaactctatgacagtattcttggcactctgctatgcggatcctgagatgacaatgtcacatagactcccctgtaagccttatccccacatacatgctatcatggat

SEQ ID NO: 704593 - DNA, 127 bp, Homo sapiens
ctttgcaagcgaaaacccacctgattggctgttgtagcagtatcaatagtgattctgaacctatcccctcgacccggggtgctgccactgatactcaggctacgggcaagtttgccgctccagccca

SEQ ID NO: 704594 - DNA, 902 bp, Homo sapiens
gccaacaagggctccgccagggggctctccctaagccctgtgggaagcccaacctctggcacatagagaaactgttaatcacagacgttctctagacaccggagaacacggggttaggcaagccgcgtgtaagacgcggggggccccgaccccacaatttcggcagcaaacctcctccaggtgggaccacaaaagacggggcacgcacccgccccgtgggtacagtgtccggggacctcagactacgcgatcacatctctctgggaccacaaataggcagaactgcctcagtgaccggcgggcggcagttacatctacctccctggagtcccgctaatttttggagaaagcggccgcgagcaattgcccgcccgggtactatgccacacaacttcgcgggcatttctataggttcgcgagtgaagaagaacaccagggaggcctcgcacataaaacaatgggcgtccaccaacagcacacacgcctactggtgcccacaataggacatcgtttttatgtgggggcatacacagtatgtcgcgaaaaaaagcttcggtagttagcgcactgcccccgggttttgctgttgttacataaacaatctagggcgaactccgccaccctgctggttctcctccagcgccaggggagacgcaacttggctcgtccacaggggccctcgatagcgccactatccccagcattgcacgcctgttcccacgggatcttggcccccggaggagacacatttaccctccccctgggggcaacaacgacttgtaatgagcgcaccacaccgcaaatcatcgagagggggacagaaccagcgacctagttcttacctttgccgccgactcgatgaattttaaaccggaaaaaaaagttttccccccacaaaaaca

SEQ ID NO: 704595 - DNA, 123 bp, Homo sapiens
cctcgataataacagcgttctcatcccagatgacgttcctcaatcccaggtgacgttccatcatcccagtgacgttcctcatcccagtgacgttcctcatcccaggtaacggttccatcaccc

SEQ ID NO: 704596 - DNA, 220 bp, Homo sapiens
  misc_feature (13)..(13): n is a, c, g, or t
tataggcgctagngttatattgcaatacgtgccattttatatcaggaacttgagcatctgcagatatggtatcggagggcggtcctggaaccaagcatccacggatactgaggggtgtcatttcatgaagtgtagatcatggtattcagagatggtaaatgaaaaaaatatagaaactatttagtttgggtagattttttttctgacaatgtgaccaggt

SEQ ID NO: 704597 - DNA, 474 bp, Homo sapiens
ctagaggatcattactgggtgatgcatgtgggtggagaggtcctctgaaattacaccatcagaactcagaaagggacttctttggaagtagggtctttgtggatggaattaagggcaggtctactggagcagtggtggcctaaatcctatgactgattgtctcatgaaaaaaaggagaggccgggcgcggtggctcgtgcctgtaatcccagcactttgggaggctgagacggggggatcatgaggtcaggagatcgagaccatcctggctaacacggtgaaaccccgtctctactaaacaaaatacaaaaattagccgggcgtggtggcctgcgcctgtaatcccagctacccaggaggctgaggcaggagaatcgctggaacccgggaggtagaggctgcagtgagccgagatcgcgccactgcactccagcctgggcgacagagcgagagttcgtctgaacaccacacacc

SEQ ID NO: 704598 - DNA, 1199 bp, Homo sapiens
  misc_feature (1199)..(1199): n is a, c, g, or t
gccgctgtccctggcgtgtgccaacctgaagctgccccgcctgctcctgtgtcctgacatgctgcgcctgcgctctgctgtgcctggcctgtggcctgccctgtgtgctgctgcctgactgcccccgatggacggatggaccactgtcctggtgcttgagtgaaaatgcaacttctgctgtgagtgcgctgtgctgggccacaaatgccccttgtgttgtgtgccaccttgcagagggtctcttggccccgctgacgtattgccaaatgcctgctggtgaaggcttgaagggtgcagacatgtgttcctgaggatcatgtgtttggccaacgtgtggactgccatcggagggacgtcttgaccttggcccaagcaggtactgtgcagtgctgctggctagtccgcaccaatcagacgttcttcatgtgaactgcgatggacagcgtgtcttccgcccaaagggcaatatagcatgcttggcatgacgatggcttgagtgacattcggtgaacttggcttgaatgaatggcgcactgtggcccctgtgctgccaccaaccctgccctgaactggctgcagcctggcagaagtccttggttggatgtccacgcgcaggttggcatggtcatcgggacttcttcacaggaccgtggagctcggacctctgaccaaggcagatttcttgcagtgcagccaggaggcccatcggattgagcataccaatttgcggatcactttcccagacaggttgaccgtgttctccaaaataccaggctcgacaaagatgggggttggtcctctttcaagaagtttgatcgaagggcggaacaacttttgcaaggggcagggtcaccaatggagaacctgctggaggtttatcagaaaaaacctgttggcccctttgtcagttgccgtccaaccgagggagacaagtccctgaagcattccgcgcgctgacatccaggacttcccattccttggcaggcctcttgcccccacagatgtgttctcttgagctcattcaaccggccactttggaccacctctcacagagcagaggccgggaagttccagtgggcagcagcctgggccacttaactcagcggggcgccctctggagcacaccgggactccccagtttgcccggaacaagagatgtccggagggccaacacccgggagcgggcgacgacaaccagn

SEQ ID NO: 704599 - DNA, 162 bp, Homo sapiens
gaggatccctgccgttctgttctgctgtggctgtaggagggcaggtggagctgcaggtggttctcccaagcctgtcctctgcaggtggggaagtgctccttggtgctctgctctatatggacactgacctgggaagacgtgtgaggaccctgctgatgcttg

SEQ ID NO: 704600 - DNA, 382 bp, Homo sapiens
gtgattcccatgccttaacttcttgactacctggattacaggtctgcgccactacaccgagctaatacttgtatttgtaggacggggtttcatcatgtaggccactctgatctcaaactcctgacctcaaatgattcaccagcctcggactcccaaagtgctgggattacatgtgtgaatcaccatgccatggctgtattgatgtaatttattctttatttcgaaattaatgtacacccagcctatgatagtatagggactaacagactcactacctatgcaactgtcatccagtgtgctatctagttcacgtcccttccttctctgttccttgacatgtctagtcatttccatgcatgtttctgtacctttaccacatatt

SEQ ID NO: 704601 - DNA, 136 bp, Homo sapiens
actctagagggtcaaccgctgcttacaaccactccccaagtgcttagcgcgctgcctctgcctggtctaatactccgccacacagatgcacacttaagcctgggtcacaccacttgttttcccctccaaatccagt

SEQ ID NO: 704602 - DNA, 231 bp, Homo sapiens
  misc_feature (18)..(18): n is a, c, g, or t
  misc_feature (154)..(154): n is a, c, g, or t
atattatgcaggataggntcatgtctgtatcccatgtttgataggcccaggtggtggatccttgaggccaggagtttgagaccagcctgggaaacatagtgagaccatctctacaaaaattagccatggcccggtgcggtggctcacgcctgtnatcctagcagtttgggaggccaaggtgggcagatcacaagtcaggcgtacaagaccagcctgaccagtatggcgaaa

SEQ ID NO: 704603 - DNA, 143 bp, Homo sapiens; identical to SEQ ID NO: 631885

SEQ ID NO: 704604 - DNA, 493 bp, Homo sapiens
tgtatcacaaaaaagctgcaggattgttagtgattttaaaatctgttccatttttaactttcataaactaaggagaatgttgtaaaattgaagtacattgtactcacccttctttaattggaaccagtgcaatgggttaagatgttttaagcattttaaaatatagggtcgtatctgtaagaaaacagaaatcaacatagatctaaactctgtctattctgttaaaatcaaagccaatcatatttcctcaaaagtagggtactatgttcctaactcttctccccttcaactcactgctgctatagcaaagttacagctgcaacaactgacccaagtcattttcagtggctcagtatttgctaagtaaacagttaaataatttttcctatgcttatcagtgcctggcatatgtaagtgctgttagctgcatcatcatcttcatcatcaccatcatcgtcgccctcattatgcaattttatatttactgctggcc

SEQ ID NO: 704605 - DNA, 306 bp, Homo sapiens
tcagcgttggtatgtagggcttctagaatgtcgcaggtacacctgctagggccagtcagttcagttaggtcaggcccggttgtcttccctgccgacggtctcgggtcccggcaagctcagaaggccttgatgctgtctggagtagagtcgctcgttccggtctcgagagctgagcctaagtattgttcccggttggtcagggtgggtcctgggccaaggacacaggcacagagacagcactgtctccgcgggagtgagagtgagacgagggagaatagagcgctgtgcgcacgcagtgcacctggc

SEQ ID NO: 704606 - DNA, 115 bp, Homo sapiens
agccgaagtggtgctagcataccgtatgtggatattgtgtattagattaactctatcatcttgcattgttcggtttgctgtctgtcttgtatcttttctccttatctgtctcttt

SEQ ID NO: 704607 - DNA, 203 bp, Homo sapiens
ttttggtggagatggcgtttcgccacgttggccaggatggtcttgatctcttgacgttgtgatcttgcccacctaagcctcccagagccccccccccccaggagttaacctccatgccaggacacggccatttcttttgttagatttgttcgtaaatattttattcgttttgatactattatcaataaaaatgttttccttcg

SEQ ID NO: 704608 - DNA, 88 bp, Homo sapiens
tgaagaactggtggctgaagcacataactctgcgccctgctagaaatgccatacaggacactgtgagggaacagaccagagtttcacg

SEQ ID NO: 704609 - DNA, 133 bp, Homo sapiens
agatagggcaagggcccgagcagggggatgaaggcgtcgcggatgcccttcaaattcagtgcaaaaacgtgctgaggatccgcggcgaaggatgaaccaccacaagtaccgaagctgtgaagagacgcgttcc

SEQ ID NO: 704610 - DNA, 600 bp, Homo sapiens
  misc_feature (491)..(491): n is a, c, g, or t
  misc_feature (493)..(493): n is a, c, g, or t
gctgaggtgatctagaggatcccgttgagcaagcggggaacaggcgatacctgaccaatcgtgatcctagacatgaagcagggaggggaggcgaaaaattacgaagagatggcaaaagtggagaagctcaaaccattagaggtagagctgcgacgcctagaagacctttcagaatctatggttaatgatttggcctacatgaagaagagagaagaggagatgcgtgataccaacgagtcaacaaacactcgggtcctatacttcagcatctttccaaggtttggtctcatgggactagctaccgggcaggtcttctaccggcgacgcttcttcaaggccaagaaatggatggagtaaggaaggaggcatattctcctcccacctggtacctcagccagcagaacatcgcggggacgtgccgggcctaaggcatcctaccaacagcaccatcaaggcacgtgggagctggctggccagaacggatctcttgngnggtgggaggacatggggtaccacctaaacccaacaagtcaatgagggacttctttttaatgcggtaggattgcgactggttctgcaacaataggtctattattagag

SEQ ID NO: 704611 - DNA, 1346 bp, Homo sapiens
agcggaggttctcttacatcgaccgcctaagagtctgcgctgtaagaagcaacaacactctcctcttagtctccgccatcagctcggcagtcgcgaatggctagcaaccatgtcgtgagtgcatctccatccacgttggccaggctggatgtccagcattggcaagtgcctgctgggagctctactgcctggaacacggacatccagcccgatggccatgatgccaagtgagccaagagcactgggggaggagatgattccgtgcagacagcgcttcttcacgatgacgacagggggctggctagatgcaatgtgccccgcgggcacgctgttgctgatacgacttgggagacccatgatggtcccttcgagtgacaccgttcagccactatggcgaccgtagccggccaggcctcctatgccgacccgtggaggcaatcttgatcccacagcgtgcagagcagcaagcaattggctgcccaatttaaccttaatgacgcacgaaggggctacctaaccaacacatgttggtcgaacggtaggaattcagttggaccctccgctgtttgggacgctgacactaactgccaacgccttgggcccgaaccagattggcacggggtcgtcaccccgtggcactatctatgagggacttctatcccagcgagacgtagtctgggtgcgcgcggcacacatagtgataccctgcgagttacccacacgttacgactgggcagtccatttgggacaactgatactccattcgcaatttcgcaatctcacttgctgccaacaggcaaaagcatcccacaaagcctcattggcagagcctatacatgccctacggttatcaagccgcccccggtggaggacgccgcccaacaggtaagcacccccgacccacgcgcagctgcagcgcggctccagacacgccccgcccttaagcaaacgacctgccgcaaattgcacacatgcgagcaccaaggaactaaaacagaccacgaacccccttgggacagagcacctgcgcctggacaccatggcacgcccccattcaaacaaggagagtaaggaacacacaatcggaaccgagcacgcaagaacctaactagaaaacacggacccaaggatcaacagcgacgacaaaccagccactcccggagacacaacatcagaaccaggcccggtagccagaaccgccccaacgagcactgaaacagcacccgccacaatatagcgggaagtcaaccccaacgccgttgcaccgaaccaacgggagcggctcaccacgcccacatacacgcgtaggcacaccccgccgcgcacagcaaccgcacaaaccaacc

SEQ ID NO: 704612 - DNA, 742 bp, Homo sapiens
  misc_feature (643)..(643): n is a, c, g, or t
ggcaggtctgtattgccataataagtcacatcatagacactgctggtcataatacactgctgtacataccatagggaaaaacgctgccaatcttaactaagatgctgcaactgtacagctgcttccaatcagagatgttcacgtgtgaaaaactgtgctacttacaatctatgaaagctggtgttatcccacttggcaggtaaggaaactgaggtcctgtgagtgaagtgacctcatgatcacacaacaggagatggcagggctgggattcaaacccgggagtgtgtgctgtcacataccacactctcactgtctgggtccaagtcccaggaagctcgagactgtgagttttctcccttgctcacctggagagagtacgggcacctgtgcctatgtggagggttccagccccagacaggcccctccgctgtccacacactgtgaggagaagcgggctccctttcaggctcatctgctcactgtccgcattctcctggcagagctgaggtctgagagatctggactccaacccaagggccctctcttgttattcaggaggtgtgcacagctagggagggacctggggccttgtgccacacctttctaggacccgtgatcaccacaccctaagcgggggcccggncccctgagcacccctcacgtgacccagcctcggctgtgcaggctactgccatggggtggtttctgggcacaggcagggctcaggcgagacagggacctg

SEQ ID NO: 704613 - DNA, 221 bp, Homo sapiens
tcgatagcgcggcgcctgccgatctgatctttgtcgacctctataccgatgtcggcccctccagtgcccacctggcctggcgcttcctggaaaactgccagggcaagctcaaccgcggcggctggctgatgatcaaccagtggagcgccaccgacggcaagcccctgggcgccgcactgctgcgcggcctgttccgccatcattactgggagtgcccggtg

SEQ ID NO: 704614 - DNA, 1612 bp, Homo sapiens
  misc_feature (717)..(717): n is a, c, g, or t
  misc_feature (999)..(999): n is a, c, g, or t
ccgccgttcctagcggtaccggcgattgtcttcgtgcgcgggtcagacacaatggagaggagaggagaactcgctccgacactgtgtcaatgcacgaactggttgccggcacagtgcgtgcatacagccgtggttatgctggtgggacgacacggcttgcccgtagcgccggtagatttgcgcgtatccgatgcgctgcgggccgactcctcagcaaaaacaccagggtgcgctccacttggattgtggacagtgcgtgccaggacacaggacgtctcgtaacgtggtgcgaccgtagggcccaagatgacaagtcgtgcgcgactacctgagtcgctgagaaggtagcgcgccgatatgagacaggtgggcgactcagtcaggcaatgtgggcgacggacagtggtgacgcaacgactctttggctagtcaagcgaccgtgtcgtagcgagagcggacgcgttgctgcggtgggacccctgcgacgcgaagcaacccgctatgtctagcttagaattgacccagagtggacacgcgcgcatgaaacgcgctcaaaagggcgcggatacagagccagggagagagagccatggcacttcggaggaaatttatagtattggagagcaccttttcaacaaacgccccgaagagctatgataacaggtggtcacgaatcgccagagacacagtgccatgggtcacacatcgtaacagccngttctgagtgccaagcaacacaaacagtgttacaagtttgctccactgggaacctcctggagcagagccttgcgcgggttcacgccaaaacaagctgtgcttagtaccagttctattacaagaagggggagcataacacgcgccattcgcgcgcccatacgacacaaatcccgttggcagtacttagagaacccctcggggctttggggccccgtgaagagcccttggagctcgagaaacttaacgcgttcgaatttggacacgtgcacttccctttcaganctgttggacaagccgtaacgggaccttatcaacggcatttaccaacccaagatcgggacccgggccacggaggtctgaggtggaccacatttccgtggccggcaggaacgaattccgacacgcggggacgacaaagagctagtttggtcttaccaggttctcggccccccgtgtgtgaacattttccgaatgtcgaacggggagaaattttggtgctcaaaccgtgtgctcggggaaataccatacactgtagagacgacccgtgggagggacagacaacgttataacgaagagaattagtggccccgaaagtgtggcccccaaggactctcaactccaaccacgaattggggggcaacatgtaaggcacgcggactccgagaggagtacccaccgaaaaaagccacgccgtagtatacaaaagagcaaaatcattatcaccgagcagcaatagtgacacaccccaggccaaggagacgtcacccataagaacaaggcgcgttagcaaccacacaccgacatcaaagacgagcgaggcagtgtgcgatagctctgaagaagacacagagaagcgtagtgaaaccagaccagagtggactgtgaggcgcgggaa

SEQ ID NO: 704615 - DNA, 353 bp, Homo sapiens
  misc_feature (31)..(31): n is a, c, g, or t
  misc_feature (59)..(59): n is a, c, g, or t
  misc_feature (107)..(107): n is a, c, g, or t
  misc_feature (207)..(207): n is a, c, g, or t
  misc_feature (250)..(250): n is a, c, g, or t
  misc_feature (270)..(270): n is a, c, g, or t
  misc_feature (316)..(316): n is a, c, g, or t
  misc_feature (320)..(320): n is a, c, g, or t
tgtcgggggagtgtgaaagagttctagcgancgttgaatgggaggatgacgtgagtcangaccgacgcgatgttgttcgaggactccgctctacaagcaaggggcangtcacggcgagaacgctgtgaagctgtcatccaacgagaaccctttcgaaccactgccgagtgtggtcgaggccgtcacccgcacactgccgaggttcanccgttacccattaatgagtgccgaggaagtacgctcgaccatngccggtcacttcggcgtttnacgtgagccaggtggcggtgggggctggatcgacggaggtagccantcanctcatgcatgccttggctggtgccggtgactag

SEQ ID NO: 704616 - DNA, 168 bp, Homo sapiens
gccacggtagatttgccacggtagattttctgtcctcggataaggagagcacgcttgatctgtcacgaacacatttagcacacatggaaccaccataggcctgctgacatgtttctttgttttggacaacctcataagaactttaggtcttacagcacgaacccctcg

SEQ ID NO: 704617 - DNA, 929 bp, Homo sapiens
gtacatgaaaatttgaaatggtaccatgtaaaattcttctatgtcaactttttctgatgtatgccagttcatttactgacaaatgtgttactaagtgcttattaagaagtgtaaatacgctataacaaagttaatacttttgttcagatgtaaggcaacagatcattgaatgccgtttcagatgtactgattgtatttataactttcacgttggtgggagtacctctttgaggaaactttgtggatgagaattaggtacgagatacaaacccccaaaaagtttattcttaccaaggtacaagttcttgtggtcaatggggccagggacagactctattttacccagaaatactagagacctcaaaacaaacataagaggtaacttggaggagggctataatgcttgcatctcagtatttcatttcacttcatcctttcataatacgccttgatatatggtagcagctaaactattacagcaccttccggctatggtaacatgactatgaccatattcatctcaacgtctcaaaacatctagtatgttaatatacaaattacctgactaaataggattgagtcacatacctagaaacatttatataataatttaattatgcacaatttttaggttcccaacttataacaaacatacctgagataaggtatggccgctccaatagaaggttacagattcagtgacacccacaaaaaacaaagcaagggcaaacaacagcgtggactggcaaacaagccacaaaggtcactaaggcccacagagcaagacgaatacatgctgcgccaaggagacgcatagggcaagagacacacacaaacaacaccagaaaaatggcaataaacggcagacaacaaaaagacagaaaataaagagaaataaaagaaaacggagacaaaaacgcacacaaaaa

SEQ ID NO: 704618 - DNA, 390 bp, Homo sapiens
acccaatatcacacatactctagtctgcagttggtcctgcagaaccctgaatatgacaaattggccctgcaaatatgtgggtttcacatcccaccaatactgtgtttttgttgcacctttggttgaacaaaaaatctgcttctaagcagacctgctcaactcagacccatgttgttcaagggccgatggcatgtatgtgtggtttccccagtagactttgtgtccatggatcagagtgggataccacaggaacctctgcatttccagtgcctgctacaggggctgacatggagcaggctgtcattaaacgttggatgagggaacaggaaagcaaatgacatgacctctaaagaattgctctgctcttccagtgtgtcttcctgttgatca

SEQ ID NO: 704619 - DNA, 427 bp, Homo sapiens
cggtcgctctgaggccccctgcgtagtgaatgatgagaagagaagagaagagaagagaaaagaaaagaaaagaaaagaaaagaaaagaaaagaaaagattgtttccatgcctgctaacacaacatccattcttcagacccatgtagtcaacggagtaattttaactcttcaagatcttattatttcaaaaaatatatttctataagactatatgctgccataaactaatgacttctctgcatggatctagggcaaagtaaatcaaacaatcttctaggaaaagattcaccataactagaatgccatataaaaacatttagtgacccatacggaggcaagtcaaaaatatttaacatttaacacagagtattggaagcaggctgattccaagtcctacacagaatgattgctgacggaattcatagac

SEQ ID NO: 704620 - DNA, 889 bp, Homo sapiens
ggagagaactagtctcggtttttggttgtttttttctggggggaaataagaggattaatggattctatgtccttggaaaaattcatccccttgtaaaatttggcctttggatttgaaattttatcccccttaacacatactttctggatgggggggcacacaatgttggtccatgctcaacggggaccttccacggtggtaccggctcacagaactgtgggcatgtactagtcactgaacaaacgtgaacatccaccagcgcagcccacaaagatcgtgcgccttttcgtgccacctgtaaaactcctcaagatggcaccacccctcaccccaggaattctcgaaaactgcactcggcgtggggagctcaattaaattataagccagagcaggtgttcgggcggtcaccaacgtgactgcctttacgaaatctaaaaccctccttttccaagaagcctacagtgctcggtgtcatagcaaacttccccaaagttaaaaatatcgaggggctacaccagcgggggtcgcattcccaagaatccccttagtgatccagcagagttcacaagcccatgtgtttgggggctctcacatggaaactctcacaaccacttggctggcggaacccggctccacggactcaattggtaccctgtgccccagttgggaaaaaacccccgatggtcccactacgtgcgcccgggtccccacactcgccgcaccgcgctcaacaccaccttcccgtctctgcgatcccccccgggacgtcgggcccccccaaaaactcccccgaaacccggcccgacacagctcgcccaccgcctatcccccgacacgcaatcgggctcacccccgctcctcaccccccgcccgggtccagaccacaccc

SEQ ID NO: 704621 - DNA, 204 bp, Homo sapiens
gctggtgagccggagcacggagaaacggagccccaaggctcggctactgaaagtgagcccccagcagcctggaccttcaggatcagccccacagccacccaagaccaagctacccttcctgtgtgccaagaggattcatcctgggagagggggcatggtggaatgcagataactcacatgtaaaaggaacttgcggcgctcgtg

SEQ ID NO: 704622 - DNA, 454 bp, Homo sapiens
gtggccatgcctgtcatgccctcccccacacatgaaaccacgtacaaacagaaggtgcgtcttatcctcttcctctgggttacgtcctcttattacagcacacctacttcaagaatttccatcaggaggacaggctgtacatacgaacctcccccaggcttctcaactggcaactggttttgcacacttggaatagagtccccagagcagccaggtgccccgtgagctccgttacactttgatgttttttgtataatcctcctttgaaattggcaacatgtttcctgtacactccaggtgtgtgtttcagtgtaaggcatttctgaacctgtccctgcaagcaagcataagcagtgtgcagtcatgaaattctcatctttgcgtggacaccttgggtgaattgtgctctcagtggtgagtgggtgtggcaagggatgaccaggcaccatccaag

SEQ ID NO: 704623 - DNA, 950 bp, Homo sapiens
gtgcatgcggcggtgggccctggggtgccctgtgtggccctgggatggggaacctgcggtggcttcctgcggagtgtttcggcagtggcatcctggggcctggggtctgcggccgtggacggggcctggggccgaggccgcggagctcgcggaggcaaggccgaggataaggagtaggatgcccgtcaccaagttgggccgctatggtcaaggacatgaagatcaagtccctggaggagatctatctcttctccctgccccacttaaggaactcacacgatcacttgatttcttcctgcgcgggcctctctcacggcatgaggcactcgaagcattatgccagtgcagaagcagacccgatgccggccacgcgcaccagcgctccaacggcatattcgtaagctatacggcggactacaatgcgccacgtcggaactagcgcgtagttcaagtgctccaacgcagcgtggccaccgccatccgctgcggcccctcatcctggccaagctctccatcgtccccgtgcgccgcacgctactgggcggacacccgatcggccagccccacactgctcccttgcaaggctgacggccgctgcggctctgctgctgctacgcctcatccctagcaccaggcgccctggcatcgtctccgcccctgctgcctaccaagctgctcctcatggctggtatcgccgacctgcctacaccctcagcccacagcatcacctcccacactcatcaacctaccgccaagcaccacccaccaccctctcccccacaccatctactccctacacccaacctctggcacgaaacctctctacccagctctcccaactcaaaactcactacaccactcccacaaccaaccagacacaccacacacactagaccacctatgccaaccccggtctcacaaccccacctctcccacccctccgctccccc

SEQ ID NO: 704624 - DNA, 140 bp, Homo sapiens
cggctcgccgagcatgatacggaaagggttaatgagagaggcaggaagtggttattggggtaaaggggtcgaggtgccggatctcagcgagaaagtagcaggaggggactctggttgaagggggcaagaaaaggtgatcg

SEQ ID NO: 704625 - DNA, 138 bp, Homo sapiens
cagagtgtcttgaatgcagactagtagttaattgcagacgtgggtcacgaagccatctcaatgaaatcgattattaagaccactagtagaagtcaggtactaacaccaagaaggccctccaggcagtgtacagcatga

SEQ ID NO: 704626 - DNA, 187 bp, Homo sapiens
ccccccccccaagggggttttttgggaatttacccccccccccccccgggggtgggttgggggggggaaaaccctttccccgtttttttttcccaaagggggggggggcccccctaaaaaaggggtttaaaattttagggggtttgggttggccccctttttttttaaaacccccggcccctttcta

SEQ ID NO: 704627 - DNA, 485 bp, Homo sapiens
  misc_feature (222)..(222): n is a, c, g, or t
  misc_feature (233)..(233): n is a, c, g, or t
  misc_feature (417)..(417): n is a, c, g, or t
  misc_feature (422)..(422): n is a, c, g, or t
  misc_feature (424)..(424): n is a, c, g, or t
  misc_feature (452)..(452): n is a, c, g, or t
gtgaattttacttgtaacttggcctttagggtttaaactgtctttggcttgaagatgggatttcactgggtacctgcccctgttttaggatttctctgcctcctccctctatcatttccccctctgaagaggtacatgtaactgccgttagaacagggatgatgactgatcttagctgcttcctgctgacaggggcattgttttaggggcaatgacaatcanatttctctcanaggcctatctaagggtcctcagtaaaagggagccattgtctgaggctctggttgcgtgactggagtttgttggcctgtaggcaagaagaaacaaattttacaaggctaactatgcatggatcaaatatgggtattatacaaagaggagttaaagggaacgaatctagtgtcaaagataacatanatganangtgaaatatactaatcattctgaaaatnatattgtccccgatgaaagaaattaaatattgt

SEQ ID NO: 704628 - DNA, 448 bp, Homo sapiens
gcgtggtcgcggccgaggtacggaatagaatggaatggaaagaattggaatggaatggaatcgaatggaatgatatggaatggaatggaatggaatggaatcaacccgagtgcaggcgaatgtaatggaatggaatgcaatggaatggaatcatccggaatgggatggaatggaatggaatggaatggagtggaatcaacccgagtgcaatgcaatggagtggaatggaatggaatggaatggaacagcacgaatggaatggaatgtaatggagagtaagggagttgaatagaatcaacccgaatgtaatggaatggaatggaacggaatggaatggaatggaatgcaatggaatggaatcaacccgagtacaatggaatggaatggaatggaatggaatggaatgtaatgtaatggaatcaacccgagtgcaatcgaatggaatcga

SEQ ID NO: 704629 - DNA, 1478 bp, Homo sapiens
  misc_feature (8)..(8): n is a, c, g, or t
  misc_feature (10)..(11): n is a, c, g, or t
  misc_feature (641)..(641): n is a, c, g, or t
ggttttcncnngagtcgttgggcccggcgcgacccgcaggagcgtagagagcgcgggactagagtgcagagctccgggacgtggatcggagccggcgcgatgggcggagagcaggaggaggagcggttcgacggcatgttgctggccatggctcagcagcacgagggcggtgtgcaggagcttgtgaacaccttcttcagcttccttcgacgcaaaacagactttttcattggaggagaagaagggatggcagagaagcttatcacacagactttcagccaccacaatcagctggcacagaagacccggcgggagaagagagcccggcaggaggccgagcggcgggagaaggcggagcgggcggccagactggccaaggaagccaagtcaagagacctcagggccccagatcaaggagctaactgatgaagaggcagagaggctgcagctagagattgaccagaaaaaggatgcagagaatcatgaggcccagctcaagaacggcagccttgactccccagggaagcaggatactgaggaagatgaggaggaagatgagaaggacaaaggaaaactgaagcccaacctaggcaacggggcagacctgcccaattaccgctggacccagaccctgtcggagnctggacctggcggtccctttctgtgtgaacttccggctgaaagggaaggacatggtggtggacatccagcggcggcacctccgggtggggctcaaggggcagccagcgatcattgatggggagctctacaatgaagtgaaggtggaggagagctcgtggctcattgaggacggcaaggtggtgactgtgcatctggagaagatcaataagatggagtggtggagccgcttggtgtccagtgaccactggagctccaaccgcggtggcgcgctctagaacctagtggatcccggcctgcaggaattcgcacgaggagactcgcagcatggtggaaaagatgatgtatgaccagcgacagaagtccatggggctgccaacttcagacgaacagaagaaacaggagattctgaagaagttcatggatcaacatccggagatggatttttccaaggctaaattcaactagcccctgttttttcctccctgaactcttggggctgagctgcaaccacccaactttctttcccactcttctctgggacttgtgggcctcagggcttggggcaggcatgggactggcccaggcacacaggtcccggggcatcaggagaaaggctgggttttgggaccttgtcctccccagttggcctactgttacacattaaaacgatttgccccagcttctttcggggtcttcttcttgcttctgccttttctttgggcacagccttcttacgcttgctgctggaaacttggaagtttgcttctagcccagattctgccatgtgaccttaggccacatccttggcccttcttctgggcctcagtttctcatta

SEQ ID NO: 704630 - DNA, 821 bp, Homo sapiens
  misc_feature (8)..(8): n is a, c, g, or t
  misc_feature (10)..(11): n is a, c, g, or t
ggttttcncnngagtcgttgggcccggcgcgacccgcaggagcgtagagagcgcgggactagagtgcagagctccgggacgtggatcggagccggcgcgatgggcggagagcaggaggaggagcggttcgacggcatgttgctggccatggctcagcagcacgagggcggtgtgcaggagcttgtgaacaccttcttcagcttccttcgacgcaaaacagactttttcattggaggagaagaagggatggcagagaagcttatcacacagactttcagccaccacaatcagctggcacagaagacccgtgctggggacgaatgatgatggccctggcatgtgatgtgcctgatgctggccgtgtgatgaatggctgggatgctgggctgtgccatgacttgtgccaatggaagccacatgtcatggacgacctcagtgtgcccccatgagtcaatgtggatgctaacttgattgaatgatggcatgacgatgtggcttgcatgcttatgcaggattttggacccacgcaaaactgggattgccagaagacatccatgaagggccccatgtcctccaaagaaactgggtgcagtcttttgacatccccccctatgagagagcaatgccagagaaataccctatgagtgatgtgaacgacattaacgtactgggaccgcactgaagacggggaccaactgtagtaaaaccttgacgcccccaagcctaatgcaaccgtgcggcaggaccttgtccaagataacccgtgtgacccagaacccttgtccggagctggtacctggtcggtccctttctggtgttac

SEQ ID NO: 704631 - DNA, 1058 bp, Homo sapiens
cggacgcgtggtgtcgcggacgcgtgggtcgagccacgcgtccggagacaagccggggcctggtcggcaagactgggccagccatggagatccacgctgggcagcgggcatcgtgatagcctgaggcgctacagaaccagctagacctggctggagaactgtgtggctctggatcaccttatctggtgcgatcccaatgatcctcttatctgttctacttcccctgcggcctactacgcctcccgccgtgtgggacatcgcggatgctctggatcagcactcatacaccgagtggctcaacctcatcttcaagtggtaactttaataggagacagagcacctataggtgggtccatagagtctggtatactacagcacaggctaccaagcccaggtatcaccagtatcccctcttactatagtagagacttggtaccaggcagcccttctggaacaactgcaattgatcacaggagcagccctctggaccataatgacggccctgtcttacgcaggtggccactcgggaccgcagccgctgggtaagggtgatgcctagcctggcttatagcaccaaccttataggcagcgataggcattgtcaggacatctgcatacttcgccacatttccactcaaccaggtgctggctggacataataactggagcggactgggctggatgatgactccacgagtgcacacatggaaccgacgagcacacccccaacgggaacgaacagacaggaaccaacaatgctaagcaccagcccccacaaagccacccccaaagcaccgagccagaaccaaccgagcccccagccaagccacgagggaacgagagggcacacgggcaaccggggcaaaggggcgcaagcccccagcgacacgaacacgggcacccagggccagggacaaccacgcgacccgggacggcaccaccacagccaacagtcacacgcacaaccaccgcgagagccaacgacaccgcacacaaggaaggcagccccaagcacgcacgaacccggcccacaagtgaccagcaacccacaacaagaa

SEQ ID NO: 704632 - DNA, 198 bp, Homo sapiens
  misc_feature (20)..(20): n is a, c, g, or t
tttttggaaaaaaaaaattncccccaattttccttttaatttcccccaaaatcccggttggatccccccttttgtttccccaaggtccctgtttccccccttaaaaaaaaaagattgccccccccccgtttcccccccggttgttgtggttgttaaaaccaaacctttttgaaatttttttaggtttttaaaggggga

SEQ ID NO: 704633 - DNA, 1309 bp, Homo sapiens
  misc_feature (8)..(8): n is a, c, g, or t
  misc_feature (10)..(11): n is a, c, g, or t
  misc_feature (641)..(641): n is a, c, g, or t
ggttttcncnngagtcgttgggcccggcgcgacccgcaggagcgtagagagcgcgggactagagtgcagagctccgggacgtggatcggagccggcgcgatgggcggagagcaggaggaggagcggttcgacggcatgttgctggccatggctcagcagcacgagggcggtgtgcaggagcttgtgaacaccttcttcagcttccttcgacgcaaaacagactttttcattggaggagaagaagggatggcagagaagcttatcacacagactttcagccaccacaatcagctggcacagaagacccggcgggagaagagagcccggcaggaggccgagcggcgggagaaggcggagcgggcggccagactggccaaggaagccaagtcaagagacctcagggccccagatcaaggagctaactgatgaagaggcagagaggctgcagctagagattgaccagaaaaaggatgcagagaatcatgaggcccagctcaagaacggcagccttgactccccagggaagcaggatactgaggaagatgaggaggaagatgagaaggacaaaggaaaactgaagcccaacctaggcaacggggcagacctgcccaattaccgctggacccagaccctgtcggagnctggacctggcggtccctttctgtgtgaacttccggctgaaagggaaggacatggtggtggacatccagcggcggcacctccgggtggggctcaaggggcagccagcgatcattgatggggagctctacaatgaagtgaaggtggaggagagctcgtggctcattgaggacggcaaggtggtgactgtgcatctggagaagatcaataagatggagtggtggagccgcttggtgtccagtgaccctgagatcaacaccaagaagattaaccctgagaattccaagctgtcagacctggacagtgagactcgcagcatggtggaaaagatgatgtatgaccagcgacagaagtccatggggctgccaacttcagacgaacagaagaaacaggagattctgaagaagttcatggatcaacatccggagatggatttttccaaggctaaattcaactagcccctgttttttcctccctgaactcttggggctgagctgcaaccacccaactttctttcccactcttctctgggacttgtgggcctcagggcttggggcaggcatgggactggcccaggcacacaggtcccggggcatcaggagaaaggctgggttttgggaccttgtcctccccagttggcctactgttacacattaaaacgatttgcccc

SEQ ID NO: 704634 - DNA, 1468 bp, Homo sapiens
  misc_feature (8)..(8): n is a, c, g, or t
  misc_feature (10)..(11): n is a, c, g, or t
  misc_feature (641)..(641): n is a, c, g, or t
ggttttcncnngagtcgttgggcccggcgcgacccgcaggagcgtagagagcgcgggactagagtgcagagctccgggacgtggatcggagccggcgcgatgggcggagagcaggaggaggagcggttcgacggcatgttgctggccatggctcagcagcacgagggcggtgtgcaggagcttgtgaacaccttcttcagcttccttcgacgcaaaacagactttttcattggaggagaagaagggatggcagagaagcttatcacacagactttcagccaccacaatcagctggcacagaagacccggcgggagaagagagcccggcaggaggccgagcggcgggagaaggcggagcgggcggccagactggccaaggaagccaagtcaagagacctcagggccccagatcaaggagctaactgatgaagaggcagagaggctgcagctagagattgaccagaaaaaggatgcagagaatcatgaggcccagctcaagaacggcagccttgactccccagggaagcaggatactgaggaagatgaggaggaagatgagaaggacaaaggaaaactgaagcccaacctaggcaacggggcagacctgcccaattaccgctggacccagaccctgtcggagnctggacctggcggtccctttctgtgtgaacttccggctgaaagggaaggacatggtggtggacatccagcggcggcacctccgggtggggctcaaggggcagccagcgatcattgatggggagctctacaatgaagtgaaggtggaggagagctcgtggctcattgaggacggcaaggtggtgactgtgcatctggagaagatcaataagatggagtggtggagccgcttggtgtccagtgaccctgagatcaacaccaagaagattaaccctgagaattccaagctgtcagacctggacagtgagactcgcagcatggtggaaaagatgatgtatgaccagcgacagaagtccatggggctgccaacttcagacgaacagaagaaacaggagattctgaagaagttcatggatcaacatccggagatggatttttccaaggctaaattcaactagcccctgttttttcctccctgaactcttggggctgagctgcaaccacccaactttctttcccactcttctctgggacttgtgggcctcagggcttggggcaggcatgggactggcccaggcacacaggtcccggggcatcaggagaaaggctgggttttgggaccttgtcctccccagttggcctactgttacacattaaaacgatttgccccagcttctttcggggtcttcttcttgcttctgccttttctttgggcacagccttcttacgcttgctgctggaaacttggaagtttgcttctagcccagattctgccatgtgaccttaggccacatccttggcccttcttctgggcctcagtttctcatta

SEQ ID NO: 704635 - DNA, 311 bp, Homo sapiens
gggacttgcaggtgacgcagtctcggctcactgcaagcgttccacctcccggacttcacgcaattctcctgcctcagcctcccaagtagctgggattgtaggcgcccaccactgtgcccggctcatttttgtaaatttagtaggactggggttcaccatgttgaccaggctggctcttgaactcctgacctcaccatccacctgacttgcgcctcccaaagtgctgcgattacaggcgtgatctactgtgccccgccaaagattttaacggaagatggaagattcacgtgggcacacacttatgcaggggc

SEQ ID NO: 704636 - DNA, 130 bp, Homo sapiens
  misc_feature (118)..(118): n is a, c, g, or t
  misc_feature (130)..(130): n is a, c, g, or t
gttggactctagaggagtcccccaagcagtgtaaaacagactcatcaggtgtcacacagtgttgtgtctccgtccaggccttgtggctgaacacctaataaaggttcaattccccagnttctggtccccn

SEQ ID NO: 704637 - DNA, 731 bp, Homo sapiens
  misc_feature (229)..(229): n is a, c, g, or t
  misc_feature (239)..(240): n is a, c, g, or t
  misc_feature (246)..(246): n is a, c, g, or t
  misc_feature (350)..(350): n is a, c, g, or t
  misc_feature (725)..(725): n is a, c, g, or t
gaacagtccttaatccagaaacctgaaatgaaggaagaggagactctgcgcagagcactttgggtccggagggcgagactccggcggaagcattcccgggcgggtgacccagcatggtccctcttggaattggattcgccattttatttttcttgctgctaaatcaccgagcccggagtagaattagtgagagctatcttatttgtcttgagggatgtcgctggttagnacgacaactnnccacgncacatacataccattatatatatatatattatatatatataaaaatacatatctctattttatatatataaaagatatatatgctttttttaaaattaacaggngcctaatgttattttgggggggccttcacctggggagggtttttttgacctggcttgttggaaccctcgagtttgggaagggggaaggttccccctttaaaacttcccacggggaaaagggggggaaataaaaaaaaacccttgggcggggactctttttttttttggcccccactttttttggggggcccaagagagccctttcccctttcccacaaaatatttaaagagcccccctttattggggggatatattcaccccctttttttgggaacaccccccaacacccccccccggggggggggggttttttttccccccccctctcccaaccgggggggggggcacccccaccctcttgtttgtgggggggntccccc

SEQ ID NO: 704638 - DNA, 315 bp, Homo sapiens
gccgccgctactactactaaattaaagggccgtcgaccaaaaacaacatggtactgtcataacgaccagcatataaagcaatgaaaagaatagagtacctagaaacaaattcatacatttacagtgaaatcattttttacaaagatgccaagcacatacattggggagagaacagtctcttcaataaatgatgctgggataatggagatccacgtgaagaagaacgaaactagacccctatctctagctacatataaaataaaattcctaggaattaaccaaagaaatgaaagatctctacaatgaaagtcgacg

SEQ ID NO: 704639 - DNA, 407 bp, Homo sapiens
ccgggcccgtgcgtgatcatcgacccccagaatcgatctcaccttccttcgatttcgctccagcaaaacatgaaattatggttgcgccggatatagactatttcctgattgtgattcagaatccacccgaagtcgccaagggaaggcctgaggagagggatgtgttagaaagatgaggccaggcgcggtggctcactcctgtaaccccagcactttgtgcaggccaaggcaggctagatcacgtgagatcagaagtttgagaccaggctgaccaacgtggtgaaaccccatcactactaaaaatacacacacacacacacacacacacagctggatttggtggcgcatgcctgtagtaccagctactcaggaggctgaggcacgagaatcgcttgaacttaggaggt

SEQ ID NO: 704640 - DNA, 214 bp, Homo sapiens
tgacgtgcagtgttttataaaaaataaaacaaaaacccaccatcacaaaaaaaaaaatttggcagcgaagagaaatgaagaaaaacggaagaaaaaaaaaaaaacgggaaaaaaggacccatacaaatttttcccaccacacataccggaggggggcattggccacgctgggttttgtgcgcacaattcaaaacaaagagcttaaaaacattac

SEQ ID NO: 704641 - DNA, 333 bp, Homo sapiens
atgcaaaggtaaataagtccttgattggcagcacacctaatgcttacactggtccgggcgcggtgattcatgcctgtgatcctagcagtttgggagtccgaggtgggcggatcccttgaggccaggagttcgagattaacctgggcaacatggtgaaaccccatctctactaaaaatacaaaaattagccaggcatgatggcaggcggctgtaatcccagctacttgggaggctgaggaaggagaattgcttgaacctgggaggcagaggttgcggtgagccgagatttagccactgcactccagcctgggcaacagagcaagactccgtctc

SEQ ID NO: 704642 - DNA, 905 bp, Homo sapiens
gagaactagtctcgagttttggttccagcggatgtaccttaatggagtaagggaaaaggggaatccagccgcttgatacagaggtcccagtggaccaaagggcgcaaacacccttccggtcggcgtgatgggaaccgcccagcacagcggggcacgcggaacccacggccgtagggagagggttcccactctcacgcacattgagcagctccgggctcagtcccaagaggcaagggcagagggcaggggggctctcacagagcctacttacaatctaaagcggttgtgctctcctcaggagtctctctacaacactttaaaaaactgaacagaaaatagggccaggggccaaggtggcagtgccatgaggcacatggaatgtccgggtcgggggactcgtggagggtgccaggagcagcatgatcaggcatggtatgacgaggatgaccagggtggccacccagggcctgcccagtggcggtgtggattaacactgcccttggttgggccaaagagtcataggtgatgacgccccgaagtataacccgctgagcctggatgaggcatgcttgaaagcatccatgtcgtggtcccgcatagaaggacgagggccagcgggtaccacgggctctgggaactcgccaagcagtgaacccacagtggtagtggccggcgcaggagtctgtgagtttacaagagtgcgtaacagaatcgcccaatagaacggtctggaagccgggttagacaacaaatgtaccagatttcccagaaatgactcgattgatggacgcctttccataggggagagcccaatattagatcgcaacgaggagctgctaaagaataagcggcagaaagtcgaagtatgctcaataccagaagaataaccaagggccggcaccgtg

SEQ ID NO: 704643 - DNA, 432 bp, Homo sapiens
cgccctggatgcgacctattgtggcagagaatcctgaatacttctctgagatctccctgaagccaggcgctgtgttgccgcctccaccttacagacaccggaatactgtggtgtaagctcagttgtggttttttaggtggagagacacacctgctccaatttccccacccccctctctttctctggtggtcttccttctaccccaaggccagtagttttgacacttcccagtggaagatacagagatgcaatgatagttatgtgcttacctaactcgaacattagagggaaagactgaaagagaaagataggaggaaccacaatgtttcttcatttctctgcatgggttggtcaggagaatgaaacagctagagagggaccagaaaatgtaaggcaatgctgcctactatcaaactagctgtcacttttttt

SEQ ID NO: 704644 - DNA, 161 bp, Homo sapiens
ccaccaagtatcactaagctcgcttttttgctgtcaccaaattttattaaaggtgtcccttgttccctaagtcccaaatacttaaactgggggatattatgtaagggccttgagcatttggattttgtccctaatataaaaacaatttattttccttccca

SEQ ID NO: 704645 - DNA, 5288 bp, Homo sapiens
  misc_feature (97)..(97): n is a, c, g, or t
  misc_feature (99)..(99): n is a, c, g, or t
  misc_feature (102)..(102): n is a, c, g, or t
  misc_feature (104)..(104): n is a, c, g, or t
  misc_feature (106)..(106): n is a, c, g, or t
  misc_feature (126)..(126): n is a, c, g, or t
  misc_feature (4140)..(4140): n is a, c, g, or t
  misc_feature (5134)..(5134): n is a, c, g, or t
tcgccactccgggcccctgctgggcgggaaggcggcgccccggccgaggtggcggcggctcctcaggacggaagctcctgctctcttgtcagccgcnanctnangnccattcgcagcttctccagnccacctgcattccttgtctcagagcctccctcctgcatcctccaagccagcagttgtgggatgggagaagaagttgtccatgttcacactgggtgaaggaagctgaaaccacagacatgactgagtcctccatgaagaagctggcctccaccctgctggacgccatcaccgataaggaccccctggtgcaggagcaggtctgcagtgccctgtgctccctcggggaggtgcggccggtggagacgctccgtgcctgcgaggagtatctgcggcagcatgacaagctggcacacccataccgagcagcggtcctgagggccatggagagggtcctgagcagtcgcgccagtgagctggacaaggacacagccagcaccatcatcctcctggcctccagcgagatgaccaagacgaaggacctggtctgggactggcagcaggcggcgagtggcgtcctggtggccgtgggaagacagttcatcagcaaggtgatggaggagctgctgcgcaggctgcaccctgggaccctgccacactgcgccgtgctgcacaccctcgccagcctctcggtggccaacgcgttcggcgtagtccccttcctgccatccgtcctgagctccctgctgcccgtgctgggcgtggccaagcaggacacggtgcgcgtggccttctgctccgctctgcagcgcttcagcgagggtgccctggagtacctagccaacctggaccgagccccagaccccacggtcaggaaggacgcctttgccaccgacatcttcagcgcctacgatgttctcttccatcagtggctgcagagtcgagaagccaagctccgtcttgccgtggtggaggctctggggcctatgagccatctgctgcccagtgagaggctggaagagcagctgcccaagctcctccctgggattctcgccctctacaagaagcacgcagagaccttctacttgtccaagagcctgggccagatcctcgaggcagctgtgagtgtgggcagccgcacactggagacccagctggatgccctcttggctgcactgcactcccagatctgtgtgcctgtggagtcctcaagccccctggtgatgagtaaccagaaggaggtgctgcgctgcttcactgtgctggcctgcagctcgcctgaccgcctactggccttcctgctgcccaggctggacaccagcaatgagaggacccgcgtgggcaccctgcaggtggtcagacatgtcatcaactcagctgctgctcagatggaagataaaaagccctttatcctgtcttccatgaggcttcctctcctggacaccaacagcaaggtgaagcgggcagtggtgcaggtgattagcgccatggcccaccacggctacctggagcagcctggaggtgaggcgatgatcgagtacatcgtgcagcagtgcgcgctgccccccgagcaggagcctgagaagccaggccccggcagcaaggaccccaaggccgacagcgtgcgggccatcagcgtgcgcaccctctacctggtcagcaccaccgtggacaggatgagtcacgtcctctggccatacctgctccagttcctcacccctgtgcgcttcactggggccctgactccgctctgcaggagcctcgtgcatctggcgcagaagaggcaggaggccggggccgacgccttcctcatccagtacgacgcccatgcgagcctcccgtctccctatgctgtaaccggaagactgttggttgtgtcttccagcccctacctaggggacggacgtggggcagcggcgctgcgcctcctcagtgttctgcacccaaacattcaccctttgctgggtcagcattgggaaacgactgtcccgctgctgctggggtacctggatgagcacacagaagagaccctgccacaggaggagtgggaggagaagctgttgatgttcctgcgagacaccctggccatcatttctgacaacgcgtggatctgccagctgagcctggagctgtgcaggcagctgccctgctacgatgaggcaccccaggagaagaacttcctgtacaaatgcataggcaccaccctgggtgctgcttcaagtaaggaggtggtgaggaagcaccttcaagagctgctggagacggccagataccaggaggaggcagaacgcgagggcctcgcctgctgcttcgggatctgtgccatctcccacctcgaggacacgctggcccagctggaggacttcgtgaggtcagaggtcttcagaaaatccattggcattctcaacatttttaaggatcgaagtgagaacgaagtggagaaggtgaagagtgctctgatcctgtgctatgggcacgtggcggcccgggccccccgggagctggtgctggccaaggtagagtcagacatcctccggaacatctgccagcacttcagcaccaaggacccagccctgaagctgtgccttgtccagagtgtgtgcatggtcagccgcgccatctgcagcagcacccaggctggctccttccacttcacccggaaagcagagctggtggcacagatgatggagttcatcagggcagagcccccggactccttgaggacacctattcggaagaaagccatgctcacctgcacttacttggtctccgtggagccagcgctggacgagcaggcccgggcggatgtgatccatggctgcctgcacagcatcatggccctgctgcctgagcccaaggaggaggacggaggctgccagaagtccctgtatctggagacactgcacgcccttgaggatctgctgacgagcctcctgcagcggaacatgaccccccaaggcctgcagatcatgattgagcacctgagcccatggatcaagtccccaagaggtcacgagcgggcgcgggccctgggcctgagcgccctcctgctgcgctacttcctggagcacctgcgtgtcagcgccctggtgcccttccacaacctgggccttctcatcggcctcttctccccacggtgtgcggacctgtggcctgccacccgccaggaggccgtggactgtgtctactccctgctgtacctccagctcggctatgagggcttctcccgggactaccgcgatgacgtggcggagcggctcctcagcctcaaggacggcctcgtgcaccctgaccccgccattctcttccacacctgccacagtgtaggccagattattgccaagcgcctccccccagaccagctcatcagcctcttgctaaccatgtttgaggccctgggagaccccgaaaagaactgctcccgagcagctaccgtcatgatcaactgcctgctgcaggagcggggcggtgtgctccaggagaaggtgcccgagatcgtgagcgtcctgcgctccaagcttcaggaggcccagggagagcacgtcctgccggccgcccagcacagcgtgtacctcctggccacccagcactgcgcagccgtggtgtccagcctcctgggcagccccttgcccttggacagccacacctgcatgctgtggcgggcgctggcggtggagcctcgcctagctgcccaggtcctggggctgctgctggagaagatgagtagggacgtccctttcaaggagagccgggccttcctgctgggccgcaccccagaccgcgtggccacgctgctgcctctctcggctacctgtgcactgtttgaggtcatgtccacgcctgcagcggggccgcggtgctcgagctctacccccagctgtttgtggtgcttctgctgcgcgtcagctgcaccgtgggtgtccagctgccccggaacctgcaggcccaggaaaggaggggtgccagtccagccctagccaccaggaacctggaaccctgcagctctgcagtggacaccctgcggtccatgctactccgcagcggcagcgaggatgtggtacagcgcatggacctggagggaggctgggaactgtcaggactcggggggcatgaggagggggccacaggttggcaggncatggctgagcacgcagggccccgactccccctggtgctgaagacgctggcatgcacacacagcagtgcgtatgagaaccagagggtgaccaccaccgccttcctggccgagctgctgaacagcaacgtggccaacgacctcatgctcttggactcgctgctggagagcctggcggctcgccagaaggacacatgcgccagcgtgcggaggctggtgctccgcggcctggccaacctggcctccggctgccctgacaaggtgcgaacccacggcccccagctcctcacagccatgattggcgggctggacgacggggacaaccctcacagcccagtggccctggaggccatgctgggccttgcgaggctggtgcacctggtggagtcctgggacctgcgctcagggctgctgcacgtggccatccgcatccggcctttcttcgacagtgagaagatggagttccggacggcatctatccgcctctttgggcaccttaacaaggtctgccacggagactgtgaggacgtcttcctggaccaggtggtgggcgggctggcgcccctgctgctgcacctgcaggaccctcaggccactgtggccagcgcctgcaggtttgccctgcgcatgtgtggccccaatctggcatgtgaggagctctcagctgctttccagaaacacctgcaggagggccgagccctgcacttcggggagttcctcaacaccacctgcaagcacctgatgcaccatttcccagacctgctgggccgtctcctgaccacctgcctgttctacttcaagagcagctgggagaacgtccgagctgctgcacccctgttcaccggtaagcaccaccccctgccccacccccacgccgcccggcagccccgcctgatgcccccacttcacagggttcctggtgctgcactcggagcccaggcagcagccgcaggtggacctggaccagctcattgcgggtgagcacccctccacggngcccctccgctgggccctgctgaccctgtaggcacccgcagggactaagtgattttcctggatttcaggactttttccctgtcactggtgacctcatcgtctctagtaattcacggaaacttcttaactgttccaaaagagcttaaaaaacact

SEQ ID NO: 704646 - DNA, 1047 bp, Homo sapiens
  misc_feature (47)..(47): n is a, c, g, or t
  misc_feature (210)..(210): n is a, c, g, or t
  misc_feature (246)..(246): n is a, c, g, or t
  misc_feature (299)..(299): n is a, c, g, or t
tcttcgacagtgtaggctggttggggcagggggagggaagagggccncagcccttcctgcctcttactctgagctttagccccagccccaccctcctccctgtctcccacctcggctaggtgaccgtggagagcgcggacctgcagggctgctgctttgctgggcctggcagccccacccgtaaggccccacccgtcggggtgtttcctngcccgggtcaggcaagggcacccatcaatggcaggnggctaggcaggcaggcctgcaggggcacagcctgtgaggagacgtatgctgcntgtccttcccaggagaagatggagttccggacggcatctatccgcctctttgggcaccttaacaaggtctgccacggagactgtgaggacgtcttcctggaccaggtggtgggcgggctggcgcccctgctgctgcacctgcaggaccctcaggccactgtggccagcgcctgcaggtttgccctgcgcatgtgtggccccaatctggcatgtgaggagctctcagctgctttccagaaacacctgcaggagggccgagccctgcacttcggggagttcctcaacaccacctgcaagcacctgatgcaccatttcccagacctgctgggccgtctcctgaccacctgcctgttctacttcaagagcagctgggagaacgtccgagctgctgcacccctgttcaccgggttcctggtgctgcactcggagcccaggcagcagccgcaggtggacctggaccagctcattgcggcgctccagatcctgctgaaggacccggcccccgaggtgcggacgagggctgctgaggccctgggccgcctggtgaagctcgcctaaggctccggccagcacccccagcgaggagtatgcacccagacctgtgcctgagctccaagacagggcctcctgaggaccacagcctgggcacacgactggaggggcctggccccagaacaggcactgctggggaccaaacccaagcccttcagtgagggatgtgcccaataaactcatctgctcccagcga

SEQ ID NO: 704647 - DNA, 349 bp, Homo sapiens
tctggaaacacacaaactcccatgaatgaatcaggaagaaactaaaaccttgggcaataacaagttctgaaattgaatcagtaattgtaaaaaaagaaaacctaccaaccaaaaaaagccatggaccagatagattcagagctaaattctatcagatggataaaaaagaaagagctggcaccaatctttacaattaacaacaaaaaaaaaaaaattcaggggaggagaagacccctctcccttaaattcagtgctacacaagcgccagcattaccctttgattaacaaaattctcgtgctcaaagacaccaggtgaaacaaaggaaaatctacgagggccaattactcc

SEQ ID NO: 704648 - DNA, 2038 bp, Homo sapiens
  misc_feature (97)..(97): n is a, c, g, or t
  misc_feature (99)..(99): n is a, c, g, or t
  misc_feature (102)..(102): n is a, c, g, or t
  misc_feature (104)..(104): n is a, c, g, or t
  misc_feature (106)..(106): n is a, c, g, or t
  misc_feature (126)..(126): n is a, c, g, or t
  misc_feature (1609)..(1609): n is a, c, g, or t
  misc_feature (1614)..(1614): n is a, c, g, or t
  misc_feature (1616)..(1616): n is a, c, g, or t
  misc_feature (1633)..(1633): n is a, c, g, or t
  misc_feature (1834)..(1834): n is a, c, g, or t
tcgccactccgggcccctgctgggcgggaaggcggcgccccggccgaggtggcggcggctcctcaggacggaagctcctgctctcttgtcagccgcnanctnangnccattcgcagcttctccagnccacctgcattccttgtctcagagcctccctcctgcatcctccaagccagcagttgtgggatgggagaagaagttgtccatgttcacactgggtgaaggaagctgaaaccacagacatgactgagtcctccatgaagaagctggcctccaccctgctggacgccatcaccgataaggaccccctggtgcaggagcaggtctgcagtgccctgtgctccctcggggaggtgcggccggtggagacgctccgtgcctgcgaggagtatctgcggcagcatgacaagctggcacacccataccgagcagcggtcctgagggccatggagagggtcctgagcagtcgcgccagtgagctggacaaggacacagccagcaccatcatcctcctggcctccagcgagatgaccaagacgaaggacctggtctgggactggcagcaggcggcgagtggcgtcctggtggccgtgggaagacagttcatcagcaaggtgatggaggagctgctgcgcaggctgcaccctgggaccctgccacactgcgccgtgctgcacaccctcgccagcctctcggtggccaacgcgttcggcgtagtccccttcctgccatccgtcctgagctccctgctgcccgtgctgggcgtggccaagcaggacacggtgcgcgtggccttctgctccgctctgcagcgcttcagcgagggtgccctggagtacctagccaacctggaccgagccccagaccccacggtcaggaaggacgcctttgccaccgacatcttcagcgcctacgatgttctcttccatcagtggctgcagagtcgagaagccaagctccgtcttgccgtggtggaggctctggggcctatgagccatctgctgcccagtgagaggctggaagagcagctgcccaagctcctccctgggattctcgccctctacaagaagcacgcagagaccttctacttgtccaagagcctgggccagatcctcgaggcagctgtgagtgtgggcagccgcacactggagacccagctggatgccctcttggctgcactgcactcccagatctgtgtgcctgtggagtcctcaagccccctggtgatgagtaaccagaaggaggtgctgcgctgcttcactgtgctggcctgcagctcgcctgaccgcctactggccttcctgctgcccaggctggacaccagcaatgagaggacccgcgtgggcaccctgcaggtggtcagacatgtcatcaactcagctgtaatttcatagaatatcctgatgttggtcctgcagtgtcctgcagttggaacagagccctgctcctcaccacggcctttctgctcccaccagcaacctgggccaagctcccaccaggacctctccttggccacactcggctgcctgatgttggaggctcttccagcctggaatcatctttctgtggctcccacatagccagctctcttcctttgagtcttagcttnagggncncttttcgaatagccctnggtgttgacccccttcttccagtgcagcacccccatgaatatgtttctcagcctctcgtctgcacctctcctgatgctgccacagtgtgtggtgatcttatttactgtccagttgtctttgtgtcttttccattaggacataagctacttgagggcaagccccatctgcttataagggctagcaggagttggctccccatnaactgagagtgataaaatattgcgttagaaaaaacaaaacaaaaaaagggggggttaaaattcccgagggcaattagctaccgttttgggaagggccatggggggtaaagaagaggggggttaagggggggaaaagctggcttgggaaccctttgggaatgggaccaaaaagggaaaaaggtgggaacggcggatgtgtaaaaa

SEQ ID NO: 704649 - DNA, 652 bp, Homo sapiens
  misc_feature (1)..(1): n is a, c, g, or t
  misc_feature (69)..(69): n is a, c, g, or t
  misc_feature (71)..(72): n is a, c, g, or t
  misc_feature (85)..(85): n is a, c, g, or t
  misc_feature (92)..(92): n is a, c, g, or t
  misc_feature (109)..(110): n is a, c, g, or t
  misc_feature (114)..(114): n is a, c, g, or t
  misc_feature (121)..(121): n is a, c, g, or t
  misc_feature (131)..(131): n is a, c, g, or t
  misc_feature (145)..(145): n is a, c, g, or t
  misc_feature (147)..(147): n is a, c, g, or t
  misc_feature (158)..(159): n is a, c, g, or t
  misc_feature (194)..(194): n is a, c, g, or t
  misc_feature (235)..(235): n is a, c, g, or t
  misc_feature (239)..(239): n is a, c, g, or t
  misc_feature (243)..(243): n is a, c, g, or t
  misc_feature (262)..(262): n is a, c, g, or t
  misc_feature (267)..(267): n is a, c, g, or t
  misc_feature (273)..(273): n is a, c, g, or t
  misc_feature (282)..(282): n is a, c, g, or t
  misc_feature (298)..(298): n is a, c, g, or t
  misc_feature (300)..(300): n is a, c, g, or t
  misc_feature (307)..(307): n is a, c, g, or t
  misc_feature (375)..(375): n is a, c, g, or t
  misc_feature (385)..(385): n is a, c, g, or t
  misc_feature (417)..(419): n is a, c, g, or t
  misc_feature (421)..(421): n is a, c, g, or t
  misc_feature (435)..(435): n is a, c, g, or t
  misc_feature (469)..(470): n is a, c, g, or t
  misc_feature (482)..(482): n is a, c, g, or t
  misc_feature (506)..(506): n is a, c, g, or t
  misc_feature (512)..(512): n is a, c, g, or t
  misc_feature (522)..(522): n is a, c, g, or t
  misc_feature (525)..(525): n is a, c, g, or t
  misc_feature (533)..(533): n is a, c, g, or t
  misc_feature (536)..(536): n is a, c, g, or t
  misc_feature (542)..(543): n is a, c, g, or t
  misc_feature (555)..(555): n is a, c, g, or t
  misc_feature (577)..(577): n is a, c, g, or t
  misc_feature (650)..(650): n is a, c, g, or t
nggcccgccctcctccctccccattccaaacagagtacaaaaccgcacccaaagcagacattctgtacngnngggtggggggggnggggggnaggggggggggggggcnntgcngttgatntgtaaaagtncgggttggtgacgncnccagcagtccnnaaagggcccctggggggcgaaggaagtgggcaggngcctctagatgaaatattccttcttgtcgtcccctcctgantgcncgcnttctgcattgatgatggcngtgtncgcgtntggagaatngtcggagccttttgcntnatgtgtnaggtaggttcctttgtgccggataaagtagtggccgaggaagatgagcatgatgagcagcaggaaganaatgaaagcnacgatcccaccgatgatggcgtggtaggtgcnnnangaggagggaaacgnaatggggtaattaaaattgcagggtgtagtaggnnttgctagctganaatgcttgctgcgtgcgcatgctnaagcangctagctgcnaanatgctaanatnttgctnnagcgcaaagcgnaagcatcaggcgcaccttctcnctggcgctcattctttcaggggcgtgcgcaaaaatgccctctacctttcttccacattagcgctattgccacngg

SEQ ID NO: 704650 - DNA, 1317 bp, Homo sapiens
tagatcgcgagcagaactcgaggctaaatcggctgcgattcctctcggaacgcgcctgcagaaggggtcctggtgacagagtccctgctgttctcatccattgaatccactcgccagcccatgacgccctctgccgtctgcacccatgcacacacctgcccctctcctgtgccaggaacattgcatacgtaccagacaccatgccctaccaatatccagcacatgacccacggagcagcacgcaggagctgtctgacatcgctcaccgcaatcgtggcaccatggcaacgggcatcctggctgcagaatgagtccactgggcgccatcgccaagcggactgcagaccatagggcaaccgacgcacaccaaccgacggacagaaccggcagcctactcaccgcccagcatgcgagcatgaacagcgtgacgacccgcagataaaacccaccatgacaatcaggcggagaagatcaacacaaacattcccagatgaagacaagatcaaacccaaagacaaggccgagactgacatgaagcagctacacaaccaccgccaaagatcacgcaaagtccacacggcgcgggtgcaacggagcgacaactcacccgcgcagcaccaaacaggcgccgagggacaccccagtgagacagacgagcaaacaaatcgcacaagatataacacacgaccaaggggaacacggcaagaggccttcgaccagacagaagccagaagcccaatacaccacagacacgggacgtggaagcatgaaatattccgtacaaaagttgttaagcatggtgagtgcgtgaacacaacatagggaaaaactacaaacacacacaaacgagagccgatgcaacacatcacaatcgaaacaaaatgaggaaaagtaatcgcaatgagaacacgtctaacaagacccagccaatcatgaacaagcaaccacatggacatatgaggacacgcgaccagggaaggacccagacagccccgccgactgacaagagcagacacaggcacaggaaagcggaacacaccaaggacacgagaccccaacagaagagcgactaggcacacaggccaaccccacgctgcccgaagtgcgaaagcgaacagccgctcacgaacaaagggaacaccagcgaacacgcagacaaaggggcaccaccacaggagagagccgacgaggaaacgtgacggagagcacagagcgaccgagcggcgcacaacaccccaacacagggccggaagcgagcacccaacgaaggaagcagaagaagggagaaaaccgaagagaggacggcgcggcgagatg

SEQ ID NO: 704651 - DNA, 313 bp, Homo sapiens
acgaaaacgtcgcctgaatggtactgtaattgagcactccgggaatatggagaagtaatacagcgtacgggttgaccaacgcaagaacatatgccagttcctcgctagagattggcctggctaaggacgatcagctgaaggttcatgggtattaagtgcttgtggctcactgaagctaaagtgaggatttccttgcactgagtagaatttcccttctctcccttgtcacaggtaaaaaaacctcacagcttgtataatgtcaaccatttgcggtccgctaataacttggactagtgtaacaccttcatgcaat

SEQ ID NO: 704652 - DNA, 141 bp, Homo sapiens
  misc_feature (7)..(7): n is a, c, g, or t
  misc_feature (14)..(14): n is a, c, g, or t
  misc_feature (73)..(73): n is a, c, g, or t
tggaaancctacanaagcctgtaagccaaggaggcagggtcttcctttggcatgggatgggaataaagtaagnagagggactggaccccctggaaactgattcactatgggggcaggtgtattgaagtcctccagacaacc

SEQ ID NO: 704653 - DNA, 798 bp, Homo sapiens
taaagaccatacctttagaaatatgggtctatttggagatttcagaatagaagtatcatcacagtggttagccgtggttttctataaaatagatacaattcaattaaaaaatattggtgtgaaaaccgtgttaatctggcataatgagcttcagttcaagttagtattggcgtgatcgtgatatccgtgtaggtgtttcaatctcgaggattataattggaagggaattaatacataggtatacactcttaaataggtataaatacaataagtgcgtgattatggctgattattaggaccatgggctatcaatgaggttctttaaagagcgcgcttgcaaaaattggcatcatatcactaggcaatattataactctaagcaaaagtccctcaaagctaattggtcctggaattatccagtagatagacagccctttgtgacccagtgctgtgtgaccagaagcccataaattacaagcgatataacgtgcgtgcctcaaatatccccaggagcaactaccgcaagacgaagactaggtggcacacagccatctacagtgaggagacacacagcgggctagtcaacaactaccgtgatgcaccacaccccatgtgacacaaacaataatcagacacggggaccaaacaacaacaacaaaaatctcagcaggacagtatagggggacgaagacacagattaaatcagaacccaatccatgagggccactccgcagcaacagacacaaaccaaatcaagcgtgggcccccaactaacacgaaaggaggaaagacaataaa

SEQ ID NO: 704654 - DNA, 346 bp, Homo sapiens
ggtgattagaggatccacgtatatgtaactttctcccttcctttccttttcctttttctttgtgagacaggtctcgctctgtcgccaggctggagtgcagtggcccgtcttggtcactgcaacctctaattgatcctcccacctcagcctcctgagtggctgggactgcatgcgtgtgctgacacgcccggctaatttttgtttattttttttttggagagaggaggtctcactatgtggccgagtctagtctcaaactccggggctcaagcgcttctccggcctgggcctcccaagtgctggtgagctctcacaccggtgcatggtttccgggttccaggtttcc

SEQ ID NO: 704655 - DNA, 619 bp, Homo sapiens
agggcgtagtggtgtaacattgaagaataaccacgtttgaggtggcagatctgaagttggtttgagagattatggcccgcggatttataagggtattaataaatactggtcggaaacccgttgcgcacgcccttggtttggggacattctgcttgtaccccctaagatgtcccagctttttttcttggttgaccccaagatgtgtctcgcttggcaaagaaggtttttttcgtgttcgtaataaaagcgttccgagacgggccctaaaaatgtatgggaaatagatattgtggcccccacacaaagggtcctatttaccccaggaattttcttgcgcgtcttgagtttttgctgttgtgtgtcgaattaggtgcgtacaaacaagggatgaaaaaccatatgcagccgaagattcttatcatctgaggaccacttttttttcgaatcaatcacagatttgtacgaggccactgtctttgcttactagtgctctggctcgagaccccccttcccacataagttggcccacaaattttttccatttctatcctgtaatccccctttatccccctcggggggatttacaaaaaaattccccaaactaaacgggtaaaaaaaa

SEQ ID NO: 704656 - DNA, 1007 bp, Homo sapiens
gctgctctgcgtaatgttgccagcctgatgcgcacgggcgcggagaagcgttgtgcaagtaacgtatgtatggttgggcactcatagcgccaggtccggtcccagattggtattgttatgggtagtactaggatgcatgacggtaaaggacacagatgctacgtggaaacgctacatcggagagatgagatctaggaccattgacaagtgatggtatgccagcctccggtgtgttgcagtgctctcatcccccttacgggtcacgcagaccaaacaggaggtaatgttactctgaagattggcctggtcctgagagagaacgaaaactgggacctaacgagaaaaggtgccgggtgcgaccacgagtagatgcgctatatatttccgcgcccaaatggtgacatcatagaaggtaggaagtaagaatcgagagattaggttatgaaaggagctgatggactaaatgtgggcatacgagattctggctgcagaggtgtgttgagaagcttcacccaatgggtgtctgctggtgtgaaagaatagctggcctattaaaggaccgggatagtgaaggggtgctgatgatggtggttgccagcggctggatggatgtctgcagtagtacgaagattcagtgcaaaaaggttcatagagttatgtaaaaagccgtttcctctggagtaaggtatgcgtggctcattggcgaccgtaactttgagactttggttgcactgcatggtcagacggatcagaagttgcggtggaccagctctgctcgaaaggtattgtgcccgattgatgtgtggcaccaacagggtccggcgggcggttcaggcctggtgaatggtatttgggggccggggtaaagcgtgttgttgagaccggcggggaggtaagggggaggaggggtcccttatatataaaacggagagaggtctatctttggagaaaaaaaaatggggggggagaggaaaaaaactgggggcgcgataatatgagcgctatca

SEQ ID NO: 704657 - DNA, 522 bp, Homo sapiens
  misc_feature (128)..(128): n is a, c, g, or t
tacgacgaagcatctctgcatgatatctggatccaccaattcgctagattcggccgtgatgcgtctccggaagtataggcatgcgtccatccccggctccggccgtctgccgtaatccatgcggtaancgcgtacgagcagacggtgaaccaggagattaactttcaaaaaagctttaacaaccacgtgcgcacgcttgtggcgcgcgaggaggtggctataggactgatgcatctgtgggactttgtaagcgcgctggagcaaaacccaaatagcaagccgctcatggcgcagctgttccttatagtgcagcacagcagggacaacgaggcattcagggatgcgctgctaaacatagtaaagcccgagggccgctggctgctcgatttgataaacattctgcagagcatagtggtgcaggagcgcagcttgagcctggctgacaaggtggccgccattaactattccatgctcagtctgggcaagttttacgcccgcaagatataccataccccttacgtt

SEQ ID NO: 704658 - DNA, 157 bp, Homo sapiens
  misc_feature (3)..(3): n is a, c, g, or t
  misc_feature (32)..(32): n is a, c, g, or t
  misc_feature (47)..(47): n is a, c, g, or t
  misc_feature (78)..(78): n is a, c, g, or t
  misc_feature (112)..(112): n is a, c, g, or t
  misc_feature (116)..(116): n is a, c, g, or t
aanctcacttacctctgagtttctgctgtaancctgtctttctctcnctttttttgaactggaatctattactttggntgatgcatgctggcgttttctaaagttttctgantgantgtgtctttaaaaaataatctgataatattttagcttcttg

SEQ ID NO: 704659 - DNA, 133 bp, Homo sapiens
agcctgagttaagctgtggggacagcatgctggccaagggtttccccacgctcagtcctggtcaaggctgccagacctttctgagtgcccccaggaggggctggggcgtctcagggtgcccactggcgaggga

SEQ ID NO: 704660 - DNA, 217 bp, Homo sapiens
  misc_feature (80)..(80): n is a, c, g, or t
gcctccatcctcaccaatcccatggatgtcatacgaacccgtgtgcagcatctgcagaagccagcccacagccaggcacnagtgcacgcctgtaatcccagcattttgggaggccgaagcgggcagatcacctgagcccaggagttcgagaccagcctggccaacatggtgaaaaccctgtctctactaaaaataaaaaattagctgggtgaaaaaa

SEQ ID NO: 704661 - DNA, 484 bp, Homo sapiens
catgcaaagatatgaacgggaagaatggagtggcaatggtgtgctcctggaaagctcacccagcagagttgccctgagctcggggccttggttacatgtccctggggatatttatatttaataaatttttatataaatacacagagaaatagaaaatataaaatctgaggggttggggaagaaacgtgagggactcagcatggaagccagagcttggagagtgtccattcaggccaacttgagctcctccttgaccccgtttgggttctggcttcgtcctccttggattactcctcttcgggtgacttctttcttctcctctgggtctatctctttttcaatacctctgttttgactctcttggcttcattgaagttggaagcagttctttgcggccccctctccctcctcttcagaaatcggagaatcttcctcacaggcaatacgtgtgtcagaggagcagatcgagatgcgcttgtcaagg

SEQ ID NO: 704662 - DNA, 356 bp, Homo sapiens
gcccgaggaaaactaaagttgttgttgttgttgttttaaaacggagtctcgctctgtcgcccaggctatagggcagtggtgcaatctcacctcactgcaagctccgcctcctgggttcatgccattcttttgccccagcctcccgagtagctgggactacaggcgccccccatcctggccaacatggtgtaaccccatgtctccccaaaatacaaaaaattagctgggcatggtggcgggcccctgtaatcccagctactggggaggcttaggcaggaaaatcgcctaagcctggaaggcggaggttgtagttaacttagatcatgcccctgcaacaagcgtgagaatccctctcc

SEQ ID NO: 704663 - DNA, 901 bp, Homo sapiens
  misc_feature (9)..(9): n is a, c, g, or t
  misc_feature (327)..(327): n is a, c, g, or t
  misc_feature (343)..(343): n is a, c, g, or t
  misc_feature (349)..(349): n is a, c, g, or t
  misc_feature (373)..(373): n is a, c, g, or t
  misc_feature (376)..(376): n is a, c, g, or t
  misc_feature (378)..(378): n is a, c, g, or t
  misc_feature (381)..(381): n is a, c, g, or t
  misc_feature (383)..(383): n is a, c, g, or t
  misc_feature (385)..(387): n is a, c, g, or t
  misc_feature (396)..(396): n is a, c, g, or t
  misc_feature (405)..(405): n is a, c, g, or t
  misc_feature (427)..(427): n is a, c, g, or t
  misc_feature (433)..(433): n is a, c, g, or t
  misc_feature (438)..(438): n is a, c, g, or t
  misc_feature (457)..(457): n is a, c, g, or t
  misc_feature (467)..(467): n is a, c, g, or t
  misc_feature (476)..(476): n is a, c, g, or t
  misc_feature (478)..(478): n is a, c, g, or t
  misc_feature (491)..(491): n is a, c, g, or t
  misc_feature (494)..(495): n is a, c, g, or t
  misc_feature (498)..(498): n is a, c, g, or t
  misc_feature (562)..(562): n is a, c, g, or t
  misc_feature (732)..(732): n is a, c, g, or t
  misc_feature (811)..(811): n is a, c, g, or t
  misc_feature (833)..(833): n is a, c, g, or t
  misc_feature (872)..(872): n is a, c, g, or t
aagaaaaangatatacacaattcaatgtggaaataaattactagaaatactctggaaacttttccatttccctctcaaactcacttttttttaagctcataagtctttttacttgattttaagaaacatggcaactataatactaagaaagaactacagctttgtacagaaacatagagccttgtcttgactataaggattagttggtgttttaataacaacaaaaaagcacacaagacacaaacactcttcaacaggtttactcaaacagcttcgctcaagaagaaaaaggcacagatttaaagggatgacaataatcattaagantgaggtaaatggggantcagtnaaaaaatgatacttcatgaattangtnangananannnaagtgtttnaaattatcngtgcttccttaaaatgaatttntaaatnaaatnggataaacatatgagaganaggggggacntgagggggngncggggtatatttntgnngtncaaatgctttgtatacaatttcgatgttccttatatattccctatatagcaaaccgagccaggncctcccaactgcatgcctcaagtccctgtggagcactctggcagctggatggccctacttgctttctgacaaaatagctggaaaggaggagggaccattaaatgtagtcatcttcaactggctctccattgacatcacaatagtggataaaaattgccactactcgctgnaatacacccttcttcatctgacgcatctctgaaatttcctctcctattgtttccatacagatgtctgcagacagctgtnctttccttctaggagcataganagtgctttcttcatcgtcttcaaagtcgtatcgagcgantgtttggggctctgcagctcgttaatgac

SEQ ID NO: 704664 - DNA, 333 bp, Homo sapiens
cctatttgttggcccgcttgtgtctgtacatctgcatcatcctctgtcggaacacatcgaatgtgtctttctttgtgctcctgcccgtaagcacccaacccttcccttcgagggggttccctagggagtgaaaagagagtagttgtgcacctcagccagggcctggcatgcaggaactgggcatggcacaaacagtcatgagatgcaggtgtttggacacacactgagacatcaagaagggaaaatcagacgcgactacagtagaacaggagtactacctcgaggctggctttgagggtccagagcctgtactcgatgctaccagcagactag

SEQ ID NO: 704665 - DNA, 383 bp, Homo sapiens
gtttcgtcttcccggaagcgttggaggacattccctgttgactgcgtccgatgtgtggcgactgtgtggagaaggaatatccaacggggtaatactgcctggagaatggatctttcttatgactttacaggctgtgagtgtgcagtaagcgggattttatgctgatcacaaacaaatccttgaagagaagatggagagaaatagttacctatgatcatgtgtagaatgcacatgtatagcagacatgagtatacatcagtatctggtgatttcaggagtataccatgctgtgtctgttatgcggcaaacggagatactatcagtattctccctgatgaccccgacaaatgactctcttattctaaggatccttctacagatct

SEQ ID NO: 704666 - DNA, 480 bp, Homo sapiens
gccggcctgcttcttacccagtgtggtaccgtacatgggaagtactgagtatatattttcgcgggtagcgactgtctggggctggtgttgcgtggtggtaaaaataatctaccaagacatttgaggtaaagaaaggcagatttattagagaaagtatgaaaatacattgcaagaaagctataggcaagtcagcaaaagaggagctgaatgcaagtagcaaaggcttgctggggatcttaaaggatggtgcttgtgctgtgggctgaagagagctttgtgcagtactgataacacctaggttgcaatgagctatcaggcgagggtctgatgatagctgggcacaggaagattgtgagttatttgtggaggaggactgtgtgtcctggaccatgaagaaaggtggacttctagcttatctgcttatgtatttttgctttaccctgttcccttattaggactgcacactgggttaagtaagca

SEQ ID NO: 704667 - DNA, 416 bp, Homo sapiens
gcggactgctcttcgctgggactcgctagcatcgcttctacagaacttcagatgcatgcttgataaccttactttgattgtgatcctgaacatgttgaagtcgtaactgaataccactgtttcgcaggagtttttatcgctgacttacacagatatgattgaacaggtgaagctagcctgctaataccattgatttaagagccaacaatatgcacatgccattccgcaagcattggcttgttcacctagtatttagagcatgttgactttgttagacgcggagaggttgatacgtgtatagatgactgcactgtcactttaacctgaacagacttctgacaacgaaggacgagccagtcttagagactacggtatccatcaggctggccaggaatgttcgaacttgttgtttttgg

SEQ ID NO: 704668 - DNA, 484 bp, Homo sapiens
tgaccacctagttttatttttttttttagagaataggggtctcactctgttgcccaggctgaagtacagtggctcaattacagctcactgcagcctgcaactcctggggcttaggctatcctcctgccttagcctcccaaagtgctgggattacaggcatgtgccaccgtgcccagctagtttctattagttttggaaattctgtgtattttggtggtttccccagtctgtaattttgcatatgtatgcttggtccttttacctttttttccaggtagtgacatccaggggtatttattttcctccatctttttcaagctttcaccaataagcatctataacttcttatcaaaaacctaacaaaacgacggtatggcatcatacctatttcttttagaaaccacaatgtatttatggagtgctttctgattaagcacaaagtttagtaaaggaatgctgctggtttaattaagtagataaatcc

SEQ ID NO: 704669 - DNA, 355 bp, Homo sapiens
atgcacattaatcacagctatcatggaggcatgacaagacaggaagacattgaacatgggaggcgaaataggaaaatgaagaggtatgcaactgtactccggcctgggcgacagagcgagactccatctcgaaaacaaacaaacaagcaatacctaacaagtaacatacccattcactaatacccagccgcgcctatcatgaatctctatagaggcctaaaatgaggatctatagtaactcttgatagaaacaggaataggggacgggcaatggtgactcagtgcctgtaataccacgcactaatgggataccgtgacggatcgctggggactcctcccagagtcaacctgcagg

SEQ ID NO: 704670 - DNA, 454 bp, Homo sapiens
  misc_feature (40)..(40): n is a, c, g, or t
  misc_feature (47)..(47): n is a, c, g, or t
tgcagttttgctcttgttgcccagcctggagtgcaatggngcgatcncggctcacagcaacctccacctcctgggttctagcgattctcctgcctcagcctcccaagtagctgggattataggcatgcagcaccatgcctggctagttttgtatttttagtaaagacagggtttgtccatcttggtcatgctggtctcaaactcccgacctcagatgatccgcccacagctgcctccgacattgttggaattacaggcatgatccaccgtggctggccaaacaaaggcatttctgtgctaggtcgttcttgttcctttatctgagtgagctggaggtttgtacaagtttttatccaaatgggccagaggtttttctatctctgcagccacgggcatgtctccaagcacaacaacatatgttagttcccttctgtcgtcttctcacagccgcata

SEQ ID NO: 704671 - DNA, 112 bp, Homo sapiens
  misc_feature (15)..(15): n is a, c, g, or t
  misc_feature (48)..(48): n is a, c, g, or t
gtgtcgagccttggnggactcccccgagatattccccacaatatcttntaagacgctgagtgtctggtggataatcagtttggtgtcatccagtggcatctttctctgtggg

SEQ ID NO: 704672 - DNA, 1186 bp, Homo sapiens
  misc_feature (360)..(360): n is a, c, g, or t
  misc_feature (823)..(823): n is a, c, g, or t
acgggaggatcccgggcaggtgcctagcagcgacggagagagaaaagaggcctcgggatgccaagaacactatgatcctggagatctggtaccaggtagcgggggagaccaggaggccactatgtcgatatggggcatatccactgaggacgggctgcgctccagacacagatgacctgaagcagcgggccaagggtgtggacagatacatctccaagtatgagcgggacaaagccttctccgataggaacaccctcatcatctacctggacaaggtctcacactctgaggatgactgtctagctttcaaagttcaccaatactttaatgtagagcttatccagccgtggagcagtcaangtctacgcctattacaacctgtgaggaaagctgttcccggttctaccatccggaaaaggaggatggaaagctgaacaagctctgccgtgatagaactgtgcctgcctgtgctgacgtgcacgacattgctttcattacaaatagtcggcactgacagggtcaccctggacacgaacggctggacaaggcctgtgagccacggagtggactatgtgtacaatgacccgactggtcaaggttcagcttgtccaagtgactttgtacgagttacattcaatggcccattgatgcagacctattcaagctcagtgctcgtgactgagggtgccacggttgtgatcatgcgagcgtcaccggttcactctagccccagtcacatggtgcacgcagaatgcccctgcaagtctggcaggcagacagaaagcgagcataccgttcactgtggtggtctgtctccttccgnagtatgtcatgcgggcagtgatgaacgcgcacaaggcttctagctgacattcagtcggccgaagcgcacagcttgtgccgtgcggagcgactgagctccgagggtacgtgactcgaactggccaaaggacggcacatgacgaaaccctaggaacagcaagtgtccatggcagctctcgagccggccctttcgacctgatgacgccattgggtctgatcatatatggggggtgcgcctcaaatcgttgacctagcagccccaagtttctcccgcaatttccacgagtaaaagcctttcgagtgtactattcttccaagaacagcggatcgcacaaagaccatcgacagccgaccgatggaaaca

SEQ ID NO: 704673 - DNA, 396 bp, Homo sapiens
  misc_feature (5)..(7): n is a, c, g, or t
  misc_feature (32)..(32): n is a, c, g, or t
  misc_feature (46)..(46): n is a, c, g, or t
  misc_feature (48)..(49): n is a, c, g, or t
  misc_feature (65)..(65): n is a, c, g, or t
  misc_feature (91)..(92): n is a, c, g, or t
  misc_feature (94)..(94): n is a, c, g, or t
  misc_feature (102)..(102): n is a, c, g, or t
  misc_feature (124)..(124): n is a, c, g, or t
  misc_feature (130)..(130): n is a, c, g, or t
  misc_feature (146)..(146): n is a, c, g, or t
  misc_feature (148)..(148): n is a, c, g, or t
  misc_feature (188)..(188): n is a, c, g, or t
  misc_feature (197)..(197): n is a, c, g, or t
  misc_feature (208)..(208): n is a, c, g, or t
  misc_feature (219)..(219): n is a, c, g, or t
  misc_feature (235)..(237): n is a, c, g, or t
  misc_feature (264)..(264): n is a, c, g, or t
  misc_feature (267)..(267): n is a, c, g, or t
  misc_feature (269)..(269): n is a, c, g, or t
  misc_feature (326)..(326): n is a, c, g, or t
  misc_feature (333)..(333): n is a, c, g, or t
  misc_feature (335)..(335): n is a, c, g, or t
  misc_feature (341)..(341): n is a, c, g, or t
  misc_feature (365)..(365): n is a, c, g, or t
  misc_feature (368)..(368): n is a, c, g, or t
  misc_feature (371)..(371): n is a, c, g, or t
  misc_feature (379)..(380): n is a, c, g, or t
  misc_feature (389)..(389): n is a, c, g, or t
gtatnnntatatagcctacagtcctggagtcnggatgcagaccacntnngcacgctctcttgcancgatcgaatcgtggatcttccggccnncntcatcccnccgccgggctgccgcgctcccngccgcngaaatctgcatctgcncngggtatttgtaggtggggttctcatagccgtggttctgcntcttgttcnggtgacgctcntctggggtgancattggatcaacctcnnngatcccgtggctgatggtgccatactnccncntcctcagcatcaccgggctgatgacgatgaccgtggcaatggccgctgcgatgaccngcaggcngntgagancactgctactcagactgaagtccnccngcngtgggccnncggattccngctcttc

SEQ ID NO: 704674 - DNA, 149 bp, Homo sapiens
tgcccccccccttttcaattgctattttttgaaaggcccccgtatgtgttttaaattgatttccccgtttcaggggaatcccggcccgtagtttccgttttgatggtataagcccaaccaataaaacgtttataaaagttgtttcttga

SEQ ID NO: 704675 - DNA, 1170 bp, Homo sapiens
attctagaggccgaaggcggccactatgttagtcatgtttctctgcttaattataattctcgatgatggaacgtgctgacattagaccaaggtgtcacgacgctttcttctttccaatcgttggaggctccattattaccagacaccggcgtagtacagtctgtcaccaacgtcacttaccttggcctctccaagtatccgacactccacacgatacccatcacacgaacacattccacaacacatctaacataacaaacaaaaagaacataatgcattgatctaacaacaaaaataccaatatcaacacgaaatacacaatataatagaatccaaatcacactcaccatataacacaccacagcccatctaacccatataacatctacaattaccaccacaaccaacaagcactacaccacacaaaccacacaataccatataatagcccctcacatcaaccactctaccacacctccccaaccttctataccacatacaccaatcccataccctaaccacaccccccacgtcactacacacacacctccacaaccacaaacacacactccaccactcaccttcactcccccatacaacatacacccacaccacacacacaacactcacacacaaccaccaacataaaactgttaacctccactaacaatctcaacaagcatcacaaaacacctacatccacacaccaacccaacaaacacacttttcaaccatacatcaacccacacacaactacatctactctctcacccactacatcacaagcaacccatcaatactaccagcactacctcacaaccctatatcctccaaactaactagcaacactaaatcaaccaaaaatgaaatacaaaatactaccaacaacatacataaacaacaacaatcggcctgagagcgaccacaagcacatgtagtctcacgacaaactcaacgagtagccactcaaacgtcaagaaccgcaccgccataataacaacaccacgaacgagcgccgaccactcccacactgcagagaaacgagagaacgcccagctcccccacacagtactcaacaccactataagagaccgacgaacacaagacgagaccaaacgcagaagcactcagaccgccacaaacatacctaaaagtgcagcacgacccacg

SEQ ID NO: 704676 - DNA, 260 bp, Homo sapiens
gggagccacagacagtcatgctcactctggctctgaagggacaatatgcttctgggcttctgccgctcagtcccttggaataccagtatattctaaaccttccgtcatttatcatctcaaggtgtcgtacccttgcttgtcatcccacatagccctgtgcggtgaatgtgaatccggagtctatttatctaaatagaatcggaaaaaacaaagagaaaacaaatatgaaaatgaatacatagacatagacaaaagcgggc

SEQ ID NO: 704677 - DNA, 643 bp, Homo sapiens
aactaaagaggaaatatggagaactggaacatgttggtcggaagccaagctaccaattacggggaagatctcacaaaaaatcatgatgagcttggatagacactcaccagaatatggcagcatgtcataggcattctgttatggtctgggatggtggctacaatggtctaatttacagcagtgtgtgatcccacaaaaagcaagtttatacctcagatgggggtataaaaatggttttcgctcagtatttactggaaaatggacatcactagtctttcagtaagatttctctcaaaacacgtgaaaaccttgggtaaatggcaattctttctggggatatatgggtacaacatgacgttaaaacttttttttttctattaaaactttaaaggggaacaaaattgtgaaaaaagccctgttcttcagaagggtgagtgggtggagggaggcagtaatatgaaagggactgctggggtattttaattacccagatttttatatattgtggccactgtgttaaattagtgggaaaggggaaattctgattaagcgacaggggtataatcctaaggtaagcttatttcagaccaagtctaatatttcagattctttcttttgcgactttaataactctggggttatt

SEQ ID NO: 704678 - DNA, 225 bp, Homo sapiens
gggcaaagccttcatgccaaaagtgggaaaagaaattgtgccgaaagccaaaattgagaaatgggatctaatcaaactaaaaagcttttgcccagcaaaagaaactatcatcagggtggacaggcaatctccagaataggagaaaatttttgcaatctacccatctgacaaagatttaatatttagaatctccaaggaacttaaacatatttccaagaaaaacca

SEQ ID NO: 704679 - DNA, 115 bp, Homo sapiens
tccgggaggaggagagaagtgaatacattcacagttaatgagtttccagtattttctgtcgcattttatgtgtaatggaaaagactgggaactgaactcacatggccactcaata

SEQ ID NO: 704680 - DNA, 416 bp, Homo sapiens
gaatcatcagagcagaatatccatccaggacaaaagccagtctcttgagtgttggaaggagatgaccaacagcttgagcagaattgggtcaaagcatctgcagcctgggctttgcgttggggcaggctgacttctgaaccaccctccccagggtgcagaaggtaaaagcagcagacacaagtaccctctgccatccccagcaccccagaatgctctccagcctgagcggcactcctcccattcctccttgcactgtagtcatttacttacggcttatgcctgctagtagccaggtcagagtcatctttgtgtgtctccctgcccaccccctgcccacatactgtcttagatgcctacacatttcaaacatcacacgttaaaagaattaaccaatcaattaagtaatgtaactttta

SEQ ID NO: 704681 - DNA, 112 bp, Homo sapiens
gttatccagctactggaggtgagtggaggacactgaccaggagtcagctgcagtgagcatatcaaccactgcactcaagctggcacagagtgagacctgtctcaaaaaaaac

SEQ ID NO: 704682 - DNA, 304 bp, Homo sapiens
acctgctgagccatgctgagggctattgggcacctccctgtggttagagaagagcgccccaatcagacttcaaacacagctgcctaatcagccagtggtgagcagccaggtggcctgggccagccataagattagtcttctcctcccagcctggtttggcccagcctccatgtatactatctttggatggaggtagagttgtcaatcagaaaactcctctcccttgacaaagactgccccagaggaagtccttttgtctcttgcctagcttctgccacaccttcctaatagatctttctgtttt

SEQ ID NO: 704683 - DNA, 421 bp, Homo sapiens
cgacactcttggttgaatattgattagttactttgtacagtgactctcaatttgggattctctgattttctgtttttcagaatttgactgaggctgtgcagttttggcaagaatatcacagaaatgatgctgtgtgctcagtagatcacagtggagctcgtgaggtcattgtgtctttttttttttctttttttttggagacagagtctcaatactgtcacccaggctggagtgctgtagcgccatcttggctcactgctgcctctgcctcccaggctcaagcaatgcacctcagcttcctgagtagctgagattataggcacacactgccacatgcggctaattttggtatttttagtacagacggggttccaccatgttggccaaactggtcttgaactcctgacctcaggtgatccgc

SEQ ID NO: 704684 - DNA, 296 bp, Homo sapiens
gtactcttcgcatggactgggaagttctgttaagtcgttaaatagtaagacgaccgtctcttctattagaattacagtacatgttcgagaccagtgagagcaagcctttacgccggttgagagtttccaacatcagttgattgagcttcaggctttgcaacgtttatccctgtagagatcatctttacagttccgcgggaaaatgtgaatggggtgcgtgttgttgtctttactgtatgaggacgaggaaaataaaagagagaattgagaaaatacagctcagtagaaaaaaaaaa

SEQ ID NO: 704685 - DNA, 323 bp, Homo sapiens
atcgtacggggctgggattacagacacccaccacaccccactcatttttgtatttttagtagagatgggattttaccatgttggccatgctggtcacgaactcctgacctcaggtgatccacttgcctcagcttcccaaagtgctgggattacaggcgcgagccactacacccaactacttgtatttatttactgctcctccctgcctcctacaaacagaccccaggtctgttttcttgaatgctaaactacatgaatgcttacaatgctaatctgctaaggtcctccagcctcagtgttccttatcagaaacatggggctaa

SEQ ID NO: 704686 - DNA, 767 bp, Homo sapiens
gcttcaacgtggtgtccacacgcggcagcctgcgtacccaggatatgcgtgccacccctgcacaggcaggtcctggtgatcttgtcccagctagagggcaacgccgagcttctcataatcactccaccgcctggcacatcgcaaaggcagtccaagccttcctcagtgacttggacaggcctccaatggggaccctacagcccccctgatcactgccagaggtcgcctggtcttgcatgggccccgaccgctgtgaccactcagtgacctgtgggcagtgggtctgtgacacagactggatccctgcagcactctgcgcgtcaacgcagcattcactgacgggaggagcccgtagtcgaacgtactcttgagtccagaatctcagtgtaccccggtcacgcgggagtcttggctcgacgactcctaagtggatctcaatagaatttcgactatctgggggctcgctatgacgttgcgtttgtagaaaattgccggagagttgatgcgtaatagagcttaggctgcaccaaggaacgcgtccgggcgctcgactcgaaggggacaccaatacaaaggaaccaaagcgagaccagtgatacgtcgtgtgagaactacttcgctggaaagcaactgggaaggacatcacaagggcacccttggaggatggccagcgggggaaaccatggtacggagacctccatgacaagactaggcgacaggctggagcggtatcgggaggtcagcaatcccagactccggatgcatcc

SEQ ID NO: 704687 - DNA, 619 bp, Homo sapiens
gggggaggcccctgccttttttggtttaaaaaactttacaggggcagggtctgttctgccaaaaaagggccccaagggtttcaaaccgtttaaaatttagggtgggggtgaggaattggcccctaaatcctttcaggaaagctgttctctgcccccagggaactggcaggggaaaaagggcggggggggctttctctatcgaacacccaaaaaaaagttgaaatggttgggggaaaaaactcccaaaaaaccccggggtccctggggggggaatcccacaatatcaattttttcttttgagggggacagggggggggtccctactgggttgtaaacttttgataggggttggggattgaaaccctcccaaaaggcttacaagggggcggtcccccactttctagggtttccaagaaaccccgggcttttttggcttgcccccccaaggttttttaccccttcccgggagaggtctttattttttttttccccaaaaactggcaaggacaacataggcctttgaaaaacccctttcctcccttttttcgcccagggttttcacattccccacgggggtccccacttggtttttcccccaggggtttttcccaaaaatttc

SEQ ID NO: 704688 - DNA, 113 bp, Homo sapiens
  misc_feature (91)..(91): n is a, c, g, or t
gctccaaacaggcatcgaggtgcctttggaaagccccagtgcactgtggccaggttcacattggccaagttatcatgtccatccgcaccanagctgcagaaacaaggaagcat

SEQ ID NO: 704689 - DNA, 202 bp, Homo sapiens
  misc_feature (42)..(42): n is a, c, g, or t
  misc_feature (66)..(66): n is a, c, g, or t
  misc_feature (88)..(88): n is a, c, g, or t
actgaagaatatccaaataaaccacctacagttagatttgtntctaagatgttccatccaaatgtntatgcagatggtagtatatgtntggacatacttcagaaccgttgggagtccaacctatggatgtgtcttccattctaacattccatacaagtctctttttggatggaaccccaatccccaattagttccagcaaaa

SEQ ID NO: 704690 - DNA, 134 bp, Homo sapiens
agactcttagaggatcccccgcccccacctgacagccccatcctcaaagactgtcttacttactcattgcaggttctagagactctaaggagcattatagctgcctcttcaaggccaccacattctctgtgctc

SEQ ID NO: 704691 - DNA, 398 bp, Homo sapiens
tacgttctttgaagaagattacgaaaattaacaaaccgttatccagactaaaaagagaaaatactcaaataactaaaatcagaaatgaaggaggagacataacaactgatgccacagaaataagaaatttaaaggatcataaaagactactaggaagaattatgtgccaacaaattggataacctagaagaaatgaataaattccttgaaacatacaacctactgaaactgaatcacaagaaaaaaattaaacagacctataactagtatggagattgaattaataatgaaaaaccttccaaaaaagaaaaagaacctaccaagcctacggaggttcataggtgaattctaccaaacatttaaggaaggaattatactaatactctacaaagctataa

SEQ ID NO: 704692 - DNA, 342 bp, Homo sapiens
gagatccccttagatgcctaggtccctgtgagttcactttttactgcagtaggaatgtactggagaggtgaactgctccttcggagatgatgagtgtcacgtggtgtttcaaggggatactcacgacccttgagctccacacaatggcaacaggaagtggcatgaattattacagtagtacagtacctattacagttattcttaggcagccctgatttaatactgcacctctgcactacgtttgttaacatctctctacggcgaatgctgtcatgtatggtctgtaagcgtttgcatgtagcctcttctttttagagacagggcttgctatgttatccaggc

SEQ ID NO: 704693 - DNA, 438 bp, Homo sapiens
  misc_feature (30)..(30): n is a, c, g, or t
  misc_feature (113)..(113): n is a, c, g, or t
  misc_feature (151)..(151): n is a, c, g, or t
  misc_feature (208)..(208): n is a, c, g, or t
  misc_feature (227)..(227): n is a, c, g, or t
  misc_feature (303)..(303): n is a, c, g, or t
  misc_feature (345)..(345): n is a, c, g, or t
  misc_feature (434)..(434): n is a, c, g, or t
cgaaacgtgccggagatccctgtgtacccngcctttccagcacctcctcagtacgccttgccaacctatgaaatccccgtgaaaatgcctgaaccagaaccaccacctccttncttacctgcctgaagaaaccctgcctttgacaataaancctataccagctttttgtccgtttatgttacagaatgccgcaattcagggctcttcncacttgtttgatataaaanatgttgtcttttgtttaagcatttattttcaaacactaaggagctttttgacatctgttaaacgtctttttgtttntttgttaagtcttttacattttaatagtttttgaagacaatnctaggttaaagcaagagcaaagtggccattgtttggcctttgaattggggggtgggaaggggaaagagggtacttggccacatagtttncctt

SEQ ID NO: 704694 - DNA, 92 bp, Homo sapiens
ggatttgctggtgcagtacaacttggcttaatagggacatgtgtatatatatttagagaggagagagcctctgaatgactcattctggaaaa

SEQ ID NO: 704695 - DNA, 1098 bp, Homo sapiens
gatgatcgtaggctctattcatctataagtcacaagggggtaggtgctctagtctcccgtagtctatccgtagcatgacagtcgggagagtaacgcagttgtatgcctttctaggtctatgttggatccattgcccgtactagccaggtggcgctagactcgcgttcaacctagcatttgctcttagcaggcgttcttccaacgtttaaaggcaggctccacgaacatttggactgaggatacacgtacagcacaacaggcatgaaatgtacgcacgactgcgctattggtgctatcgaatatcctcgtagtaagaatgtgtgagctgtgagtggctgcctacctttcggcacacgatcaggctgaggagagatacggatcaagaatcagactttctgtggctcataactattgaggctgcgtgcgatgaagatctctacgttactttgcgctagctcacatgaaatctccgaagacacggcgcagctgaacaagctttcagtcgacgcatacaggggcatccatgagtcagcaagtcgatgacaaaatgaagaagccagattacgatgagtcactcagccgaggtaacctgggcagattggctggccgagggacgaagggtaatcaatgtatcgtcggacctgagctcttcctggtgatgtgccttggagacgtcgtgaaggctgcctctttgtccccactatgggaccaggtgccggaggtgcccattgtgtcgcgtcgggtggtgatgacggggctacctgatgtggtcatgtctgaattgctgggttctgggctgacagtgagcaccgaattgtctatcggaaccaagccagggacaggatggtcaacacgactcgatcgactggtccgaccaccaagcggggaacgcttgattccatttgggcaattggattgaactggaacctaaccaaccaagttgctggtggcgacttcacgcaacagtttggactcgtggaaacacgcacgcattcaggtgtgaattaccggcccagattgggaaaagtttgaaggcttatgagagggtattcgcaaaaaccaatgggcgtacattccttaccctttccgggtgatccg

SEQ ID NO: 704696 - DNA, 254 bp, Homo sapiens
ccacctcagcctcccgagtagctgggactgcaggcacccgccatcatgtccggctagtttttgtatttttggtagaaacggtgtttcaccatgttgttcaggctggtcttgaactcctgacctgaagggatccacccgcctcggcctcccaaagtgctggaattacagacatgagacacggcgcccagctgcattgtacgatattaaacggcatccctggtccccacccataaatgcaagttacaccctcccaa

SEQ ID NO: 704697 - DNA, 164 bp, Homo sapiens
gggggggggggccccccccccccccccctttgggttaagttcccttggggggggggccgaaaaaaccagggggggcccgggggcccccccccccccccggggggaaacccccggggggggggcaaatttttttaaaaaaaaaaaaaaaatttttttttttttga

SEQ ID NO: 704698 - DNA, 236 bp, Homo sapiens
cgccgtctggcttttcaccgtgccgtgtgcaagcattgtactgttggccgacatggtgaagtgaagagtgagcactgcaatcaaggagagacacaggcgttcagaggaatgggacacagatgacgggcgggttggagagagcagcagagtccgagccaggcaaggcaacaagagactgattgcagtgaaacgacggagacgaaacacacgtgacgctgaagacgacgggatgcgac

SEQ ID NO: 704699 - DNA, 395 bp, Homo sapiens
tgcagaaggaggcataaaacttgcttctagttatacaagtaaaaagatggagaaaaattttgcccccatctggatcctacccagagcctcaccaacacctgatttagacacaacttcgatgatcagatttgggacttctgagctgattaaatgttgttcttgtttttttcaagatggggtctcattctgtcacctgggttcagcctccagggttgagcaatcctcctacctccacctcctgagcagctgggactacagccatgtgccaccacacctggctaatttttttttttttttttttttggaaatgggttctggctctgtcacccgggcgggagtgcttgggtgcagtctcggcccattgaaccctctgcctctggggtccaaccaagtct

SEQ ID NO: 704700 - DNA, 252 bp, Homo sapiens
  misc_feature (158)..(158): n is a, c, g, or t
  misc_feature (192)..(192): n is a, c, g, or t
ctagaggatcttgatgtcatcccccttcgtgtggcatcctgatgccctctgtgatggcgtgtgccagttccagctcacggacctccatggccatccaccaagcaccccatcgtatcaacttggcatgtacagtggtgtggaccccttccccgctcatnggatgctcctgtgtggcctccaactgaacatgtnaggagacctgtccacccacaagcatatttggtcacaggtgtctccatttcacaatgccag

SEQ ID NO: 704701 - DNA, 533 bp, Homo sapiens
cagaacacactcaatcagaaactaaggtacttgtcccaaatttcatacctatcatctagtagggactcgtctcacacagatatacttacagagtgaatatccggcggtttatgttaaatcattctgcatcagtgtgaaaaacaataggattgttttatggaggcttgcatagattccctgagcaggatttaatctttttctaactggactggttcaaatgttgttctcttctttaaagggatggcaagatgtgggcagtgatgtcactagggcagggacaggataagagggattagggagagaagatagcagggcatggctgggaacccaagtccaagcataccaacacgagcaggctactgtcagctcccctcggagaagagctgttcacagccagactggcacagttttctgagaaagactattcaaacagtctcaggaaatcaaatatgcaaagcactgacttctaagtaaaaccacagcagttgaaaagactccaaagaaatgtaagggaaactgccagcaacgcaggc

SEQ ID NO: 704702 - DNA, 443 bp, Homo sapiens
actttgaaatcatatatgtgataaggatatataaataattccaattcaccaatagaaaacccattttaaaaataagcaaaggatttgagtggacatttctccagaaaagatatacaagtttccaataaacacatgaaaagatgctcaacagggccgggtgcggtggttcacatctgtaatcccagcactttgggaggctgaggcgggcggatcaccttaagtcaggagttggagaccagcttggccaacatggtgaaaccccatctctactaaaaatatgaaacttagctggctgtgatgtcatgcgcctgtagtctcagatactcgtgaggctgaggcagaggagaattgcttgaacttgggaggtggaggttgcagtgagctgagattgtaacattgcactccagcctgggcaaaagggcaaaactccatctcaaaaaaaa

SEQ ID NO: 704703 - DNA, 158 bp, Homo sapiens
gctcagacttggctctgtgagctggggcaagcgaggcccatcccgagctgcccttgcctcctctgcacaagcggcgtgggactagatggctggttgttccactcttgagctgcaagggtttaggcttcctgagaagcccagtggggaagctagatgta

SEQ ID NO: 704704 - DNA, 371 bp, Homo sapiens
tctagcaggatcccctttcgtcgaagaacaacggctcgtcaaatccttcagcaattctaatccactttgggttttcagctgctttttacatctatagcaatttgactagaactgaattatcttctacactgtaatatcactattgtggaattacaggaattctggggatattttggtgaaataacaaaacacaataggtcctattttatacagttgtactgtgatcagtaagttttttttgtaccctttttcttctttttggagatgcttctcctccagataagggctttttcccctatttaaggagtccgcatgtttgatagatgtggcaattggcagctgttgatctttatcttcctggtaccccatgt

SEQ ID NO: 704705 - DNA, 104 bp, Homo sapiens
aatccccccccggggggcttttttcccccattttatacagggagtggataattagggacccccccctgtttccgtccttcccgtataaaaagggggtcccttta

SEQ ID NO: 704706 - DNA, 171 bp, Homo sapiens
gacttactccacagatgagctcagccccagagagagtctgacgtacaagtagcaggccaggctcaggccccaactcgccagctctcccctctggatctgcatctaagatcgatttctgtcatggaagacagattgctctgttgcactaattcactaaactgcttgttggga

SEQ ID NO: 704707 - DNA, 163 bp, Homo sapiens
gatcctcaacccactgagcaagggcaggtatcgaacccgcaacctcctggttcctggttggatttgttaaccactgagccacggcgggaactccctagttctccttttcttatccatttttatactaatcatcaatgacataagttgctatactttcgtgatg

SEQ ID NO: 704708 - DNA, 855 bp, Homo sapiens
aggcgggttgcagtcagacgtcacctgccatgtctgacatggcagtctccaacaccatcgaaccccatatctgaggacatacagactattggatctaccccggactcttaccaccccattctaggcccctgaaacccaggggagcgagggcaacgtggtaaactggggaaagccacagtgtcagtggaaccaccacgctcacaggactgcctgcgacagattcaccagaccagagacacttgtgtgcagcagcgccaagatcaagtgcagcgtgttgccatagcataccaggagtccacaaagcagctcacatatgaagaaactgcccatcgtagcctgtaattcatctacaaactgattatgaacactcagccaaggctgcggctggaatgactcaccacgtatgtagtaccttccccctggagctggacatgacccctttcatggcctccatgcacaagaagagcaggatgaatggacagtaccacgcatgcccacggacagtctcaacaaatgacaaacacaagtattccctgtaacagctgattgcaaacccatcaaggggacttggagaagtggccactactaccaacattaatccgtgcaccccaagaccaccaggtacaaagtggtgacgaatgccaatcatcaccaggccgacatcacagaccgccaaggacagcgaaagcgaactgctgctccactcacaaaccgcacctgagatacgagtagccaaacagcagaggcagaacaacaacccgccgcatggcacgcctcacaaggacccccaggccaccacaccactcaccaacacccacccacccacacgaaaaacacacacacaccagcaccaca

SEQ ID NO: 704709 - DNA, 726 bp, Homo sapiens
ctgtcgccacagtttccgtcttccggggccccccgttggccttcccccgtctttgcaagcggcccatggattcccctcccgcggaattcgtgatttccagtgcccaaaatgctggggccacacgcatcttgccctttgttacatcccgttccctcgtttttcttctggacccccggggagacaccgccggctaccccggaaatagcttcaagggatgattcgcccccctccgggaccgcctaagcgacccatggatgggagtcccgccccagagcccccccgcgtatttctggcgcccaatcttgcaagacggccaccgactcaacactcccggacgaacatctgtgctccttgaggacagagacctgcgatgtgttttttcctgccgaaaggcctggctcctcctgccgggagttctccccctgtagaccccgagcacttgccccctccatgtggcgtcccggaccacttgggcttgggtgcaggagatccgagcgcagcctttcatcctctctgtgggccccacggagaattccggtgccgagattctcaagggccgcgacatctcccgggctctctctgtgactctcccgttcgggtgagcacggtttctccccccaccctggggctgatctgcttttaggttcctccaagcggcgccccggcccgagacccctatcggaagtggggactcgaaagacccataaatcaagttccccccaacca

SEQ ID NO: 704710 - DNA, 425 bp, Homo sapiens
aacgaggcagatcttccatcgattcggagcctccagaggcttgcttgtatgtatccctcccactcctgcttacagaatgcctcagaaaatatttgtggatttgatggcagctttaatctataagaaagaaagaacaactggaatgcctttgcaaagttatgttccacccagttcccgccctcaggaagctcagggtgacacgggaagtttgggatgggcacagtttattacaaggcagaaagggaccgttgggcgctactatcctaagatattttcagaaaatggtaggccaaggataggaatatgagaaataagtttgagcttaggggccagggtaggtgtcctggagaagtggggcctgcgggatgcatcggggaggaaatgcaggacgcccctgactccctgcacattgcgggagttgagtg

SEQ ID NO: 704711 - DNA, 412 bp, Homo sapiens
ttttggtataaagagtttatgccaaaaaaacaaaatttttgaaagacatgggcccccccaacctttgcacatggggaaggtatgtctcctttttccaagagacccactctatggaggggggcttatggaaatgggctcattttaatgccccccaaggtttaatgggaaaaaaacgaacacttttttttgtaaggaaaaaacgttggccccattctaaaagctcagcttttcaatttaaaaagggttaaagtttccacagtttgggttttccaccaagagggaattttttgagccctactaataggaaaggcccctttgtgaaagaacaagtctttttaaggataacttggtgcttaagaaaaagatgggccctctgattgggccatttgctatgacaggtatattgggggat

SEQ ID NO: 704712 - DNA, 197 bp, Homo sapiens
atcagctcgcgagcagggaggaactgtggccccgttatatggactcggggcctatatcagtcaaacttaatcttgagtggggttgatatggaggagaaggggggataggtgtatgaacatgagggtgttttctcgtgtgaactgagggtttttcttggtttttggtttttgtttcttcaaagactcggcacgtgaga

SEQ ID NO: 704713 - DNA, 492 bp, Homo sapiens
tattccacaggaatattttttatttttcctttttttggtttggaactacacacggtaaaactaaaggtatggattttatttggtttggtttttttaacagaagcttggatatcagcggcagatcactcaatactgggccgagacaaatctacttgggccggaagcagctctagatgagcctctgggctagatttagtccctccttattagtgttgggcgattcaggccaggtcatagggcctttcagacaaaagggtcctaatcccagtcaggcgggccaaaacattaacttgggatttctaacccggctacagcatcttctagaagggcagcaagatattatggtgggcagtgcacagataacatcagggtagactggactgggagaaaaccaaatcctgcgctggttccggtgtgcccccatccagcggtgcttgcacacacgggacacctttctagtatgaagaactggcatcatggtcggccctctat

SEQ ID NO: 704714 - DNA, 166 bp, Homo sapiens
gtggctacctcactgagcatttcgacctggccgaattgcgggatcaatcggcggatatgtacgtgtgcgggccgccaccaatggtcgaatccatcaaacaatggctgctggatcaggcacttgatggcgttcagctgtattacgaaaagtttaccgagagtaatat

SEQ ID NO: 704715 - DNA, 177 bp, Homo sapiens
  misc_feature (7)..(7): n is a, c, g, or t
  misc_feature (18)..(18): n is a, c, g, or t
aaaatgnaaattgtcccnattggattcttaaccttgatgcagagatacttcaggatcatcacaaacagcttatgcaaataaagcatgagctgttgggatcccaactcagagtagcctctttgcaagacatgtctttgccactacttggtgaatgctgagggacagactgtttaggga

SEQ ID NO: 704716 - DNA, 135 bp, Homo sapiens
gctcgacagccctgctgcgcttgcccggagactcgagaggcgcgcgatgctgtaatcatcgagaaaggagaagaacactgtggacatcagtttgaggcccacaaggaatgaatgagagccctaggatttaaaata

SEQ ID NO: 704717 - DNA, 351 bp, Homo sapiens
  misc_feature (226)..(226): n is a, c, g, or t
agttaaccgaagaggggggtcgaggagagccgggagtcgggggacccagggaggtttctgttgtccagcgctgccggagccggcttaagttgggaggtacaggtggtattaatcttgggcttgctgcaacttctgcttcccgggttcaaggtaattcttcctgcctagctttccaaggaagctgcattacagatggaggtcttgctcttttgcccaggccttagancaggtggtgttatctgggctcactgcaacgctccgcctccagggtaccagcacccatcagaaactcctgaggtgccagctttagtaactagcatacaaaagaacctaccattctaggatcttaga

SEQ ID NO: 704718 - DNA, 128 bp, Homo sapiens
gaccaggttacacaggcaggcatggaacgaggcagctcacaatcttttttgttcccgtctttttcatttcaatcaaagcgatgtcactttcggctaagtgcctgcattgtagttcttcatggaaaata

SEQ ID NO: 704719 - DNA, 218 bp, Homo sapiens
gtgactcgactaagagaattaaccagaactttacagactagcatggcaaagcttctctccgatctgagtgtggacagcgctcgctgcaagcctgggaatagccttacgaaatcactcttgaacattcatgattaacatctgcaacatgagccatctactgctcacacttacataatgagctatccaaattagtaagaaacatgctacagcattacaca

SEQ ID NO: 704720 - DNA, 722 bp, Homo sapiens
agtgagttaaagaaacttaagatggaggagaccctaaggagtcatgtaagttaaatgatcacccagtggagagtacacttcacagtgggaataagctctgcccattttttttcctaggtgctaattcaggaaagcatgctcactcttagtgatccttttcttcatgttgagatgaaatgtgtcttcagaattgttcttagttgttcttggttgtgcaggcaactggacagaactcagtccccctttaaatgctctccacatggtaaagacagctcttatgtatcttgttctcagtttccaaggcttgaataggttcatgtaaagtcatcaccacttcctcaaaaggaaattaacaaaaaaaaattttaattcagacgtcttgcagataacgtggcaattgtaatgagaatagcacagcagagaaaataaattttgtgactctgtttttcactgatttgtagtacctggtgatacttaagtgtcctcttttccctccccaggtggaggtatttttgttgaaaagtaaagagcctcatataatacagagctttccccctctgctgataactctcacaaacacttagcatatgtccatccatagtttcctattaaaacacactttgggggtatgtggtgtaggaatatgtgccatttttcatggtcttccctcccgtcttcacattctacagttcacagcagaattgtcttttcaagtccatctc

SEQ ID NO: 704721 - DNA, 945 bp, Homo sapiens
  misc_feature (1)..(1): n is a, c, g, or t
ncggctgcccgccgggggtggtttaatacaagacgacccgttttgtggagaccgcccgcgtgtgccttgggggcgacaccaacgaaccccctgtggtggcccccccgctaaagaacacccggggggcgctctctacacctcctcccgggcgttttttctctttgagtcccgcgcgggggggatgaaagtccattatctcccaccacggcggaacagcccgtctgtgcctcccttggccgccttttttgggggcgcacaaccatttgagagcacagcgtgttgttgcgcaacgaacagacgcacgcggctggtggttcctcgcgctcgccggtgatgtatctcgcggggagtatttgttttgccccccccagccgctccggcgtggcgctctacatcgcaccgcccgcggagtatggtgggtctcgctttgtttatggagaggaggctccgcgcccccctcctcccgcctggttgttcctccctggtgtgccgcccgcgccgccggggagaatagtgtttgtggccgccgccccccgtcggcgctcccacccgtggagcgatcttctcccggtggtgtctcgaggcgacaacacgaacgcccgcggttgttgtgtgcgccccccggggcggggcgctcgagttggtcgccctccagaggagtgtttttttcctcgtctcacccccccctctggtgagaggttgttttttgattccctctccgtcgcgggaggacccccactctggttgtctttgtttgaggggtcaccccaccgcgggtcgttgttactcccaccgcgtgtgggtgttcttcgcggcgcccgcctccttcccccccccccaaacggggggcccccccccaaaattttgggggggtttctccccccccttttttttttttttggggggggaaagaggggttccccaaaaaggttttttcccccccca

SEQ ID NO: 704722 - DNA, 726 bp, Homo sapiens
gagggctgaagaggagcgttgcgcaagcgcacccaagacggtcacaggtaactcccatctgacgagcgagggtcgccgtcgtcgcggaaattgtggtgttgtgcgccgcgggggaggcggcggccgcagcagaagcagctgagtgtctccctgatacccggatgtgaggcgatccgctggcgctagtctgaccctccgccaggcaaaaagggaacgatgggtctgtgggctatagagtttttttttaaaaagattactaaacttacagggacagtgatacaggaagtatcaattcattcagaaggcatcatttcatcaactcactctgtgaagaaacagcggtggatcatattagatttcttaaaagggtgctggggtgatgtggtaaaagagacatattagaaaggaagtgcgttggtcataatttcctccatgagttagtggtggctgagacatcgagtcatatattgggggggcaaaaactaaagggggcaccaaagaggagattctatattactgagaatattgtggtggacacaaaaggagggttagataaagaaggtgaaaccaagagaactcagcaaaccagggaaagaaagtgttagcataagaaatgtttcaaggtgattcgaagtccaatagtgtggactccagaagacaaaagtttcaaaaattttttcaaaacgaggtccattgattaaataattctccagtatagaagtaggc

SEQ ID NO: 704723 - DNA, 198 bp, Homo sapiens
tctcagagagcctgtgcgtcacggtcacagaccggctggtggcactatctactcacagtctatgcctcactacagctccgcagcgatgacatctggatgtgctgactctggtgcccagaagatgttgcaggacagtcagaaacagaggtctgcccacatccccatcactccctttcccaacttcccagcccgagccgg

SEQ ID NO: 704724 - DNA, 668 bp, Homo sapiens
tagttcagcttttggggacgctctcagttctcagcgcatggcccagctaatccttcaaaatagtctattgttcactaaatcctgtgcaagcatcatgggttggaggtgtgatcagcgtcttacaatcctccacgaagtgcatatgggtctgtaaaagcctatactagctttgatagctcgacgcgggcactgctttgcacccattgaaacagccatcaagagcgaaaggtgtggcatgagcgtcaccattgtccaagaatttatccgacccaatcgcgggtaaattgggccacgatgcacgagggcataatatgccatcacagcctaacccaggaagaaagtggacgcagacaaagatgtgcaaccgtttgcattcaattcgcccttggacagtcctaggccttaatcattgtgccaagcccgtgtcagacacggctagcagtgattcggggccctcattgaaagaactacccctggctcacgattaatggaccggcgttcttggcagctaaaaagtcttcccagttgacaggggggcgtgttgaaaccccgaacgaagggacgtcctctgccatttgagaattcaagtcatgctcacaagaaaaccaaaccatgtgcggctgcatgcgcacaatttacacaagagtgatacctacgtgaacttggtc

SEQ ID NO: 704725 - DNA, 150 bp, Homo sapiens
aggatcccccccgaagatgctgactcttgagaatcagcaaacacccagaacaggccttaatgacctcataggcactctatccaaaaagacaacagtaactggactagagaggcctgggtctagtctccatgccttagcagagccatatca

SEQ ID NO: 704726 - DNA, 128 bp, Homo sapiens
ttccgacagcattatctgagagcggctacattacccttctgctatggaaactcagcacattgaactgggttgattcagtattaacagatctgactacactaattctttatattatagaaccaacggaa

SEQ ID NO: 704727 - DNA, 1021 bp, Homo sapiens
  misc_feature (427)..(427): n is a, c, g, or t
  misc_feature (429)..(429): n is a, c, g, or t
  misc_feature (519)..(519): n is a, c, g, or t
  misc_feature (539)..(540): n is a, c, g, or t
  misc_feature (550)..(550): n is a, c, g, or t
  misc_feature (557)..(558): n is a, c, g, or t
  misc_feature (577)..(577): n is a, c, g, or t
  misc_feature (598)..(598): n is a, c, g, or t
  misc_feature (604)..(604): n is a, c, g, or t
  misc_feature (615)..(616): n is a, c, g, or t
  misc_feature (663)..(663): n is a, c, g, or t
  misc_feature (678)..(679): n is a, c, g, or t
ggggatatattgtgcccggaagtgcggtctgtcaatatgcgggacatgttgttgttgtcatgagcgcgcgaattttgtgtcgacccgtggtggactctgcgtgtaatatttctctgggcgggtttgttggagcccgagggttcgccccccgccttgggccttgagcaagcgcaaatgatgtctcaaggaagtcggtaagttttgttcccggatatgggcatcttgcaaactggtactgtgatggtgttcttactcgggaactggctgaaaatggctaactctggaactgagggtcgagttactcccttaccagggccaggaatccttatgcgtagccaccaggacatcaggatgttcttggtgagaaggccgcggattcgggaactgactctgtagttcagaagaggtttggctttcccgagggcantntagagctttatgctgaaaaggtggcccctagaggtctgtgtgcccttgccccggcagagtctctgcgttaccaactcctaggagggcttnctgttgcggagggcctgctnntggtgtgctncggttcnntcatggagagtggggcccnaggctgcgaggttgtggtgtntggganaactccgaggnncacgagggcttaatccctgaagtttgtggatggcctgatgatccccngcggaggaccctgtnnactactacgttgacactgctgtggcgccaccgtgttgctcagaacacgggtgtgctgggcatcaaggtgaagatcatgctgccctgggagcccaactggtaagattggccctaagaagcccctgcctgaccacgtgagcattgtgggacccaaagatgagatactgccccccacccccatttcagaacagaagggtgggaagccagagccgcctgccatgccccagccagtccccacagcataacagggtctccttggcagctgtattctggagtctggatgttgctctctaaagacctttaataaaattttgtacaaagaccaaaaaataaaatgacaaaa

SEQ ID NO: 704728 - DNA, 391 bp, Homo sapiens
gttattattattttgagacagggtcacactctgtcacttaggctggagtgcagtggcgtcatcttggctcactgcaatctccgcctcccaggttggagcaattctcctgcctcagcctccctagtagctgggactataggtgcctgccaccacacccagctaatttttgtattttgagtagagacagggtttcaccatgttggctaggctggtctcaagctcctgaccttaggtgatccacccaccttggcctcctaaagtggtaggattacaggtgtaagtaagccactgtgtctggtctccttggcagctgtattctggagtctggatgttgctctctaaagacctttaataaaattttgtacaaagaccaaaaaataaaatgacaaaa

SEQ ID NO: 704729 - DNA, 179 bp, Homo sapiens
caaaattggggcctggggaaaataccaaaattttccgggggggggggggggcccctgtttttcccggttcttgggggggtggggccaacccctcccttttccccggggggggggggtttccgtttgttggggttgcccccctgcccccccgcttggggccccgagcggccccctttcca

SEQ ID NO: 704730 - DNA, 294 bp, Homo sapiens
agaatgtagcggtagggtcggcaggctattggtgaatgataggtgatggtgcgataatagtagtatggggataaggggtgtaggtgtgccttgtggtaggaagtgggctagggcatttttaatcttagagcgaaaggctataatcactgcgcccgctcatatggggatggccatggttagatttatagatagtcgggtggtcggggtaaattgagtgaggcaggagtccgatggaggttagctgtggcaataacaatgattaaggatactagtataagagatcagggttcgtcc

SEQ ID NO: 704731 - DNA, 166 bp, Homo sapiens
  misc_feature (12)..(12): n is a, c, g, or t
  misc_feature (15)..(15): n is a, c, g, or t
  misc_feature (27)..(27): n is a, c, g, or t
  misc_feature (149)..(149): n is a, c, g, or t
acaagaacaacngcngccctgcgccanggccaagcaggagatgatggaataccgacaccagatccagtcctacacctgcaagattgacgccctcaagggcactaacgattccttgatgaggcagatgcgggatttggaggaccgatttnccagtaaggccagtggc

SEQ ID NO: 704732 - DNA, 190 bp, Homo sapiens
  misc_feature (71)..(71): n is a, c, g, or t
  misc_feature (73)..(73): n is a, c, g, or t
  misc_feature (78)..(78): n is a, c, g, or t
aagaagccttcagttgtatcgaccagaatcgtgatggcatcatttgcaaggcagacctcagggagacctantnccagntggggaaggtgagtttcccagaggaggagttggacggatgttgtaagagggaagggcccataaattaacggtttttgtacgttttttggggagaagttaatgggacagacac

SEQ ID NO: 704733 - DNA, 627 bp, Homo sapiens
cacaaagagaaatcatatcatcccttacttaataaaggtcccattagggtaagagaccccaacaagtacatgaataaccacaatcatgagacatatttctacaacgttgggggaaaagaagaagatcccagttatagtacagagtgttggtaaaacccagaaaagaaattcaattaagtatattgaaaatagttttgtgctgcaaatctcgctccaatttttataatggaagttaaccagaaaataggacaggctataaagacgctggttttgtggttctttttcctaaaatgcatccgtttctaaaaaagcaggagagagcaggcattctgatgagaacgtgcgttgatttaatccaacccctggattatagcttaactacacttagtgtgggccaaaatatctttttccttgtaggcctggtcctctgcaggactaggggcagagagctacccaaaagcataaacatcatcacttgagattccaaaaggctatgggagcccccaacttcttcatacagagaggcaagagccatgatatttcagcattcccggcccttcttgcactttgctccctcaaccccgttttcttccataatatcccaaccgccttctcttacaagaacga

SEQ ID NO: 704734 - DNA, 501 bp, Homo sapiens
cgagtggtccctgcatgatatgtgaggtgctacaacttgaatgagggagtaagtagtttaaataccaggcctggtttcaggatactactcaaacaggaaactccaaactgtaatttggttagttatcttccactcccagcctccaccccctccaaaaaacaccaagactgtcaactctgtgacgtgctttcctaatggcctgtagctacatgactcaaagaaaaaggtgttttctttggaacacacaattgtaaaactatacccagcatcctacaccctgatttctggcaaacaaaggaaaactacctttttttttttttttccactcatagaaaacagaatggggccataggccatttaaaatgccataactagtttaaacagaaacaacagtctatccaattgtgactgcttgcctatttgtcctctgtcaattgggaaattagagggagctttttataaaatcagatgctgagaacaaagatttttgtgcagaatggg

SEQ ID NO: 704735 - DNA, 995 bp, Homo sapiens
cacaacactaggctaggtcgaggctcgtgttaatcggcaccgagggacagcctggacacacagactccagcctgcttcagtgacaatgtggccttcgtgctgtgcctggacaccgtgttccgtggcagcttagcctgcacctgctcgtgtcaagccgcctcgggagggcaccctgcagtacgccttcctgcgggagctggagacggtggccgcgcaccagttccctgaggtacggttctccatggtgcgcaatgcggatcagcctggcggagtgacgtgctgtgcctgggtaagcacgagcgcttcgcctatcctgtcgagcgtgccgccttctacgcctgtcccacctggagagccaccgtgacggcagcgcaggcacgcatcatggacgtgcggtcccgggtggattctaagaccctgatccgtaacctacgaggtatcttgctagggcctgtactcgagtctatctacaagctgacagtagataggggacacccccagaccatgccggtgttcaacagtagctatatggccagataccagctagggagctagttggactcggtgcatggacgtggttcaccaacctaagccgtgggcctgcgcaacgcttgtggacggggtcagcgagcttcctcagcacggttgagcaaccacctgagccggtacctgaaggacgtgagagcagccctacgtcagtgctgtaacactcgggcagccagagtttgttcttctagacctgctttaagtcaagtggttgcaatggccttccgagtccaggccgggcgccctttgggcctggctccgtggctgatgggcttgcttgcctacctcgggatggccaaaggtgggttttccagaacttttagcttcctcttaagaaaccgcccaaggctgtcctggtaaggccgaagaagtgttcggtgcccccccgggaagcccgggtcaaactcctggcggcccattttttattcccccggggcctcaaaggagcc

SEQ ID NO: 704736 - DNA, 280 bp, Homo sapiens
gccggtaccatccataatgtgtgccaggctggctcgaactcctgggctcaaagcagtcctcctgccttggcctcccaaagtatgggattacaggtgtgagccacctgtatttttttttggtagagacaggatttggtcatgttgcccaggcgggtcttgaacccctgggctcagagcagtcggcctgccttggcctcccaaagtgctaggactaccggcgggagtgagctacctcaccgggcctctcatagactttaatatgctaatagacattatggag

SEQ ID NO: 704737 - DNA, 410 bp, Homo sapiens
gggagccacagaagccttggtctgtgatctctttgatggtggcacactgtgccatgtgttcccgtgcatcagagcttgcagccagcttgaggtccgcggtacgcatcactctctggggtggcttgggcccacacaggaaggtcacacatagcctgttcaagtagctcatgtccacgttgtagaagttgtgcacgtcctcacttgtggtatccggtttgttgccatagttgcacagctcatccgacgcggatatggaaaatgggcttgctccgggcattggccatccccagcagccagcagagggaggcccagagctgtcacatggtgaacgccggctcctagatccccacagcgctgcagcagagagcctacagcacagtgtgcgcacagcggagcggttggcgttgccg

SEQ ID NO: 704738 - DNA, 408 bp, Homo sapiens
cctgagctgcatcaggtggctagattctgagagggaggcatcccaaaacatgcatcctacagtatgaaagctgccagtctcttacggtttgaccctgaaattagaacacatcacttcctctgcattctattagccaaagcagtcacggatcagcccagattgaaggagaggggacataggccccagctttcaatgaaaggaatgtcaagccaggcacgatggctcacacctgtaatcccagcacttagggaggccgaggtaggcagatcacgttcaggtcaggagtttgagatcagcctggccaacatggtgaaaccccatctctactaaaaataccaaaattagccaggcgtggtgtgtacatgctactggagaggctgaggcatgagaatcgcttgaacccgggag

SEQ ID NO: 704739 - DNA, 124 bp, Homo sapiens
ctgcgtggtgggcgtgataaggggggcctgacacccgtgtatgggagcagaaacccattggagagcgaggctcgggatctggtggcctgccccgatttggcatgtaatgggcacctgctgcctg

SEQ ID NO: 704740 - DNA, 276 bp, Homo sapiens
ttaaaaaaaaaaaattttatcccattggcttgttttggaaagacatttctttggcccccaaaaaaacctaaaaaatttccttcccctagggccgggacagttaatcttttttgcccccatcttgaacccaaaatgggtttttggaatatttgtataaccgtgtaaaataaaaaaggaattttgtggcccgggcattgttttttaaactggaaaccatgttgttttaaaagttaataatggaaccccttttaaaattggataaaatttaaaataata

SEQ ID NO: 704741 - DNA, 382 bp, Homo sapiens
gcgttccggatacttgcaagccccgcggcactccccacagccgcaagtcacgccaccactacgggctgcacggcctgacagctggcccgcgccagcgctcacctctcggtctgatctgagcctatgcactgacccaccacatggcttctcacagtccctgacccccattcaccgctggcgaagatccctggcgatgcggtccactggctgcagtggacacttcttcacttggctctggaagccgcggtggtagagaagaaaagcctcagggtcttcctggaagagacgctgtgcagcactggtgggccctgagtacaactgtacattgaggtagcaaaatcgggccccatccagccgctgtgccatgagggctcgaaaagac

SEQ ID NO: 704742 - DNA, 147 bp, Homo sapiens
tggaaacagagtctcgctctgtcgcccaggctgaagtgcagtggcgcgatcttggcccactgcaagctccatcccccaggttcacgccattctcctgcctcaaaaaaaaatttagatcgttatccacgtgaaggttatgtggtacca

SEQ ID NO: 704743 - DNA, 329 bp, Homo sapiens
gacggctggtcaaagtctcagtatttggagggattttattgaatagaatgaaagttatcaacacaaatcataccataattttttatctaggatagaggttctcaaccttgttactgtggaggaacacataaccaagctgtttaacccaaagcttgtagaattataatgaaaactaaagccaagaacataagataatgtttaacagaatagaatatcaaaattaatgcttacgtatgtggatgctgtgtttgtatatgcacaattctcttctctgaaaaatttccccctcaaatggtggtgatttctccatatttaccttgatatttgat

SEQ ID NO: 704744 - DNA, 132 bp, Homo sapiens
atctatgcccgtcggcgggctaaggtcggctgggtcctctggggaggcaggctgtgcccattgcctggggctagtatggcaacaattgtgttgggtagtcttggccttgccagctcaggccctcaagtcgcc

SEQ ID NO: 704745 - DNA, 222 bp, Homo sapiens
gacgccgccgagttcgcgcgagggcaggcgctctgggtgcgttcaagattcagcttcacccgtaacccaccgccatggccgaggaaggcattgatgctggaggtgtactccccgtcactcctgctttacaagaggttctgaagactgccctcatccacgatggcctagcacgtggaaatctcgcacgttcccaaaacccttaaaaaagcccaacccatcttt

SEQ ID NO: 704746 - DNA, 230 bp, Homo sapiens
aacaaaaagaagccagaggaagaaggcagttctcatcaagatactgctgaaaagaatgcaccttccccagagaaagcgaagggtagacatactgtgccttgtatgccacctccaaagcgaagttttcttaaaaagtcctgaggggccagagctggagaagagtatgaaaatgccgcaagaggtggtggagatccggaaaaagattgaggtgttcaagaaactttcttggc

SEQ ID NO: 704747 - DNA, 405 bp, Homo sapiens
aaggggctttaaaataaatctgacggccggttttggtgtctcacacctgtaatcccagcactttgggaggccgaggcgggtggatcacaaggtcaggagattgagaccatcctggctaacacagtgaaaccccgtctccactaaaaatacacacggaaaattagctgggcatggtggtgagtgcctgtaatcccagctactcgggaggctgaggcaggagaatggcttgaaccagggaggtggaggctgcagtgagctgagatcacgccactgcactccagactagcgacagagcgagacaacgtctcaaaaaaagtaaaaaagaggccagcttctagagtcccaagtctcgtcttctgccgctgaaatcactaaatggtcagactataaaatcaaaattcagat

SEQ ID NO: 704748 - DNA, 116 bp, Homo sapiens
  misc_feature (4)..(4): n is a, c, g, or t
  misc_feature (6)..(6): n is a, c, g, or t
  misc_feature (112)..(112): n is a, c, g, or t
aagncngtgatctgtctgaaaacatacaatcgaagtaaccaaagcaaaaccttaaggtacaaccgttagggtttgttggttttttttttctgggagacggattgagaccctntctc

SEQ ID NO: 704749 - DNA, 152 bp, Homo sapiens
ttgtcatacccccgatacagcgagcaggtatgaacaacagtgcaggtatgaacaacagtgcaggtataacaacagtacaggtattaacaacagtgcaggtattaacaacagtgcaggtataaacaacagtgcaggtatgacacaacagtgca

SEQ ID NO: 704750 - DNA, 464 bp, Homo sapiens
caatagtagagagcgcgcacataaatgcgataatgaacccgagaaggggagaagcttgggaaatatatacaaaagagagacatacaaagaaatgcaaacaccaaatactgggaaacaggtacttatacaaaagccgcagaggcagaagtaattaacaccatagaacacggcagggggcagcgtttaactgagagtagaataacaaacacaatgataaggacaaaaacagtgctagggatgggacaggaaagagcgcaagcaaatgatggttaggacggactagcaagggaaacggaattaaccggaaagatcagagaacagaatgtacgcgaagacggcccgtgggacaaggataaaacaaattgcgggggcaaccctaaatttggctgcaatagaagtttccaatgcggaactaatgattgggggatgatacgaccagagcgaccgattagcattaaaatgaa

SEQ ID NO: 704751 - DNA, 391 bp, Homo sapiens
accttagagtacagatgggtgtgccttacactgagcaaatcatacagacttacctcaaacatgtattaccagagagcagttaagccgagagcatacctccacgatggcagcacaggctgccgggtggtggaggaagtaactgaagatacctgcaggtggtggtccaaggagccaggccaaggtgtacatgcgcttcctccccaggatcatcgccctgtgcatggagcaagtgtatcccaatacattgcctgagcgtccctcccctgatgtgaaggccgagctgatagagctccttttccggacgctccatcacaactggaggtacttcttcaagtacaccgtgctggccagtgtacagagggggatcgctgaagagcagatggagaatgag

SEQ ID NO: 704752 - DNA, 172 bp, Homo sapiens
gtaccgtactagcattgatttaaaaataaataaggcaattccaattgtcctttttttttttaaaatcaatgcttactagtttggtaggattcccaggtcagcagcagggttgattaaataatcttgacaatgagcagctgccatctgtgggggatttcattctataggttgt

SEQ ID NO: 704753 - DNA, 901 bp, Homo sapiens
gtgactgcgtgtcctgtgcatgcccatctgctgtgggtcctcagccttctctgctgggttacacgacgagattatcctgtctaatctactgtatattcgtgaccgggttgcatgatatcactgactgaagctttggctgtggcaactacttagtcaagaaaggtctacggtaggtacagcacgttgcactgttggtggcgagtacattgactgatggcacattcgttctgattgatccaccgagggtacctagtcttaagcaccagggatagtggatcctcgtgtgattaacttctgactgattactagaagaccatgggatagtctaagtagttagaagaagaactagatgatataaatagggaaacaaaagggtgggtcgcgaaggagtgcatcccccatgacctctggaacaagagcggatggtacccaagaatgcaaatccctcattgatccccacaagccgcggcccacaaaccacggctcccgtttgggtatgagcgtacccgggatgggcggcttggcggtgctttggggttggcacatggcttgcgttccctggtgagccatattcagccgctacgcaggtcgtcgcggcccttggggacagggtacaaccgcttggtgtgttcactcgccgtgggactatgcttgccttgttccctaaataccaagcccttcatcaccaagtctttgtccaacgcccgtgtggtagtaggaccaacacctggagcaaagtgaggggcgcggtggcacaccaggcgcatacgcccccaagccataatttgacacccagggtttaagccaacacaccaaccccggtcccaaagacggggggctaccccttggctagcggcccacagggtgttcccccccaacgccgtcacccctgtttatacgg

SEQ ID NO: 704754 - DNA, 516 bp, Homo sapiens
  misc_feature (31)..(33): n is a, c, g, or t
  misc_feature (35)..(37): n is a, c, g, or t
  misc_feature (40)..(40): n is a, c, g, or t
tgtattacgcctgagaagtacttatcatctnnncnnngcncccatccttccctatctcacggtccatatgggcgaggctgccactctgcctcctgcttgccttggtgccagctctgccacagagggccaggccccagaactggagcttagagccctctcccagacagccaaagccactgaggtggaccacacgggcgacagtggcctcacagcactcacgggcacctgcattctctgtcactgctgtgctctctctcctcaaagtgggtgctcagtccccttgtcaagaaatgtaggggttctacaagaagagcttggtgagatgtagggactggggtttatggcaggtagggtatgtgtgtttgtgaaggtgtccctgagagagactgcaattcctgcctgcatatgactacacacgcgaatggataacgtattaacagtctgtgtgtgtagactaggaatgtgtgtgagagagggaagatcgtgagagagggaagatcgtagagagggaaggat

SEQ ID NO: 704755 - DNA, 126 bp, Homo sapiens
cccttcatatggtctccagaaccaagtcacttctcaccaccggccccaccatccttcagccctacccatccatctttacctctcaccggggataagtggcaccgagcggcctctcctcttccagtt

SEQ ID NO: 704756 - DNA, 251 bp, Homo sapiens
tctagaggatcctatccccggatctgggtagctggaactacagtgagcatgccaccatgcctggcttaatttttgtatttttagtagagacggggtttcaccatgttggctaggctggtctcaaactcctaacctcaggtgatccacccgccttggcctctcaaagtgcgggcattacaggcatgagccaccgcacctggccagaattttatttttttatttttatttttcgaaacacagtctcattctgt

SEQ ID NO: 704757 - DNA, 124 bp, Homo sapiens
tcgcagttccactcacctcttccggactcaagatcctcagtatcaaaggcagttctggagttgagctccaggatttcacccctgacttaaagacccgcctacgcaccctttacgccgatgcggg

SEQ ID NO: 704758 - DNA, 308 bp, Homo sapiens
tctatttaatggttttcagactccaagacattagcttgtcattaagtaaatattcaaaaacgaaagtctttaagatagttttctttaagatacacttccaaaacttaagggctagtttaatgcaaattgcttctcggtatatgtgaagtacttttaattaaacattttttaaagtagattgactttttgtactatattttaagactttatagacatttatgcatcatttaaaaatgactgtagactgtatttataatagtatatgggttgttctcaggcctagcctcttagaagagaaataatagaac

SEQ ID NO: 704759 - DNA, 106 bp, Homo sapiens
tgggattcaactctgaatctttttagtatgtcccatatgtcatgtccatgattttaatagatatcttctatattaagttctagcatttatttcattaaagtgctgt

SEQ ID NO: 704760 - DNA, 922 bp, Homo sapiens
  misc_feature (879)..(879): n is a, c, g, or t
cctagtaggtcacgggaagatgtgcttcggagaggaagcatgtcttaaatctggaaatgatatgaagagggatgtcagcaacacttgatactgggccactaatagggagagtttctttcatctggtcaaactgctcaatggattctaccctttctcctggcgcggacacctcctttcgcaaccctccaacctctgtgctcactcgaaacctacccactcctcccaccctccgttttttttgaggaaagttgaagtcttttttatctttttttaatcactatttacatcatcgctcccttcgctattcttcatattgcgctactgcatttaattatattctatacccccgtctcatcttacaccctctcccctctcatgctttcctgcgcacccccccccccatctccactgcctcgtacccctcacttcatcgtgcttggttagcagcgcatcaaccttgtttgctccctatatactcgccgctgtattctcgtcttgcgagttctagtgctttgctcgtaccttgcttcttttctttacccgttgtctctccctctgtcctattccgctgacagctgcgctgtcgatgttgtagttctctctcttctcaagactactcgctgtttcgtacgctcatcgaaagcacgtttctctctctgttccgtatatcatcatagagggtccacaaccccccgacacgcacctctcaatcgacccaagtccacattaactctacgccacgatcaaacgactcgatcgcatcacatctcgccacatcctgaagtgtccatgtctaccttccccgccaccgtgttcgcttgcacctcatatatctctttagtgtccttaattgataatgaatgatttacaatgtaaaanacgcacattcaacattttactatcaccactccctcgctcccct

SEQ ID NO: 704761 - DNA, 691 bp, Homo sapiens
acagccgtcagcttaaactgtggaatgtagggaaccctactgcctacgttccttccagggtcatatccatgcaaaaaactttgtagcctggcttcccatggagattatatagcttgtggaagtgaaatatactctctctaccctgtactataaaggactttctaagactttgctaacattttaagtcttgataccagtccaaaagtgttctcgaccaagacccgaaagaagatgataccaatgaatttgttagtgctgtgtgctggagggccacatacccagatggggagtcccatgtgctgattgctgctacaccaggatccgggtcacccattaaggtgctagaattggtatgaagggttaactccagtccaattgtacttgatcctcgctgaaatacaactctgcacgctgaccatgagagaagcaacccgaaaatgtcactgtgatgtctctcccccaagtcatccactgggttttggatttgttttgaatatttttttctgttttgttcttttcccctcccttatgaccccttgggaccttgggaataccccgcccactctcccccatccatgttactccctggaccttgctgctcttggtggtgttatctaatttttgtgatagggaaaccaattcttttgaataaaaattaataaccaaaccattaaagtttattgagccccca

SEQ ID NO: 704762 - DNA, 366 bp, Homo sapiens
  misc_feature (6)..(6): n is a, c, g, or t
ctgacnagaggttcccagttccttctctaactttctctgttaggattctgaattccttctgtgtgttatctgaatttcttgagtttccttaaaacggctattttaaattctctatctgaaaggtcacatatctcagtccttccaggcttggtccctggtgcctcatttggtttagtgaagtcatgttttcctggattctcttgatgcttgtggatgttcattggtgtctgagcattgaagagttaggtattcgttgtagtgttcagagtctgtgcttgtttttgcccacctttcttggaaaggctttccaaggtatccgaagggacttgggtcgttgagaactaactggtcactgcaaccatatct

SEQ ID NO: 704763 - DNA, 1506 bp, Homo sapiens
  misc_feature (963)..(963): n is a, c, g, or t
ccgatgtcagttctgacttcttgctgtctcactggtctgtgtcaaacttgctttgtgccagcacattgtgttggtgcacatatgatgtggtgcggctcccctgttgtgtacaccaggctgcctggtgttgtatccgcccgcccctcatttaattgccgtttctctatgtagtgcaggccatcctgggttggagtataatttggcgcgcaggtggtcctcccccccctccctcaaggtctcccgaaggtagaatattgtgcccctccactgtaaaaaaagaagggggggtcttcccggccccaccctcgtttctggtgaatgatacctacggagggtcttataagaaaaattaggggagaaacaccacccgcggttgtggggaaaaaagggtgctcttaagagaattttgtggggcccatgtgggaccacgggatctattcccccggctcgccttatttgggaggcgcccttcccccccccgcgccttttggtggggacaaattggccccccccgcttatataatccacgggttgtgtcccgccgggtcctcggagtatgcccctttccctctctatttatagccgggtgctgtagaaaggtggccccctcccttgtcggagtttataccccacaggtggcaccccccacagagcccccctgggagcccccgcccccaaacaaagcttatactcacagcgtgtcgttatataagcctgggcccaccaaccacacagtgatcacagacgctcacagagagacccccacacgccacacaggagagagatagaaacccccagagagaccctggttggcacccggggcccgagagagaagagaaggcgctgtcgtgcgcacaaaaggggaaaccgtctcccccaccagagaagagagagccccacccctggtccctttctcgagcgacacagagagagtttaaacacacccggtctaacaccaccctntgtggtgtggagagacaccccagagtaagacctctcagacctgtggtgtggtgtaattgcgcaccccgcacacgtgtggatctccccagtctggagacctgggttggtctcttctgttgccctgtcccctgttgttctggtaaaatagtggggtctcccttaactgccatttatcccagaggaaagagccaagaacatgggacagttttagatcccaccagaggaagaaccctgccaccccctttctcgcccttctcacacacacagagtgtaacatctgggaagaacccaaagagccgctttggctaagactggtggaaactatccaggaccccattcacccatgcaccagataaccgatgagatccccccgtccactggggtggccaatagtccctgggtccctaagtctgtggcgtctcgtatctcgcccagctcgagaaaggccaagggctaaagaacttgcccctaaactgggtttaatgtaccctgttgagttttctgtaccataaaaataattgaaataataccaattttcccttc

SEQ ID NO: 704764 - DNA, 344 bp, Homo sapiens
tatgagatagggttggtgcttgctcaggctggtctcaaacttctgaggcttaagcaatccatttgcattggcctccaaagtgttaggattacaggcatgagccactgctcctggctccttttacatttctcctttccttgtcctactctctggctcagactggagtgcagtggcgccatctcagttcactgcaacctctgtgtcctgggttaaagtgattcttctgcctcagcctcctgagtagctaagattacaggcacctgccaccatgcttggctaatttttctatttttagtagagatggggttttgccatgttggccaggctagtctcgaactcttcac

SEQ ID NO: 704765 - DNA, 112 bp, Homo sapiens
gcactccaagtttattgcagcacaattcacaatagtcaagatacagacgtcagcctaggtgtacatcaattggacaaatgataagaactgtgatatagagagatcatagtag

SEQ ID NO: 704766 - DNA, 418 bp, Homo sapiens
ggaacctcttgaatctaggggaagcatcgtttagggttgcagggacaaagggcagagggggaaggcatgattctttgtagctggaattccagtcacttcacttcccttcgagaaagcacatggggcctggcgcggtgactcaacgcctgtaatcccagcactttgggaggccaaggcaggtggatcacctgaggtcaggagttcaagaccagcctggccaacatggtgaaaccctgtctccgctaaaaatacaaaaattagccgggcgtagtggtgcatacataacattccagctactagagaggctgaggtaggagaataaaataaaagtgggagacagagaaaacagaaagctgagatcccaataacacaatccagccagaggtgaaaagcataagactctgactcaaaaaaaaaa

SEQ ID NO: 704767 - DNA, 451 bp, Homo sapiens
ggccacctctctctgtgactctcagatcccaatatgcatagaacccaggctggatcctgggacatggctggggagctggacaggctgggaatctgtcaatcttccctagtttgcaggttggtggctggtgctggtggatatgcttcatgctctgggagcagagttcagccctggtatcagggtttcgacacacaatactgcgcccataccatatcttgcagtctggggattgggtccttctgttggtgactttggggtctccgttctgggagaccggacgcttggtacaagttgtggattctgaggggataaggggtgctaggaacccagggataagtgccttatggcgaggttcagttgctggaagaggaaggttttggaaagtttaggaagtcccaggttgagaaaacagttctggtctgagttggttttgttttatttgtttttcttt

SEQ ID NO: 704768 - DNA, 168 bp, Homo sapiens
tatttttctaatcagcaaggtgcttcactgccttcttgagacgcctctcaaagctcttaaatttctcctgctgcttatgttgttgtgttgcttggcagtctaatttctcttctgttacatgtttttatacttttcactaggaatatcaacattccatttcttccatac

SEQ ID NO: 704769 - DNA, 254 bp, Homo sapiens
  misc_feature (163)..(163): n is a, c, g, or t
  misc_feature (221)..(221): n is a, c, g, or t
  misc_feature (225)..(225): n is a, c, g, or t
cggcacgagagtcaataaggtttaaaatcaggcaccgttcatgtacatatgtggtaaaaatatcactttaccaaaaaataggctttcttctcttttcccagttctttttctcactttttgatctttccaaaggaaattctgcacatactaaagaatgtatggntcgggcacggtggctcatgcctgtagtcccagcagtctgggaggccgagatgggcggntcanctgaggtcagaagtttgagacctgcctgg

SEQ ID NO: 704770 - DNA, 486 bp, Homo sapiens
  misc_feature (205)..(205): n is a, c, g, or t
gccattctgccctgtgtgcgttggtggactcagatatagcggagaggggatgctctcgagatgtctgagtctgttgttgacagtggctgtgcagggcgaggaaggaagatggggatgagcacgggtctggcaggggcctccagtaagagatgcatgggcctgagcctcgggatgaggccgctctgtcggctgatgccaaaacagncccaaggttcctacacacgtgggctgctgcgtagagtcccaccccttgagacaaagcccctgaccaaggcccctacccacaggttgctgccctcgcctgggcgcctttctcccagattgaccctgcttggcataacctggttaattcccaaccccaggaactcctggtgctcagcacccccgacagattggagccagcccttgagggtggccgtggcaaaggccttcggtccctggggtctcgatgtctcatctgaggtctaaccccacattgcttgttgg

SEQ ID NO: 704771 - DNA, 172 bp, Homo sapiens
tatggatcccatcgggcaaggatgcagcagcagctggatagtaccaggagcttctggacataagctggccctggacattgagatccacgcataccgcaagctcttggaggtagaggaggagaaatcgcttggggaaaagtcggagagatgtaaaattcgtgtactgtgggag

SEQ ID NO: 704772 - DNA, 208 bp, Homo sapiens
gttagtgtggccgggcgtccgctcctcagcgatgtggcagcccgagccatgctctcgccgtccgagtcgtttattgtggcgttaggctacaagtccaagatcttcaagtcaagagagttagagtagtcccgccgctggccaacttcggcagggacctccccagccaccggtctttgtgtgtgttgccgggcgtattaccttaaggaga

SEQ ID NO: 704773 - DNA, 216 bp, Homo sapiens
  misc_feature (13)..(13): n is a, c, g, or t
ttccccccccctntttttttttttggcccgggggggggaaccttttttcccccgggcccccgttttccccttggggccttttgggggcccccttttcccccgtttttcccaaaaaaccggtggggcccggggggggttttccggggttttttttccccccggggccgggaggaaaaggtaaggaattaccggggttttgttcccccccgggtccca

SEQ ID NO: 704774 - DNA, 818 bp, Homo sapiens
aggcgacatgttagccacatctccattgaatggcagtagctgtcatttagcaagattgaggaaaaatttctcttaatcttgaacttgaaaagagcagttaccacagagaagagggatttttagcttttttttttctatttgtagagacggggtttcactatgtgtcccaggctggttttgaactcctgagctcaagtgatccttcttggttgggctcccaaaagtgtctcgggatttacacggtgtgtagacgccactgtgtgtgtggctaccaaaggggagtagtttattataaaacaaaaaccccccataatatgcttcgttccttgagtgcaaggaccttccttttaagactgtcagcttttacttcctctaatggttggttctttggaagaccggtgtctcacttctgtcacccaggctggagtgcaatggagcgatcatggctcactgcaacctccgcttcctgggttcaaccagttctcctgcttcagcctccctggtatatgcggactacaggtgtaccacactatgcccagtaattttggtattctgggcacgagatggggttaactggtgatggctaggctacagttctctatcgttccactttacgaatgttctcccccgattgtccatgttgtctacccaccatttaattcttctcaataacctgagttcaattatcgtacatctaacctgcccgacaaacacatctaaaaaaacacaacaccagcccacacaatcaaccacccacccaccatccccaacaaatcacccaacaaccccccacaccacgcacaaccacacaaccacaa

SEQ ID NO: 704775 - DNA, 313 bp, Homo sapiens
gtctagacatccgctatgctccctcttcaagcagcgaggagtaatagtccatctggttggatgcagtgtactcgttggctcgtacaggtgggacttgccatcgtgtggctgcacaggcctcccaattttccatccaatgcgatgtggggcacatcatctgttgtgaacaccagcaaatgcagtgcatcctttcgccagccaatcttctccttgcagacggctgcctggagtactgcatcaaagcccccctcaggggcatctcggttccgggacaccctctgtttccgaacttcctcattgaagctgtccactc

SEQ ID NO: 704776 - DNA, 198 bp, Homo sapiens
  misc_feature (48)..(48): n is a, c, g, or t
  misc_feature (126)..(126): n is a, c, g, or t
ccgactgcaagtacaagctcaagtgctcgcacttccactgcaccttcnccggtgccgcaacacggtggtgggcatgtcgcagatggactcgcacaagcgcaagcacgagaagcaggatgccgcganccgcggcagaggcccgcgcccgggcctcccatcagtctggacggctccctgtcgctgggcgccgagccgggc

SEQ ID NO: 704777 - DNA, 830 bp, Homo sapiens
tcaatcggcacgagggcgagagagaggaagctagtcgcgagtacttgttcttcatttttacacatttacttcccattttttaatttgtttctctctctcgtgcactctctcactcatttctctcttgcacttggtcttcggagctcattgccatggagtggcttgagctgtccgcatcaaaaagccacccgaaaacgtccatccttggccgatgcggttccagcgttctcactcattttacttcctatccgtgcattcattagacattcctttcctttcctggcgttgcatctcttttttagtaaggacatttattcctcatattagtgagagtcagggtgcccttattgacaagtcctagccaaactcttctcggtggatctacccatttataccatttgggttagtatattatctattataccagtatccttatactacttcttctagtacatagctattaccatacctccctggacctaacatatataacatagcaggtaggggtcgcccagggtggaaccccaaaaaaccctcatacgaggaggacccatggggccatgtattctcattcaccatcatccttgtctattaaggttactccactgacttgttcacttagaatgtccatctatatcacgtggaacagcctgtggtatccgctaaaaagtggaccgaggcaaagccctataattctgtgatgctgcatgtgccaccaacagatcgaatggcttatttacctcttattaccccccttaatgtttctgtcaacattgtccatggtaccatccaataccaatacatcaatcctctaaaaccaagccgaaaaa

SEQ ID NO: 704778 - DNA, 487 bp, Homo sapiens
gagcgtacccccagaatgagccgcttgcatcagtcgccaattcagtcccgcgcgggcacagaggcgctaacgtttggcagtacagctactcacgctgcgaagagagaccggacaccgtcgtgacccggacatgctcctggccctctccagctacacgcgattgcaacctgccgagaaccgaattgaagacgagccggcatgtgtcggcggcatgaacgcctaggctagcacggctatcagggaccaattacagatgacagatacgatgagatccgccgtcactggggtggcaatgtcctgggtcctagagatctgtggctcgtagtcgccaacgctctgagaaaggcacacatggctagaagaagcttgccactaacactgggttaaatgtacacgtgttgagttttctgtacataaaaataattgaaactaaattaggcaaaactttttcccctgtcaacatgaacaacacaaaggaaaagactct

SEQ ID NO: 704779 - DNA, 418 bp, Homo sapiens
cattccttgactcatggccatgcataaatctcacctttgtttctgctgttccatctccttcttcaactgacctttctgcctccctcttataacgactctcatggttacattgggcccacccagatcgtcaagaataccctccccatctcaagatcagtaactcgagcacattggaaaagtctttttatgctatgtaaggatcatgaaagtggggccctaatctggtaggactgtgtcgttgtaacaagtggaagagacactacaagcatgtatacatggaagaaaaaccacgtgaggacacagccatctacaagccaaggaaagaggctttaagagaaatcaactagctaacaccttaatcttgaacttcccgtctccataattgtgaaaaaataaatttatgttcttgaagccaaaa

SEQ ID NO: 704780 - DNA, 182 bp, Homo sapiens
tggggggggggaagggggtcctttttggtttttttgtggggtcactccggaaaaatacttttataatttcagtgggtattatgtgggggggtttcccggggaaatcattaaaggggtgggctggggacagtggtggaaagagcttatattaatataaaagtggatttcacttattgaaaaaa

SEQ ID NO: 704781 - DNA, 1148 bp, Homo sapiens
ggctgcgtcgccttcctggatggcggtggccgagtatgaagtgaccccggatgacgatgcgggaaggcattgtgggcggcgaggctaacgtcacgcaattttcttgagccacaacgggtcttgagctcatccctgacggtcccctcggcagctaggtgactgaactgcacccagtctggctggaagcagtggtccctgcaatgacctttgccaggaactcacccggttgacccacgaggtacctgagcgtggcccctttttgccagactaccatcgaccagtcatctacttcaagccgtttcctgcagtgcgaatgtggcttggaaaggcagctcagtgaccaataaacaccttcaggcaataccgagtcctggcgcaaacggtggcttaggggaggtgtgcgacctgcacaggtgcgggccacatggtacagattgtactgcctgcaaaagaaggcttacgacgataaacacgcggatcaagaagcggaccaggggaggccatggcgctgaaacgagaagcacgatcctggatgaaccacgtgacaccatgccaggtgtgtacgtgagctatgggccttaacgcgcctagtgagcacccaatgggacgcaggctgctgcctgggttgtctgtagcactgtgttgaaccggggcgcgaaccgtcaacgttgtcccacgatctacccatatggcgcccaatgctgattttccccctgaaagcctgcgggccccggtcttctagggccgtccggaagaatcttgctagtgagccgtggtagggaacctagctacacggggatagcgccatcgatgtacaggggatcctatgaaggcaccgatagacattcttgtcttgcaattgagccaaccgggtcagaattccgtatctctgacctgggaacttagctttgagtcactttgttgacccctgatgggggaacaggaaacccgttcaattggggtccattgttttgccacccagtggggataacactggtgttccaggcagttgtgtgttgcaagaattggaccgggtacactctgcaggcacctgaaattgagtggtgcgccacccgtgttgccatccattatcagaggactttatacgtggaggcaaactataccttcagttaacagggagacaaaag

SEQ ID NO: 704782 - DNA, 483 bp, Homo sapiens
cctcgtggatggtcggaagctggttctggtatgaatgtcatgatatcaccgtaaatcctattcatattttgtgcagcaggttcgtggacgcctaccaacattcattcatagcggtgattcagagaagatgaagagaggactctgtgggcgatgaagatcctcgatagagctcacatgagcagagtggactggcttgtaccctaaatacatatcacgatatgtctcactctgacctgggtcgactggatacaataccacacagctcgagagtggttgagctgccgtgggaacccgaatgggatctgagtccaaagcctaactctcaaacatgactctgatgcctcctattctttcctgaaatctacagtaatagtcatgattgtggcgtaaagacagaaaacggcaggcacggaaggtagagggagcccctctagctccattcttagttcccatgaagaaccgtccagtccagttccgggggcg

SEQ ID NO: 704783 - DNA, 350 bp, Homo sapiens
gggacagacattaagagagcaaaatgtaaaacagtgctactcttaataatattctttcctttagaaatttagaggccaggcacggtggctcacacctgtatcccaacctttgggaggctgaggcgggcggatcatgaggtcaacagttcaagaccagcgtggccaacatggtgaagccctgtctctactaaaaatacaaaaattagccaggcgtggtggcaggcgcctgtaatcccagctacttgggaaactgagccaggagaatcacttgaacccgggaggcggaggttgcagtgagccgagacagtgccattgcactcccgcctgggcaacaaagcgagattcgtccc

SEQ ID NO: 704784 - DNA, 103 bp, Homo sapiens
  misc_feature (61)..(61): n is a, c, g, or t
tcgaccccaagactttcaagtgcagagcatagagctgtcctggttccagacggtgggggantcggcactgagcgtagagcccttctcctaccaaggggagcct

SEQ ID NO: 704785 - DNA, 302 bp, Homo sapiens
attcgcggccgcgtcgactgcactgtagaacaacatacatgttaattacacacactacctatgtagcatggagcaagtaagtagtaaggacggcacgcggccgccctgctcctcgctgctcgctgatcgctgccacgtttcttgaatgaaactttatttccatcaaacaacaatgtcgtacgcaattactgtttgtacctgtcgccctatatacacgtctacatacatattgttacactacatgcacgtagttacattgaatgcgaattagaaatccaataacacgtgttgtacttatttac

SEQ ID NO: 704786 - DNA, 288 bp, Homo sapiens
ggcggatacggtgctcgagtcgagaaaagcacgagtgagcacgccggagaggggcgcgggcacgtatttccagccgttggaaatgcccaggttggggatcttgtaggcccacacggattcggccagcagggcgcagttccacgccatcagcgcgccgaacagcagcaccagcaggtggatgaagatcttcaaacgccgctggccggccgccggcaaggcgtcggaccagcgactcgaagccgatgtggccggcgtcgcgcacgccgacggcggggcccagcgatggtg

SEQ ID NO: 704787 - DNA, 351 bp, Homo sapiens
gagataagaaagcgtaagatgaacaaaagagaaaacagtagcttcgaacacccaactttcctttacggattccctgggaccttaagtcaggatatgtttcaaacacattccatggagaaaggaagaaagaggcattctctagtctcaacctgccccacacaacttgggtggtgatctggaaaacttgctcatagccaagccctagaccagctcagccactgtgtgcatcttctgatggcgactgaggttgcagtgtcgattaaagctttacccacattcaatgcactggtgaggtcgctcccctgtatggcttctctgatgttcaatgagaaatgaacgccgactgtagct

SEQ ID NO: 704788 - DNA, 1019 bp, Homo sapiens
  misc_feature (394)..(394): n is a, c, g, or t
gccacgctggaagggatcatccagtcagctcggtcatagcggcatctatcactgcccgtctcgccattcctccaggcctggtgccccatgaggagagttcctgcatcgtcaagagcgcctagtggatcgtacgcctggggcctaacggactggatgcctgtcatcacgaacgagtctccgtcaagtcagttttgtaaaatcatcgaggctccccgcgaccgcgggcgagagtaagagacgagaaatccaggccctccccaccggtccccgtgtcactgaggagcacgtgtaggctccgggctcgtagtgccctgtggtgcctggacgacgtacgtcgctgggtgaggcgtgtgcggcagcgtgcccgtgctaaccaccgtgttccgacaacggnctgcgattcgtggccctgggctggtagccagcgatcgatctagctgggccccggtctgccgaagaatagctcttcgacgggaacagcagacacggccacgtaacccccctggccatcactggggtgagcgttctccgtcctcgtcgtcagtcgtcgtcctccagctcgcccagcaacgaggaacgccacaagcaactcgtgagcccagcgtcggccggtcgggaagatgcacggggtcctttcccaaccatgcctcagccagcagccagtacggcacccatcagactgggtgccccggcggcgccacgcttggctggtcagcgccgcaggtcccgcctgttccctggcaggacccgggcccggccaccggcctcctggcttgggaaggcgtgggccacatggtccccgtcttggggcgtcccaggctccccgtcctctgtctaactcaccctctaaacgttcagcggtggacagattctcatactttccattattactgcttggacataacggcgttggagctcccgtggcggcatgcttgttggggcgggacacagggccccggtcccaggctgagcccgggtccggggtctcacgtcgggcgccgaggccgggcccatcctgg

SEQ ID NO: 704789 - DNA, 368 bp, Homo sapiens
caatggtcttagcttgcaagacctctactgccgggcggtcgtgtcctgcacttgccggtgcacctggtggacaagctcccgctccccattgccttaagaagccacctcaagtccttctcgatgtgccaacgtgccatgaatgccagtgatgatgcacgtgtggttcctactccactcaccaccatgctccaccacacaaaatggagcagcctcctgcaaatgtgaatgctctgtcctgccccctcccatgatgccccccacagaaaacttgcaccatgaacacatgcttgcaaacatttcatataagtgaatggcacttgacaagaaaacactgtgctggatatctcatccatgtgatgaagctctgg

SEQ ID NO: 704790 - DNA, 284 bp, Homo sapiens
gatcctctttaaagccacgcttagtagatatcgagcaaattagctctactcatgctaaggtgatcttagaaccgttagagcgtggctttggtcatactctagggaatgcattacgtcgtatccttctgtcttcaatgccaggttgtgctgtaactgaagtagaaattgatggcgtactgcacgaatatagtagtaaagaaggtgttcaggaagatattcttgaagttcttttaaaccttaaaggtctagcggttaaagtacagaataaagatgatgttattctg

SEQ ID NO: 704791 - DNA, 449 bp, Homo sapiens
  misc_feature (200)..(200): n is a, c, g, or t
  misc_feature (213)..(213): n is a, c, g, or t
  misc_feature (215)..(215): n is a, c, g, or t
  misc_feature (231)..(231): n is a, c, g, or t
  misc_feature (321)..(321): n is a, c, g, or t
  misc_feature (336)..(336): n is a, c, g, or t
  misc_feature (352)..(352): n is a, c, g, or t
  misc_feature (364)..(364): n is a, c, g, or t
  misc_feature (382)..(382): n is a, c, g, or t
gtccgatttcagagtattgtgggaccatgagacaaaattaagtacgatcacattctttatttctcattttaaagaaatgatgttggtttaccttttcctagttgaagatagtaattaggtttctaagctgtatactgtgtttattggtggcagtgacaccaaagatagaggcaatggatagaaatttttaaactggaaanaaaacctgaattncnctacattttcgaagtntcttgtaattattttgttgatatcccaaataattacaagagacttcgaaaatgtagtgtaattatttgggatatcaacaaaatttgattngtctgtctaatcccntgctagtattttaaanatgtctttaacncattgtatcctttaattnttcattaaaatggaaataagtagatgtttcaaagtaatttacattcctggctttgcttaacgtttta

SEQ ID NO: 704792 - DNA, 912 bp, Homo sapiens
agcggagtcacacccggaagccggcagggagcggagctgcggagccgcctggttctcccgtggatccatcgagtccatttcctgcgttgttgtgtccttccgaaacgcacacttcaatgagcagccgcgaaaggtggtatggcatcgatgcacagacatggttgggctcggaggatatcttccctctaggtgtgccatcacatgcgatgaacctccgaacgtccactggggcgaggagattgaaatggcaaatggaacgtgtggaccgataggcatgtgtcgatagaggacctgccatagggtggcgctagatcgggaaaagtactgatgacgagtggcacacgatgtgtgtactatcagtcttactccaagagatcgtagggggaatgtgcctgcatcagcggctcaatcgataccttatgcacggatgtgtccactgaaacggccccctgcgtacacgaagcataggacgaattcgcaaaggcagaactttgcaaggaggataacaggcgccgcgatgagaagggggctttccgaattgctctattctgggggcgacgcttgcggttgggtccccgggaagcaccgaggcccaagcacaaaatagtcgaggggtcggttcccacgtccggaagggcaacagaaacccagggtgggggtttgcttggtctcaagaacgcaaggcacatagatccgcgatccttcgcaagggcacgaattgctactgggtggccttctcacactaaggtgaaggcagcttttccagaattgacagaaggccggcaaaggggccaacaagggccaatttgcaggtgacggggcaagtgacggatcccttggaaccgaacaagtgggcttagcgtgaagcgcccttacaattaaagtgccacgcaaccctacgagtgcccaagg

SEQ ID NO: 704793 - DNA, 396 bp, Homo sapiens
  misc_feature (200)..(200): n is a, c, g, or t
  misc_feature (213)..(213): n is a, c, g, or t
  misc_feature (215)..(215): n is a, c, g, or t
  misc_feature (231)..(231): n is a, c, g, or t
  misc_feature (268)..(268): n is a, c, g, or t
  misc_feature (283)..(283): n is a, c, g, or t
  misc_feature (299)..(299): n is a, c, g, or t
  misc_feature (311)..(311): n is a, c, g, or t
  misc_feature (329)..(329): n is a, c, g, or t
gtccgatttcagagtattgtgggaccatgagacaaaattaagtacgatcacattctttatttctcattttaaagaaatgatgttggtttaccttttcctagttgaagatagtaattaggtttctaagctgtatactgtgtttattggtggcagtgacaccaaagatagaggcaatggatagaaatttttaaactggaaanaaaacctgaattncnctacattttcgaagtntcttgtaattatttgggatatcaacaaaatttgattngtctgtctaatcccntgctagtattttaaanatgtctttaacncattgtatcctttaattnttcattaaaatggaaataagtagatgtttcaaagtaatttacattcctggctttgcttaacgtttta

SEQ ID NO: 704794 - DNA, 460 bp, Homo sapiens
aggaatgcccccatttgagaataaaaaggggcaaaacctttgtgttccatatagctacacgaatcagcaggctaacccaaagatcaccttctgagaaggattcacccccacacggagtggtattatttttcctctagtgcatttaaaatatgatttgattttaaatattcatattccacacaattaattctactaaaacatggggcccagcaaatgataggttctccacaaatgtttgaggacaacctgaatgaaccagtgattggaatgaatgaacaatatggcactgtgccctcattttagaatttgaaatgagatattcacaggctttttatatttacctccttctggccttcccaccaagggaattaagcttctctttggactactagacaattgttttcttccaagggacttggaggccaacttgaaacttggtcctcctgtaatacaaactcaa

SEQ ID NO: 704795 - DNA, 227 bp, Homo sapiens
tcttgatgatccctagactgtgaatggggtaaaatactgagtacatctctctagatcagtaatcgaagtgcttcagatctaattacattagtagttctcaaagtggggcttagagacacatatttagtgggagaatggaattctgtgtgtactaatgaaacatagtcctgattgatgttctagtttaacttgttgtgtgtttacattcattatacaacattgcttta

SEQ ID NO: 704796 - DNA, 881 bp, Homo sapiens
tttgcacgtggcgccaccgtcttctccaagggggaccaaggggctttcaccagggacgacgattctttctcccccctcttccttcggccaccgcgggagggggtttttatccccctccgctctccttgctcccccggtgggcttctaagcggaacgtgtttctacgcccacgtttcctttgtgagaacccttctggggtcgcccaagatgttgtggtcgccacccctcggcgttgttgtgctgcaccccgcaagaggtgtccttggttccacaactctgtgttgttctgtgggaggacccaccccgcacccttctcctgtttttcctgtggcaattcttctaatctcctccccaggacacccccccctgtggtggggattgagcaacaaccaacgcgcggtcccaccacacgcatgttctcctctggggaggagattgtgcccaccccagaagagttcttctggagccccaatcgtgtgtgctgtgagaggtttctgaggagccccccaccagggttcctcccgcccacccctccctttcccctgccactgatggtctttatcacgctgaagttgttccgccacactctctccctcactcaccacacgacagtcggttgtttcttttcttcaggcgagtgtgcccgtgttccctcctgggcaacctcgggccccccccgccttgggttccgtcggggggattgccccccgccggggccgccgcgtttcctccccttgggccctcttcttccccccaccacagagttcccccgggcgggatttttcattcttttcccccccttttctggggtttcccccccccgggaaaggacattttttttttgggggccccacacacaaataaacccgggggttccccca

SEQ ID NO: 704797 - DNA, 121 bp, Homo sapiens
accaggatacgactttaatacgactcacctactcggaatttgggcctctaggccagaaattcgtgagtaagaagattcgcagtcggataactgaatctaccagttcgctaacttcggccgt

SEQ ID NO: 704798 - DNA, 439 bp, Homo sapiens
gaattaaaattttcagggaaaagagagggggagggagttagagacaagtcacatcagtaagcctgaaacaacagagatggcatacaatcaagacaccttcaatgacacactgccacctctccttctaaataatgggcattaaacaatttctatttatcttcctgtgctctctggaccatttttcaagatctttctccctctatgatttcaatgagattaaacatagaaaacaatgccctttgtcccatatctatctattccaaagcgaactgctttaggggaggaagtgagagaccccaggggattccatgttcaatgcatgtacctttgatttaggaatggaaccagaagtcaagtacaagagaattttgccaaagaggaaacagtgcttgggaagattcctgtactccagaactggtcaccaaacctagaaggggag

SEQ ID NO: 704799 - DNA, 339 bp, Homo sapiens
ttgcgatggatttgacacaaagagataattgttctcttaagttgtatatgaactaaaacaacttagttaaattactccattactaattaacatcctgcagataattccattagttagagaggcccagaaatcaggtcagcactttttctttgcacacctggttgaaataaaaagtgcttctaataggtttatatctaaacccagcagtatatctccttctcgcggatttatacctaaatcacaccatgatttttaacatctggtttcttttgcctctctcaataattttttggttgttgttcattccatcaaatgtgagttgagatgtgggaggcataa

SEQ ID NO: 704800 - DNA, 664 bp, Homo sapiens
tcagcagcctcccccttgagccccctcgcttcccgacgttccgtatcccccctgaccgcctttctcccgccaccgccgccgacgccttccgcaggccgtttccacctgcacgtgaaaatggtaatcgtatcagtcatgtaccgcgtatccacagaacggctccactacatattctgacgctcgcgtttgcctgcatcgcagacgatcaaattggttgagtgacacctgcaagtcacgtgcgtcggccaccgtgacgagatatatcatccgagtatacacgaacttccgaacaagaagaaaacgcggcaacggacacgacgcactatacatacaatgtcgtccatacgggaactcagcatgactgacgtcacggacgtagacacagcacacaattaggatgaacggcgtttagtaaaggcacacaacacggtttgccatgcgagactgcgatacgtgtagactatgcaagccattacccggaacgtaattgcgcagagacgttacaatatcatgacatacgacaggggttgaacccaaaacggcaaagaaaagcattaaatgccacagtttcacatcggttaagagaatttggaccatgagctaaaggcacgactcacgttagaacggttcaatgaggttctccacgtgctaagtagcatcactg

SEQ ID NO: 704801 - DNA, 108 bp, Homo sapiens
atcaagtgtatatttagcatattggtatacacgcggttctctatatatgttgttctttaataagagtctatcggccgggcgtaatggctcatgcctgtaatcccagca

SEQ ID NO: 704802 - DNA, 358 bp, Homo sapiens
gaaagggggggaaaaggcaagttttgggaaacccttgggggtttggaacccccaggccttgggggcccttggaggtttctttaccagggggttccccatcccccgggggaaattagggggcccatttactgttttaggtctagcccatgtggattttttcctaacatacctaagcaaacccagtgtcgggggggtaattcttattctttcgttcagttaagtttttcccttcatctgggccctgaagggatatgtgaaacaatgttaacatttttggtagtcttcaaccaggggttgtttctttttaacttcttataggaaagcttgggtaaaaaaaatattttctttttttttttca

SEQ ID NO: 704803 - DNA, 854 bp, Homo sapiens
aaggggagatgctttgtctctgcagcagaactacccgaccgtccaagagcaccagcagaaaagagcctcgagccccagcacagcgacggtactactgcgcagctcgtgtacctggatgactgtggacacagagtggtagcgaatgtgggacctacggtctgtacccccgaggtacagtgtccctgcgatgcttgttgtgagggggtcgagttcgtgactaagtggtggccatgctgccgcagttctgcaggaggagactgaccagacggacttgcgggatgccccctcggagtccagacagacaggccccaccagagaagatctgccacgaggaagaggaacgacgagtagatgatgatgaccaaggagtaagacaagaaatagcccctggcagaagcgggaggagagggccctgatggtcgtgtatacattaacatgatgctatcgcagagaccgatctgactgtgagacatataaaattgctcaaaatatccgttgtgctcatggaacgcgcgtacgcgcttgcgatggaggagacggaacggaaggccagacgtgggacggacgtggatgtttactgctttcctgtttcgacgtggtggagtgtgaagaaaggaatataagttattattcggaatataggatgactttgggggatgtcggggcctggcaaggaggtggtgaaagtggtgttccagatgtcttccgaggactcgggtatgcggcaacagggacattaagaaaacggagtgatgtcggtatgctgtaagatactcagttctcctcggattctgggacagatgagacttttggatgggtgaggcatttgatgggagatctagggagctgcggaa

SEQ ID NO: 704804 - DNA, 817 bp, Homo sapiens
agtttctctaagccatccagctgccatcctcgtcgctgctggtcgacactacgctctcgcctcgccgacatgagtgagacagatgacccttcgtggcaccctcaagggccacaacggttgggtaaccgcatatcgctactaccccgtagttccctggacatgatcctctccgcctctcgagaataaggaccatcatcatgtgtgaaacctgaccagggcatgagaccacatctatggaatttactcagcagacgtgtctctgctggggtctaagctcccaacttggttgatgtgatgtggtgtagtcgtacctcagatggtccaggttttgtgctcgctcttcgagtgccctcactgggggatggtgaagctccctttggcggccctctgggggaatgcgtcctagctagacgggtcgatcccatctcgatcgtacggtctgaatttagttgcggccgattactccaaggggatcgttgctggacgttggtgtgcccgtgttcctccttctgtagcagatccggtcaggatgtgtcgtctgggatctgcgtagcgagtaacagccgatgcatagctgatgggtacttgccgctggtgtgtgtggcgaagctacactagttccgggatgctgagccacttcgacgagtcgggtgtctttgttgtcgcgcattcgtcgcccagagcatgcgtgctatcgcctatcatcgtctccttgttggctgggaccatcgcgggtcaaggttttggcacctggctggctgctagctgccgacctgtccttcatgggtcctgcaggctatcttgagcctggggctgc

SEQ ID NO: 704805 - DNA, 883 bp, Homo sapiens
  misc_feature (12)..(12): n is a, c, g, or t
  misc_feature (64)..(64): n is a, c, g, or t
  misc_feature (156)..(156): n is a, c, g, or t
cacccctcgccnagcggccgcgacgctatggcgcactggagtaccctgttcctggcaggtcccnctccattgcccaagctgaagttcagtggcacgaacatgtttcactgcagcctcaacctcctgggctcaagctgtcctgcctcagcctcccgngtagctgtggaccacaagcaactcggccatcacacctgtgcattaattttttgatgtttcatgggagacatgggcttcacttttgttggcctatgctggtcttgaactcctggcctcaatgcagatcattcgtgcttgtggccttccaggagtgctgacaattacagggggaggaaacaggaagagaagagtggtggcctccctagacaatctagccacggagcaacgacctggtcttgaacttcctgacctcgtgatacctcagacctcccaaatgtgctgggattacaggagtgaacccaccaagcccggcttgacctcttgagttttaccaaaggatgttgtgcttctgaggaagcatggaagctgcagccacaattgtgcctttgcaggggagcctgagagcaacagatgtcaaggagaactgcaaaccagtgggttcattgaactaaaagagaatacaaacaaaatggaaaaagcattccatgatcatgggttggaaggaactcactatcggtgaaaatgggcataattgccaaggtaattaatagattcaatgccatcccaatcaagctacaaatgatttcttcaagatgggaacaatacttgaaggtcatatggacaaaatgagcccgattggcaaagtcactcctaggcaaagaacaagccagcggcatctggctactggattcagtatataacggctacataaccaaacagagtgaag

SEQ ID NO: 704806 - DNA, 131 bp, Homo sapiens
cacgagggagggcagtatgtacacacaaattgggagggtttatttcttggactcatccgccttggataaagtcttgatgatctcctccttcattggactggaggcgctcttcacggcgcttgcgtgcttcc

SEQ ID NO: 704807 - DNA, 469 bp, Homo sapiens
  misc_feature (12)..(12): n is a, c, g, or t
  misc_feature (64)..(64): n is a, c, g, or t
  misc_feature (156)..(156): n is a, c, g, or t
  misc_feature (300)..(300): n is a, c, g, or t
  misc_feature (410)..(410): n is a, c, g, or t
  misc_feature (418)..(418): n is a, c, g, or t
cacccctcgccnagcggccgcgacgctatggcgcactggagtaccctgttcctggcaggtcccnctccattgcccaagctgaagttcagtggcacgaacatgtttcactgcagcctcaacctcctgggctcaagctgtcctgcctcagcctcccgngtagctgggattacagtcgtgagccagcatgtctagccttttttggtatttttttgcagagatggggttttgctatgccacccaggctggtctcaaattcctggactcaagcaatccacctgccttggcctcccaaagtgctgngattacaggcgcgagtggctgtctctctctctctctctctctctctctctcaagtgatagagtcttagggccaggcacagtggctcacgcctgtgataccagcactttgngaggccangatgggcagatgatgaagctagagttcgaccagctgaccagatgtgccccg

SEQ ID NO: 704808 - DNA, 667 bp, Homo sapiens
  misc_feature (21)..(21): n is a, c, g, or t
  misc_feature (65)..(65): n is a, c, g, or t
  misc_feature (70)..(70): n is a, c, g, or t
  misc_feature (83)..(83): n is a, c, g, or t
  misc_feature (88)..(88): n is a, c, g, or t
  misc_feature (92)..(92): n is a, c, g, or t
  misc_feature (96)..(96): n is a, c, g, or t
  misc_feature (130)..(131): n is a, c, g, or t
  misc_feature (153)..(153): n is a, c, g, or t
  misc_feature (181)..(181): n is a, c, g, or t
  misc_feature (183)..(183): n is a, c, g, or t
  misc_feature (219)..(219): n is a, c, g, or t
  misc_feature (221)..(221): n is a, c, g, or t
  misc_feature (229)..(229): n is a, c, g, or t
  misc_feature (239)..(239): n is a, c, g, or t
  misc_feature (256)..(256): n is a, c, g, or t
  misc_feature (270)..(270): n is a, c, g, or t
  misc_feature (275)..(275): n is a, c, g, or t
  misc_feature (305)..(305): n is a, c, g, or t
  misc_feature (320)..(320): n is a, c, g, or t
  misc_feature (323)..(323): n is a, c, g, or t
  misc_feature (338)..(338): n is a, c, g, or t
  misc_feature (340)..(340): n is a, c, g, or t
  misc_feature (377)..(377): n is a, c, g, or t
  misc_feature (436)..(436): n is a, c, g, or t
  misc_feature (474)..(474): n is a, c, g, or t
  misc_feature (584)..(584): n is a, c, g, or t
  misc_feature (629)..(629): n is a, c, g, or t
ggccacagcatttgtggccanatggtactctcagggccgacgcagggccgacgggcaaaaagctnttatntccagcctggcgnttccnggcntttnttgaggccaccatgggaatttgatgttttttttnngggctaagaaaaaaaaaaaaanacgcacctgggatcggcggtccggacangngcagggaaaccacacgccctactttgccctttcctntncatcccanacctactcanatccctcagtgcctaanaaaacaggacagtnagganttggggttttgggacggggcttaggggctngggcagggcccgttntangtggacggtggtttntntggatggaggggtgactgtgtggtggtgctgcctctnaaacaccctccccttccccagtccccagccctatggtgatttaaaggggctgagaagcnaagaggcagcgggcccatggaaagcaggaagacctggngggtggcaggtggccactaacagcccagcagctccaggcgcagggcgatgcggttgtgccaggctacaggcaggatgcgcacatagcgagccaggatgggcgtctcaaanaagttcttcttgtgggagtggttgtcccagttgccagggaagatnttactgctgccagtcctggggtcctggtactcagtcca

SEQ ID NO: 704809 - DNA, 1036 bp, Homo sapiens
tgggacaatctacaaccacttttattagcaaaagggaggtaaggtgcagcagggggaagaaaagagggggctcctccttcccctcaaagggcgatcacggccccttccacagggggcaggccagcggggaacaacgaggaccccaagggtggcaagcaggcggggaatcaagacaaaaggggatccggggtccggggaacgctattggaccgtggcgcaagactatgtggagcgctccctcattatcgcatccaagaggccggccggggacagtggggcggggtggtagacacgccacggaagatcacaacaggcgagcgggcctctggcgcctcagagaagaccgcgggacaacttgcggcgcgccccggtgaagaccagtgttcaccgggaggggggggcgcaaatctactcacatctcgggcggggctcctcggagagctccataagcgggttcggcccccggatggtccgtccatagaaagaagaagtgtccttggggaaaattcctcacattaagcccgtggagggggctttcatgttcaccgattcttattttttactctccaccaaaattgcccacacattttcttcaaaacagggttggccagaagcaggggggacaaggggcgggcgcaggaattacgcccaaagcaagggggctcccgggggccaagaaaatgtaatacgggggggcgcattcccataaatataagccccaaaggcccttcatccgacgctaaatttctccaccagagtattcgacggacgggcagagaggaactccaaagcgccaagaagaaattctgggccaccccaagtggggcgagatcacaccgagaggacacaaggggatattgataacacgcctctagaagaacatacacaatggcccaaaagggtccaccccgcgggaacggcggcggcaacccagtatgtgcagctcagggccaactgggcacaaggaggacgggacacaccccagaaaagcacacaggaaccagcgcaggagccggccagaaaacacagaaagaag

SEQ ID NO: 704810 - DNA, 454 bp, Homo sapiens
  misc_feature (145)..(145): n is a, c, g, or t
  misc_feature (373)..(374): n is a, c, g, or t
atagcagcattagtcacaacagccaaaatgtggaaagccaacccaagggttcgtggacagatgaatgaaaaagcaacactgcagttcctttatacaatggaagactattcagccttaaaaaggcaggcacttctggccgagtgcngtgtgtcacgcctgtaattgcggcgtcttggaagaccgaggtgggcggatcacctgaggtcaggaattcaagaccagcctggccatcttggtgaaaccctgtctctactgaaaatgcaaaaaatgagacgagcgtggtggggtgtgcctatagtcccaactactcgggaggctgaggcacaagaatggctggaacccgggaggcggaggttgcagtgagcccagattnngccactgcactccagcctgtgcgacagagtgaggctccatggaaacacaaaacaaaacaaagtcaaacgaacaaacaaac

SEQ ID NO: 704811 - DNA, 855 bp, Homo sapiens
agcgaagatccgggagcgagtacccagacatggagcatgaacaccgtttatgtgtggtgccattcgcccgcaaagtgtcatgacacagtggtggacgccctacagatgccaccctctgccagtgcaccatgctggtagaaaatacagaggagaccttattggtattgataacgagagatctctagggaatgttgttcagaacttctatgagatgacaagatgagctatggtgacctgaagaatcatggtgtctgataacgatgagtggggtcaccagctgggtgcagtttgccagggcaggtcaatgatgacttgcggaatgctggtgtgaatatggtccgcggtgatcaccggggtgcacgttacttgcagtgcccgagtttttgcccccgaggtagatccggagcggggggacagtcaggcgaagtaacctgggagctggactccgtggcccggatgctcaacaccaagcagagtgttgagtgccacaggaacatgagtggttgacgtgggaacgcctggaacaatgggtggtacatgacggttgacgccgtggacagggggccggatgttcgcatgaaggagggtgaatgaggcaaattgttggaattgttcaatgcacaatgagagttagtgggcatattggggtcgcagtggtattctgctaaataatgttgaagaactggattgtcttgtgaataatgcaagcataggaggggctaaaaaatgtccggcagcttcatgtggcaacatgaaggggcattgcatggagctgttaagagggcatgtccgagcaattcaggaccaggttcaggcgcaaaggcttacatgaagggtacgaggcaagggtgacga

SEQ ID NO: 704812 - DNA, 219 bp, Homo sapiens
tcgagctgctccgattcctaattacgcagacacacatttccccacgtcccacatatagtagcctaacatgtccctcctgaaaactacaagggcatagccccagcgaatatgcctccaaatgcccatgcccctggaatacacactcaaacgcattctacacacaactctccaaaacacccaagcagacccgctattacaacctcgccacccccttctccc

SEQ ID NO: 704813 - DNA, 877 bp, Homo sapiens
ccacgcgtgggcggatgcgtgagtagcccatgcgttcggatgctagttcccctatcatcgaagagcttatcagctttcattagatcatgtcctcgtcccttatatcactttaatccttcaatctagctatacctagtctcatgtactgcccatttttcactaagcatctacaagcaaactagaactaccgtcttgtaactaatcactgtcacgacgcttcaatggaaaatacaaaacggtctgtaactattccctgaccgcgctcatctattccatagatcacgacatacggctccatccgcaattcccttacgtctatccatttacaattaactagacgagcgacatgggtaatctccgcatccctttacacgattctacacggtccaatatgggccggcataatggtacctgaacctacaaaatacaccgcaataatgcggacaaactcatgcaactctcgtaaatacgttgccccccattaactatctctaagataccagcgtcgagctgtggaagtccttgaatctctttgatcaattcgttagtattactccgagattggagacccccatgtacgtgtcataataatcatgactatagacgtccttgtcacctcattgaggctggttcttcacactaaaggcattttatatcaccagctgcaacgtatccggggaggattaaaaccgtaaccacgtttccgccgttagacggacgcgggggtataacttaacgtggcaacagcgctcgaaaaacttgagtgtcgcactacaaatcttcgtagctcagtgcgcccgtataattcatatcgctaccaacatcttgccctataggccgtattacctataagcacccctctaccccctctagagcc

SEQ ID NO: 704814 - DNA, 913 bp, Homo sapiens
tgtgtcacttccggccgccctttagctgccatcttgtcgttcccgcgtgtgtgtgacgccgtaatctcaggatgagtccaggccggagaacctcttgagcagcatactcatagtctcccgcgcgcccgcttattcgcgtcgatacgactgaaagatcccagatcggtgataccagggaataaatcatcggcgaaacttgtcaggcaagcgaagttgcagcgatgtggtgggaaatgtgaagtgctcgcacgaaacgggacgaagggtggttcagtatgaacaggcgctactagcgagagtgaccaaaatagaacttcagttctccttaaagaagttaggggtaaagaatatctctggtatggcagaggtgaatatgtttacaagaccagggaacagtgatccactttaagcaacgcctaaagttcaggcatctctggcagtcgaagcactttcaccattacaggccatgctgagacaaagcagctgacagaaatgctacccagcatcttaaaccagctttggtgcggatagtctgacgtagttgtaatgacgactggtccggagctcttgcccaaaccaatctgtggactggacaagcagcacttgctactggagaggatgatgatgatgaagttccagatcttgtggcagaattttgatgaggcttccaaggaatgaggcaaactgaattgagtcaacttcttgaagattaaaactgaagaagtactgggagctggtattttatattatgactggtttttaagaaaatttgcgttcatgggatctggataaaaatctagatctcctaatattttaaggcacaaggcccttgggacactggcaggttctttcaagtttggttatacacaattcaatcttggcaggtaattaaggcggagaaaacctgggaata

SEQ ID NO: 704815 - DNA, 404 bp, Homo sapiens
  misc_feature (379)..(379): n is a, c, g, or t
  misc_feature (393)..(393): n is a, c, g, or t
tactcagaaggctataggacaggaaccacacagctcaccagcaggacaattttgaacctcctttcagaagacggtcttctaacagcaatctatgaaatggtatctccccaggtgacagctcacggtcctccttaaaggacatacagttacaagagttttccactcaggtatgcccaaagctgtggctttctgtcgtgtatctggagatttcccagtccagatgcaacttaccagtcagggtcatatttaccaaaagcaaagctgcatggcaataaatacagttgacacataccatcctatttagttgtcagggtagggaagagctaggtagttaacagaagtcatccagggggaaaaggtttttgtttaaccttttccnttttcaactacttnggggaagtacc

SEQ ID NO: 704816 - DNA, 912 bp, Homo sapiens
ggaagcatgtcctgctcacggcttccctgctgggccccaggccccgggctgagcctccctggtccctcttgcgcctcagtggatcagggcctgtgtggcaggtgcctgggcatgctcctgtgtaggtccggtgaggtcaggcttggaggacgcacagggggtggggtttcacgctgctgcatgttatgttcccgaaactcgtatctagtagaatcgccatcgggctgcgttggcatgaattgtgctagacgtgccccatgaatagtgtccaaatacagactcccatagtttggcgtgtgctgaagcagatttctagaagcgaagaagaggtgcttgctggtggagccagtgcgaatgttgagtgtgttgtagcccctccccgtaaatgagtcccacaatagcctagctagcattgtcaataataaaccatagtttgaaggctacctgaatagatagctgacatgagaagctagagagaataatgaaagacattagagatatctaacaaggagagtggggccagcacccgaagagacatgccccctactggccttacacacctgggctgctgaaacaccaaatctatagttgctcgggtggtgtaaccaaaaatgggatgtccacttgtaggccaccctacaagcgcagaagcagatatgagagaaaattgttgaaagggaaagtcagcacttacattagcgcaaaaattggctacaaacacccgacaacaggagccataagaagccaagttgactaggttcggaattggtgaacaacatgctaggagacagaagtgctaaacatagctcgggttcaaaggagagtggggaacagtcaccccggtaatggataggcaatgcccagaaggaaaccacgctgctagaggtcttggaacatgaattcttacacaag

SEQ ID NO: 704817 - DNA, 113 bp, Homo sapiens
  misc_feature (19)..(19): n is a, c, g, or t
ctgcatacgcaaggccaangaggttgtgtaaggcagcggacatgtcgaaatgaaaaagctacctatagtttgtgccccctacttgcgccttgcccatatgctaagggtatccg

SEQ ID NO: 704818 - DNA, 126 bp, Homo sapiens
cgtggctcatgcctcgtaatctcagcactttgagaggtgaaggtgggagaatccacttgagccctggagtttgaattcagcctggacaaatggcaagaccctatctctaccaaaaaaaccccccaa

SEQ ID NO: 704819 - DNA, 278 bp, Homo sapiens
gcctccagcggatctccgaactcactgttctgacaataacgccatgacttttgaaaaaccagctgaggccgggcgcggtggctcacgcctgtaatcccagcactttgggaggccaaggtgggcgggtcacaaggtcaaagacatcgagaccatcctggctaacatggtgaaatcccatctctactaaaaatacaaaaattagctggacatggtggcaggtgcctgtaatcccagctacgcgggaggctgaggcaggagaatcgcttgaacccgggtgg

SEQ ID NO: 704820 - DNA, 723 bp, Homo sapiens
ggcagatcacccgaggtcgggagttcgagaccagcctgaccagcatggaggggctccgtctctactaagaatgcaaaaattggctgggcatggtggtgcgcgtctgtagtcccggctactcgggaggctgaggcgggagagtcgcttgaacctggcaggtggaggttgcggtgagccgagatcgggccattgcgctccagcctgggcgacaagagtaagactccatctgaaaaaaaaaacaaaaacacttgggcctgatatttattgataagtaataatttggattgattgtgttggatctattactgatttttttaaatctattcaggctccctatttcttctgtgagtttcatttgataattcgtatttgtttaaaaacatttctactaaatccatgttatacaagtttattagcatgaggttgaaaaataacattttctttctttctttctttctttttttccgagatggagtcttgctctgtcgcccaggctggagtgcagtggcgcgatctcggctcactgcagcatccacctcccagattcaggcgattctcctgtctcagtctcctgagtagctgtggattacagatgctttgccacaacccatctagttttgtatccgggggatacgggggtttccaccaatgttgggcaggtgatctcgaactggttggtctcaagcttctgggccgtgtgatttgcctgcttcgggcttccca

SEQ ID NO: 704821 - DNA, 152 bp, Homo sapiens
cactgctggtccttagctgcattacagccccagttcctgtgctgtcttgggctgaagtgcacctgtgtgagaagatggcccgagtttgatgctaagaaagttttgcagagacccaacctaaaaaggacacacctatggaaagatgaagggtt

SEQ ID NO: 704822 - DNA, 163 bp, Homo sapiens
tggtatagaggttcttcctggcatccatggcatcattatgtttatatatgttttagtcgccaaaagtgaccttgaggaaccctatggagctcaggaaaggaaggagcacccagaagcagggacaagggcagctaggttaggggaggacccagaaatccaggtt

SEQ ID NO: 704823 - DNA, 180 bp, Homo sapiens
cgagcctggtacccctccaaattgttacaatgtctgcccattatctagatccaaagacacttccacattttcaggtcatccttacagcagtgccccactctctcagtaccaattttctgtattagtccaatttcacactgctataaagaatacctgagggcagtttaccatgcagcgcta

SEQ ID NO: 704824 - DNA, 827 bp, Homo sapiens
gggacagcatgagcttcagcactcggtccagcttctccagcaactaccggtccctgggtctctgtccaggcgcccagctacggtgcccggccggtcagcgagcgcgggcagcgtctatgcaggcgctgggggctctggttcccggatctccgtgtcccgactcacaccatgcttcagggtgcggcatggggtccgggggcctggtccaccgggcatagccgtggggtcgtggcaggacatgggacgtgcatccaagaacggagaaggagaccatgcgaagagccttgaagcgagcggcctggcctctgtacctgggacatggagtgcacgggagcctgcgagacctgacgaagccgagaggctgtgagagcagaaatcctgggaggcacattggaggaagacagggacgcccagagtcagaagacgtggaggccatgatcgttcgcacgatcattctgacggagccgtgatgtggctcgagatctgtgctgcaagaataactggtgtgaccaaactgcgccggccatcggtgtgcttgacatgtacttcgagccagaataggccacggtcattggacatagcggtgcacttgagcttataggacgtcaaacgtcatgcagaacacgaggctgcgagcgatgacgaccatggtctcgtggaagaaacggactagttccatgggagacttccggtcaaacgggtcaattggatggacacccacataatttcacaccgaacttggcgagctagcgagaccagaagattcgcaggggctctccaaaggcaggaagctggatctttcatgggaaggaaagaaaccaatgaaa

SEQ ID NO: 704825 - DNA, 238 bp, Homo sapiens
cagtggtttttgtgtccctgtggtgccagtgcttttgggcagtgcaggcggctgccaggcccagccctgacttccactttgggtcagcaacctggttatttatgtggggccgtgcaggcatgggccccctgcctgtccatcctgttttttttatttattgaaactccccattgccctatccttgtgtttccccccccttccatgtgttgaataataaaaggtgggaaagtgctgtcca

SEQ ID NO: 704826 - DNA, 1115 bp, Homo sapiens
tttttgtatttttagtagatgacggggtttcacacgtgttagccaggatggtctcgatctcctgacctcctgatcctgcccgcctcgtgcctcccaaatgtgctgggattacaggctgtgagccacctgtgcccggcctggtactcctgaagccctcagatctggtgacctggtgcgctgtaggcaccgatgaaaatacaggcacctgagccatgaagcatgtgcctgcaaccaatgagacctcggctcggcgaaattggctggtgtctggagcctgcgatgtgactgccatgctgtgtgtgggctgtcaaggagaacattcgttacggcgcaaccaacggtactgtcaccaagaaaccgtcgtctctgagaaaaaaagagacgttcggccgccgagaaactcctgtacaatgtgctgtgacagaaaaaccgccggctccgcgcagcggcaaaagagccaacgggaacgccgggtgctgcgaccatgaacccggcactggcaggacgtgggatggagaatgggacacacggagcgagcacagggcacaccgttcgtgcagaccaactagcgccgcgacacggaaaactgacctcgccagtgctgccaatgaagtgcgtgtgccaaaccgatgactggtgcgcaggagcagacgctgggcgctggaccagcgcagtgtgagaatctggcggcgccaaggaccacttcagacgcggcccacgacggcgcaaaccaagacgaggaggccaagcacactgcgcgtacaatgggcgccaacagcggggcagcagggaccaaaccccagggacctgacaacacacaggaaggcaagacaaaagacaccggaccagagacagacggagaaccgagcaccgggaccctcagtggcacgtgcgtacacaattggctattggtacataacaactccaacttaccaacaactacaacgctaccagctgtctgctcactactcctgaataccacgaaagtctggcccacgtcgccacacacctcacgctctgaagccgccaaaaacatcgccaacaactcacacccggtaacaacgacacacgaaccgaactcacgacaacacagacgagccatacacaccccccat

SEQ ID NO: 704827 - DNA, 117 bp, Homo sapiens
cgactcatagaggatcccatgctcactcggcacatccaaacattcactcatgtgtcttctcgcatgtgacatactggaatcagagtttacctttctctacaattttgcaacaagaag

SEQ ID NO: 704828 - DNA, 148 bp, Homo sapiens
taatccctacatcatgcattgctcctacgtccttaccatggcacccttactatggaactcagtcatcaagacctgaatgtttcattcctttttcattaagttgacaaaatagaacaaggtgaccttccttccctgtggcaattcctca

SEQ ID NO: 704829 - DNA, 638 bp, Homo sapiens
  misc_feature (330)..(330): n is a, c, g, or t
attcagagttagatatcatttgaacttcaggtgtgctttaaaggctttcaaattgtaccgagtgatagcgtgtttcgttgacatcatgagatatatagaagcactccagcagtgtgctatattgggaagatattgggaaggaaatatatttgtcaagagatgaaggctgtatctatttattggactttttaacagtttgtgtcacttaaattcgtttcgaggatgggatgtattgttggcttgctgtacagtggcttttccctttgcatctgtagttctgtggtcacacgtgaccttgagcgtacagtagcagactttcccaaatgtatngattacaaataaccagttgttacttagcaagacctgagaaatatgtctcgcacggttctctccttgaagcaagatgtgtgggatcgatggcatttccgagaaatctggcctccttcgacctccggggacagtatatgtcatgcctcacttacttctagctgaagcttgtaaatcattagagcttgaaattgtgcagatcgttcatgtgcctttccaggggttatttagtaaagtttgtttgaagagcaaaatacgccttattctagggtcttgtttccaggtactctgaaggtccagcatcctgatga

SEQ ID NO: 704830 - DNA, 202 bp, Homo sapiens
tgactccaaatgttgactgcataggtgagatgattatacatgtgtaattgtcagtgggatacgtggttgctccagtgtcagcagcacgagtgtcgtgagacatctggttgtgaacttgtcatggtttcgctggtggcgcctggtgtttcacaatgctctgctgtgtgcttgaagtgaagcccttccacatgcagcttgctgc

SEQ ID NO: 704831 - DNA, 237 bp, Homo sapiens
tttgaagatccccgagatgcagctgatgcagtccgatacctagatggaagaacattatgtggttgccgtgcaagagtggaattgtcgaatggtgaaaaaagaagtagaaatcgtggcccagctccctcttggggtcgtcgcccccgagatgattatcgtaggaggagtcctccacctcgtcgcagatctccaagaaggagaaagttctctcgcaaccggagcaggtccctttctaga

SEQ ID NO: 704832 - DNA, 624 bp, Homo sapiens
  misc_feature (430)..(430): n is a, c, g, or t
agtctctacaaaaaataccaaaaagaaaaaaaaaaaagccaggcatggtggctgtatgtgcctgtagcccagttactcaggaggctgaggtgggaggatcgcttgtgcctgggagatggaggctgcaagtgagccatgatcatgccactgcactccagcctgggtgatagagtgagactctgtctcaaaaataaataaataaataaaatgaaagcaaaaaaaaaaaaaagaaatcgggtaacatctcttccccacgccttcatgcccatcctcccaactcttacggcccaccctcccactcctcccctcacacccccgcctccaccccacacacagaggaaacaagcaaaaacaacgtattgtctcttagaacttggaaaaggtttttgttaaccacaagtccaggtgctcagtatttgtaatttatagnctttgcttctatgtttttgctgaaaatatgactctttatcactctttaaaaattatattgtactgttgaccaagcatggtggctcacacctgtaatcccagcactttgagaagctgaggcaggaggatcacttgaacccaggagatcgagaccagcttgggcagcatagcagactccgtctctacaaaaaataa

SEQ ID NO: 704833 - DNA, 401 bp, Homo sapiens
aaatacatgcagtctccctataaaggttcttcaatcccatacctcaatgtatacaaatctgtaaaaatgtatacatggataaacatacatcaaatagagaaatcccaaagttcactttggggaaaaaaaaaagaaaaagttgccaaccagtctaagcaatactgaaaaccactgttgtctcaaataattgatgaatctcttacctttttcttgttgctttaccatttttaaaaaatgtgtctgaagttttacaaccattcctggatgtgaagtggaacgatagtggtttggggcatcagctggggtaggtcagggggataggaaaagcagaggagagttgcttgaacccgggaggcggaggttgcagtgagccgagatcgcgccactgcactccagcatgg

SEQ ID NO: 704834 - DNA, 497 bp, Homo sapiens
  misc_feature (380)..(380): n is a, c, g, or t
  misc_feature (382)..(382): n is a, c, g, or t
  misc_feature (384)..(384): n is a, c, g, or t
  misc_feature (386)..(386): n is a, c, g, or t
  misc_feature (391)..(391): n is a, c, g, or t
  misc_feature (393)..(393): n is a, c, g, or t
  misc_feature (397)..(398): n is a, c, g, or t
gtggagccacaatgctttgaccagtatcgagacctggtattttggaaggtggcgtcctcatctggtctacctctggggatctggttcatgggtttggtggagtggatcccccataaagaagggtggagatgggatccaaggaaagatccaagggtggtggggaattccattcccaaggttggtagaaagtgagggagaatccaggggtcgaacggccattaccagtttgacctccaaggtgatgctgtggctgccagaccaacaaatctggctctggcaccatgaacctcgggaggcagccttaccagacagatggagaaggatgaaactgtgagtgactgctccccacacatagccaacatcgggcgcctggtaggganangncntgtanantcannagtacgctgaacgagatctacttaggaaggacaaaggatatcgtcaatgagctgaggtctgtgcagactttttgctgacgaatccaaacaagaagctct

SEQ ID NO: 704835 - DNA, 269 bp, Homo sapiens
  misc_feature (152)..(152): n is a, c, g, or t
  misc_feature (154)..(154): n is a, c, g, or t
  misc_feature (156)..(156): n is a, c, g, or t
  misc_feature (158)..(158): n is a, c, g, or t
  misc_feature (163)..(163): n is a, c, g, or t
  misc_feature (165)..(165): n is a, c, g, or t
  misc_feature (169)..(170): n is a, c, g, or t
ctaacagcaaccgtagtgaagtatgaccatgtaatcccccagaacaaaaccataaggaaagactagcatcgtccctaatgagagatggagaaggatgaaactgtgagtgactgctccccacacatagccaacatcgggcgcctggtaggganangncntgtanantcannagtacgctgaacgagatctacttaggaaggacaaaggatatcgtcaatgagctgaggtctgtgcagactttttgctgacgaatccaaacaagaagctct

SEQ ID NO: 704836 - DNA, 266 bp, Homo sapiens
gggggggcccccccccccccccccccgttttttttttgggggggggaagggggccgggtttttttttcgggcccccttttggggggggggggggggggccccccccttttttccccccccgggggggggggggggggggtttttccaacccccccccccccccccccggggggtttggcccccccccacccccccccccggggggggggggggggggggggttttttttttttttttttttttttttaaaggggggggggggggga

SEQ ID NO: 704837 - DNA, 141 bp, Homo sapiens
atcacgctctgtacccagtgtcctgatgaaggtggcacgaagaacgccactgaaaagcccaggaagcaggccaaggagatggacgaggaagatagggctttcaagcagaaacaaaaagaggagcagaagaaactcgaggag

SEQ ID NO: 704838 - DNA, 277 bp, Homo sapiens
ggactgtgaaaggggaacgcatagtcactgggaactgggagctcagtactgggaaagcggagcacagtactgggaaaggggagcccatagtactgggaactgggagcacagtactggaaaagtgggagctcacagcactgggcacactgggagcatagcacttgggacaactgggagcacagcacctgggaacttgggacgcacagcgctgagaacactgggacgctcacaagtactgggaacactggacgcacctgatgctcgatgccagggagta

SEQ ID NO: 704839 - DNA, 135 bp, Homo sapiens
cagatgttatgggactcttctgattacctttctctccatagtcaactttgagatagggtgcatcaggacgtaactttttagtatataataaacctttagcgttcagttaaccatcttcatttatggggtaccgat

SEQ ID NO: 704840 - DNA, 382 bp, Homo sapiens
acactactgagtccggctagtttttgtatttttagtagaggtttcaccatgttggccaggctggtctggaactcctgacctcaagggatccacccatcttggcctcccaaagtgccgggattacaggcatgagccaccgcacccagcctactgaactttttgactagggaatttgttctctgttattgttttctggaaataagacgacagctaattcttatctgacatcaaagactcaggtggtgtgactttccgtgcccgccatcgtgcccgtcttcttcgcgttttcctggtagaggtttcatgcatgtcggcccggctggtctgcaactcctgacctcaagggatccacccatcttggcctcccaaagtgccgggatta

SEQ ID NO: 704841 - DNA, 203 bp, Homo sapiens
cattaaaatatactgaagatgaagtataaacagtgtttatcagtacgtggtgggttgtagccctttatgtttttaattactttgcacattttccccggatttttcacaaggcagcatgtgcaacttgtcataatcatagaagtgatgactattgtatttaagtatgggtagtcacagacgcggtaccgagactcgcaattcgt

SEQ ID NO: 704842 - DNA, 239 bp, Homo sapiens
  misc_feature (72)..(72): n is a, c, g, or t
taaggaaaaggctttttttattttaagaaaattaataaaactttcttttccttaaaggaaattacaaaatcnttttcctattttaattccattctttaaaatgtgctttaggctgggtgcggtggctcacgcctgtaatcccagcactttgggaggccgaggcaggcggatcatgagatcaggagatcgagatcatcctggctaacatggtgaaaccccgtctctactagaaatacaaa

SEQ ID NO: 704843 - DNA, 121 bp, Homo sapiens
catttcaactttgagccgcatttacagttcctcttatcacaattaacaacaatctatattttctaaaactatccagatttcattatcagggaaaagtttgcttaggtttattacagcagtc

SEQ ID NO: 704844 - DNA, 530 bp, Homo sapiens
gctaggccctcagcagaccttttaagctactggtttccaaggtgagctttgataagaagatgtaggtcatctaaaatgcagcatcgtgggcacttaagggaataacttcttcctctacttggatactagtccaaaacgctaatgattagaagctgatcttctctaattgccttacacctttctggcccagataaatgtttgtgaaccaaatacctgtaaagcaaactccatcatccacatagacaataactatggcagctcaccagttcttgggaagagtctgctccattgacaaataagccacagtgaggccttactgatgtatactggcacctcttccaacaggcatctctacccattccccagacccaaaaagctggacttttcaccagcactaaatctgcttgtaacaactaatcagctctgattttacctgactctgcggtgtgactgctctttgtcctttacctccatctctcccaaatacacacaacccgatccagtgctcaaaattgaatctgggcagcaga

SEQ ID NO: 704845 - DNA, 390 bp, Homo sapiens
cacgaagtggaggactacatcgtggtgattgagatcctggccacctgcgaccacccctacattgtgaatctcctgggagactactatcacgacgggaagctgtggatcatgattgacttctgtccagggggagtcgtggacgccatcatgctggagctggccagaggtctcacggagccccagatacaggtggcttgccgccatatgctaaaatccctcaacttcctgcacagcaagaggatcatccatcgagatctgaaagctggcaacgtgctgatgaccctcgacggagacatcacgctgggatggaccccgaggtggtcatgtgtgagaccatgaaggacacgctctacgactacacccgacatctggtccctgggcatcacgctg

SEQ ID NO: 704846 - DNA, 259 bp, Homo sapiens
gctgccgcctactactactaaattaaaggccggtacgacacctgatctgcggtcctaccgccgcgatctccatcgtgctctacgccagtgtcagcccgctggccgtgccgggtcccaggactacatcacgctcatcctgttgctgaccttcctggccggcgtcttccaatggctgctggggatgctgcgcttcggtgccctggtgaacttcgtttcacattcagtggtgctcggcttcaccctcggcgctgcgtcgacg

SEQ ID NO: 704847 - DNA, 540 bp, Homo sapiens
  misc_feature (402)..(402): n is a, c, g, or t
gtagggggacaagtagggaaattgagtcggagtggagatttagagatagattggtaaaagcggcggtaataagggtggaactgactctcctcagggaaaatcagagaggatgggacccattgtttttttcagtcagtaaaaatttctaatcccaagcagctgtactcatggggggggacggctttctctttccatgtacctaattattgccggcctcattccaagagggtaggtgaggggggtggagcactggttctacacaagaccctcggggtcacctcacagaggggagtcctccagaggggggggcttcacagccagactcctgggaagaatcttcggcggggggtgtcccctcctcactcctcagtggacaagggtcagcgtcctactcccacgggncggtgtccctgggggaccgagagtcactccatctagtcctcatcagggcttgagctcttgcaggctggttgttgggaccacccccattccctgaagcagtttttctcgtggttctttcccacctcattctcgtggttt

SEQ ID NO: 704848 - DNA, 181 bp, Homo sapiens
attgaggaggcaggaggagattgatgatgaggaaatagagcggcggcgtgacatgatgcgtcaggagcacaggagagaaaaaatgaagagatggaagtcatggcaagtggaagatgagggctcgttcgtggagaggagtcagaatcaagagtctgagatatgaaagagtacacagcacagg

SEQ ID NO: 704849 - DNA, 756 bp, Homo sapiens
  misc_feature (639)..(639): n is a, c, g, or t
agcaaactggcctttagaagtgtggcctggggaggagggagtcaggatgactaggctctgtcctgtgttggtcagtttgttgggctcgcatttatcgagtcctggttctgtaatcttagctgtgtgcttaggtggccacttcacgagcagagaaacagtatgagttctatgtgtgtcacttgcttttaacattctttgctcatcgttgacctatgcgaggttagctgtacaattttgctacctggatgaccacagatgcagcttgctcttttggctggggtgagtaattcaatgtaacagtgtatacagaatatgtcttgtactcccacatttgtaatgagttctatgtattccttgccttatcctttagttcttttctcccctgtgccttgtgtatcatcacctgccttgttcctttttctctggacttgtccatttctcactttcttccatatttgattccttctccttgtttcgtctcttcccctattttcctctatctctgtcctttcaccttcgctcgtgccttttctcttactatttatgcctttatcttcagtcttcgatcattcgcagcttcttctatactcttttttcacttccctctactaccttcttcttctcttctatcttccccancttgtatacttttcctatattcctatagtgttctctatctttctcattgcttttctatttctctccttttctctatctcttctctatttctttatatagtctctcctttcctcttcc

SEQ ID NO: 704850 - DNA, 116 bp, Homo sapiens
gagatcccgtgtagtactcacctcagctcagtggcagcaccgacgtctggccacggtgctggaggagatgccgccttccccgagcgcgagttcgtcatcctggccaagcagtcggc

SEQ ID NO: 704851 - DNA, 253 bp, Homo sapiens
gtgcccaggtatccagctctcagcatgaagcagtatctacttgttgcttcaaggaatgcatatagtattatagtgggaaagttgcaatatattatctctctacactgtgttgctagttggtgatcagctcttctgtcaattccacccatggcctgtctagcactcagctaatttctgaaggctttgaccattcgagcaaagtctgatcgctatataagcgtgtcattagaactattctaatctcttcatggtt

SEQ ID NO: 704852 - DNA, 185 bp, Homo sapiens
ctggtagttctcgaggtcccaagcttctcacgcctgggtccagtgtcaggaggccgatctctcatcccagcagcttgatcctcagtgccccacttctttctgcacagagtgatgggctgatggatttctcacatccattttggtgtcttatcaaagtcaatgaggcagtatccgttgagaagctt

SEQ ID NO: 704853 - DNA, 283 bp, Homo sapiens
  misc_feature (22)..(22): n is a, c, g, or t
  misc_feature (263)..(263): n is a, c, g, or t
gcagaccatggcttggcttcanatgtccgcttctctctgaggatcagtggatgacggtgtgggagtcgcaccagctggaaaggggcaggtcccaggggagccgcctcggggtggggaggccagacagcagctgcgctcacttccagggcaagattgctcagaattctggaagctcttctagcccagccacttgctacggattttccagttaaagacactgaaatccaggcagttccaatgaggtcaggctgaacgggccccgnagcagaacaagagcagcaag

SEQ ID NO: 704854 - DNA, 213 bp, Homo sapiens
ggtcgaccaaagcgctccaaatgtccacttccaggatactacaagaagactgtttcaaacctgatctatgaaagggaatattcagctctgtgacttgaatgcaaacatcacagagatgtttctgagaatgattctgtccactttttacatgaagatattcccgtttccaacgaaatcctcaaagctatccaaatatgcacttgcagattctac

SEQ ID NO: 704855 - DNA, 608 bp, Homo sapiens
taaaaaaaagataccctgttaagccctggattatacttagaaattgtaatggaagaaatgcatattaagttataatgccagatattaagcataatctgattctgaagataaaactgaagatatttttcagagccaatggccattatttctcccaattttcctagtatgcccccttaatttgtccagtttgctgttagccactgttatatgctgccctagagaagacttttggttgaaggctgaataatgaggggaggggataatttatgactgtgttaatacttttttgatccattagctgaataattccatatttgatatgtaacccatatagggatgtgttcgatataactatataggccagggataatattgatttggccacatctatttgatttatggagggccaaataacctgtttcttttagataccagcccttgccggggccattctaaaagttttctactaagataaagatgattgtgtatggctgggagcagattgctcatgcctgtaattttagtactttgggaggctgaggcaggaggatcactcaaggcccggagtttgagacccgcctgggccaccatgagaccctgtctctcca

SEQ ID NO: 704856 - DNA, 219 bp, Homo sapiens
  misc_feature (18)..(18): n is a, c, g, or t
  misc_feature (156)..(156): n is a, c, g, or t
  misc_feature (213)..(213): n is a, c, g, or t
cggtagtattatcttttnaatatgttgttggattcagttagctagtactttgtttaggattttagcatctatattcatcaggaatattggtctgtagttttctttttttgttatgtcctttcctggtcttggtattaggatgatactagcttcacngaatgatttagggagggttccctctctctatcttgggaaaccaggtggtcacaccangggaac

SEQ ID NO: 704857 - DNA, 847 bp, Homo sapiens
ggatataggcatgagccactgccccttggctcaacatagttttaacatatatatacttggattgggaggaatggtggttgttgtcgagatagagtcttgcctgtcacccaggctgagtgcagcggcaccatttgtggtctcactgcaacctccgcctgccaggttcaagtgattctcctgcctcaggttcccaagtagctgggactacaggcacgtgccactacgcctggtaattttgtatttaagtagagacggggtttctaccatgtttggccaggatggttctcgatctccttgaacctggtgatctgcccgtctgtggcctccccaagggtgctgggatcgttaatctttgaggcgtaattaccttacttatgtttcactcatcaacccttcaaaaaatgacttttacaaacaattcaaacagacttattaaacaattagtcttcacatcagaagtacaacttttgggcacacatccgtgagttactcagaatttgtgccttttcacacagttcttcctccctcccgggttttcctactaagtactacttttgtccttcatgtaagtctaagggggcggaagaaaaaaagcgggaaacggcaggacaagggcttgaacggcggaaaacggcttgacgggggaaagggagaacaatattgagatcttatgtgagtcttagaactggggtggatttattaagctttataaaacgtttataattgcctgttttttttcgcttaaacatcctgtctagtggatcttggaacgagcgtaagagctaagacattaaatgggaagagcacagggtttggactgggtgttaaaacacactttgaagagggt

SEQ ID NO: 704858 - DNA, 261 bp, Homo sapiens
gactgttccactcttggccggggattctcttcctccctggggaactttggccgggccccctttttttccctttttttcccccccggttttctggcccccggcctttgggagggggctgttttcccccggttttcccctccggggttccctggccccctcgtccaggcccccccccgggtttccgttccccgggccccgggttccgctgggggttcccccttggggttttttcccagaaaaattaagttaatttagggtgga

SEQ ID NO: 704859 - DNA, 280 bp, Homo sapiens
  misc_feature (87)..(87): n is a, c, g, or t
  misc_feature (98)..(98): n is a, c, g, or t
  misc_feature (247)..(247): n is a, c, g, or t
aggtgcagtgcagtggcacaatctcagcaccattacattccacaccattccattccattccagtgcattccattccatttcattccnttccatttctntccagtccactccactccactcgagtccattccactccactccagtcctttacactccactccaatccattccactcaactccattccacttcactgcactctgctacactccgtcacattccactcttttctttcgacagtctccgtntatcacactgtatgcactgcacctaacgggagg

SEQ ID NO: 704860 - DNA, 278 bp, Homo sapiens
tatctagcggatcttttctgcaccacagcaggtaggtggtgtttgtggtacaggtagtgactggtgatggtggtgatggtgttggtggtgatgatgttgatgacaatggtgatggtgtggtcatggtagtagtggtagttatggtggtggtgatggtcgtgaggtgatggtgatggtcgcactggttaaccgtggtgactgacttgaccaccactgactggtggttgactgactggtgttggagtgttgacggtgacttgctgacttggtttgtgact

SEQ ID NO: 704861 - DNA, 410 bp, Homo sapiens
gagtctagaggatccctgctggaattgagaagcccacgtctcagctgttatatagactggttcaccccagcagtggtcatgttgtgtgttgtcaaaacgtggggctgtcaccacaggagtgtcagagacagtcttcctgcccagggaagaccaccttttccgcaagttccactatctccccttcctgccctcaactgaggacgtttacgactgcagggtggagcactggggcttggatgagcctcttctcaagcactgggagtttgatgctccaagccctctcccagagactacagagaacgtggtgtgtgccctgggcctgactgtgggtctggtgggcatcattattgggaccatcttcatcatcaagggattgcgcaaaagcaatgcagcaattccacagggggtac

SEQ ID NO: 704862 - DNA, 331 bp, Homo sapiens
agtgaaagcacctagtgaaaactgatttgataatataagatttaaaaatatgtaaaaggtaaatcaggttaaaggggaaattaacggactgttttgttgaggccagaaggaaagtgaatatgcagaatgagacacagcagggtcctgcacgcttgctaaaagaaggcccctcacttaagtgctgaggttcccggacactgaggcaaaaagggaaacatgactttgaaaagagtcagggtccctaaaataaagagcagctgttcaggagcatccctgtgttttaaaacaaatggggccaagagcaatttctctggggcatcctcgtcaagag

SEQ ID NO: 704863 - DNA, 1264 bp, Homo sapiens
  misc_feature (288)..(288): n is a, c, g, or t
tgggggggctacttctttccggtattctcagaatatgtcgtaaaagatggtgccccctataggggccatttccgttatcttaaacaaaaccaacattctgtggtgggattgtgaacaaacttagtgcttagtgactcgacgtgcgttagtggtggtgtagtgtcttttttatttttttcacaaatctcccttataagaatctctttttctctatatataattagagttctccttgtgtgaaaaacccttggagaaagtttcccgggccatgtgggaaattatagaaanatccccccagaggtggtctccgtggtaaatttaaagcttctccacgaggaaaatcttgtggaacattttataaatttgtgtgggttctatcaccttttatagatgtgttcacaccgagataactaagtgaagtgttagaggtgtgtaacaatattatataaagacttcgtgaacctcttacacagggtggggggaactctatttttatatatagaatataaaccagagtggtgtgttatcctctgtggagggtaagaataataacgaggagagggaactgtgtgatgtgattcacaacttagtgtgggggagagtggaagagactctttatataatagagggagggagaatgagagaggtggatgagtgttagggggggaaatataaaaacagtagtcacaacaaaatttatccgaacaacgtgtgtgagaaaacgcgcgtgtgtctccacacacaacgtgcagacaccgagctacgatgggaagaatagtggggacagcgagaaaatacctcccacaccacaggggagggagggggaagaaggaagtagtataccaaccgggtgtctgtctcaaacaagccgagactgattaaaacagaagggtcgccaccaaacaacgcaggggagttcgtgcaggcagccccatcttgtataaacaaagtctggtctgatctacatacaacacgaagcgcccgcagcccgacgagtagcagacgttctagtaaaagacacagagtctattacacacaaaagggtggggcccccaccaatagcaccacacgtgggtgacgaacgaaaaaccacccgaaagaaagaatagttcgggcgaagacaccaacaaccaaggaccgggggaacaacacatggagacaggagcgaaaccaagagagggcgggcagattacacagccaaccaaacggagcaaagctcgccccaggggaagacaagaatgaagcataatcaagcaacaccaac

SEQ ID NO: 704864 - DNA, 946 bp, Homo sapiens
ggtactggtcccgaaggtcgtttggatgcatgctggcacgcaccagtaatcccagctacttgggaggctgaggcaggagaatcacttgaacccgggaggcagaggtcatggtgagccgagatcacgccactgcactccagcctgggcaacagagcgagactctatctcaaaaaaaaacaaaaaaaaaaaaaacaaaaaacaaagatgagtcgcacatctggctggctggggatttcctacgggttggtctatgacagaatggaccatacttttaagatattaatgggagtataaatgggagtctataaggggtctttcatataactttaaactcttgggctatcctgggctctgatcatgatatgttggagcatagtagctccctaaactctgggagccctttcagaaatttccatgtagtgctaattaaccctttttacttgcacactgattaaagtaacctgactcagggtctgtggggctctgcaggcttagcctgtgtttgggtaggatgtccagatatatttctcagaaattttttaccaccttattttagcttattacttcaggttactctatttctcgtgcactaacttacgtgtccttcgtgggaacctatgatggggcttcaagggagttcaggtgtcaccgaatggcggggtaagtactctctacttgcgggaaaatcatggtaagtctgtggcggtatgacattttaggaaacgtcttatatagttccctttccagactgtccctttggactctaaatataatcataagtctgtgcttccattatgcagggtcacattccgtagcatcctgcgcaagtattgagccatactctcattcccattttggcgggtaaaatttgtcccttaccccgaagccctttaagtaaccccgggtaagtgggggcagaatcccgtctagcaatcccaaggtttcc

SEQ ID NO: 704865 - DNA, 391 bp, Homo sapiens
atagcctataatggtctagtcctctacccagtgcactttcttaataccattttccagttgatatgatataaaccactttcacagagagttagggcctacccttctgaccagccttggaaaattccgtgttgtaatgaaagttttcgcctttcacgtggaacctcatagtcaagcatattttaccaaccttttaaaaaattgtatacacagctaagattaagagtaaagtttgttaaagaagatacctttgtcactttatatatagatattattttaatatctcaaattgtggctcactctccatatagcgcctagaaaaagaggtctcagtgtgtttctcaatatgtatagtataatatatagagtattacgcgaggtttccccgcgtgcc

SEQ ID NO: 704866 - DNA, 535 bp, Homo sapiens
  misc_feature (501)..(501): n is a, c, g, or t
tgctgcaaacagatatggtgtcatctagcctttcacattccatttatagagtacaggtagagtagatttagcatagtttttgagggcactaagagtttctaaatggtaaatgaatattggcttcaatttgaagtcaccagatgcattagcccctagcgagagtcagcctgtcctttgaagctttgaagccaggcattgccttctctctagctaggaaagttctagatggcatcttcttccaatagagcactgttaattctgcattgaaaatctgttgtttagtctagccaccttcatcaattattttagctagatcttctggataaccctggtgcagcttctccattagcacttgctgcttcacccttgtacttttatgttataggaaagggcttctttcctttaaacctcatgaaccaacctctgctagcttcagacttctgcaacttcctcaccactcttaagcctttataggaattgaagaagtgtcaaggccttggntctttaattagggctttggcttaagggaaatgct

SEQ ID NO: 704867 - DNA, 561 bp, Homo sapiens
  misc_feature (4)..(4): n is a, c, g, or t
  misc_feature (97)..(97): n is a, c, g, or t
  misc_feature (237)..(237): n is a, c, g, or t
  misc_feature (284)..(284): n is a, c, g, or t
  misc_feature (300)..(300): n is a, c, g, or t
  misc_feature (303)..(303): n is a, c, g, or t
  misc_feature (328)..(328): n is a, c, g, or t
  misc_feature (332)..(332): n is a, c, g, or t
  misc_feature (346)..(346): n is a, c, g, or t
  misc_feature (365)..(365): n is a, c, g, or t
  misc_feature (380)..(380): n is a, c, g, or t
  misc_feature (439)..(442): n is a, c, g, or t
  misc_feature (459)..(459): n is a, c, g, or t
  misc_feature (496)..(496): n is a, c, g, or t
  misc_feature (555)..(555): n is a, c, g, or t
tgcnttcagaggggcaactttttattgtagagatctgcaaagtgctcattgtccttaggttgtctgttttcactcaaatgcccaaattctgtttttnactgacccaggctcactctgtgtgaacagttttaataccaccctcaacgtgggataaggttagctgttagcagcaaaattaagcagatgctttctaggaatattcctagggaagatggtaaaaaaaaaaaaacaaaaatntgaatttagcagtttgcctcacaagattttcacttttaaagaatacngtcttaatgcccaccnccnggcaatatccaggtaatatccagcncacnggttaattttgganggggggggggggggggggngacaagcagcaaggntttctccttagcaaaacagaaaaacgtgattctcttctcagagtacacctgaacaatannnntcatctaaacaacattnttacataatcatttcttcatttacttaataccattcntctttattcacacattattacatcataatcatcacattacatttcatatcaaattctcnaatttc

SEQ ID NO: 704868 - DNA, 948 bp, Homo sapiens
gaagtcagattccgcggatatacgagtgactccggagtctctgaggctcattatgcagttgtgaaattgtcgcgccgattgttagcaaatcagtgtatgaaccaatcagagtccttgggagtggagcagatgctcgaattgcatattcattgttgatatcggataggaattggtatctgtcttaggtcaaagatcatggttactatacttctatggtgctgtgagtgagtatcacgcaccgtcaatgatggggtgtcctggaatgcgtgtccttatgtggctgctagatattgtgccactgtgccccaccctgaaaagatgatcatcgcacacagattcacgacagacgttgccgttggtaggacctggaagtgtgggccattctggtgggtcgatggcctacgaagtgagggcgtggagatatcacgattggcttcaagggaaatgtgaaatcatcttattttgccaggtggacttttagatgacagtacgactagatgtcagtgaaggtgatcgcgggggtaaatgcagcatattacatttgtgtgaatgtttgcaaaatgagatcaatccatggtctatgagaacttcctgtgtagacttcgtttggtcacagcgattttaactttcaaattgtcattgagctggggtgactggtatgggtgcgcatgtcatttcggggaaccgttctgggtcagtttcataagttggcattgcagtgtgatggaggacgaagtgggttgaggctgtatatgaaggcatagagattgccaaatgggggtggagggagggagacaactattgtgttgggagaacttggactctgctggttggcctaggaagtggactgaggtggggacaaggtagagagcatcgggtagaagagtgtagtagactaatgtggaaagttttctctatcttctcttatttgttaatttttttgttggt

SEQ ID NO: 704869 - DNA, 2083 bp, Homo sapiens
  misc_feature (113)..(115): n is a, c, g, or t
  misc_feature (154)..(154): n is a, c, g, or t
  misc_feature (178)..(178): n is a, c, g, or t
  misc_feature (202)..(202): n is a, c, g, or t
  misc_feature (1446)..(1446): n is a, c, g, or t
  misc_feature (1448)..(1448): n is a, c, g, or t
  misc_feature (1455)..(1455): n is a, c, g, or t
gtggtgcaagaagaaagggggtgcaattccccccccctttcagtgaaaataacccccctttaattaaaagagcaaaccagggtgggtacagggtgtgactaagtggtacctgnnnctgaaatatcttccattcattgggatcattaagaagagnaggtaaggttcctgtgaactgggncaattccatttgccattaaacacncgagaattgtaatggttagtgattccagagcctctcttataaacacttagattataggatgtgcatttctccttagaatgaagtctgggtatttccatttgcatctggatttagatgatttagggacaaaattacctacatgtgataagttgaactcttcctaatgactattcttattcttctcttatttcatctttatctcaagacattatctttaattcagcaaatcaagtatttccctagaaagctatgtattaaaactctctatgaaaagttaaaataaaacatagagttgcctaaactgagaagttttgagtcactgtttggaatttcactccctcgctaatattgtatgtgaaatctgctgtgcaacatttgaaaatgaaattatgtttcctggatttctgtgataatttttgaattcttactagagtaagattattctgtatccataaggattaatattacttatcctttaacaaaattagaattgcccctaaagaatgctgttttagctacagcaacattgaaatttttaaataaatgtctcgtttggtagaaggcaaaaatggtctaaaatttattggtccattttttaaccaaatactttcatctaaatcaagggttggccaaatctgccccactgtctgtttttgtaaataaaattttctttgaaacacagccatgttcattcatttatgtactatcatctgtggctgcttttgtacttcagtggtagagttgagtagttgtgagaaagactggatggcccacaaagcctaaaatatttactatcttgtcctttacagaaaaagtttgccaacatctgatctaaaagataaagtgcagaatctggctgctctaaacattctggttttgaatgaagtcattttcactttactcttttgggtgagctcttaattctgtttccctaaagacataatgatcatgtttctattgctgcccatgaaattagtttttttaaaaaagtcttgatgctgtttaggaagtgatttggttgtacaactatcttgagaggtgggagggtgtatacattatagaatttccaagctagaagtgatcattaaggaatattgttattcccttaggactgtgaccaagtcagaaacttgagactgttttagtatagatgtaggcagtataatttaagtcttatagtaaccataatgaaaacacatacattttccttcttaatactttaaacttttaattatgataaattncnggctcantgaaaaactgcaagaatagcattctgtacatattctacatgttacacacattctagtgacgagtctagagaaaattcagtgaaaaattcctctaaacttttcactgagattccccagtgttaacattttaccttatttttttattgttttctgtttctgaactttaaaaaagtaagttacagcagaggtgggcagatcatttgagcccaggagttcaagaccagcctgggcaacaaagcaaaaccctgtctctacaaaaactaaaaaattagcgaggcatggtggcacatgcctgtagtcccagccacttgggaggctgaggtgggaggattgcttgagcccaggaggttgaggctgcagtgatccatgatggtgtcactgcactccagcctggatgacagagtgagactttgtgtaaaaaaaaacaaaacaaaacaacaacaactaagttatagatatgatgcccctggatattgtgtatttcctaaaaccaaggatattcttctgtgtaactttagtgtacttaccaaaatcagcaaatcacagtgataaaatactatgatctaatcagcagacctctttcagattttgccagttgttcacataatggcctttatagcaagaaaga

SEQ ID NO: 704870 - DNA, 1405 bp, Homo sapiens
tacttctttaacatctttaatgtcttatgatgatcaagcatgtatttaaatagtatttactgatgcctgttagcagtggtaagcacgtgtctgtttctgctcacaccccaagagtgtagagctttgagggttttgcagtcagtggtcccatgatggggcgttgggtgattaatccaatccagcttaggccacccagattcttagtctcaagggcttggtcatgagaaccttccagaggctcctgtgactcagtgactccagtcccctgggtggttcttggtgcaggtcacatgagggaggagaccgggcttttatagaactcacttcactgtctgttcaaagaaaagtgttacttgatcataacagctcaaaaaaatctgtttcttaaaatgagattttacctggatgcccatcagctgggaaagggaatatctattccccagttgatgggcacctagatgtacatagagacatatgtttgtacatctatgtaatatgtacttatatttgtagatagatacatggaattatctgtggccagagtccaaaacattttgagtgggaaaaaacaaattatagagtgttaagttttgtttttttttaaattctgcacaaaaaccaaacctgttcacaagggcttgtccaccaggccagggccagatgggccgccaggcaaaacagttttggagcaccttctgaatttccttgagtttacagaatgtttccttcaaagtaacacttttataaaaaattattattataaaagcaatgcttgtttgttataagtttggaaactccagggaagtataaagaaaaaatttaaacaatcccaaatttaaccatccagaggtagttaccaccagcatcccagccatttttgggccatgactatctacgttcacacatgtatacatgggtgtgtacatatatgcacacattcctagatattgtttcacttatttttctgtgttgctgaatattcttcgatggcacttcgaatgagtgacttgtggcccccttcttggacatttcccaactcctcactgatagaaacagggcttcactgggcccatccttgcctcgggactcattcctaggactgcccagctaaagggtctgagcttggtcaagtccttgggaggagcattctctggtgatcctggacagtggggaattgttgaccaagagaccggacaaagatgagcagatgccacagtcagtaaagcagggaaaatgcattactaaagtcagcttcattaaactggcgatctcttcttttcaaaagtccagcatgtgccacagaaatggaaagctctctggccactactgtcctgcccagggaggggagcgtgggtccacccacaccatttaatacctgtaactggatgcacctctgcccctacac

SEQ ID NO: 704871 - DNA, 495 bp, Homo sapiens
ttttttttttcacggtggcattctgggtttgggttttattggctttccattgagaaaggtggccagtgggcatcaagggtgccataaaggcccacagagctttgacctggggaccctgcttgttttccagaagtgacccaccaggagaggtggaccagagagctctctgcctggagggctgtggctggggagcacgaccggatgatgcagagctggaggaaggcgtgggtaagtggccgcagccgggcaaagaaaggagggctggagccaggggcagggcacctgcaacaatccagtggatctttcaagggccccattcagcatgggaccccacttgttccctcttagccccggagcagtttcctttatgaaatctgcaacactggggggggaaatcccacgtcttgttgctgaaactgcaggagatcaaggggcatctggccccagcccttaaaagagactgaagggaggcgagactgggagggactcacaggt

SEQ ID NO: 704872 - DNA, 232 bp, Homo sapiens
aggtcagtgaaaaagttggccagggaaataaatactcggagttgagcctgactaagtcatccggaaggtggagatcagagagaggctgcagtatggctgaggatctcctcagcattcactagcatcaccaagcccagcaccagtatccgctcagcctcacccgaaaccccgtcgtctatccccctgacggactcaagcaggacgttgaagtacacaattctcatagacaaat

SEQ ID NO: 704873 - DNA, 220 bp, Homo sapiens
ggctaacgtgcttctgctgcaccatagtgtttgtctgtgtgagatataatcgccgagacaacttgcactgctaacattgttgcgattgctaagagaccactctattactaggtgcactacacctagtagttacagtgggatgtggtctggtccacctgcctagcgatgagtacaatctgtcttaggatcgtgcttggcatgccattgcatcgaaagaaac

SEQ ID NO: 704874 - DNA, 1368 bp, Homo sapiens
cggcctcgtctcctaaagcccctccctcctcctggctcctcttccctgtcctgtctgggccatgtgggggacaggaggctttcctctccctggaccccctggccagcctcgggtgcggggcccgacagcagctcgagggtctccttgctgccgcccttcctgagtgaccaggcacagcacgtgcacgccctggggaacttctacctcttctgccaggccacaggtcctgcagacattcgctttgtctgggagaagaatgggcgagctctggagacctgtgtccctgtgcagacccatgcactgcccgatggcagggcccatgcactcagctggctgcaggacgccatcagggaaagcgctgagtatcgctgctctgtcctctcctcagcagggaacaagacttcgaaggtgcaggttgctgtgatgagacctgaagtgacccaccaggagaggtggaccagagagctctctgcctggagggctgtggctggggagcacgaccggatgatgcagagctggaggaaggcgtgggaaagctgtagcaaggacaccctgtagccaccaggaaggagtccctgacaccgacctcaaccccaacaagaccctgctgccactgaccacagccacccccggagaaggcctggtcccccacaactgtgaactgtcttgcccaagcctgctctgaacacagccattgggccaccacctgatgggcagaggcgggacagtggagaagcctggaacccaagtgggcctgtgacaggaactaagacttaaaaaattaggtgcttacctgggacagtaagttctgtctggcacaagcaggtaaccaggatggctaacaggctttgatagctgctcgtgaactaaaacagcagggtgtgtgcaggttcctcctctacggtcaggcagcaggctctgaaggctgatcctacaccgtcccagtgactccccttgacagagtgcccccaccccctaatagccaacagggttagcatggccagcacagatcgctgcttttattgatgcaaatcaagcctgctgcttctcctccctgcagacttagccaaggaactccaagatgcatgactgggacaagaaaaggtgagactccacatggaaatgccttgccctaaaccttgaatgactgtgagatgcgatctgggagtgcatctgtcaagtctttgtgttttcttcactaacctcagaatactgggctctattttatcaagcgctgcagtttatgcctctgtcccgtcaatgctcagcttctgcaacaggacaccaaacttgatgcagaaagccaaataggtcaattatgcaaatctcctggtgccatattaaatttcttgacgatggaaaaaaaaa

SEQ ID NO: 704875 - DNA, 162 bp, Homo sapiens
cagacatatgcacttcggaatcaactcaggcatgcacagctatccctgtgctggagttcattttaaaaaacaacgccccagttatcacagttatcttttatggttcaccacttttccagtaacacaaagaagctacaccaaaatttgggggggcagatcact

SEQ ID NO: 704876 - DNA, 881 bp, Homo sapiens
taagatcacagactgttttttgcaagaccacattgttctttcaggaaagctgtagcaaggacaccctgtagccaccaggaaggagtccctgacaccgacctcaaccccaacaagaccctgctgccactgaccacagccacccccggagaaggcctggtcccccacaactgtgaactgtcttgcccaagcctgctctgaacacagccattgggccaccacctgatgggcagaggcgggacagtggagaagcctggaacccaagtgggcctgtgacaggaactaagacttaaaaaattaggtgcttacctgggacagtaagttctgtctggcacaagcaggtaaccaggatggctaacaggctttgatagctgctcgtgaactaaaacagcagggtgtgtgcaggttcctcctctacggtcaggcagcaggctctgaaggctgatcctacaccgtcccagtgactccccttgacagagtgcccccaccccctaatagccaacagggttagcatggccagcacagatcgctgcttttattgatgcaaatcaagcctgctgcttctcctccctgcagacttagccaaggaactccaagatgcatgactgggacaagaaaaggtgagactccacatggaaatgccttgccctaaaccttgaatgactgtgagatgcgatctgggagtgcatctgtcaagtctttgtgttttcttcactaacctcagaatactgggctctattttatcaagcgctgcagtttatgcctctgtcccgtcaatgctcagcttctgcaacaggacaccaaacttgatgcagaaagccaaataggtcaattatgcaaatctcctggtgccatattaaatttcttgacgatggaaaaaaaaa

SEQ ID NO: 704877 - DNA, 907 bp, Homo sapiens
tacttctttaacatctttaatgtcttatgatgatcaagcatgtatttaaatagtatttactgatgcctgttagcagtggtaagcacgtgtctgtttctgctcacaccccaagagtgtagagctttgagggttttgcagtcagtggtcccatgatggggcgttgggtgattaatccaatccagcttaggccacccagattcttagtctcaagggcttggtcatgagaaccttccagaggctcctgtgactcagtgactccagtcccctgggtggttcttggtgcaggtcacatgagggaggagaccgggcttttatagaactcacttcactgtctgggacagtaagttctgtctggcacaagcaggtaaccaggatggctaacaggctttgatagctgctcgtgaactaaaacagcagggtgtgtgcaggttcctcctctacggtcaggcagcaggctctgaaggctgatcctacaccgtcccagtgactccccttgacagagtgcccccaccccctaatagccaacagggttagcatggccagcacagatcgctgcttttattgatgcaaatcaagcctgctgcttctcctccctgcagacttagccaaggaactccaagatgcatgactgggacaagaaaaggtgagactccacatggaaatgccttgccctaaaccttgaatgactgtgagatgcgatctgggagtgcatctgtcaagtctttgtgttttcttcactaacctcagaatactgggctctattttatcaagcgctgcagtttatgcctctgtcccgtcaatgctcagcttctgcaacaggacaccaaacttgatgcagaaagccaaataggtcaattatgcaaatctcctggtgccatattaaatttcttgacgatggaaaaaaaaa

SEQ ID NO: 704878 - DNA, 311 bp, Homo sapiens
tgcacaacctagggtcagtctgcaggtggtaagccatttaccaagatagttgtaggtaaagaagggcagacttattagagaaatgtgaaaatatgttgcagtgggcagctcagcagagaaggggctacctgcaaagaggcaagggctggaggaaagttttatagggtcctgctgaagggtgctacgtgtggaatgaggtcattgtgcccgcaggttgtttgtgattagctgtctctaacaattgttcatacaataattgttcattattgttctcaacttggggctctccccaacctggggacccttcctta

SEQ ID NO: 704879 - DNA, 260 bp, Homo sapiens
cgcaaggccttgccaggccagtggaccttgtgcagttcccaccggagccaggagctgcccagaccgcagacccagcccagtcacactgccgttatcgccaaacacatgctccctctgcagcagcatgggcttttgaaaagcacgcgcatgccgccgccagcatgcatgccatgggatccgcgcgttctccccggtgctctgcagagctgaggggtacaaactgagctgcaaacgaaacagtgtgttcccccttggccttg

SEQ ID NO: 704880 - DNA, 14715 bp, Homo sapiens
aggaaatgcaggttgaagggaattctctggggctttggggaatttagtgcgtgggtgagccaagaaaatactaattaataatagtaagttgttagtgttggttaagttgttgcttggaagtgagaagttgcttagaaactttccaaagtgcttagaactttaagtgcaaacagacaaactaacaaacaaaaattgttttgctttgctacaaggtggggaagactgaagaagtgttaactgaaaacaggtgacacagagtcaccagttttccgagaaccaaagggaggggtgtgtgatgccatctcacaggcaggggaaatgtctttaccagcttcctcctggtggccaagacagcctgtttcagagggttgttttgtttggggtgtgggtgttatcaagtgaattagtcacttgaaagatgggcgtcagacttgcatacgcagcagatcagcatccttcgctgccccttagcaacttaggtggttgatttgaaactgtgaaggtgtgattttttcaggagctggaagtcttagaaaagccttgtaaatgcctatattgtgggcttttaacgtatttaagggaccacttaagacgagattagatgggctcttctggatttgttcctcatttgtcacaggtgtcttgtgattgaaaatcatgagcgaagtgaaattgcattgaatttcaagggaatttagtatgtaaatcgtgccttagaaacacatctgttgtcttttctgtgtttggtcgatattaataatggcaaaatttttgcctatctagtatcttcaaattgtagtctttgtaacaaccaaataaccttttgtggtcactgtaaaattaatatttggtagacagaatccatgtacctttgctaaggttagaatgaataatttattgtatttttaatttgaatgtttgtgctttttaaatgagccaagactagaggggaaactatcacctaacatcagtttggaaaacaagacctaaaaagggaaggggatggggattgtggggagagagtgggcgaggtgcctttactacatgtgtgatctgaaaaccctgcttggttctgagctgcgtctattgaattggtaaagtaataccaatggctttttatcatttccttcttccctttaagtttcacttgaaattttaaaaatcatggttatttttatcgttgggatctttctgtcttctgggttccattttttaaatgtttaaaaatatgttgacatggtagttcagttcttaaccaatgacttggggatgatgcaaacaattactgtcgttgggatttaaagtgtattagtcacgcatgtatggggaagtagtctcgggtatgctgttgtgaaattgaaactgtaaaagtagatggttgaaagtactggtatgttgctctgtatggtaagaactaattttgttacgtcatgtacataattactaatcacttttcttcccctttacagcacaaataaagtttgagttctaaactcattagaattgttgtattgctatgttacatttctcgacccctatcacattgccttcataacgactttggatgtatcttcatattgtagatttaggtctagatttgctagctccaagtaattaaggccatgtaggagagcatggtaaccacagatagaactggtattatcccaagtggtctgcagactgctgagtggggatgggatctgctctctgttgagagttggtaatcattggtttgaaatgtgatgaaaccactcaagccaatgaaggtgggtgtgtaggtggggagtactttgccataatattttaaaacattacctggttagagttctaagtggtacttatttttgtttggttaggggaaagcctgaataaaaacagaaatggacacataatatgcatattccatagtctttgggaggctggaatgtgcctgggatttgggtctaagtgtatgcgtaattcttacctcactaaagaatttgccttgtttttttccttttggtgagtgactaaaacgtctgggcttccctgtgtgcgtgctacagtaagcaagcagaggctgtgcaaaggtgtgagcaggatcacgtggaatctggaggatacatcttggcttgcaaactgcctctgtctcctgggtgggactgttctgtccttgcactgctgttctgtgttacctcttggggtgtaaggttttgcttacaggagacaaactttgggcgtagaatggaagccactgccagcctctgtgctgagaaggaaggtgcttgtttcaaagggagcagcaagggaggcttgttctactcacctgggcctgtttgcctgagaaggggagataagggctgaactgggactagccagggggaccaacacaaatggtgggggatcatgacctgaaggattctttccttcccatgagctgcagggctggttgccgtccttgcaactgtgtcttatttgcctgtgccgttatatcttggtgacccctccacgtgtacactactgacaaacgggtggagtgctggggagaagtcactgtgccgcccacctagtaaaccttctgtctgtgctcatggcatctccaagatggggcactgctgtgtgcagaatccagggtcctctttctgcttgcaactcctttccctggatgccccagaaacaatccaggcctcctttcctatcttacccctttgctttgctttttaccccagcacctctataaccgccttctcttcttttcagaactccttgtttctcatcctgttttttatgattacaaaactcttgcttccaccctggaagataactgctatagatgcctgtatgtaaatggtgctgtctccagcaactggcatgctgaagaagaattgattcacggggtataaatgttggggattggaagtggggatgaaatggcacttgttgatacaggagcagagaggtgaggccgactgctgaagacagctcgccaccctccttgcctccactccaatccaggggctggggccacattctttgccttcatttatcctcagatcaggtgagatcgacaggaggtgttgatggcagtgccagcaattattgctaatccgtttgcatccttatgcatagatctgaattcagactttgtgaatttccagaggtgtgggtaatataatagaattcagtgagtgggcatggctgatcttgtgcaaattaaaagttatggggcataagaatagcaaaagttgaacttcttttaaaaaggaaagtaccctgagagccagtattggttgaggctcttcagtatgcccaggttggcagcactgagaaccgcaggaacggcctgttgttacaaaaaggagattgactcagctgcccttggtgcatctgactgactatgactgctgagagattccaaggacccttaatgccagggctaacctctccatgtgcagtgagacctctggaggaagtgtcatcctctggctttgtgtggtactcattatggtgcagtgcgggcatgaaatgaagacacccaaataggcttacagatacgatatgttttaaatgttcgtatttaacaaaaacatactgacactgtttggaaatggcaacaggaagatagcaaaatgaatactaacattacgaaaagatgaacaggtacatgttccaaggcaggtggctgtgaacttcctctgagtgaaggcatcccctccagcacctttcagcctgctagttaggacgacccgccgccaccctccaggacctccagccctgcactgcctttcctctcttttaaataattcttcattgagttctaatatgtaaaaaaaaaaagtttactgtaaagtttgcaaataaggaaattttttttaaaagtcctcagtaatcttaccagtaacaattgttatgggcacatttgcttttggaagatttcttttgtatgcatgggataagtacatttttaaacaaaaatgggattatgccataaattctattttgtgactttaatatatagtgaacaccttttttaatgatgacaggatgttcccttgcatggctgtatcaatttaaacaatcttgtttcaatgggcatacagggtattttctagtttttttttcctcttagaaaataatacttgcgatgactttccttgtagctcagactttttcacgtctgttgttatctctttgggaatgctgaatacatacatttcgagaaggaaatgactgttaaactcttaagacttcaggttcatattgctaaactgcccagcagggagggattttttcaattagtgttctcactggtgaggcaaacctgatgccttcccctcttcctcagaaccggctttatcacattgaaaacctttgctcctccgacggatcgagtctgctttccctgtggatgtgagcattgctttgtctgctggtgactgaacatctctaccatgtgtcaattggccatttgtggtgtgtgtgtgtgtgcgtgtgtgtgtgtgtgtgtgtgtgtatgattttctaattcctagtcatttttctattgattgttttgcaaaagccatttacatcttaaggatattgataatcttttgttatatttgatgcaaatatttttttccagtttataggttgccttttaattttgtgtttcaggtagataaaagttaaacgattttcttaggttagtttatcactgtggtttctgaacttgttatgtgtagatcttttccaccccaagagtacataaatattaatccatactttcttatggaacttgtatggtttcgttttttacatttaaaccttcttccccgtggtgtgtgttgtggaatctgtgtttgtgtgaggaggggcatggtgctctcagaacccacctcctgtggccagagagccctgtcctgtgagggtggttatcacagtggcagggttcaattcagaagaccttgagggcaggctgatgtttcctgaatgggcccctggttgttgcttgtccctgactctccatttccccatctgagtggatttggacctaatagggcactggagctggttcgaatcctgactggactacttggcaactttatgtctgggagcaagttacttaacctccccaagcctgtgtctgtgaaatgcgggtaaatgaatgtagatgtttggcagcagctactccttgttgagctctcacagtgaactctcctgcctctgccctccttccccgcctcccctggtgcctagcgtcaggtctagccacttcctcctgggcccctctcccttttctgtggctggctgcctgcccgcctggcgctggacctttcatgtaacgggaatcagcatgtatattctggtctggtctgtttctacacttaattttgtttccagtagtatttccctgtaccggcagagttcacaaacacatttgaagaggctttttctcaggattcttaaccttcccaaaggaagtcccatggatgggtttctagaagtctataaatgctctgaaattgtatttttctgtggaaagcataactttcatctgcttgttcgtgctcaaaaaagatcatgaatgaatgattgcatgattttatgccattgtgcttatactaaaggatatgtagcccatctcttgagctgttaaactgttttgactactttaaatcgtgcagctgtgagcatctctgtaaatttagtgtacacatgtatcccctggagtggcatataactcggcagtgagcacttatggttttataactctcttcacagactcaaatgactccagaaagctacacttcctgttgtgagtatatgatatccatttccctacatagccactaacatcaggtttttacaattttatttatttcttgctactttaagaaatttttgtggtgaaatacatataatagaagttgactatctgaatcatttttaagtatacattcagtagtgttaagtatgtcgccattgttgtacaaccaatctccagaactttttcatcttgcaaaacaaactctgtacccattaaataacattaaacattccattccctccagcctcagcaaccccattctactttctgtttctgtgagtttgactattccaagcacttcatatcagttaaatcatgaagtatttgtctgtctgtgactggcttatttctctgagcacagtgtcctcgagatgcgtctatgttgtagcatatgtcagaatttccttcctttttaaaagatccaaataatattcttattttatatcttttttttatccattcatccattagtggacacttgggttgcttttggctattgtaaataatggtgctatgtacaaatatctatattattgtatttacaagtataatgctgtaatgtacacacatctttttgagatcctaccttcagttcttttgagtatatagccagaagtggtattactaaatcttacgatatttctatttttaatttattgaggaaccactgtagtttttcatagcaactgcaccattttacgttctcaccaagagtgcacaagggttccgaggttcccacatcctccccaacacttgttattttctgctttttttagattgcagccatcatagtgggtgtgaggtgacatttcattgtggttttgatttgcatttccctaatgaggagtgatgctgagcatcttttcatatgcttactggtcatttgtatgttgtctttggaaaaatgtctattcaagtcctttgactattttaaaaattgggttattagagttatcgttgttgttgacttgtaggagtttctttctatattctggatattaatcccctatcagatatatgatttgcaaatatcttctcttattccataaggttactttttcactttgttgattgtgttctttgatgtatagaagtttttagttttgaaatagtctaatttatctgtttttacttttgtggtctgtgcttttggtgtcatatccaagaaatccttgccaaatccaacgttataaggtacttttaaggtattttagttgtcttagtctatatttctgtactcacctttctttatccactcatcagttgatgggcatgtaggttggttccatatctttgcaattctgaattgtgctgtgatcaggtgtctttttagtataatgatttactctcctttgcgtagatacccagtagtgggattgctggatcgaatggtttttataattttctattttaccacagtttctctctgcatttttcctctttgaccactaaccatgtgaaattctcatattgacctttataatgatcatgaactcttagtatcattgggaaggccacatttgccacttatgattgtaaaccttatcctccatttttcctgttattgttggtgcaaaaagcacctattataccaggactttaaaaatcagtctgataagtctttgataagtctaataataataactgataagtccattgaatttgcttctgattactttttctttagtagctaaacatgtatgtactcctatgattacaatgaacactcctctccatttaaattaattatttacattgatgaaatagcaaaatgttaatgactaaatactgtcttggttttttcgttccaggtcagtcaatattaacttcttataattttcttttttttctttatgtgtgtgtgtgtgtgtatttttttttttttaatttcaatggcttttggggtacaaatggcttttggtcatatagatgaattctacagtagtgaagtctgagattttactgcaccggtcacctgagtagtgtacattgtacccaatatgtggttttttataccttgcccccctcttaccctccccactttgagtctctagtgtccattatgtcactctgtatacctttttgtacccataagttagctctcacttataagtgagaacacacagtatttggttttccattcctgagttgcttcacttagaataatatcctccagctccatccaaaattgctgcaaaaaaaaaaaaaaccacaaacattattttgttcttttttattgctaagtcatattccatggtgtagagataccacattttatttatccactcactggttgatgggttggttccacatctttgcaattgtgacttgtactgccatcaagtgtctttctggtataatgacttcttttcctttgggtagatacccaggagtgggattgctagatcaaatggttcttaacattttctctctggatctatttctggaaattttaggctccagtttttgttgttgttgttaataaaatgcaatggaatgtaatgatcatcacttttcattatgctttaaaatctggtaaatggaggctagaacactcctgtaaggcaagaatattctctctgttggaactcaaatacacagaactgggtaaatctcaatcttaatctttgattcaggacacaacatggctctcttttacttgctttctttaattgttttttaataatgtggtaagcatttctgaatctcctatccaatacaaaaactaggacaatacagacagtaactcctatggttacaatgaacactcctctccacttaaattaattatttacactgatgaaattgaaatagcaaaattttaatgactaaatactgtctttgattttttgttccaggtctgtcaatattaacttcttataattttctttttttttctttatgtgtgtgtgtgtgtgtatatatatatatatttaatttcaatggcttttggggtacaaatggcttttggtcatatatatgagttctacagtagtgaagtctgagattttactacaccttccacttatgtggtcccacaccacccgcctcccctgccgcctcctgccaccccctaggccaaggtaataatcatcctgaatcctgggtttatctctcacttgctttcttttcatataattttgcaaaagaatctgatctaaatgtgtttttcagagtatatatttatattttagctgttcttagagaaaatttattattttgcatgtaatcttatggaacattctcatttaataccatggtaagattcagcccttgcccaggggatagttcatttagtttgtttactggatagagctcatcatgtgactatacctcagttagtttatcagttctcccatccatggtgactaggttgcctctcagcctctcaacaacactgtttctcagtgtccttgtagaagtgatatgtgggtgttttctccttacacagagttgaaaggtgacgacaacaacgttggcactaccaatcccccaccctccagaggggtaaccagtgttaccagtttgctgtgtttcctgctacacctcgccttattcacttccatttgtatctgaaaaacgtgttgcatggtttcttttctatagaagtggtaaaatgctattgtgtcctgtacattattgattactttttttcatttaacagtagggagatgcctgggagtacacagagaactgccctcattgttttcaacttctgcactgtatgtctgtgagtttagccattctgctgttaatggaaatttacagtattctaatcttttgatattacaaacagttctgtgcgatcatcgtcatacacaaccccttgtgcacaatgcatgagtgtttctcagggtaggtaccaagaagtgaaattcctgggtcatagggcgtgagtccgacatttttctccattctgccctgttgccctccagagtgggtgtccagctttgcatacctaagtatgagagtatctgttgttcatatcctctacgacgctccatatatgaaacttaagtttctgctagttgccatctttgatctatcatgtatgcagtgacctactaagactgtaattggtacagtagattcttgtcatctgtgtgtgaatttagcattcatgggcttaatgctgacaaggcccccagggtccaagacatataatcatgtataattttgtcaaggtataattttttaaattgcttttgtcatgtgtctgctggtgatgcccaacccagtgctctgcacccaggtcacactgtggctttgtcctctgcttatgcctgcattgcagcaactgtcctgaagagaccaaaattatgcagatttaggtaagtccatggctaatgttattatattatgtgctattgtaatggatggggctgtggagtgtatgaatttataaatcactggtcttgtaattaaaattcaaacactatagaaaaaggccatgtagaagataaaagttcctctataatcccggacccctaagataactactaatgacaacttcatttatattccttcagacattttctggctgtggatgtactaaaatgtatcctattattctctgccctaaaatggaatcatacaaggtgtactgttatttttatggctctataacatgtcatattgtacgtgttggtatggtcattttaaccatttttctagtgatggctttgaggttatttgcagtttcctagccatctcaaagtgtgctgcggggatctcttttgcatccctctgggtgcagagctgaggcacccagaggcagtgtccagaggaggcagcatctgtaggtgtcttcacctgctctggctcttggcacatctggttggtgacactgttttgtgagatgggttgaaagcacgtgctgccaaaatagaataatgttggtcctctcctcatgtgccgtggaactggggtaaaactgcgtagtggctgcagctgcctgtccataccggaatcgagtataacacggtgcctggcttagcacaaaacagtagtgggtcctgcaggccccagagtctaattcctggtattctttcccctacacagattaaataaaccaaaaacaaactattctaggaaagcgtctgtgacatttgtaaaaagtggtatttaatgatcttttattcacttgtctgtttagtttgttgaaatcttaagtggcatcctggtctgggaaggagtgctgtctgcgcctgccctccgctgggcacagcgtggctgcttcaggggctaagcacacactttctgtcttctaaagggccgccacatgccaggagctcaggtgtgagcccggctctggctcttacctcatagggtcactcataggggcacagggagcagaacattgtacacagcgaggcaccacccggcttggcatctgcctcggtggacttactacctctagaaggaaatacctgagttcctctggcctcagctcctagagtgactggtgtgctgtccctgttactcttctgtcaaggtgacaactgtgtgacccatcatctgtgtgtcaaagcaaggccctgcctgggcctctgctcctgtgctgaccccaaaggcaaatgctttgctagtttccttccagttaatttcacctatgaatagatgtgtgaaaactgttcaaagccatacctgcacatgtttgaacttcaaaccctgtgggtgattcagtggcatctttctctaacccccagcctcccttcccacagaggccaccgtcatggccagttgctgcagtttctttccagagaacctgtgtatgtgtaaagctgtacaggcgtgggtacaccacacagcctgtcttgcactgtggactgttgagttactagtacatctaggtaagcaccgcatatctgtattcatgtctgccttggtcttttcaacatctgtgtggtagccgtgtttgaattacccattccctttttggggaaccattaagttgtttcagcaatttttactgtagataaggctataccgcatatctgtgtacatgggtttttatgtacatgggcaagtatatctgtgagagaaaagtttcctcaggaggaattctgggcacagcatgtgtaaatttctaaatatgatggacacccccagcttccacctcaaggaggttggtcccattgacatttccccacaccttcacccaggctgtgcccttaaacttggttatttgtcaatgtgagaagtggaaaatagtatttaattgtagtttggatttgtatttctattgggttgtatacttactgattaataataagagctctttacatattaaggaaattaacccttttcaaatacattcctatttctcactaatctttaagttttattgtaatattttgctctttagtttatatatatatgtatatatatatatatgtatatatatatatatacatatatatatatatatatatatatatatatatatatatatatatatatatatatatatatatatatacatatatatatacatatatatatactaattttcttttatggttcctggattttgtgagtagtttgaaaaggctaatccagctgaagattttgttgttgttgttaaaccccatgttttctcctaactctttttatttttattttggaggactctatctagacttaattttagcataacaagtgacagggttagttagcctgttgtccttacaccattttctggctaatacagctattaactattgatctgtctattcacgtgccagttcctaatggttttacatagtgtaatctgcacttcaaaatagcgaagggaagccctacctcattattctacttttccagaattctcctggctattccaggctgcatgtttaccttaaccttccctgtgatgtcttcatgccgttgtcttcttatgcaagaataaggtacgtctttccatccactcacgtctatttaatttgactttgcattacacagaaagctggtcttggtctgtctacctcggcatctagttgtcctcactgccccctagccgaccccaccccatctgactgactaccccatcacagagtacttttatttacgttttgctctgcctaatggttacttgatactgtcacgccgacagtgtccagttcagtggtctttgcagttgaaatgctcccgtacacactgtcttgttaaaaatgccagtaagttcatacaaacccagcttgcacccaaggtcacattcagagagcgtagggctgggatgggttgttttccaagcttctgccactgtgtggctagctcttcccactgggaagttctgtgtacccggaatgtcggagtggagtcctgttctagtgtccagcacctgaccctgtgcccaacccctcaacagcctattcctgctgtccacagcctgctggaactttttacaaaatatgttgccatgctggaccctgggcactggacataagccccctggcagcctttttcatgtcacccaaaggggtaattgtcctactggtggtctgtaagatgagttagggtgacttgctaatagacattgtaaatcttaatatttatgtatgtattttattattaccggttttccatttatgatggtaatattgtttcttctaagaatatttatttttccttctaaatattgagataaaattcatgcttttgaaatgttctattcagtggcttttagtatatttgctatgttgtgcaaccatcgacactatccatttctagaactttttcgtcatcccaaacagacgctctgtattcataaaaaaataacttcctacctgtctctccccctagtctttggtaacctttgttatactggtaaactttgttgtgctctctgtctgtgtgaatttgcctattctaggggcctcatataagtgtaatcatacagtatttgtctttttgggtctgtctgatttcacttagcgggttttcagggttcattcatgttgcagcatataacagtactgcgttcctttttctggctgaataatattccactgtatggatagaccccattttgtttattcacacatcatttggacatttggattatttctggtttttggctattatgaacaatggtgctatgaacagttgcgtacaagtttttgtgtgaacatatgttttcaattctctcattatatacctaggagtagaattactgggtcatatggtaactgtatatttttgaggaactgccaaactattttcccacgtccatgcaccatttcacattcccaccagtaagtaagagggttccaatttctgcgcattcttgccaacactagttattatctgactttctggttataatcattctaatgagtgtgaagtagcctctggtgtcatttggatttgcatttctctgatgagtgatgctatcaagcacctttgctggtgctgttggccatatgtgtatgttccctggagaagtgtctgtgctgagccttggcccactttttaattaggcgtttgtctttttattactgagttgtaagagttctttatatattctggattctagacccttatcagatacatggtttgcaaatattttctcccattctgtgggttgtgttttcactttatcgataatgtccttagacatataataaatttgtattttaaaagtgacttgatttggctgtgcaaggtggctcacgcttgtaatcccagcactttgggagactgaggtgggtggatcatatgaggaggctaggagttcgaggtcagcctggccagcatagcgaaaacttgtctctactaaaaatacaaaaattagtcaggcatggtggtgcacgtctgtaataccagcttctcaggaggctgaggcacgaggatcacttgaacccaggaggaggaggttgcagtgagctgagatcatgccagggcaacagaatgagactttgtttaaa

SEQ ID NO: 704881 - DNA, 9223 bp, Homo sapiens
aacgcgctcctaggtactgcactctgcaaagggaaactgtgcatcggggaacaaagctcagccccaaggcggctatggctcaggatcgcagcgctatgcctagttctcacctagaccctaggctccccatagggccaaggagggtctgggctgcctctggctccgtgggcagagttcatatgccactccagcgctggagtggcatataactcggcagtgagcacttatggttttataactctcttcacagactcaaatgactccagaaagctacacttcctgttgtgagtatatgatatccatttccctacatagccactaacatcaggtttttacaattttatttatttcttgctactttaagaaatttttgtggtgaaatacatataatagaagttgactatctgaatcatttttaagtatacattcagtagtgttaagtatgtcgccattgttgtacaaccaatctccagaactttttcatcttgcaaaacaaactctgtacccattaaataacattaaacattccattccctccagcctcagcaaccccattctactttctgtttctgtgagtttgactattccaagcacttcatatcagttaaatcatgaagtatttgtctgtctgtgactggcttatttctctgagcacagtgtcctcgagatgcgtctatgttgtagcatatgtcagaatttccttcctttttaaaagatccaaataatattcttattttatatcttttttttatccattcatccattagtggacacttgggttgcttttggctattgtaaataatggtgctatgtacaaatatctatattattgtatttacaagtataatgctgtaatgtacacacatctttttgagatcctaccttcagttcttttgagtatatagccagaagtggtattactaaatcttacgatatttctatttttaatttattgaggaaccactgtagtttttcatagcaactgcaccattttacgttctcaccaagagtgcacaagggttccgaggttcccacatcctccccaacacttgttattttctgctttttttagattgcagccatcatagtgggtgtgaggtgacatttcattgtggttttgatttgcatttccctaatgaggagtgatgctgagcatcttttcatatgcttactggtcatttgtatgttgtctttggaaaaatgtctattcaagtcctttgactattttaaaaattgggttattagagttatcgttgttgttgacttgtaggagtttctttctatattctggatattaatcccctatcagatatatgatttgcaaatatcttctcttattccataaggttactttttcactttgttgattgtgttctttgatgtatagaagtttttagttttgaaatagtctaatttatctgtttttacttttgtggtctgtgcttttggtgtcatatccaagaaatccttgccaaatccaacgttataaggtacttttaaggtattttagttgtcttagtctatatttctgtactcacctttctttatccactcatcagttgatgggcatgtaggttggttccatatctttgcaattctgaattgtgctgtgatcaggtgtctttttagtataatgatttactctcctttgcgtagatacccagtagtgggattgctggatcgaatggtttttataattttctattttaccacagtttctctctgcatttttcctctttgaccactaaccatgtgaaattctcatattgacctttataatgatcatgaactcttagtatcattgggaaggccacatttgccacttatgattgtaaaccttatcctccatttttcctgttattgttggtgcaaaaagcacctattataccaggactttaaaaatcagtctgataagtctttgataagtctaataataataactgataagtccattgaatttgcttctgattactttttctttagtagctaaacatgtatgtactcctatgattacaatgaacactcctctccatttaaattaattatttacattgatgaaatagcaaaatgttaatgactaaatactgtcttggttttttcgttccaggtcagtcaatattaacttcttataattttcttttttttctttatgtgtgtgtgtgtgtgtatttttttttttttaatttcaatggcttttggggtacaaatggcttttggtcatatagatgaattctacagtagtgaagtctgagattttactgcaccggtcacctgagtagtgtacattgtacccaatatgtggttttttataccttgcccccctcttaccctccccactttgagtctctagtgtccattatgtcactctgtatacctttttgtacccataagttagctctcacttataagtgagaacacacagtatttggttttccattcctgagttgcttcacttagaataatatcctccagctccatccaaaattgctgcaaaaaaaaaaaaaaccacaaacattattttgttcttttttattgctaagtcatattccatggtgtagagataccacattttatttatccactcactggttgatgggttggttccacatctttgcaattgtgacttgtactgccatcaagtgtctttctggtataatgacttcttttcctttgggtagatacccaggagtgggattgctagatcaaatggttcttaacattttctctctggatctatttctggaaattttaggctccagtttttgttgttgttgttaataaaatgcaatggaatgtaatgatcatcacttttcattatgctttaaaatctggtaaatggaggctagaacactcctgtaaggcaagaatattctctctgttggaactcaaatacacagaactgggtaaatctcaatcttaatctttgattcaggacacaacatggctctcttttacttgctttctttaattgttttttaataatgtggtaagcatttctgaatctcctatccaatacaaaaactaggacaatacagacagtaactcctatggttacaatgaacactcctctccacttaaattaattatttacactgatgaaattgaaatagcaaaattttaatgactaaatactgtctttgattttttgttccaggtctgtcaatattaacttcttataattttctttttttttctttatgtgtgtgtgtgtgtgtatatatatatatatttaatttcaatggcttttggggtacaaatggcttttggtcatatatatgagttctacagtagtgaagtctgagattttactacaccttccacttatgtggtcccacaccacccgcctcccctgccgcctcctgccaccccctaggccaaggtaataatcatcctgaatcctgggtttatctctcacttgctttcttttcatataattttgcaaaagaatctgatctaaatgtgtttttcagagtatatatttatattttagctgttcttagagaaaatttattattttgcatgtaatcttatggaacattctcatttaataccatggtaagattcagcccttgcccaggggatagttcatttagtttgtttactggatagagctcatcatgtgactatacctcagttagtttatcagttctcccatccatggtgactaggttgcctctcagcctctcaacaacactgtttctcagtgtccttgtagaagtgatatgtgggtgttttctccttacacagagttgaaaggtgacgacaacaacgttggcactaccaatcccccaccctccagaggggtaaccagtgttaccagtttgctgtgtttcctgctacacctcgccttattcacttccatttgtatctgaaaaacgtgttgcatggtttcttttctatagaagtggtaaaatgctattgtgtcctgtacattattgattactttttttcatttaacagtagggagatgcctgggagtacacagagaactgccctcattgttttcaacttctgcactgtatgtctgtgagtttagccattctgctgttaatggaaatttacagtattctaatcttttgatattacaaacagttctgtgcgatcatcgtcatacacaaccccttgtgcacaatgcatgagtgtttctcagggtaggtaccaagaagtgaaattcctgggtcatagggcgtgagtccgacatttttctccattctgccctgttgccctccagagtgggtgtccagctttgcatacctaagtatgagagtatctgttgttcatatcctctacgacgctccatatatgaaacttaagtttctgctagttgccatctttgatctatcatgtatgcagtgacctactaagactgtaattggtacagtagattcttgtcatctgtgtgtgaatttagcattcatgggcttaatgctgacaaggcccccagggtccaagacatataatcatgtataattttgtcaaggtataattttttaaattgcttttgtcatgtgtctgctggtgatgcccaacccagtgctctgcacccaggtcacactgtggctttgtcctctgcttatgcctgcattgcagcaactgtcctgaagagaccaaaattatgcagatttaggtaagtccatggctaatgttattatattatgtgctattgtaatggatggggctgtggagtgtatgaatttataaatcactggtcttgtaattaaaattcaaacactatagaaaaaggccatgtagaagataaaagttcctctataatcccggacccctaagataactactaatgacaacttcatttatattccttcagacattttctggctgtggatgtactaaaatgtatcctattattctctgccctaaaatggaatcatacaaggtgtactgttatttttatggctctataacatgtcatattgtacgtgttggtatggtcattttaaccatttttctagtgatggctttgaggttatttgcagtttcctagccatctcaaagtgtgctgcggggatctcttttgcatccctctgggtgcagagctgaggcacccagaggcagtgtccagaggaggcagcatctgtaggtgtcttcacctgctctggctcttggcacatctggttggtgacactgttttgtgagatgggttgaaagcacgtgctgccaaaatagaataatgttggtcctctcctcatgtgccgtggaactggggtaaaactgcgtagtggctgcagctgcctgtccataccggaatcgagtataacacggtgcctggcttagcacaaaacagtagtgggtcctgcaggccccagagtctaattcctggtattctttcccctacacagattaaataaaccaaaaacaaactattctaggaaagcgtctgtgacatttgtaaaaagtggtatttaatgatcttttattcacttgtctgtttagtttgttgaaatcttaagtggcatcctggtctgggaaggagtgctgtctgcgcctgccctccgctgggcacagcgtggctgcttcaggggctaagcacacactttctgtcttctaaagggccgccacatgccaggagctcaggtgtgagcccggctctggctcttacctcatagggtcactcataggggcacagggagcagaacattgtacacagcgaggcaccacccggcttggcatctgcctcggtggacttactacctctagaaggaaatacctgagttcctctggcctcagctcctagagtgactggtgtgctgtccctgttactcttctgtcaaggtgacaactgtgtgacccatcatctgtgtgtcaaagcaaggccctgcctgggcctctgctcctgtgctgaccccaaaggcaaatgctttgctagtttccttccagttaatttcacctatgaatagatgtgtgaaaactgttcaaagccatacctgcacatgtttgaacttcaaaccctgtgggtgattcagtggcatctttctctaacccccagcctcccttcccacagaggccaccgtcatggccagttgctgcagtttctttccagagaacctgtgtatgtgtaaagctgtacaggcgtgggtacaccacacagcctgtcttgcactgtggactgttgagttactagtacatctaggtaagcaccgcatatctgtattcatgtctgccttggtcttttcaacatctgtgtggtagccgtgtttgaattacccattccctttttggggaaccattaagttgtttcagcaatttttactgtagataaggctataccgcatatctgtgtacatgggtttttatgtacatgggcaagtatatctgtgagagaaaagtttcctcaggaggaattctgggcacagcatgtgtaaatttctaaatatgatggacacccccagcttccacctcaaggaggttggtcccattgacatttccccacaccttcacccaggctgtgcccttaaacttggttatttgtcaatgtgagaagtggaaaatagtatttaattgtagtttggatttgtatttctattgggttgtatacttactgattaataataagagctctttacatattaaggaaattaacccttttcaaatacattcctatttctcactaatctttaagttttattgtaatattttgctctttagtttatatatatatgtatatatatatatatgtatatatatatatatacatatatatatatatatatatatatatatatatatatatatatatatatatatatatatatatatatacatatatatatacatatatatatactaattttcttttatggttcctggattttgtgagtagtttgaaaaggctaatccagctgaagattttgttgttgttgttaaaccccatgttttctcctaactctttttatttttattttggaggactctatctagacttaattttagcataacaagtgacagggttagttagcctgttgtccttacaccattttctggctaatacagctattaactattgatctgtctattcacgtgccagttcctaatggttttacatagtgtaatctgcacttcaaaatagcgaagggaagccctacctcattattctacttttccagaattctcctggctattccaggctgcatgtttaccttaaccttccctgtgatgtcttcatgccgttgtcttcttatgcaagaataaggtacgtctttccatccactcacgtctatttaatttgactttgcattacacagaaagctggtcttggtctgtctacctcggcatctagttgtcctcactgccccctagccgaccccaccccatctgactgactaccccatcacagagtacttttatttacgttttgctctgcctaatggttacttgatactgtcacgccgacagtgtccagttcagtggtctttgcagttgaaatgctcccgtacacactgtcttgttaaaaatgccagtaagttcatacaaacccagcttgcacccaaggtcacattcagagagcgtagggctgggatgggttgttttccaagcttctgccactgtgtggctagctcttcccactgggaagttctgtgtacccggaatgtcggagtggagtcctgttctagtgtccagcacctgaccctgtgcccaacccctcaacagcctattcctgctgtccacagcctgctggaactttttacaaaatatgttgccatgctggaccctgggcactggacataagccccctggcagcctttttcatgtcacccaaaggggtaattgtcctactggtggtctgtaagatgagttagggtgacttgctaatagacattgtaaatcttaatatttatgtatgtattttattattaccggttttccatttatgatggtaatattgtttcttctaagaatatttatttttccttctaaatattgagataaaattcatgcttttgaaatgttctattcagtggcttttagtatatttgctatgttgtgcaaccatcgacactatccatttctagaactttttcgtcatcccaaacagacgctctgtattcataaaaaaataacttcctacctgtctctccccctagtctttggtaacctttgttatactggtaaactttgttgtgctctctgtctgtgtgaatttgcctattctaggggcctcatataagtgtaatcatacagtatttgtctttttgggtctgtctgatttcacttagcgggttttcagggttcattcatgttgcagcatataacagtactgcgttcctttttctggctgaataatattccactgtatggatagaccccattttgtttattcacacatcatttggacatttggattatttctggtttttggctattatgaacaatggtgctatgaacagttgcgtacaagtttttgtgtgaacatatgttttcaattctctcattatatacctaggagtagaattactgggtcatatggtaactgtatatttttgaggaactgccaaactattttcccacgtccatgcaccatttcacattcccaccagtaagtaagagggttccaatttctgcgcattcttgccaacactagttattatctgactttctggttataatcattctaatgagtgtgaagtagcctctggtgtcatttggatttgcatttctctgatgagtgatgctatcaagcacctttgctggtgctgttggccatatgtgtatgttccctggagaagtgtctgtgctgagccttggcccactttttaattaggcgtttgtctttttattactgagttgtaagagttctttatatattctggattctagacccttatcagatacatggtttgcaaatattttctcccattctgtgggttgtgttttcactttatcgataatgtccttagacatataataaatttgtattttaaaagtgacttgatttggctgtgcaaggtggctcacgcttgtaatcccagcactttgggagactgaggtgggtggatcatatgaggaggctaggagttcgaggtcagcctggccagcatagcgaaaacttgtctctactaaaaatacaaaaattagtcaggcatggtggtgcacgtctgtaataccagcttctcaggaggctgaggcacgaggatcacttgaacccaggaggaggaggttgcagtgagctgagatcatgccagggcaacagaatgagactttgtttaaa

SEQ ID NO: 704882 - DNA, 255 bp, Homo sapiens
tcggaagtgaacgcagctgggattacaggcatgcaccaccacacctggttaattttttgtatttttagtagagacagggtttctccatgttggccaggctggtcttgaactcctgacctcaagtgatctgcccgcctcgggctcccaaagtgctgggattacaggcgtgagccactgcgcctggcccagtgtttttaataagtgaacagaagcactaatcatggagtttgaggggaaaagacctggggtccggct

SEQ ID NO: 704883 - DNA, 466 bp, Homo sapiens
  misc_feature (10)..(10): n is a, c, g, or t
  misc_feature (91)..(91): n is a, c, g, or t
  misc_feature (181)..(181): n is a, c, g, or t
  misc_feature (313)..(313): n is a, c, g, or t
aagggttccnattcctactggtgaacccccaacaaactgaaccctgaaccccagtgaacacggcaagcaccccatgtgaggaaacagcaanctggggtccattttcaccctccctccctagggaacccccagcaagagattgattgatgaacataagaatttaggggctgggaggccgggncgtggtggctcaggcctataatcccagcactttgggaggctgacgtgagtggatcatctgaggtcgtcaaaagttcgagaccagtcctgatgggtgaaaccccatctctactgaaaatacaaaagaattagnccaggcgtggtggcacacgcctgtaatcccagatacttgggaggctgaggcaggagaattgcttgaacctgggaggcaaaggttgcagtgagccaagatccagccattgcactccggcctggacaacagagtgagacaccatctcaaaaaaaa

SEQ ID NO: 704884 - DNA, 596 bp, Homo sapiens
aggaaatgcaggttgaagggaattctctggggctttggggaatttagtgcgtgggtgagccaagaaaatactaattaataatagtaagttgttagtgttggttaagttgttgcttggaagtgagaagttgcttagaaactttccaaagtgcttagaactttaagtgcaaacagacaaactaacaaacaaaaattgttttgctttgctacaaggtggggaagactgaagaagtgttaactggatgccatctcacaggcaggggaaatgtctttaccagcttcctcctggtggccaagacagcctgtttcagagggttgttttgtttggggtgtgggtgttatcaagtgaattagtcacttgaaagatgggcgtcagacttgcatacgcagcagatcagcatccttcgctgccccttagcaacttaggtggttgatttgaaactgtgaaggtgtgattttttcaggagctggaagtcttagaaaagccttgtaaatgcctatattgtgggctttgacgctgtttgtgcacacgtaagatcagagtagatgcggtcatctggaactggtctcaactgcaacaggtgtcgtgcgatagaa

SEQ ID NO: 704885 - DNA, 14661 bp, Homo sapiens
aggaaatgcaggttgaagggaattctctggggctttggggaatttagtgcgtgggtgagccaagaaaatactaattaataatagtaagttgttagtgttggttaagttgttgcttggaagtgagaagttgcttagaaactttccaaagtgcttagaactttaagtgcaaacagacaaactaacaaacaaaaattgttttgctttgctacaaggtggggaagactgaagaagtgttaactgaaaacaggtgacacagagtcaccagttttccgagaaccaaagggaggggtgtgtgatgccatctcacaggcaggggaaatgtctttaccagcttcctcctggtggccaagacagcctgtttcagagggttgttttgtttggggtgtgggtgttatcaagtgaattagtcacttgaaagatgggcgtcagacttgcatacgcagcagatcagcatccttcgctgccccttagcaacttaggtggttgatttgaaactgtgaaggtgtgattttttcaggagctggaagtcttagaaaagccttgtaaatgcctatattgtgggcttttaacgtatttaagggaccacttaagacgagattagatgggctcttctggatttgttcctcatttgtcacaggtgtcttgtgattgaaaatcatgagcgaagtgaaattgcattgaatttcaagggaatttagtatgtaaatcgtgccttagaaacacatctgttgtcttttctgtgtttggtcgatattaataatggcaaaatttttgcctatctagtatcttcaaattgtagtctttgtaacaaccaaataaccttttgtggtcactgtaaaattaatatttggtagacagaatccatgtacctttgctaaggttagaatgaataatttattgtatttttaatttgaatgtttgtgctttttaaatgagccaagactagaggggaaactatcacctaacatcagtttggaaaacaagacctaaaaagggaaggggatggggattgtggggagagagtgggcgaggtgcctttactacatgtgtgatctgaaaaccctgcttggttctgagctgcgtctattgaattggtaaagtaataccaatggctttttatcatttccttcttccctttaagtttcacttgaaattttaaaaatcatggttatttttatcgttgggatctttctgtcttctgggttccattttttaaatggttcaacgatgactgtagattggatttaaagtgtattagtcacgcatgtatggggaagtagtctcgggtatgctgttgtgaaattgaaactgtaaaagtagatggttgaaagtactggtatgttgctctgtatggtaagaactaattttgttacgtcatgtacataattactaatcacttttcttcccctttacagcacaaataaagtttgagttctaaactcattagaattgttgtattgctatgttacatttctcgacccctatcacattgccttcataacgactttggatgtatcttcatattgtagatttaggtctagatttgctagctccaagtaattaaggccatgtaggagagcatggtaaccacagatagaactggtattatcccaagtggtctgcagactgctgagtggggatgggatctgctctctgttgagagttggtaatcattggtttgaaatgtgatgaaaccactcaagccaatgaaggtgggtgtgtaggtggggagtactttgccataatattttaaaacattacctggttagagttctaagtggtacttatttttgtttggttaggggaaagcctgaataaaaacagaaatggacacataatatgcatattccatagtctttgggaggctggaatgtgcctgggatttgggtctaagtgtatgcgtaattcttacctcactaaagaatttgccttgtttttttccttttggtgagtgactaaaacgtctgggcttccctgtgtgcgtgctacagtaagcaagcagaggctgtgcaaaggtgtgagcaggatcacgtggaatctggaggatacatcttggcttgcaaactgcctctgtctcctgggtgggactgttctgtccttgcactgctgttctgtgttacctcttggggtgtaaggttttgcttacaggagacaaactttgggcgtagaatggaagccactgccagcctctgtgctgagaaggaaggtgcttgtttcaaagggagcagcaagggaggcttgttctactcacctgggcctgtttgcctgagaaggggagataagggctgaactgggactagccagggggaccaacacaaatggtgggggatcatgacctgaaggattctttccttcccatgagctgcagggctggttgccgtccttgcaactgtgtcttatttgcctgtgccgttatatcttggtgacccctccacgtgtacactactgacaaacgggtggagtgctggggagaagtcactgtgccgcccacctagtaaaccttctgtctgtgctcatggcatctccaagatggggcactgctgtgtgcagaatccagggtcctctttctgcttgcaactcctttccctggatgccccagaaacaatccaggcctcctttcctatcttacccctttgctttgctttttaccccagcacctctataaccgccttctcttcttttcagaactccttgtttctcatcctgttttttatgattacaaaactcttgcttccaccctggaagataactgctatagatgcctgtatgtaaatggtgctgtctccagcaactggcatgctgaagaagaattgattcacggggtataaatgttggggattggaagtggggatgaaatggcacttgttgatacaggagcagagaggtgaggccgactgctgaagacagctcgccaccctccttgcctccactccaatccaggggctggggccacattctttgccttcatttatcctcagatcaggtgagatcgacaggaggtgttgatggcagtgccagcaattattgctaatccgtttgcatccttatgcatagatctgaattcagactttgtgaatttccagaggtgtgggtaatataatagaattcagtgagtgggcatggctgatcttgtgcaaattaaaagttatggggcataagaatagcaaaagttgaacttcttttaaaaaggaaagtaccctgagagccagtattggttgaggctcttcagtatgcccaggttggcagcactgagaaccgcaggaacggcctgttgttacaaaaaggagattgactcagctgcccttggtgcatctgactgactatgactgctgagagattccaaggacccttaatgccagggctaacctctccatgtgcagtgagacctctggaggaagtgtcatcctctggctttgtgtggtactcattatggtgcagtgcgggcatgaaatgaagacacccaaataggcttacagatacgatatgttttaaatgttcgtatttaacaaaaacatactgacactgtttggaaatggcaacaggaagatagcaaaatgaatactaacattacgaaaagatgaacaggtacatgttccaaggcaggtggctgtgaacttcctctgagtgaaggcatcccctccagcacctttcagcctgctagttaggacgacccgccgccaccctccaggacctccagccctgcactgcctttcctctcttttaaataattcttcattgagttctaatatgtaaaaaaaaaaagtttactgtaaagtttgcaaataaggaaattttttttaaaagtcctcagtaatcttaccagtaacaattgttatgggcacatttgcttttggaagatttcttttgtatgcatgggataagtacatttttaaacaaaaatgggattatgccataaattctattttgtgactttaatatatagtgaacaccttttttaatgatgacaggatgttcccttgcatggctgtatcaatttaaacaatcttgtttcaatgggcatacagggtattttctagtttttttttcctcttagaaaataatacttgcgatgactttccttgtagctcagactttttcacgtctgttgttatctctttgggaatgctgaatacatacatttcgagaaggaaatgactgttaaactcttaagacttcaggttcatattgctaaactgcccagcagggagggattttttcaattagtgttctcactggtgaggcaaacctgatgccttcccctcttcctcagaaccggctttatcacattgaaaacctttgctcctccgacggatcgagtctgctttccctgtggatgtgagcattgctttgtctgctggtgactgaacatctctaccatgtgtcaattggccatttgtggtgtgtgtgtgtgtgcgtgtgtgtgtgtgtgtgtgtgtgtatgattttctaattcctagtcatttttctattgattgttttgcaaaagccatttacatcttaaggatattgataatcttttgttatatttgatgcaaatatttttttccagtttataggttgccttttaattttgtgtttcaggtagataaaagttaaacgattttcttaggttagtttatcactgtggtttctgaacttgttatgtgtagatcttttccaccccaagagtacataaatattaatccatactttcttatggaacttgtatggtttcgttttttacatttaaaccttcttccccgtggtgtgtgttgtggaatctgtgtttgtgtgaggaggggcatggtgctctcagaacccacctcctgtggccagagagccctgtcctgtgagggtggttatcacagtggcagggttcaattcagaagaccttgagggcaggctgatgtttcctgaatgggcccctggttgttgcttgtccctgactctccatttccccatctgagtggatttggacctaatagggcactggagctggttcgaatcctgactggactacttggcaactttatgtctgggagcaagttacttaacctccccaagcctgtgtctgtgaaatgcgggtaaatgaatgtagatgtttggcagcagctactccttgttgagctctcacagtgaactctcctgcctctgccctccttccccgcctcccctggtgcctagcgtcaggtctagccacttcctcctgggcccctctcccttttctgtggctggctgcctgcccgcctggcgctggacctttcatgtaacgggaatcagcatgtatattctggtctggtctgtttctacacttaattttgtttccagtagtatttccctgtaccggcagagttcacaaacacatttgaagaggctttttctcaggattcttaaccttcccaaaggaagtcccatggatgggtttctagaagtctataaatgctctgaaattgtatttttctgtggaaagcataactttcatctgcttgttcgtgctcaaaaaagatcatgaatgaatgattgcatgattttatgccattgtgcttatactaaaggatatgtagcccatctcttgagctgttaaactgttttgactactttaaatcgtgcagctgtgagcatctctgtaaatttagtgtacacatgtatcccctggagtggcatataactcggcagtgagcacttatggttttataactctcttcacagactcaaatgactccagaaagctacacttcctgttgtgagtatatgatatccatttccctacatagccactaacatcaggtttttacaattttatttatttcttgctactttaagaaatttttgtggtgaaatacatataatagaagttgactatctgaatcatttttaagtatacattcagtagtgttaagtatgtcgccattgttgtacaaccaatctccagaactttttcatcttgcaaaacaaactctgtacccattaaataacattaaacattccattccctccagcctcagcaaccccattctactttctgtttctgtgagtttgactattccaagcacttcatatcagttaaatcatgaagtatttgtctgtctgtgactggcttatttctctgagcacagtgtcctcgagatgcgtctatgttgtagcatatgtcagaatttccttcctttttaaaagatccaaataatattcttattttatatcttttttttatccattcatccattagtggacacttgggttgcttttggctattgtaaataatggtgctatgtacaaatatctatattattgtatttacaagtataatgctgtaatgtacacacatctttttgagatcctaccttcagttcttttgagtatatagccagaagtggtattactaaatcttacgatatttctatttttaatttattgaggaaccactgtagtttttcatagcaactgcaccattttacgttctcaccaagagtgcacaagggttccgaggttcccacatcctccccaacacttgttattttctgctttttttagattgcagccatcatagtgggtgtgaggtgacatttcattgtggttttgatttgcatttccctaatgaggagtgatgctgagcatcttttcatatgcttactggtcatttgtatgttgtctttggaaaaatgtctattcaagtcctttgactattttaaaaattgggttattagagttatcgttgttgttgacttgtaggagtttctttctatattctggatattaatcccctatcagatatatgatttgcaaatatcttctcttattccataaggttactttttcactttgttgattgtgttctttgatgtatagaagtttttagttttgaaatagtctaatttatctgtttttacttttgtggtctgtgcttttggtgtcatatccaagaaatccttgccaaatccaacgttataaggtacttttaaggtattttagttgtcttagtctatatttctgtactcacctttctttatccactcatcagttgatgggcatgtaggttggttccatatctttgcaattctgaattgtgctgtgatcaggtgtctttttagtataatgatttactctcctttgcgtagatacccagtagtgggattgctggatcgaatggtttttataattttctattttaccacagtttctctctgcatttttcctctttgaccactaaccatgtgaaattctcatattgacctttataatgatcatgaactcttagtatcattgggaaggccacatttgccacttatgattgtaaaccttatcctccatttttcctgttattgttggtgcaaaaagcacctattataccaggactttaaaaatcagtctgataagtctttgataagtctaataataataactgataagtccattgaatttgcttctgattactttttctttagtagctaaacatgtatgtactcctatgattacaatgaacactcctctccatttaaattaattatttacattgatgaaatagcaaaatgttaatgactaaatactgtcttggttttttcgttccaggtcagtcaatattaacttcttataattttcttttttttctttatgtgtgtgtgtgtgtgtatttttttttttttaatttcaatggcttttggggtacaaatggcttttggtcatatagatgaattctacagtagtgaagtctgagattttactgcaccggtcacctgagtagtgtacattgtacccaatatgtggttttttataccttgcccccctcttaccctccccactttgagtctctagtgtccattatgtcactctgtatacctttttgtacccataagttagctctcacttataagtgagaacacacagtatttggttttccattcctgagttgcttcacttagaataatatcctccagctccatccaaaattgctgcaaaaaaaaaaaaaaccacaaacattattttgttcttttttattgctaagtcatattccatggtgtagagataccacattttatttatccactcactggttgatgggttggttccacatctttgcaattgtgacttgtactgccatcaagtgtctttctggtataatgacttcttttcctttgggtagatacccaggagtgggattgctagatcaaatggttcttaacattttctctctggatctatttctggaaattttaggctccagtttttgttgttgttgttaataaaatgcaatggaatgtaatgatcatcacttttcattatgctttaaaatctggtaaatggaggctagaacactcctgtaaggcaagaatattctctctgttggaactcaaatacacagaactgggtaaatctcaatcttaatctttgattcaggacacaacatggctctcttttacttgctttctttaattgttttttaataatgtggtaagcatttctgaatctcctatccaatacaaaaactaggacaatacagacagtaactcctatggttacaatgaacactcctctccacttaaattaattatttacactgatgaaattgaaatagcaaaattttaatgactaaatactgtctttgattttttgttccaggtctgtcaatattaacttcttataattttctttttttttctttatgtgtgtgtgtgtgtgtatatatatatatatttaatttcaatggcttttggggtacaaatggcttttggtcatatatatgagttctacagtagtgaagtctgagattttactacaccttccacttatgtggtcccacaccacccgcctcccctgccgcctcctgccaccccctaggccaaggtaataatcatcctgaatcctgggtttatctctcacttgctttcttttcatataattttgcaaaagaatctgatctaaatgtgtttttcagagtatatatttatattttagctgttcttagagaaaatttattattttgcatgtaatcttatggaacattctcatttaataccatggtaagattcagcccttgcccaggggatagttcatttagtttgtttactggatagagctcatcatgtgactatacctcagttagtttatcagttctcccatccatggtgactaggttgcctctcagcctctcaacaacactgtttctcagtgtccttgtagaagtgatatgtgggtgttttctccttacacagagttgaaaggtgacgacaacaacgttggcactaccaatcccccaccctccagaggggtaaccagtgttaccagtttgctgtgtttcctgctacacctcgccttattcacttccatttgtatctgaaaaacgtgttgcatggtttcttttctatagaagtggtaaaatgctattgtgtcctgtacattattgattactttttttcatttaacagtagggagatgcctgggagtacacagagaactgccctcattgttttcaacttctgcactgtatgtctgtgagtttagccattctgctgttaatggaaatttacagtattctaatcttttgatattacaaacagttctgtgcgatcatcgtcatacacaaccccttgtgcacaatgcatgagtgtttctcagggtaggtaccaagaagtgaaattcctgggtcatagggcgtgagtccgacatttttctccattctgccctgttgccctccagagtgggtgtccagctttgcatacctaagtatgagagtatctgttgttcatatcctctacgacgctccatatatgaaacttaagtttctgctagttgccatctttgatctatcatgtatgcagtgacctactaagactgtaattggtacagtagattcttgtcatctgtgtgtgaatttagcattcatgggcttaatgctgacaaggcccccagggtccaagacatataatcatgtataattttgtcaaggtataattttttaaattgcttttgtcatgtgtctgctggtgatgcccaacccagtgctctgcacccaggtcacactgtggctttgtcctctgcttatgcctgcattgcagcaactgtcctgaagagaccaaaattatgcagatttaggtaagtccatggctaatgttattatattatgtgctattgtaatggatggggctgtggagtgtatgaatttataaatcactggtcttgtaattaaaattcaaacactatagaaaaaggccatgtagaagataaaagttcctctataatcccggacccctaagataactactaatgacaacttcatttatattccttcagacattttctggctgtggatgtactaaaatgtatcctattattctctgccctaaaatggaatcatacaaggtgtactgttatttttatggctctataacatgtcatattgtacgtgttggtatggtcattttaaccatttttctagtgatggctttgaggttatttgcagtttcctagccatctcaaagtgtgctgcggggatctcttttgcatccctctgggtgcagagctgaggcacccagaggcagtgtccagaggaggcagcatctgtaggtgtcttcacctgctctggctcttggcacatctggttggtgacactgttttgtgagatgggttgaaagcacgtgctgccaaaatagaataatgttggtcctctcctcatgtgccgtggaactggggtaaaactgcgtagtggctgcagctgcctgtccataccggaatcgagtataacacggtgcctggcttagcacaaaacagtagtgggtcctgcaggccccagagtctaattcctggtattctttcccctacacagattaaataaaccaaaaacaaactattctaggaaagcgtctgtgacatttgtaaaaagtggtatttaatgatcttttattcacttgtctgtttagtttgttgaaatcttaagtggcatcctggtctgggaaggagtgctgtctgcgcctgccctccgctgggcacagcgtggctgcttcaggggctaagcacacactttctgtcttctaaagggccgccacatgccaggagctcaggtgtgagcccggctctggctcttacctcatagggtcactcataggggcacagggagcagaacattgtacacagcgaggcaccacccggcttggcatctgcctcggtggacttactacctctagaaggaaatacctgagttcctctggcctcagctcctagagtgactggtgtgctgtccctgttactcttctgtcaaggtgacaactgtgtgacccatcatctgtgtgtcaaagcaaggccctgcctgggcctctgctcctgtgctgaccccaaaggcaaatgctttgctagtttccttccagttaatttcacctatgaatagatgtgtgaaaactgttcaaagccatacctgcacatgtttgaacttcaaaccctgtgggtgattcagtggcatctttctctaacccccagcctcccttcccacagaggccaccgtcatggccagttgctgcagtttctttccagagaacctgtgtatgtgtaaagctgtacaggcgtgggtacaccacacagcctgtcttgcactgtggactgttgagttactagtacatctaggtaagcaccgcatatctgtattcatgtctgccttggtcttttcaacatctgtgtggtagccgtgtttgaattacccattccctttttggggaaccattaagttgtttcagcaatttttactgtagataaggctataccgcatatctgtgtacatgggtttttatgtacatgggcaagtatatctgtgagagaaaagtttcctcaggaggaattctgggcacagcatgtgtaaatttctaaatatgatggacacccccagcttccacctcaaggaggttggtcccattgacatttccccacaccttcacccaggctgtgcccttaaacttggttatttgtcaatgtgagaagtggaaaatagtatttaattgtagtttggatttgtatttctattgggttgtatacttactgattaataataagagctctttacatattaaggaaattaacccttttcaaatacattcctatttctcactaatctttaagttttattgtaatattttgctctttagtttatatatatatgtatatatatatatatgtatatatatatatatacatatatatatatatatatatatatatatatatatatatatatatatatatatatatatatatatatacatatatatatacatatatatatactaattttcttttatggttcctggattttgtgagtagtttgaaaaggctaatccagctgaagattttgttgttgttgttaaaccccatgttttctcctaactctttttatttttattttggaggactctatctagacttaattttagcataacaagtgacagggttagttagcctgttgtccttacaccattttctggctaatacagctattaactattgatctgtctattcacgtgccagttcctaatggttttacatagtgtaatctgcacttcaaaatagcgaagggaagccctacctcattattctacttttccagaattctcctggctattccaggctgcatgtttaccttaaccttccctgtgatgtcttcatgccgttgtcttcttatgcaagaataaggtacgtctttccatccactcacgtctatttaatttgactttgcattacacagaaagctggtcttggtctgtctacctcggcatctagttgtcctcactgccccctagccgaccccaccccatctgactgactaccccatcacagagtacttttatttacgttttgctctgcctaatggttacttgatactgtcacgccgacagtgtccagttcagtggtctttgcagttgaaatgctcccgtacacactgtcttgttaaaaatgccagtaagttcatacaaacccagcttgcacccaaggtcacattcagagagcgtagggctgggatgggttgttttccaagcttctgccactgtgtggctagctcttcccactgggaagttctgtgtacccggaatgtcggagtggagtcctgttctagtgtccagcacctgaccctgtgcccaacccctcaacagcctattcctgctgtccacagcctgctggaactttttacaaaatatgttgccatgctggaccctgggcactggacataagccccctggcagcctttttcatgtcacccaaaggggtaattgtcctactggtggtctgtaagatgagttagggtgacttgctaatagacattgtaaatcttaatatttatgtatgtattttattattaccggttttccatttatgatggtaatattgtttcttctaagaatatttatttttccttctaaatattgagataaaattcatgcttttgaaatgttctattcagtggcttttagtatatttgctatgttgtgcaaccatcgacactatccatttctagaactttttcgtcatcccaaacagacgctctgtattcataaaaaaataacttcctacctgtctctccccctagtctttggtaacctttgttatactggtaaactttgttgtgctctctgtctgtgtgaatttgcctattctaggggcctcatataagtgtaatcatacagtatttgtctttttgggtctgtctgatttcacttagcgggttttcagggttcattcatgttgcagcatataacagtactgcgttcctttttctggctgaataatattccactgtatggatagaccccattttgtttattcacacatcatttggacatttggattatttctggtttttggctattatgaacaatggtgctatgaacagttgcgtacaagtttttgtgtgaacatatgttttcaattctctcattatatacctaggagtagaattactgggtcatatggtaactgtatatttttgaggaactgccaaactattttcccacgtccatgcaccatttcacattcccaccagtaagtaagagggttccaatttctgcgcattcttgccaacactagttattatctgactttctggttataatcattctaatgagtgtgaagtagcctctggtgtcatttggatttgcatttctctgatgagtgatgctatcaagcacctttgctggtgctgttggccatatgtgtatgttccctggagaagtgtctgtgctgagccttggcccactttttaattaggcgtttgtctttttattactgagttgtaagagttctttatatattctggattctagacccttatcagatacatggtttgcaaatattttctcccattctgtgggttgtgttttcactttatcgataatgtccttagacatataataaatttgtattttaaaagtgacttgatttggctgtgcaaggtggctcacgcttgtaatcccagcactttgggagactgaggtgggtggatcatatgaggaggctaggagttcgaggtcagcctggccagcatagcgaaaacttgtctctactaaaaatacaaaaattagtcaggcatggtggtgcacgtctgtaataccagcttctcaggaggctgaggcacgaggatcacttgaacccaggaggaggaggttgcagtgagctgagatcatgccagggcaacagaatgagactttgtttaaa

SEQ ID NO: 704886 - DNA, 235 bp, Homo sapiens
caattgcaactatcggacttcagaattcctcctcaggcacctggcagcctgagacagcatacgctgggtcacggcacagccacctaaggaaagaatggaacggacacaccttgctcctattctgagcccgtttcccaaaaacccccttccaggtgcttctaatgggtgttgccatagcgtacgctgctaatgcatcatagcattctttgaactggtcgccaatccgggggatcct

SEQ ID NO: 704887 - DNA, 664 bp, Homo sapiens
actacatgatatggcttctagaggaatatattatggtatatgacaaggcaacgtaggggatttcactctgttctatgtgatacatcgctcaacaagatctgcatgagtccagattcactgtccctgctatgaaaagatgtcgcgtgtgtaacactgaatagccaagaccaccgttctaatatccaaggagtccgtgcacaatcttgcgagctgaattgacctacgtgtgactcgtctctcccggccactagagtgtagaagatgtacgataacccacctcaatttcctctgcctggactataactgttgaccagtatgagaaggttatacgtacagaactgcagccttttctgtcgccagcaattaaagaccaccaatcttgtttgtccatctacatggtttgtcggggacatttaactcatggaggtgctttagatttcaacatcagatggttgaagctggaagtttacttatatgtagagtgagaaggcagttccagttttagcacagatttgttaatgtgtccagatatttggtggagtctttaaattttttcaaatataagagatcatatcatctgcaaacaaggataattagacttcttccttttcaatttggatactctttattctttctgttgtctagttgttctagctaggacttc

SEQ ID NO: 704888 - DNA, 13928 bp, Homo sapiens
  misc_feature (14)..(14): n is a, c, g, or t
  misc_feature (73)..(73): n is a, c, g, or t
  misc_feature (84)..(84): n is a, c, g, or t
  misc_feature (87)..(88): n is a, c, g, or t
  misc_feature (95)..(95): n is a, c, g, or t
  misc_feature (105)..(105): n is a, c, g, or t
  misc_feature (107)..(107): n is a, c, g, or t
  misc_feature (109)..(109): n is a, c, g, or t
  misc_feature (111)..(111): n is a, c, g, or t
  misc_feature (117)..(117): n is a, c, g, or t
  misc_feature (124)..(124): n is a, c, g, or t
  misc_feature (127)..(127): n is a, c, g, or t
  misc_feature (134)..(136): n is a, c, g, or t
  misc_feature (142)..(142): n is a, c, g, or t
  misc_feature (144)..(146): n is a, c, g, or t
  misc_feature (148)..(148): n is a, c, g, or t
  misc_feature (158)..(158): n is a, c, g, or t
  misc_feature (161)..(161): n is a, c, g, or t
  misc_feature (165)..(166): n is a, c, g, or t
  misc_feature (177)..(177): n is a, c, g, or t
  misc_feature (187)..(189): n is a, c, g, or t
  misc_feature (193)..(193): n is a, c, g, or t
  misc_feature (199)..(199): n is a, c, g, or t
  misc_feature (201)..(201): n is a, c, g, or t
  misc_feature (221)..(221): n is a, c, g, or t
  misc_feature (223)..(224): n is a, c, g, or t
  misc_feature (227)..(227): n is a, c, g, or t
  misc_feature (232)..(232): n is a, c, g, or t
  misc_feature (234)..(234): n is a, c, g, or t
  misc_feature (237)..(239): n is a, c, g, or t
  misc_feature (242)..(242): n is a, c, g, or t
  misc_feature (252)..(253): n is a, c, g, or t
  misc_feature (259)..(261): n is a, c, g, or t
  misc_feature (264)..(264): n is a, c, g, or t
  misc_feature (267)..(267): n is a, c, g, or t
  misc_feature (271)..(271): n is a, c, g, or t
  misc_feature (276)..(276): n is a, c, g, or t
  misc_feature (301)..(301): n is a, c, g, or t
  misc_feature (304)..(304): n is a, c, g, or t
  misc_feature (307)..(308): n is a, c, g, or t
  misc_feature (311)..(311): n is a, c, g, or t
  misc_feature (314)..(316): n is a, c, g, or t
  misc_feature (322)..(322): n is a, c, g, or t
  misc_feature (327)..(328): n is a, c, g, or t
  misc_feature (331)..(331): n is a, c, g, or t
  misc_feature (334)..(335): n is a, c, g, or t
  misc_feature (337)..(338): n is a, c, g, or t
  misc_feature (354)..(355): n is a, c, g, or t
  misc_feature (357)..(357): n is a, c, g, or t
  misc_feature (362)..(363): n is a, c, g, or t
  misc_feature (366)..(366): n is a, c, g, or t
  misc_feature (368)..(368): n is a, c, g, or t
  misc_feature (370)..(370): n is a, c, g, or t
  misc_feature (373)..(373): n is a, c, g, or t
  misc_feature (376)..(376): n is a, c, g, or t
  misc_feature (378)..(379): n is a, c, g, or t
  misc_feature (382)..(382): n is a, c, g, or t
  misc_feature (384)..(385): n is a, c, g, or t
  misc_feature (388)..(389): n is a, c, g, or t
  misc_feature (392)..(392): n is a, c, g, or t
  misc_feature (396)..(396): n is a, c, g, or t
  misc_feature (399)..(399): n is a, c, g, or t
  misc_feature (406)..(407): n is a, c, g, or t
  misc_feature (412)..(412): n is a, c, g, or t
  misc_feature (419)..(422): n is a, c, g, or t
  misc_feature (428)..(428): n is a, c, g, or t
  misc_feature (438)..(438): n is a, c, g, or t
  misc_feature (443)..(445): n is a, c, g, or t
  misc_feature (450)..(450): n is a, c, g, or t
  misc_feature (453)..(454): n is a, c, g, or t
  misc_feature (456)..(456): n is a, c, g, or t
  misc_feature (460)..(460): n is a, c, g, or t
  misc_feature (464)..(465): n is a, c, g, or t
  misc_feature (467)..(469): n is a, c, g, or t
  misc_feature (474)..(475): n is a, c, g, or t
  misc_feature (487)..(488): n is a, c, g, or t
  misc_feature (491)..(491): n is a, c, g, or t
  misc_feature (493)..(493): n is a, c, g, or t
  misc_feature (497)..(497): n is a, c, g, or t
  misc_feature (508)..(508): n is a, c, g, or t
  misc_feature (511)..(512): n is a, c, g, or t
  misc_feature (516)..(516): n is a, c, g, or t
  misc_feature (518)..(518): n is a, c, g, or t
  misc_feature (522)..(524): n is a, c, g, or t
  misc_feature (526)..(526): n is a, c, g, or t
  misc_feature (539)..(539): n is a, c, g, or t
  misc_feature (543)..(544): n is a, c, g, or t
  misc_feature (555)..(555): n is a, c, g, or t
ccttttcgccgcantctaaaaggaatagggcgcgacacacaatccaatctaccggtcctaaccgtacaagcanttaatttattnganntttaagntcaagctttntncntntaaagnacccaanacntatgagnnngaaaantnnnancttaaaatcnagntttnnaaaacaaacgnccataaaaannntaancccatncncattttcgcgcgcactacantnnttntattngnggnnngtnagggggcagnngaaaannntcnttngttngcagntccctctattgtaattgcgtaaagnaantannaanccnnngggatnagttnnggnggnncnntaagttcacttcaaanntnaaaannaangngnatntgnanngtncnnagnnttntctnttntcccttnnatttnttaaatnnnnaaaaanatgttgacangctannncaggnctnnancaangacnngnnnatganncaaacaattacnntcntngccnatggacacgcnatnnacgnancaannnangcgcgcgcaagcntagnncttcgcgcgtnatgctgttgtgaaattgaaactgtaaaagtagatggttgaaagtactggtatgttgctctgtatggtaagaactaattttgttacgtcatgtacataattactaatcacttttcttcccctttacagcacaaataaagtttgagttctaaactcattagaattgttgtattgctatgttacatttctcgacccctatcacattgccttcataacgactttggatgtatcttcatattgtagatttaggtctagatttgctagctccaagtaattaaggccatgtaggagagcatggtaaccacagatagaactggtattatcccaagtggtctgcagactgctgagtggggatgggatctgctctctgttgagagttggtaatcattggtttgaaatgtgatgaaaccactcaagccaatgaaggtgggtgtgtaggtggggagtactttgccataatattttaaaacattacctggttagagttctaagtggtacttatttttgtttggttaggggaaagcctgaataaaaacagaaatggacacataatatgcatattccatagtctttgggaggctggaatgtgcctgggatttgggtctaagtgtatgcgtaattcttacctcactaaagaatttgccttgtttttttccttttggtgagtgactaaaacgtctgggcttccctgtgtgcgtgctacagtaagcaagcagaggctgtgcaaaggtgtgagcaggatcacgtggaatctggaggatacatcttggcttgcaaactgcctctgtctcctgggtgggactgttctgtccttgcactgctgttctgtgttacctcttggggtgtaaggttttgcttacaggagacaaactttgggcgtagaatggaagccactgccagcctctgtgctgagaaggaaggtgcttgtttcaaagggagcagcaagggaggcttgttctactcacctgggcctgtttgcctgagaaggggagataagggctgaactgggactagccagggggaccaacacaaatggtgggggatcatgacctgaaggattctttccttcccatgagctgcagggctggttgccgtccttgcaactgtgtcttatttgcctgtgccgttatatcttggtgacccctccacgtgtacactactgacaaacgggtggagtgctggggagaagtcactgtgccgcccacctagtaaaccttctgtctgtgctcatggcatctccaagatggggcactgctgtgtgcagaatccagggtcctctttctgcttgcaactcctttccctggatgccccagaaacaatccaggcctcctttcctatcttacccctttgctttgctttttaccccagcacctctataaccgccttctcttcttttcagaactccttgtttctcatcctgttttttatgattacaaaactcttgcttccaccctggaagataactgctatagatgcctgtatgtaaatggtgctgtctccagcaactggcatgctgaagaagaattgattcacggggtataaatgttggggattggaagtggggatgaaatggcacttgttgatacaggagcagagaggtgaggccgactgctgaagacagctcgccaccctccttgcctccactccaatccaggggctggggccacattctttgccttcatttatcctcagatcaggtgagatcgacaggaggtgttgatggcagtgccagcaattattgctaatccgtttgcatccttatgcatagatctgaattcagactttgtgaatttccagaggtgtgggtaatataatagaattcagtgagtgggcatggctgatcttgtgcaaattaaaagttatggggcataagaatagcaaaagttgaacttcttttaaaaaggaaagtaccctgagagccagtattggttgaggctcttcagtatgcccaggttggcagcactgagaaccgcaggaacggcctgttgttacaaaaaggagattgactcagctgcccttggtgcatctgactgactatgactgctgagagattccaaggacccttaatgccagggctaacctctccatgtgcagtgagacctctggaggaagtgtcatcctctggctttgtgtggtactcattatggtgcagtgcgggcatgaaatgaagacacccaaataggcttacagatacgatatgttttaaatgttcgtatttaacaaaaacatactgacactgtttggaaatggcaacaggaagatagcaaaatgaatactaacattacgaaaagatgaacaggtacatgttccaaggcaggtggctgtgaacttcctctgagtgaaggcatcccctccagcacctttcagcctgctagttaggacgacccgccgccaccctccaggacctccagccctgcactgcctttcctctcttttaaataattcttcattgagttctaatatgtaaaaaaaaaaagtttactgtaaagtttgcaaataaggaaattttttttaaaagtcctcagtaatcttaccagtaacaattgttatgggcacatttgcttttggaagatttcttttgtatgcatgggataagtacatttttaaacaaaaatgggattatgccataaattctattttgtgactttaatatatagtgaacaccttttttaatgatgacaggatgttcccttgcatggctgtatcaatttaaacaatcttgtttcaatgggcatacagggtattttctagtttttttttcctcttagaaaataatacttgcgatgactttccttgtagctcagactttttcacgtctgttgttatctctttgggaatgctgaatacatacatttcgagaaggaaatgactgttaaactcttaagacttcaggttcatattgctaaactgcccagcagggagggattttttcaattagtgttctcactggtgaggcaaacctgatgccttcccctcttcctcagaaccggctttatcacattgaaaacctttgctcctccgacggatcgagtctgctttccctgtggatgtgagcattgctttgtctgctggtgactgaacatctctaccatgtgtcaattggccatttgtggtgtgtgtgtgtgtgcgtgtgtgtgtgtgtgtgtgtgtgtatgattttctaattcctagtcatttttctattgattgttttgcaaaagccatttacatcttaaggatattgataatcttttgttatatttgatgcaaatatttttttccagtttataggttgccttttaattttgtgtttcaggtagataaaagttaaacgattttcttaggttagtttatcactgtggtttctgaacttgttatgtgtagatcttttccaccccaagagtacataaatattaatccatactttcttatggaacttgtatggtttcgttttttacatttaaaccttcttccccgtggtgtgtgttgtggaatctgtgtttgtgtgaggaggggcatggtgctctcagaacccacctcctgtggccagagagccctgtcctgtgagggtggttatcacagtggcagggttcaattcagaagaccttgagggcaggctgatgtttcctgaatgggcccctggttgttgcttgtccctgactctccatttccccatctgagtggatttggacctaatagggcactggagctggttcgaatcctgactggactacttggcaactttatgtctgggagcaagttacttaacctccccaagcctgtgtctgtgaaatgcgggtaaatgaatgtagatgtttggcagcagctactccttgttgagctctcacagtgaactctcctgcctctgccctccttccccgcctcccctggtgcctagcgtcaggtctagccacttcctcctgggcccctctcccttttctgtggctggctgcctgcccgcctggcgctggacctttcatgtaacgggaatcagcatgtatattctggtctggtctgtttctacacttaattttgtttccagtagtatttccctgtaccggcagagttcacaaacacatttgaagaggctttttctcaggattcttaaccttcccaaaggaagtcccatggatgggtttctagaagtctataaatgctctgaaattgtatttttctgtggaaagcataactttcatctgcttgttcgtgctcaaaaaagatcatgaatgaatgattgcatgattttatgccattgtgcttatactaaaggatatgtagcccatctcttgagctgttaaactgttttgactactttaaatcgtgcagctgtgagcatctctgtaaatttagtgtacacatgtatcccctggagtggcatataactcggcagtgagcacttatggttttataactctcttcacagactcaaatgactccagaaagctacacttcctgttgtgagtatatgatatccatttccctacatagccactaacatcaggtttttacaattttatttatttcttgctactttaagaaatttttgtggtgaaatacatataatagaagttgactatctgaatcatttttaagtatacattcagtagtgttaagtatgtcgccattgttgtacaaccaatctccagaactttttcatcttgcaaaacaaactctgtacccattaaataacattaaacattccattccctccagcctcagcaaccccattctactttctgtttctgtgagtttgactattccaagcacttcatatcagttaaatcatgaagtatttgtctgtctgtgactggcttatttctctgagcacagtgtcctcgagatgcgtctatgttgtagcatatgtcagaatttccttcctttttaaaagatccaaataatattcttattttatatcttttttttatccattcatccattagtggacacttgggttgcttttggctattgtaaataatggtgctatgtacaaatatctatattattgtatttacaagtataatgctgtaatgtacacacatctttttgagatcctaccttcagttcttttgagtatatagccagaagtggtattactaaatcttacgatatttctatttttaatttattgaggaaccactgtagtttttcatagcaactgcaccattttacgttctcaccaagagtgcacaagggttccgaggttcccacatcctccccaacacttgttattttctgctttttttagattgcagccatcatagtgggtgtgaggtgacatttcattgtggttttgatttgcatttccctaatgaggagtgatgctgagcatcttttcatatgcttactggtcatttgtatgttgtctttggaaaaatgtctattcaagtcctttgactattttaaaaattgggttattagagttatcgttgttgttgacttgtaggagtttctttctatattctggatattaatcccctatcagatatatgatttgcaaatatcttctcttattccataaggttactttttcactttgttgattgtgttctttgatgtatagaagtttttagttttgaaatagtctaatttatctgtttttacttttgtggtctgtgcttttggtgtcatatccaagaaatccttgccaaatccaacgttataaggtacttttaaggtattttagttgtcttagtctatatttctgtactcacctttctttatccactcatcagttgatgggcatgtaggttggttccatatctttgcaattctgaattgtgctgtgatcaggtgtctttttagtataatgatttactctcctttgcgtagatacccagtagtgggattgctggatcgaatggtttttataattttctattttaccacagtttctctctgcatttttcctctttgaccactaaccatgtgaaattctcatattgacctttataatgatcatgaactcttagtatcattgggaaggccacatttgccacttatgattgtaaaccttatcctccatttttcctgttattgttggtgcaaaaagcacctattataccaggactttaaaaatcagtctgataagtctttgataagtctaataataataactgataagtccattgaatttgcttctgattactttttctttagtagctaaacatgtatgtactcctatgattacaatgaacactcctctccatttaaattaattatttacattgatgaaatagcaaaatgttaatgactaaatactgtcttggttttttcgttccaggtcagtcaatattaacttcttataattttcttttttttctttatgtgtgtgtgtgtgtgtatttttttttttttaatttcaatggcttttggggtacaaatggcttttggtcatatagatgaattctacagtagtgaagtctgagattttactgcaccggtcacctgagtagtgtacattgtacccaatatgtggttttttataccttgcccccctcttaccctccccactttgagtctctagtgtccattatgtcactctgtatacctttttgtacccataagttagctctcacttataagtgagaacacacagtatttggttttccattcctgagttgcttcacttagaataatatcctccagctccatccaaaattgctgcaaaaaaaaaaaaaaccacaaacattattttgttcttttttattgctaagtcatattccatggtgtagagataccacattttatttatccactcactggttgatgggttggttccacatctttgcaattgtgacttgtactgccatcaagtgtctttctggtataatgacttcttttcctttgggtagatacccaggagtgggattgctagatcaaatggttcttaacattttctctctggatctatttctggaaattttaggctccagtttttgttgttgttgttaataaaatgcaatggaatgtaatgatcatcacttttcattatgctttaaaatctggtaaatggaggctagaacactcctgtaaggcaagaatattctctctgttggaactcaaatacacagaactgggtaaatctcaatcttaatctttgattcaggacacaacatggctctcttttacttgctttctttaattgttttttaataatgtggtaagcatttctgaatctcctatccaatacaaaaactaggacaatacagacagtaactcctatggttacaatgaacactcctctccacttaaattaattatttacactgatgaaattgaaatagcaaaattttaatgactaaatactgtctttgattttttgttccaggtctgtcaatattaacttcttataattttctttttttttctttatgtgtgtgtgtgtgtgtatatatatatatatttaatttcaatggcttttggggtacaaatggcttttggtcatatatatgagttctacagtagtgaagtctgagattttactacaccttccacttatgtggtcccacaccacccgcctcccctgccgcctcctgccaccccctaggccaaggtaataatcatcctgaatcctgggtttatctctcacttgctttcttttcatataattttgcaaaagaatctgatctaaatgtgtttttcagagtatatatttatattttagctgttcttagagaaaatttattattttgcatgtaatcttatggaacattctcatttaataccatggtaagattcagcccttgcccaggggatagttcatttagtttgtttactggatagagctcatcatgtgactatacctcagttagtttatcagttctcccatccatggtgactaggttgcctctcagcctctcaacaacactgtttctcagtgtccttgtagaagtgatatgtgggtgttttctccttacacagagttgaaaggtgacgacaacaacgttggcactaccaatcccccaccctccagaggggtaaccagtgttaccagtttgctgtgtttcctgctacacctcgccttattcacttccatttgtatctgaaaaacgtgttgcatggtttcttttctatagaagtggtaaaatgctattgtgtcctgtacattattgattactttttttcatttaacagtagggagatgcctgggagtacacagagaactgccctcattgttttcaacttctgcactgtatgtctgtgagtttagccattctgctgttaatggaaatttacagtattctaatcttttgatattacaaacagttctgtgcgatcatcgtcatacacaaccccttgtgcacaatgcatgagtgtttctcagggtaggtaccaagaagtgaaattcctgggtcatagggcgtgagtccgacatttttctccattctgccctgttgccctccagagtgggtgtccagctttgcatacctaagtatgagagtatctgttgttcatatcctctacgacgctccatatatgaaacttaagtttctgctagttgccatctttgatctatcatgtatgcagtgacctactaagactgtaattggtacagtagattcttgtcatctgtgtgtgaatttagcattcatgggcttaatgctgacaaggcccccagggtccaagacatataatcatgtataattttgtcaaggtataattttttaaattgcttttgtcatgtgtctgctggtgatgcccaacccagtgctctgcacccaggtcacactgtggctttgtcctctgcttatgcctgcattgcagcaactgtcctgaagagaccaaaattatgcagatttaggtaagtccatggctaatgttattatattatgtgctattgtaatggatggggctgtggagtgtatgaatttataaatcactggtcttgtaattaaaattcaaacactatagaaaaaggccatgtagaagataaaagttcctctataatcccggacccctaagataactactaatgacaacttcatttatattccttcagacattttctggctgtggatgtactaaaatgtatcctattattctctgccctaaaatggaatcatacaaggtgtactgttatttttatggctctataacatgtcatattgtacgtgttggtatggtcattttaaccatttttctagtgatggctttgaggttatttgcagtttcctagccatctcaaagtgtgctgcggggatctcttttgcatccctctgggtgcagagctgaggcacccagaggcagtgtccagaggaggcagcatctgtaggtgtcttcacctgctctggctcttggcacatctggttggtgacactgttttgtgagatgggttgaaagcacgtgctgccaaaatagaataatgttggtcctctcctcatgtgccgtggaactggggtaaaactgcgtagtggctgcagctgcctgtccataccggaatcgagtataacacggtgcctggcttagcacaaaacagtagtgggtcctgcaggccccagagtctaattcctggtattctttcccctacacagattaaataaaccaaaaacaaactattctaggaaagcgtctgtgacatttgtaaaaagtggtatttaatgatcttttattcacttgtctgtttagtttgttgaaatcttaagtggcatcctggtctgggaaggagtgctgtctgcgcctgccctccgctgggcacagcgtggctgcttcaggggctaagcacacactttctgtcttctaaagggccgccacatgccaggagctcaggtgtgagcccggctctggctcttacctcatagggtcactcataggggcacagggagcagaacattgtacacagcgaggcaccacccggcttggcatctgcctcggtggacttactacctctagaaggaaatacctgagttcctctggcctcagctcctagagtgactggtgtgctgtccctgttactcttctgtcaaggtgacaactgtgtgacccatcatctgtgtgtcaaagcaaggccctgcctgggcctctgctcctgtgctgaccccaaaggcaaatgctttgctagtttccttccagttaatttcacctatgaatagatgtgtgaaaactgttcaaagccatacctgcacatgtttgaacttcaaaccctgtgggtgattcagtggcatctttctctaacccccagcctcccttcccacagaggccaccgtcatggccagttgctgcagtttctttccagagaacctgtgtatgtgtaaagctgtacaggcgtgggtacaccacacagcctgtcttgcactgtggactgttgagttactagtacatctaggtaagcaccgcatatctgtattcatgtctgccttggtcttttcaacatctgtgtggtagccgtgtttgaattacccattccctttttggggaaccattaagttgtttcagcaatttttactgtagataaggctataccgcatatctgtgtacatgggtttttatgtacatgggcaagtatatctgtgagagaaaagtttcctcaggaggaattctgggcacagcatgtgtaaatttctaaatatgatggacacccccagcttccacctcaaggaggttggtcccattgacatttccccacaccttcacccaggctgtgcccttaaacttggttatttgtcaatgtgagaagtggaaaatagtatttaattgtagtttggatttgtatttctattgggttgtatacttactgattaataataagagctctttacatattaaggaaattaacccttttcaaatacattcctatttctcactaatctttaagttttattgtaatattttgctctttagtttatatatatatgtatatatatatatatgtatatatatatatatacatatatatatatatatatatatatatatatatatatatatatatatatatatatatatatatatatacatatatatatacatatatatatactaattttcttttatggttcctggattttgtgagtagtttgaaaaggctaatccagctgaagattttgttgttgttgttaaaccccatgttttctcctaactctttttatttttattttggaggactctatctagacttaattttagcataacaagtgacagggttagttagcctgttgtccttacaccattttctggctaatacagctattaactattgatctgtctattcacgtgccagttcctaatggttttacatagtgtaatctgcacttcaaaatagcgaagggaagccctacctcattattctacttttccagaattctcctggctattccaggctgcatgtttaccttaaccttccctgtgatgtcttcatgccgttgtcttcttatgcaagaataaggtacgtctttccatccactcacgtctatttaatttgactttgcattacacagaaagctggtcttggtctgtctacctcggcatctagttgtcctcactgccccctagccgaccccaccccatctgactgactaccccatcacagagtacttttatttacgttttgctctgcctaatggttacttgatactgtcacgccgacagtgtccagttcagtggtctttgcagttgaaatgctcccgtacacactgtcttgttaaaaatgccagtaagttcatacaaacccagcttgcacccaaggtcacattcagagagcgtagggctgggatgggttgttttccaagcttctgccactgtgtggctagctcttcccactgggaagttctgtgtacccggaatgtcggagtggagtcctgttctagtgtccagcacctgaccctgtgcccaacccctcaacagcctattcctgctgtccacagcctgctggaactttttacaaaatatgttgccatgctggaccctgggcactggacataagccccctggcagcctttttcatgtcacccaaaggggtaattgtcctactggtggtctgtaagatgagttagggtgacttgctaatagacattgtaaatcttaatatttatgtatgtattttattattaccggttttccatttatgatggtaatattgtttcttctaagaatatttatttttccttctaaatattgagataaaattcatgcttttgaaatgttctattcagtggcttttagtatatttgctatgttgtgcaaccatcgacactatccatttctagaactttttcgtcatcccaaacagacgctctgtattcataaaaaaataacttcctacctgtctctccccctagtctttggtaacctttgttatactggtaaactttgttgtgctctctgtctgtgtgaatttgcctattctaggggcctcatataagtgtaatcatacagtatttgtctttttgggtctgtctgatttcacttagcgggttttcagggttcattcatgttgcagcatataacagtactgcgttcctttttctggctgaataatattccactgtatggatagaccccattttgtttattcacacatcatttggacatttggattatttctggtttttggctattatgaacaatggtgctatgaacagttgcgtacaagtttttgtgtgaacatatgttttcaattctctcattatatacctaggagtagaattactgggtcatatggtaactgtatatttttgaggaactgccaaactattttcccacgtccatgcaccatttcacattcccaccagtaagtaagagggttccaatttctgcgcattcttgccaacactagttattatctgactttctggttataatcattctaatgagtgtgaagtagcctctggtgtcatttggatttgcatttctctgatgagtgatgctatcaagcacctttgctggtgctgttggccatatgtgtatgttccctggagaagtgtctgtgctgagccttggcccactttttaattaggcgtttgtctttttattactgagttgtaagagttctttatatattctggattctagacccttatcagatacatggtttgcaaatattttctcccattctgtgggttgtgttttcactttatcgataatgtccttagacatataataaatttgtattttaaaagtgacttgatttggctgtgcaaggtggctcacgcttgtaatcccagcactttgggagactgaggtgggtggatcatatgaggaggctaggagttcgaggtcagcctggccagcatagcgaaaacttgtctctactaaaaatacaaaaattagtcaggcatggtggtgcacgtctgtaataccagcttctcaggaggctgaggcacgaggatcacttgaacccaggaggaggaggttgcagtgagctgagatcatgccagggcaacagaatgagactttgtttaaa

SEQ ID NO: 704889 - DNA, 481 bp, Homo sapiens
  misc_feature (393)..(393): n is a, c, g, or t
attcttccaaacttaggataaatgctaaaaacattgaccatacaagcaaagattaaattagcctatattaatcataataactgtttatcgcacatgtaccccttaacctaaaagatgaagaagaaaataaaaaataaaataaaatttgaagaaaatgttaaacaaaaatgaaaccataccagtactagaagaaaaatgggtgaattcctctttaacctaggcaaaggaaaggcttctctggctcccaatctggatttaattaatcctaaagtttgtatagaatcacaaaatacctcaaatagccaaaacaatcctgagcaaagagaacaaagctggaggtatcacactaccagatgccaaaatatcctgcaaagctgtagtaaccaaaacagnattatactggcatacaaatagacatatagagcaatggaacagaatagcgaacacagaaattaatccaaatatctgtaaccaactgatt

SEQ ID NO: 704890 - DNA, 13532 bp, Homo sapiens
ccctatagcaaacagacacttcaaaagaagacacacatgcggccaacaagcatatgagaaaaagctcaatatcactgatcattagagaaatgcaaatcaaaaccacaatggcataccatctcacaccagtcacgcatgtatggggaagtagtctcgggtatgctgttgtgaaattgaaactgtaaaagtagatggttgaaagtactggtatgttgctctgtatggtaagaactaattttgttacgtcatgtacataattactaatcacttttcttcccctttacagcacaaataaagtttgagttctaaactcattagaattgttgtattgctatgttacatttctcgacccctatcacattgccttcataacgactttggatgtatcttcatattgtagatttaggtctagatttgctagctccaagtaattaaggccatgtaggagagcatggtaaccacagatagaactggtattatcccaagtggtctgcagactgctgagtggggatgggatctgctctctgttgagagttggtaatcattggtttgaaatgtgatgaaaccactcaagccaatgaaggtgggtgtgtaggtggggagtactttgccataatattttaaaacattacctggttagagttctaagtggtacttatttttgtttggttaggggaaagcctgaataaaaacagaaatggacacataatatgcatattccatagtctttgggaggctggaatgtgcctgggatttgggtctaagtgtatgcgtaattcttacctcactaaagaatttgccttgtttttttccttttggtgagtgactaaaacgtctgggcttccctgtgtgcgtgctacagtaagcaagcagaggctgtgcaaaggtgtgagcaggatcacgtggaatctggaggatacatcttggcttgcaaactgcctctgtctcctgggtgggactgttctgtccttgcactgctgttctgtgttacctcttggggtgtaaggttttgcttacaggagacaaactttgggcgtagaatggaagccactgccagcctctgtgctgagaaggaaggtgcttgtttcaaagggagcagcaagggaggcttgttctactcacctgggcctgtttgcctgagaaggggagataagggctgaactgggactagccagggggaccaacacaaatggtgggggatcatgacctgaaggattctttccttcccatgagctgcagggctggttgccgtccttgcaactgtgtcttatttgcctgtgccgttatatcttggtgacccctccacgtgtacactactgacaaacgggtggagtgctggggagaagtcactgtgccgcccacctagtaaaccttctgtctgtgctcatggcatctccaagatggggcactgctgtgtgcagaatccagggtcctctttctgcttgcaactcctttccctggatgccccagaaacaatccaggcctcctttcctatcttacccctttgctttgctttttaccccagcacctctataaccgccttctcttcttttcagaactccttgtttctcatcctgttttttatgattacaaaactcttgcttccaccctggaagataactgctatagatgcctgtatgtaaatggtgctgtctccagcaactggcatgctgaagaagaattgattcacggggtataaatgttggggattggaagtggggatgaaatggcacttgttgatacaggagcagagaggtgaggccgactgctgaagacagctcgccaccctccttgcctccactccaatccaggggctggggccacattctttgccttcatttatcctcagatcaggtgagatcgacaggaggtgttgatggcagtgccagcaattattgctaatccgtttgcatccttatgcatagatctgaattcagactttgtgaatttccagaggtgtgggtaatataatagaattcagtgagtgggcatggctgatcttgtgcaaattaaaagttatggggcataagaatagcaaaagttgaacttcttttaaaaaggaaagtaccctgagagccagtattggttgaggctcttcagtatgcccaggttggcagcactgagaaccgcaggaacggcctgttgttacaaaaaggagattgactcagctgcccttggtgcatctgactgactatgactgctgagagattccaaggacccttaatgccagggctaacctctccatgtgcagtgagacctctggaggaagtgtcatcctctggctttgtgtggtactcattatggtgcagtgcgggcatgaaatgaagacacccaaataggcttacagatacgatatgttttaaatgttcgtatttaacaaaaacatactgacactgtttggaaatggcaacaggaagatagcaaaatgaatactaacattacgaaaagatgaacaggtacatgttccaaggcaggtggctgtgaacttcctctgagtgaaggcatcccctccagcacctttcagcctgctagttaggacgacccgccgccaccctccaggacctccagccctgcactgcctttcctctcttttaaataattcttcattgagttctaatatgtaaaaaaaaaaagtttactgtaaagtttgcaaataaggaaattttttttaaaagtcctcagtaatcttaccagtaacaattgttatgggcacatttgcttttggaagatttcttttgtatgcatgggataagtacatttttaaacaaaaatgggattatgccataaattctattttgtgactttaatatatagtgaacaccttttttaatgatgacaggatgttcccttgcatggctgtatcaatttaaacaatcttgtttcaatgggcatacagggtattttctagtttttttttcctcttagaaaataatacttgcgatgactttccttgtagctcagactttttcacgtctgttgttatctctttgggaatgctgaatacatacatttcgagaaggaaatgactgttaaactcttaagacttcaggttcatattgctaaactgcccagcagggagggattttttcaattagtgttctcactggtgaggcaaacctgatgccttcccctcttcctcagaaccggctttatcacattgaaaacctttgctcctccgacggatcgagtctgctttccctgtggatgtgagcattgctttgtctgctggtgactgaacatctctaccatgtgtcaattggccatttgtggtgtgtgtgtgtgtgcgtgtgtgtgtgtgtgtgtgtgtgtatgattttctaattcctagtcatttttctattgattgttttgcaaaagccatttacatcttaaggatattgataatcttttgttatatttgatgcaaatatttttttccagtttataggttgccttttaattttgtgtttcaggtagataaaagttaaacgattttcttaggttagtttatcactgtggtttctgaacttgttatgtgtagatcttttccaccccaagagtacataaatattaatccatactttcttatggaacttgtatggtttcgttttttacatttaaaccttcttccccgtggtgtgtgttgtggaatctgtgtttgtgtgaggaggggcatggtgctctcagaacccacctcctgtggccagagagccctgtcctgtgagggtggttatcacagtggcagggttcaattcagaagaccttgagggcaggctgatgtttcctgaatgggcccctggttgttgcttgtccctgactctccatttccccatctgagtggatttggacctaatagggcactggagctggttcgaatcctgactggactacttggcaactttatgtctgggagcaagttacttaacctccccaagcctgtgtctgtgaaatgcgggtaaatgaatgtagatgtttggcagcagctactccttgttgagctctcacagtgaactctcctgcctctgccctccttccccgcctcccctggtgcctagcgtcaggtctagccacttcctcctgggcccctctcccttttctgtggctggctgcctgcccgcctggcgctggacctttcatgtaacgggaatcagcatgtatattctggtctggtctgtttctacacttaattttgtttccagtagtatttccctgtaccggcagagttcacaaacacatttgaagaggctttttctcaggattcttaaccttcccaaaggaagtcccatggatgggtttctagaagtctataaatgctctgaaattgtatttttctgtggaaagcataactttcatctgcttgttcgtgctcaaaaaagatcatgaatgaatgattgcatgattttatgccattgtgcttatactaaaggatatgtagcccatctcttgagctgttaaactgttttgactactttaaatcgtgcagctgtgagcatctctgtaaatttagtgtacacatgtatcccctggagtggcatataactcggcagtgagcacttatggttttataactctcttcacagactcaaatgactccagaaagctacacttcctgttgtgagtatatgatatccatttccctacatagccactaacatcaggtttttacaattttatttatttcttgctactttaagaaatttttgtggtgaaatacatataatagaagttgactatctgaatcatttttaagtatacattcagtagtgttaagtatgtcgccattgttgtacaaccaatctccagaactttttcatcttgcaaaacaaactctgtacccattaaataacattaaacattccattccctccagcctcagcaaccccattctactttctgtttctgtgagtttgactattccaagcacttcatatcagttaaatcatgaagtatttgtctgtctgtgactggcttatttctctgagcacagtgtcctcgagatgcgtctatgttgtagcatatgtcagaatttccttcctttttaaaagatccaaataatattcttattttatatcttttttttatccattcatccattagtggacacttgggttgcttttggctattgtaaataatggtgctatgtacaaatatctatattattgtatttacaagtataatgctgtaatgtacacacatctttttgagatcctaccttcagttcttttgagtatatagccagaagtggtattactaaatcttacgatatttctatttttaatttattgaggaaccactgtagtttttcatagcaactgcaccattttacgttctcaccaagagtgcacaagggttccgaggttcccacatcctccccaacacttgttattttctgctttttttagattgcagccatcatagtgggtgtgaggtgacatttcattgtggttttgatttgcatttccctaatgaggagtgatgctgagcatcttttcatatgcttactggtcatttgtatgttgtctttggaaaaatgtctattcaagtcctttgactattttaaaaattgggttattagagttatcgttgttgttgacttgtaggagtttctttctatattctggatattaatcccctatcagatatatgatttgcaaatatcttctcttattccataaggttactttttcactttgttgattgtgttctttgatgtatagaagtttttagttttgaaatagtctaatttatctgtttttacttttgtggtctgtgcttttggtgtcatatccaagaaatccttgccaaatccaacgttataaggtacttttaaggtattttagttgtcttagtctatatttctgtactcacctttctttatccactcatcagttgatgggcatgtaggttggttccatatctttgcaattctgaattgtgctgtgatcaggtgtctttttagtataatgatttactctcctttgcgtagatacccagtagtgggattgctggatcgaatggtttttataattttctattttaccacagtttctctctgcatttttcctctttgaccactaaccatgtgaaattctcatattgacctttataatgatcatgaactcttagtatcattgggaaggccacatttgccacttatgattgtaaaccttatcctccatttttcctgttattgttggtgcaaaaagcacctattataccaggactttaaaaatcagtctgataagtctttgataagtctaataataataactgataagtccattgaatttgcttctgattactttttctttagtagctaaacatgtatgtactcctatgattacaatgaacactcctctccatttaaattaattatttacattgatgaaatagcaaaatgttaatgactaaatactgtcttggttttttcgttccaggtcagtcaatattaacttcttataattttcttttttttctttatgtgtgtgtgtgtgtgtatttttttttttttaatttcaatggcttttggggtacaaatggcttttggtcatatagatgaattctacagtagtgaagtctgagattttactgcaccggtcacctgagtagtgtacattgtacccaatatgtggttttttataccttgcccccctcttaccctccccactttgagtctctagtgtccattatgtcactctgtatacctttttgtacccataagttagctctcacttataagtgagaacacacagtatttggttttccattcctgagttgcttcacttagaataatatcctccagctccatccaaaattgctgcaaaaaaaaaaaaaaccacaaacattattttgttcttttttattgctaagtcatattccatggtgtagagataccacattttatttatccactcactggttgatgggttggttccacatctttgcaattgtgacttgtactgccatcaagtgtctttctggtataatgacttcttttcctttgggtagatacccaggagtgggattgctagatcaaatggttcttaacattttctctctggatctatttctggaaattttaggctccagtttttgttgttgttgttaataaaatgcaatggaatgtaatgatcatcacttttcattatgctttaaaatctggtaaatggaggctagaacactcctgtaaggcaagaatattctctctgttggaactcaaatacacagaactgggtaaatctcaatcttaatctttgattcaggacacaacatggctctcttttacttgctttctttaattgttttttaataatgtggtaagcatttctgaatctcctatccaatacaaaaactaggacaatacagacagtaactcctatggttacaatgaacactcctctccacttaaattaattatttacactgatgaaattgaaatagcaaaattttaatgactaaatactgtctttgattttttgttccaggtctgtcaatattaacttcttataattttctttttttttctttatgtgtgtgtgtgtgtgtatatatatatatatttaatttcaatggcttttggggtacaaatggcttttggtcatatatatgagttctacagtagtgaagtctgagattttactacaccttccacttatgtggtcccacaccacccgcctcccctgccgcctcctgccaccccctaggccaaggtaataatcatcctgaatcctgggtttatctctcacttgctttcttttcatataattttgcaaaagaatctgatctaaatgtgtttttcagagtatatatttatattttagctgttcttagagaaaatttattattttgcatgtaatcttatggaacattctcatttaataccatggtaagattcagcccttgcccaggggatagttcatttagtttgtttactggatagagctcatcatgtgactatacctcagttagtttatcagttctcccatccatggtgactaggttgcctctcagcctctcaacaacactgtttctcagtgtccttgtagaagtgatatgtgggtgttttctccttacacagagttgaaaggtgacgacaacaacgttggcactaccaatcccccaccctccagaggggtaaccagtgttaccagtttgctgtgtttcctgctacacctcgccttattcacttccatttgtatctgaaaaacgtgttgcatggtttcttttctatagaagtggtaaaatgctattgtgtcctgtacattattgattactttttttcatttaacagtagggagatgcctgggagtacacagagaactgccctcattgttttcaacttctgcactgtatgtctgtgagtttagccattctgctgttaatggaaatttacagtattctaatcttttgatattacaaacagttctgtgcgatcatcgtcatacacaaccccttgtgcacaatgcatgagtgtttctcagggtaggtaccaagaagtgaaattcctgggtcatagggcgtgagtccgacatttttctccattctgccctgttgccctccagagtgggtgtccagctttgcatacctaagtatgagagtatctgttgttcatatcctctacgacgctccatatatgaaacttaagtttctgctagttgccatctttgatctatcatgtatgcagtgacctactaagactgtaattggtacagtagattcttgtcatctgtgtgtgaatttagcattcatgggcttaatgctgacaaggcccccagggtccaagacatataatcatgtataattttgtcaaggtataattttttaaattgcttttgtcatgtgtctgctggtgatgcccaacccagtgctctgcacccaggtcacactgtggctttgtcctctgcttatgcctgcattgcagcaactgtcctgaagagaccaaaattatgcagatttaggtaagtccatggctaatgttattatattatgtgctattgtaatggatggggctgtggagtgtatgaatttataaatcactggtcttgtaattaaaattcaaacactatagaaaaaggccatgtagaagataaaagttcctctataatcccggacccctaagataactactaatgacaacttcatttatattccttcagacattttctggctgtggatgtactaaaatgtatcctattattctctgccctaaaatggaatcatacaaggtgtactgttatttttatggctctataacatgtcatattgtacgtgttggtatggtcattttaaccatttttctagtgatggctttgaggttatttgcagtttcctagccatctcaaagtgtgctgcggggatctcttttgcatccctctgggtgcagagctgaggcacccagaggcagtgtccagaggaggcagcatctgtaggtgtcttcacctgctctggctcttggcacatctggttggtgacactgttttgtgagatgggttgaaagcacgtgctgccaaaatagaataatgttggtcctctcctcatgtgccgtggaactggggtaaaactgcgtagtggctgcagctgcctgtccataccggaatcgagtataacacggtgcctggcttagcacaaaacagtagtgggtcctgcaggccccagagtctaattcctggtattctttcccctacacagattaaataaaccaaaaacaaactattctaggaaagcgtctgtgacatttgtaaaaagtggtatttaatgatcttttattcacttgtctgtttagtttgttgaaatcttaagtggcatcctggtctgggaaggagtgctgtctgcgcctgccctccgctgggcacagcgtggctgcttcaggggctaagcacacactttctgtcttctaaagggccgccacatgccaggagctcaggtgtgagcccggctctggctcttacctcatagggtcactcataggggcacagggagcagaacattgtacacagcgaggcaccacccggcttggcatctgcctcggtggacttactacctctagaaggaaatacctgagttcctctggcctcagctcctagagtgactggtgtgctgtccctgttactcttctgtcaaggtgacaactgtgtgacccatcatctgtgtgtcaaagcaaggccctgcctgggcctctgctcctgtgctgaccccaaaggcaaatgctttgctagtttccttccagttaatttcacctatgaatagatgtgtgaaaactgttcaaagccatacctgcacatgtttgaacttcaaaccctgtgggtgattcagtggcatctttctctaacccccagcctcccttcccacagaggccaccgtcatggccagttgctgcagtttctttccagagaacctgtgtatgtgtaaagctgtacaggcgtgggtacaccacacagcctgtcttgcactgtggactgttgagttactagtacatctaggtaagcaccgcatatctgtattcatgtctgccttggtcttttcaacatctgtgtggtagccgtgtttgaattacccattccctttttggggaaccattaagttgtttcagcaatttttactgtagataaggctataccgcatatctgtgtacatgggtttttatgtacatgggcaagtatatctgtgagagaaaagtttcctcaggaggaattctgggcacagcatgtgtaaatttctaaatatgatggacacccccagcttccacctcaaggaggttggtcccattgacatttccccacaccttcacccaggctgtgcccttaaacttggttatttgtcaatgtgagaagtggaaaatagtatttaattgtagtttggatttgtatttctattgggttgtatacttactgattaataataagagctctttacatattaaggaaattaacccttttcaaatacattcctatttctcactaatctttaagttttattgtaatattttgctctttagtttatatatatatgtatatatatatatatgtatatatatatatatacatatatatatatatatatatatatatatatatatatatatatatatatatatatatatatatatatacatatatatatacatatatatatactaattttcttttatggttcctggattttgtgagtagtttgaaaaggctaatccagctgaagattttgttgttgttgttaaaccccatgttttctcctaactctttttatttttattttggaggactctatctagacttaattttagcataacaagtgacagggttagttagcctgttgtccttacaccattttctggctaatacagctattaactattgatctgtctattcacgtgccagttcctaatggttttacatagtgtaatctgcacttcaaaatagcgaagggaagccctacctcattattctacttttccagaattctcctggctattccaggctgcatgtttaccttaaccttccctgtgatgtcttcatgccgttgtcttcttatgcaagaataaggtacgtctttccatccactcacgtctatttaatttgactttgcattacacagaaagctggtcttggtctgtctacctcggcatctagttgtcctcactgccccctagccgaccccaccccatctgactgactaccccatcacagagtacttttatttacgttttgctctgcctaatggttacttgatactgtcacgccgacagtgtccagttcagtggtctttgcagttgaaatgctcccgtacacactgtcttgttaaaaatgccagtaagttcatacaaacccagcttgcacccaaggtcacattcagagagcgtagggctgggatgggttgttttccaagcttctgccactgtgtggctagctcttcccactgggaagttctgtgtacccggaatgtcggagtggagtcctgttctagtgtccagcacctgaccctgtgcccaacccctcaacagcctattcctgctgtccacagcctgctggaactttttacaaaatatgttgccatgctggaccctgggcactggacataagccccctggcagcctttttcatgtcacccaaaggggtaattgtcctactggtggtctgtaagatgagttagggtgacttgctaatagacattgtaaatcttaatatttatgtatgtattttattattaccggttttccatttatgatggtaatattgtttcttctaagaatatttatttttccttctaaatattgagataaaattcatgcttttgaaatgttctattcagtggcttttagtatatttgctatgttgtgcaaccatcgacactatccatttctagaactttttcgtcatcccaaacagacgctctgtattcataaaaaaataacttcctacctgtctctccccctagtctttggtaacctttgttatactggtaaactttgttgtgctctctgtctgtgtgaatttgcctattctaggggcctcatataagtgtaatcatacagtatttgtctttttgggtctgtctgatttcacttagcgggttttcagggttcattcatgttgcagcatataacagtactgcgttcctttttctggctgaataatattccactgtatggatagaccccattttgtttattcacacatcatttggacatttggattatttctggtttttggctattatgaacaatggtgctatgaacagttgcgtacaagtttttgtgtgaacatatgttttcaattctctcattatatacctaggagtagaattactgggtcatatggtaactgtatatttttgaggaactgccaaactattttcccacgtccatgcaccatttcacattcccaccagtaagtaagagggttccaatttctgcgcattcttgccaacactagttattatctgactttctggttataatcattctaatgagtgtgaagtagcctctggtgtcatttggatttgcatttctctgatgagtgatgctatcaagcacctttgctggtgctgttggccatatgtgtatgttccctggagaagtgtctgtgctgagccttggcccactttttaattaggcgtttgtctttttattactgagttgtaagagttctttatatattctggattctagacccttatcagatacatggtttgcaaatattttctcccattctgtgggttgtgttttcactttatcgataatgtccttagacatataataaatttgtattttaaaagtgacttgatttggctgtgcaaggtggctcacgcttgtaatcccagcactttgggagactgaggtgggtggatcatatgaggaggctaggagttcgaggtcagcctggccagcatagcgaaaacttgtctctactaaaaatacaaaaattagtcaggcatggtggtgcacgtctgtaataccagcttctcaggaggctgaggcacgaggatcacttgaacccaggaggaggaggttgcagtgagctgagatcatgccagggcaacagaatgagactttgtttaaa

SEQ ID NO: 704891 - DNA, 101 bp, Homo sapiens
ccagcagacctgaccacgtataaggaaggcaaagggcaaaatcgcttcagttaaactgaaattaaatgacacaataaggcaactatataagtaacttctag

SEQ ID NO: 704892 - DNA, 332 bp, Homo sapiens
cgcggcactccaaagggcgcgagcaccaggagcgcttacctgactcacgcgcccactgggagagcacttgcctgaaagacactgctggcgaagccagcgccgcgccgatcatggtttgataaggcgggtatcgagaccgaagcgctcttggctgatcagccggtaatggccctcggcaaggtcgcaactcaccagcaggttccatgaatggccggtcacggcagacgggatcagcacaaagggatgcttggccagcaatgtgtcggcgaacttctgctggtttggcgaagcggaagcgctcgatagccacacagggttcggcacgtcctcgg

SEQ ID NO: 704893 - DNA, 625 bp, Homo sapiens
atcgtggaagagcggcaaaaatgggggggtttataaaggtatcccgctcctgggcgggggttggtgttaaggtggaccccctcgttgggacggtggtatgaaaaaggtggggagtcctctataagagagttcctccctcccgccgacgttgtcggtgtcggatagcaggtcttaccggtggtgcaccctctgctatagcgcgagcaatctctttgtggtaggcgcgcccccgcccccattgggtggcgttccaggaataaatatttttctgggcgttatgtgagtgttaagaagaagacagagcgcctccccgccacttgtcaaaacttgggtgcgcctctctctagggcccctcgggggaacacacgctacattgttgtgctcttgtatgttgtcaacacgctcctgtagagtgtgtctgtttggcgagagattctgttttctacagcgtctctctatatgtgtcacgaaatttgtgagggtttaggaaaatatttattgtggaaagcggaggggcgacaagtgacagttatgcccacatattgatcattttttgggtgtccccgacgatgatggcccccgccaccactactcaccccccgcacccatcatagaacaagaaata

SEQ ID NO: 704894 - DNA, 509 bp, Homo sapiens
gtagtagcaagaaacagctactaggctgctaaaataccgtccaaatatgaaactgattattagtagtgtgtagaagcgtttacaagtggtactattatacgtttgaagagctaacagaatacaggtgatgatgatgaatgtggggctgggaggtgagaatgcgagacgtacgtggatattatcacgggttcatcgcgcacacacctgtggagaatgggggatcccagttaccgagagggggagcctgacggaagaatagtttctgggaagaagttaaagatttgggttctacacatgtttactctggctgcttaacttccagggacagatgttacttaagcagctagataccaaaatctggatttcaatgggggggtctgagctagattaataaatatgggagctttcagcataaagatgatatttaaagacatgggaactgactggagattatctagaagtaattcgaaatagaaaagaacagagtctggagaccaaataaggctcat

SEQ ID NO: 704895 - DNA, 691 bp, Homo sapiens
agcgggagggacatgtggccgtcgatcatctcgagatccgtcggccgtgcgtggacgcgggtgctgctgctgcacgatgttaggtctggcgtgagactcagtgggctgcactgatctgccagcgcatctcgttaccgcttccggcactcgagtagcagggcgtcaccatgtggacgctcgtgtagagatcgagcgatcgtacttctgtgctcctcccatagttcgttggagctagagtagagagcgtgctcggagctctctaagaagaagatcccgattatacggacgctacctctatcgtaaaccgacaacatgagacatcgattgcgtacgaagtttgagaccacgcacgagccaaaaaagacatcgcgcaatcccacgaggcatcgtatcacacagccgaagcaagttcggagtgctaggatcaggaccccattatcgcatgagcaggacgtatggaacaaggagcggatgggccatggggcaaggacgcaacatcaatgcagacgaaccagacgctcaagaccgcaccgttcgcaatccacgagcaagagggaagaccaagcacagaagtagctgtggcgagcacagaagcgagtacccccaggacgaatcgtcgactgccccgggccgtaagtcgagcagcgaggacaggaaagcccacgcgcggagaaatccggagggcaccccg

SEQ ID NO: 704896 - DNA, 272 bp, Homo sapiens
cccccccccgggggggccccctgggggtttttttttttccccaaaaaaattttttgggcaccttgggtttcccctgcaattaccccctccccaggggtttttagacccctccctttcggccaacctaggggccagggtgagggccccccggattacaccccccccccccccgggtggatggggggttttccccccccccccagggggggccgtccttagggggaagttaaaagggccccaaaagggccaaataaaatgtgtgtgccggggga

SEQ ID NO: 704897 - DNA, 432 bp, Homo sapiens
  misc_feature (120)..(120): n is a, c, g, or t
  misc_feature (149)..(149): n is a, c, g, or t
  misc_feature (188)..(188): n is a, c, g, or t
  misc_feature (210)..(211): n is a, c, g, or t
  misc_feature (307)..(307): n is a, c, g, or t
  misc_feature (383)..(383): n is a, c, g, or t
ctaagttcaagcgaccctttagggtgggaagaagtatccccccaggaagcatctgcaaaggaaaaaaattgtaatcatgattccaaagcaaaaatggctaaagttggaagagaagaaatnccaagagagaagacaaaacaatgcttgtnccaaggacttgaggagtgactttacaaggacttgtcagntggctcttgtacttctattggnntggtccttcaccatttccaaaggggttcttggagaccttgcaggaacaggaacagcaccttagccaagagggttccagcctcctcctagcctgggntctcctcgttaggtcccaggaataaattgagtcccattggcagcacttgcaggtattctagtccacgggcaagatntgcttagggattttgtggtacagccggtgaagagaaagtgagggttttc

SEQ ID NO: 704898 - DNA, 1210 bp, Homo sapiens
  misc_feature (543)..(543): n is a, c, g, or t
  misc_feature (568)..(568): n is a, c, g, or t
  misc_feature (622)..(622): n is a, c, g, or t
  misc_feature (850)..(850): n is a, c, g, or t
  misc_feature (856)..(856): n is a, c, g, or t
  misc_feature (921)..(921): n is a, c, g, or t
  misc_feature (942)..(942): n is a, c, g, or t
ggacgaagggggagagtagacagcagaaccagcggcggcggctaagcagagactgtagtagcggcgacagcgacgacggcagcgatggctggggcggggccagccccgggactcccgggtgcaggaggacccgtggtcccgggtcctggcgctggcatcccgggcaaaagcggcgaggaacgcttgaaggaaatggaggcggagatggccctgtttgagcaggaagttctgggggctccagtacctggaatcccaactgctgtgcctgcggtgcccactgtccccacggtccccacagtagaagcgatgcaggtcccagcggctcctgtgatccgcccaattatcgcgaccaacacataccagcaggtccagcagactctggaggcccgagcaagctgctgcagccacgagtagttcctcccatggtgggtggccctccttttgtaggccctgttggctttggccctggtgatcggagtcacctggacagcccagaggctcgagaagccatgttcctgcggcgggcagctgccggtcgcccgncctatggccctacggccccctcacnaggccctcgtgggccccctctgcctgggccccctggaccacccatgatgctgcnaccaatggctcgggctccagggcccccgctgggctccatggctgcactgaggccccctctggaagagccagcagcaccccgagagctgggcctaggcctggggttgggcctgaaagagaaggaagaggcagtggtggcggcggcggctgggctggaggaggctagcgcggctgtggccgtggggggcaggaggtgccccagctggccctgcagtcattggggccagcntgccgntggccctggccatgccattgcccgagcctgagcccctgcccctcccgttggaggtcgtccgcggnctcctgccccgctgcgcattncgtgaacatccgtgtcccgtggtgttcgcatcgggtgcccgagacccgcctcggtgacgagaagccgatgcgccccctaggggtgcttcaatttggcttcctttggatgggtcccccaggagttcctcaccttggtggttgaaaggaccacacgacaagaagggggggaaatgcacaggcatccacagatttttgagagcttgggttggcatttctcggcacacatgggggggccttggtaacgcaggagatagggggagtgagaccc

SEQ ID NO: 704899 - DNA, 659 bp, Homo sapiens
ggacgaagggggagagtagacagcagaaccagcggcggcggctaagcagagactgtagtagcggcgacagcgacgacggcagcgatggctggggcggggccagccccgggactcccgggtgcaggaggacccgtggtcccgggtcctggcgctggcatcccgggcaaaagcggcgaggaacgcttgaaggaaatggaggcggagatggccctgtttgagcaggaagttctgggggctccagtacctggaatcccaactgctgtgcctgcggtgcccactgtccccacggtccccacagtagaagcgatgcaggtcccagcggctcctgtgatccgcccaattatcgcgaccaacacataccagcaggtccagcagactctggaggcccgagcaagctgctgcagccacgagtagttcctcccatggtgggtggccctccttttgtaggccctgttggctttggccctggtgatcggagtcacctggacagcccagaggctcgagaagccatgttcctgcggcgggcagctgtggcccccagagggccctatcctgcgtcagcttcgtcccccacgtgctacagagagcagattccgtctctcctctgcagaggcggtcctccgtggccgggcccacgggctgggggggcccttgtgtgg

SEQ ID NO: 704900 - DNA, 861 bp, Homo sapiens
  misc_feature (501)..(501): n is a, c, g, or t
  misc_feature (507)..(507): n is a, c, g, or t
  misc_feature (572)..(572): n is a, c, g, or t
  misc_feature (593)..(593): n is a, c, g, or t
ggacgaagggggagagtagacagcagaaccagcggcggcggctaagcagagactgtagtagcggcgacagcgacgacggcagcgatggctggggcggggccagccccgggactcccgggtgcaggaggacccgtggtcccgggtcctggcgctggcatcccgggcaaaagcggcgaggaacgcttgaaggaaatggaggcggagatggccctgtttgagcaggaagttctgggggctccagtacctggaatcccaactgctgtgcctgcggtgcccactgtccccacggtccccacagtagaagcgctccatggctgcactgaggccccctctggaagagccagcagcaccccgagagctgggcctaggcctggggttgggcctgaaagagaaggaagaggcagtggtggcggcggcggctgggctggaggaggctagcgcggctgtggccgtggggggcaggaggtgccccagctggccctgcagtcattggggccagcntgccgntggccctggccatgccattgcccgagcctgagcccctgcccctcccgttggaggtcgtccgcggnctcctgccccgctgcgcattncgtgaacatccgtgtcccgtggtgttcgcatcgggtgcccgagacccgcctcggtgacgagaagccgatgcgccccctaggggtgcttcaatttggcttcctttggatgggtcccccaggagttcctcaccttggtggttgaaaggaccacacgacaagaagggggggaaatgcacaggcatccacagatttttgagagcttgggttggcatttctcggcacacatgggggggccttggtaacgcaggagatagggggagtgagaccc

SEQ ID NO: 704901 - DNA, 378 bp, Homo sapiens
tcacgccatgtccacaagccatagacaaaagcactgtctgtgtatgcactgacatacctctcaattttttttttcctcttattgcccaggcgggagtgcaaaagtacggatctcggctcacggcaacctccgtctcccggattcaagtgattctccggcctcagcctcccaagtagcctccaagtggcaagcaggcgccagccactacacccagccaatttctgtacttttagtagagacagggtttcaccacgctggccagactggtctcgaactcccgacctcaagtgatccacccgcctcaacctcccaaagtgttgggattacgggtgtgagccactgctcccagctaggaccagctctttgttagccatgtgg

SEQ ID NO: 704902 - DNA, 220 bp, Homo sapiens
ctaagacggagcaccaggtgcggggtggactctttctggatgtggtcatcttacagggtgcgtccatgttacagctgtttcccatcaaagatcaacctatgctggtcaggaggaatgccttccttatcttggatctttgccttgacattctcaatgggtgtcactcggctccacctcaaaagtgatggtcttaccagtcacggtcttcaccaagatttgc

SEQ ID NO: 704903 - DNA, 253 bp, Homo sapiens
aggtctgagccaacacgagttgggagtgagttcttgtatctgagaactagtgcttgtgatcagaaatacctgccctatgctaaccaccagaagaatgaaggcttctcctactgaccaataggccactcttgtatgtagatcctctgcggggattcggccttgagcttctcttaaacggaaatgagtctgataatcgatgacagacttcagagctatcgtgaattgaaacacaggcagattccatctgggtcag

SEQ ID NO: 704904 - DNA, 272 bp, Homo sapiens
aacgcactgacacactcctttgtacctgagctgaagcagcaccttgtctgcggggaaaacagtactttgaccatcgacagcagtcatgcctccccagtgcataagttcaagcagcaccctgcctttcaggtaacagtgtcttgggcatcctaagcagacacacagtccagtacctaatgtgaagcaccttactgcatccgaggaaaatggcgcctgcaccaacctaaggtcacacaccctagacctcagctgacgaggcacattaccctctg

SEQ ID NO: 704905 - DNA, 196 bp, Homo sapiens
aatgcagccgacagctaacaggctcaccccttccattccggacatatcctggacatcttttcagtcctgtgaagagtctctctggaaattctgagttagatacaaaagtacagaaatatcattacacattcacccgacctggattacatttaattgtactggaacagctacaacaatctgccgagtccgctgcatt

SEQ ID NO: 704906 - DNA, 350 bp, Homo sapiens
caagatatagattgtggattaaaggtaatagctgaacaggagggttgtggtgagaatgaaaatcagggtaggaaagagcaggtgggtaaaagtggtagcaggtaagtttatgaggcaaacaggtttgagatcatatggacaggctagaggaagactttctaggtggttattagttattatcaatattctactttttgtgttgggtgatgaaattttgggtgcttattttatgatggatatatagagaccatatgtagaccaataatgtaaatgtgtcataaaacaagaattgtgaatacctaatattgtgtatgtaatgtaaaaaatgttttctgtggatgtaaaaacta

SEQ ID NO: 704907 - DNA, 118 bp, Homo sapiens
ccaagacgaaaaaagaaaaaacaagaaaagacacaagaagaagaaaagagaaggaggagaggagcaaaaagccaagggagaccggggttaaacgacatatgtgggccagtcgcgtttt

SEQ ID NO: 704908 - DNA, 415 bp, Homo sapiens
cccagatcaatgttctatggtttcaatgttctatgagctagagcattgtagaagctcagctgaaccattgccatcaaccaataggcttatgtctaggaaatcctttcaagtaagaagaaaatctggggatgggcaagggcagagaaaaaagagggaaaattagaaaacaccgtgcctatctctacgtagtggatgctgtgatatgccacccaggtcctgccttcaggacaaaggcactcattcccccacctgcttggagtgattctttctgacggtgcacagctgaatttctcccaaagaattgccctcagagtaagcagctgcctcagccaagggcacacccattcctggggcagcctacaattaataattggtcagtatagggattcaatggccagccccattgcctcaattc

SEQ ID NO: 704909 - DNA, 592 bp, Homo sapiens
  misc_feature (28)..(28): n is a, c, g, or t
ctgtctagaaatgtaatcctttagattntgtctgtaatgtggtgttggttcttacagaactctaaatagtatatatagtatttttcaagccgaaaagtctctggagatatgatgttaaaaggtgtatccatgcctcaagaatcacccccctccaaaaaataaggtagtgtggcataatcaagtaagttggggaaatgtggcattaaataagatttaacctgtctttactgtataatttagaacttttaagatgttgtatacaatgaatctgcaaaatggatatggcccacggcatttgagacttgatgtcagaaccccttttttgtaaaccatctattgaagtctcagtggacacaaagtgctttgcagaacacagttttggaaagtctgataactacagtaacgcgatccagtattgcctggaaatgagctgttatgtttaattgactatattgaagtgttttctttaactgtcaagagttttgtttcattttgaattgaaatctttctaaattaaattgtataaaaatgttccgtcttaatagtgaatataaatttaataataatttaaataaaagttaaaaataataaa

SEQ ID NO: 704910 - DNA, 202 bp, Homo sapiens
atagtaggcaactcacatcccaactatagacactgccagccacagatccaaatgcccaagtctaatatgccttgttaactgtaccccgcctcagcaacatccctccatttctattcacatgctcaatgcaccagtataatgtgtctcccaggaagcttgctctggataataggaaaattccagtccctgacatcttgtagag

SEQ ID NO: 704911 - DNA, 191 bp, Homo sapiens
tgatgcctgatgtatctcagctcatgcaactctgctccgggtcatgtgatcttgtgctcagctcctgagtagctgggattacatggtgtgtccagcatgcctggctgatttttgtattttacgttagagatgggttatcgccatgttgtctatgctgttcttgacctcctgaactcaagtgatcctcctgc

SEQ ID NO: 704912 - DNA, 280 bp, Homo sapiens
aggctcaaggtggtcaaggggtttttctaaggccccatggcagcaggtgatagagcctggattagaaccgaaatttggtgcactgccttcaactccagcttgttgtttccccttccccttggggcccctcctcggattatttggtggggtgggctttcagcccccccccttttctcctcacaactcaagtgagcccctctgggtctgtggcttccatgcccatttttcttttttctttttctttctttttttttttatttgggacagagcgagaaactga

SEQ ID NO: 704913 - DNA, 572 bp, Homo sapiens
  misc_feature (39)..(39): n is a, c, g, or t
  misc_feature (43)..(43): n is a, c, g, or t
ccgccgccctttcaattttccccggaggccactccagantttnaggtgttgggggcgggcctccccccccggcctttggtaaaaaagggcggggggggccctcccccaaacccttaagcctgggccaagccggggaccctttacccctaaaagttttcgggttggggccggccacaaccccggccccttttggaacttcccctttggggcgggcccccgaaattcccccgggggggtttaagggtgctttagggccaaattaccccccccccccgggtggccaaagttcgggttccaaccctcccctaaaccccggggccccccccgcgaaaaatcccaattttcccccgggccccaaaaaggggtttttttcaaaattggtttcccccttccccaaaaggggccgggggggggggggggccccccccatttcaaaaaaacccccaggggggggggttccaatttttggaaaaaggcccccaaagggtttaaaaaggggccggcccgccaagaaaaaagggttttttccaaaccttttcctaaaggtttaaaaacggtttttgcccctggga

SEQ ID NO: 704914 - DNA, 188 bp, Homo sapiens
  misc_feature (106)..(106): n is a, c, g, or t
actctagaggatctccaatgcagggactcggcatcacgtgttatggttgagtgatggcacgcagcgtgcctagaaaccgtctcagtggagctgtctgctgtgtcgntgacagtctcccagggttgtcggtctgacgaattcgagtgacgttgtggctgtggggtgctgcgatgtccccggggcggcag

SEQ ID NO: 704915 - DNA, 162 bp, Homo sapiens
tcccggggggccccccttggggggccccccccccccgggttcccctttgggtttttttcgggcttttttccgggaaaacccccttggggggggtggggaggggccccaaaaattttttttttttccctggcccccggggggggtggggggtttttcccggga

SEQ ID NO: 704916 - DNA, 405 bp, Homo sapiens
  misc_feature (320)..(320): n is a, c, g, or t
ggtcttagtaatcttctatatagttaatgagctaaaaaatgatacttaaagttccaggttggtccgctagcatgaaacatgccttcctacactcccacatgttcctcagaaaattattttaagagttgtgaaaccgattaaatatctatattcgttggcctaatttaaaataatttataccagctttggtattggtgtcatcaccacttatgccaaattcccaaggaatcagaaaactggaggttagccatctccattatttccttttgcacattgggtacagtgggtggcattagtatgcactagctgcaaagtcacangcaccttatgggaacaaaccttacacggctttaacttggatattttaacttttaacttacatttaaccaacaacagcttttacaa

SEQ ID NO: 704917 - DNA, 115 bp, Homo sapiens
gccagtggtatagaaagagaagaaaaacagtaagcaggcaggaccatccgaacagatcctcaaatgctgcccatggacctcactctccctgtaccccgacaggaaggctggctgg

SEQ ID NO: 704918 - DNA, 204 bp, Homo sapiens
tctagaggatcccgggcaggctgactgaattactaccaggtgccgctggcgcgtgtggtcgaggacctggggcgctactacccggggcggatcgtcttgctgaatgaggaactcgggcagcgtaaggtcagtggcagcttccccttggccgagccgctgctggcactggattcgctgggcaaggtgatgggcttttcacggcag

SEQ ID NO: 704919 - DNA, 117 bp, Homo sapiens
cccccccggcagagctgccctgaacatcacctaagaataatgccaggtgttctttaaaagcataacagcacctgggatccggtaagctagacgtatgacggcagtcaggctggactg

SEQ ID NO: 704920 - DNA, 344 bp, Homo sapiens
tagccacaacagggtcaatgctcgccttgcaggtgcccccagcgaggacccccagttccccaaggtgcagtggccactccgtgaactttgttctgcctgccacaatgaacgcctggatgtgcccgtgtgggacgtggaagccaccctcaacttcctcaacggcccacctctccccaagcaacatcatcctggacttccctgcagctgggtcagctgctcggacgggatgttagatatttgcttcctcttcagcattgtcgatgggagctttcgatctcgtaatcccgtttttaactctggaccctgggaagcctgagatgatgaagtcccccacaaacaccacc

SEQ ID NO: 704921 - DNA, 907 bp, Homo sapiens
gagtgctggaaatttatctttgacagaggaagaatgcttgtgaaaacgagttcttacgtgatctttatgtaacttagtttgccctggaagggaaatgtctcgtctctggctatgggacaaagcgggagaacgacagtcaaccatcttaatcataaatacactctggtagtgtcagtggctgagtatcaccgcaggatcgatgctctaaatactgaacgcaaggtgcgcacactctgcagacgcctccagattattacaggggaagacataatattcatgagcaggttgctacagtgaaagcacggacctggagtctgaacctgttttcgacactaatacctaagtgatcccagtgaactttagtgccagatcacattgaaatagcttaccaagcatctttcaccaagaacaaattggctagtccatggactcttgtttactggttacgtggatagaacatggcacaagcttgagaactctttatcgaacaagtgacaggtttagacgccccagtgctgactggtgattaaacgacggtgatggccaggtttggtgcgttagcatctgagcactgaaagtgagttgatggcttctatggtactggagagaccttgtcttctacatttctgtcccgggtacgaggtcttgaagtggaccgggatagtatgtttcagtccacggcgcctgaattcccagcttccgggtggacagaaggcacctgcgcttgcctgaggagatcctacaggacaagcctcttggtaacgttggatctccctgcacaaggaaatcttttaccaaagtgcaatcggcctcgaacaaccacctgtttaagagaaggcaccctgtgtaatgtgtactacacaccggctatgtgtcaccgtcaatgcagaacaatctccctcacacg

SEQ ID NO: 704922 - DNA, 319 bp, Homo sapiens
agagagagaaggtttttaagggaggggcttctcgataacttggggagataacgggaccgacccaaggaccacactcccaggggtgcattccgttgctccctcgggcaccacttctgggattacagtgtgccaggtcctttggaggccctaccccttcccattcattgccaccagtaagaaatgggggtcccctctttaaagaaacctaccaaggtttacatttgcacctagcctcaatagctacgacccctagagaggcagctagctggagctcatgtcccactcctgattctcaggagaaagatggatttaccccaaa

SEQ ID NO: 704923 - DNA, 250 bp, Homo sapiens
ggtcactcacggaccgctatgcacgccagcctgtgcaacagagcgagacatgatgatctgtcttaaaaaaaagaaaatgaccatatatgtgaggatttatttctggtctctccattcagttgattggtctttatgtctatctttatgtccttactgcactgttgtgatggctgtagctaaatggtacacttaaaaatggttaaaataggccaggcacggtggctcacgcctataatcttagcactttggg

SEQ ID NO: 704924 - DNA, 842 bp, Homo sapiens
tcctccaggggcttttatttcccggtcaaaaaaaaagcgggacaggcccctctgcctgaagccctggcaaacacaacacagaaagaccgggggatgggcgcggggagaggcacaggaagacgggcttctcagcaattgtgtcgcactgggtcccttgtttggtccctggctgggtcagggaaggcctgccggggttggtggcactgaaacgcctgggggaacaggcgccaggccagtggcccagggacggcacggacggaggcaataaattactgattggccaggcggggcttcctggttggccccaggttgggttggcttaggaggttgtccatcgagggctctatgggcgggttgtgggctcatgggcactgcccgcatgaaacagaaaaggcagagcgcaggacaattacccagccttccgtggagtggtcactgagggtgacttgagttttgggcaacttgggcttttcccaaagccgccggagccatctcaagaagcccgtgttccagggaagggggcaggcttgcccaggaccgtggatggcactgtgggagcagcagaaagcaacaccccaggtgtcccgtgggatcaaggggatacgccaccgggggaaagggcaccgggaggccaccatgcctcagtgacaggacacaaaggggagattacgagggcatagatgaacgcccccgaggggtaacactgtccaccatgtaagagggcaatcaaacgggcttaagaacggcgcacgcgagagagaacaggggggcgctctggccaagtgaacacacggaggcattggagcagaggccaggcccccacaaaggccgggaactcacag

SEQ ID NO: 704925 - DNA, 345 bp, Homo sapiens
ggaaaagttgcaagcattccctctgagaactggaacaagacaaggatgcccaatctcaccacccctcttcagcatagtactggaagtcctagccagagcaatcagacaagagaaagaaataaagggcatccaaatcagtaaagagaaagtcaaactgtccctgtttgctgttgatatcatttaccttgaaaacccctaagtcgactccagaaagctcctagaactgatagaagaatctggcaaagtttctggatacaatatttaggtatagaaatcagtagttcttctttacttcaacagtgatcctagctgagaatcaaatcaataattcatccccttttacaa

SEQ ID NO: 704926 - DNA, 962 bp, Homo sapiens
cttacgttgaacacgtgtgttcctagctgacactggactaactggatagttatatttggctgatgttcttaaccctactcctcaataatatctattggagagtcggtatcctcaaaggtggccactgctatagcaaatcgagcgttgggccaagccaccgagacctgtgtcacttctctctcgtggatcatcgtatagtggacggtacgagctgagtaagtcctctctgagatacttcgtatatgaatcagtgcggcccaagtgaagaatgcaagagagccatgcaattctcggtgagcagaagagtttgacttcttgagtggcagttatttttgctcaatcgcacaccgaattgtacatccccttgcggtgcaacgcattgattctctttgtccggggactacaggaaagaaaggacactggatgttcagaacattgaatagtgtacatgctctaaagaaagactgatgtaaagtaaatgaatgaaatgggctgacaggacttaatttacctaacaatgattaggacctgttctgcatggatgtgtcatatggtgtacactagcactgtaaatattggaatccgtgagtaatctcaggaattcaggagtatttgaactgatggggatattgaactatggtcaggagagaggagtccatgagtgttggagatctagtgatgggctttgtgagtacactttggttattgttgcaggttttgtgacctgtgaatatatgtaagttctctagtgccttgaaatgggatcggtgaggaaccgtccctttaaaagattttgacttaacgtggagggaggtacatgttcatatatctgcaaaatctgattgtgatatgtcaaactataactttgaagagtattgttggtaattaggattttctcacagggcgggaagcgtatttaatataggcactgagtgctaaactgattaagatcaagtcaatac

SEQ ID NO: 704927 - DNA, 778 bp, Homo sapiens
cagacggctgacggctcacactgtgccgtgagcgatggggagatgcaggaacactatgatgagtttgttgaggaggtttttacagaaatggaggagaagtatggggaagtagaggagatgaacgtctgtgacaactcttgggagagcaccctggtggggaacgtgtacgtcaagtttcgtccgtgaggaagtatgctggagagataggctgtgatttgacttgaataagccgttggtttaatggacagccgagtccacggccgagctgtcacccgtgacggactgtcagagaagcctgctgccgtcagtatgagatgggagaatgcacacgaggcggcttctgcgaacttcatgcatttggacatgcccagttttccagaagagctgcggcgggcaacgctgtatggccgccgtcgctggaggcgtagatcaggatcccgatcccgggagcgtcgtggctcggtctagagaccgtggtcgtggctggtggctggtggctggtggtggcggtggcggcggacgggagcgtgacgaggaggcggtcgagagatcgtgacagcgatcgtgggcgattctgagcgcatgccgatttttaccttatgtctgcgtagaaagtgtggtagtgaggtggagcaataccggttcatagggggaatttggtgtaaaaagagcaactgaaggaggatgatccaagggtgggttgctgagttaacattgggtcgcgcctgagcggttagcaaaccaagggcgggggggcaagggtttccgcggggggcca

SEQ ID NO: 704928 - DNA, 389 bp, Homo sapiens
gcacgaggagaagaggatggagatgaacatgaggaagctgactcagctacggacacgcgggcagctgaagatgatgaggatgactatgtccataccaagaaacacaagaccggctaggatgactacacagcaaaaaaggaaaagtctaaactaaaaaaaaaaaggccggcgtgacctattcaccctacacttcccgtataaaaatctaaacgcggtcaccttcaagtaaagaggcccgcccgcccaccgtgggcagcgccacccgcatatgacacgcgctctccaccacccaacccaaaccatgataatttgcaacaggggaggaaaaaagaaccaaaccttccaaggccctgctttttttcttaaaagttctttaaaaaggaaatttg

SEQ ID NO: 704929 - DNA, 455 bp, Homo sapiens
  misc_feature (88)..(88): n is a, c, g, or t
  misc_feature (112)..(112): n is a, c, g, or t
  misc_feature (124)..(124): n is a, c, g, or t
  misc_feature (126)..(126): n is a, c, g, or t
  misc_feature (138)..(138): n is a, c, g, or t
  misc_feature (150)..(150): n is a, c, g, or t
  misc_feature (169)..(169): n is a, c, g, or t
  misc_feature (172)..(172): n is a, c, g, or t
  misc_feature (175)..(175): n is a, c, g, or t
  misc_feature (374)..(374): n is a, c, g, or t
  misc_feature (410)..(410): n is a, c, g, or t
  misc_feature (445)..(445): n is a, c, g, or t
gcacgaggcaacgggagtgggagccccaggatttggggttgggaacgagattgcacggattgttttaaaaaaatggcagacaaaccanacatgggggaaatcgccagtttcnataaggccaagntnaaaaaaacgganacgcaggaaaanaaccccctgccgaccaaanagnccnttgagcaggaaaagcggagtgaaatttcttaagatcctggaggatttcctacccccgtctttttgagaccccagttgtgatgtggaggaaaagccccctgcaaaatggacacgagccccaagctgccttgtgaacttgggcactccgcgccgatgccaccggcctgtgggtttttaaagggaccccccccccatcgggnttgccaaattttccggtttgccccgggatattatanaaaattatttgtatgaataatgaaaataaaacacncctcgtggca

SEQ ID NO: 704930 - DNA, 497 bp, Homo sapiens
  misc_feature (210)..(210): n is a, c, g, or t
tcgcttgaggttgggagttggacagcctgggcatgtagcaagaccccgtctctacaaaaaatgaaaattagccgggcatggtggcgcatgcctgtagtcctagctactcgggaggccaaggtgggaagatcacttgagcctgaaaggttgaggctgcagtgaaccaagattgtaccactgcattccagcctgggagacagagcgagactntgtctcaaaaaaaaaaaaaaaattcatttcctccactcatggcaaacctctcacagctcccactcctatcgggggaattcacttcaaactttacggagaaattaaaggcagctctggtcatcttttcaccaccaattctacaaactggtctggatgggtcctctggttcggtcttcctttcattggttatcggaagaccattccggacggtcggatttctctactggggactcagatttcatctttccggcatctcggtcttccatatcattcttctcctcgctatc

SEQ ID NO: 704931 - DNA, 1089 bp, Homo sapiens
  misc_feature (88)..(88): n is a, c, g, or t
  misc_feature (112)..(112): n is a, c, g, or t
  misc_feature (124)..(124): n is a, c, g, or t
  misc_feature (126)..(126): n is a, c, g, or t
  misc_feature (138)..(138): n is a, c, g, or t
  misc_feature (150)..(150): n is a, c, g, or t
  misc_feature (169)..(169): n is a, c, g, or t
  misc_feature (172)..(172): n is a, c, g, or t
  misc_feature (175)..(175): n is a, c, g, or t
  misc_feature (374)..(374): n is a, c, g, or t
  misc_feature (410)..(410): n is a, c, g, or t
  misc_feature (445)..(445): n is a, c, g, or t
gcacgaggcaacgggagtgggagccccaggatttggggttgggaacgagattgcacggattgttttaaaaaaatggcagacaaaccanacatgggggaaatcgccagtttcnataaggccaagntnaaaaaaacgganacgcaggaaaanaaccccctgccgaccaaanagnccnttgagcaggaaaagcggagtgaaatttcttaagatcctggaggatttcctacccccgtctttttgagaccccagttgtgatgtggaggaaaagccccctgcaaaatggacacgagccccaagctgccttgtgaacttgggcactccgcgccgatgccaccggcctgtgggtttttaaagggaccccccccccatcgggnttgccaaattttccggtttgccccgggatattatanaaaattatttgtatgaataatgaaaataaaacacncctcgtggcatgaaaaaaaaaaaaaaaaaaaaaaaaaaaaaaaaaaaaaaaaaaaaaaaaaaaaaaaaaaaaaaaaaaaaaaaaaaaaaaaaaaaaaaaaaaaaaaaaaaaaccaaaaaaaaaaaaaaaaaaaaaaaaaaaaaaaaatggggccccccttgcccaaaccaatttaaaaattaaaaaattttaaaaatgcgccccaaattgggcccaaatggccaaaaccccccaaaaggggggcataaaaaaaaaaaaggccccggtttaaaaaacctcggaacgggaaaaacccgggggtacccaaaaaaaaacccttggaaaaaaaaccccttttcccaaagggggaaaaaacaaaaagggccccaaccaaggccctttaaaaaaaattgccaccccaaaagggcaaaggaaaattgaaagccaaaaaatttggaaaaaacccccgaaaaattttggaaaaaacgcctattttttaaacaaaggccccaaatgcggaaaaacccctaaaaacaaaaataaaacccccaaaaaggttaggggtttcccaatttggaaaaaggcccctttaaaaaacaggggcccaaactaaaagggaaaaaaacccttaagaggcaaaggcccatttggaaaccacccccaaa

SEQ ID NO: 704932 - DNA, 663 bp, Homo sapiens
  misc_feature (205)..(205): n is a, c, g, or t
ttttccggggttttcttaaaagacccttgaaagttttgcactccatgggtcccttctccaatagcttccaggggtattgggtctggtgagccacatgttcaaactctttagttcgaaatccagctgtcagctgtcccaaaaacaagatgtttcagggcctcaagctccaacttgtccgcccaaaatgaaattcctgtaccctganccagcgtcggtcctatcatgcatgcccctgcatgttatgtcgtacctgcagaaccatagtgtgtgattccatgcatgtagtgagactacaatgtcggggtaatccacagtcccacatgtgaccattgtgtatgtatctcctaccagtagtgtaacaccaactacccagactgtgtgcggcagactgagctggcactagcgttctgttggccacttggggacctgaagggtgcctcgtgggcccacttgcctgctttacccacaactgctgggtcctgcaaggaattatattccccagctgagtatgtgcaaggtctcatgtgtgacaactgtcttcacgcgtgtctctgtgtttgtggactggattcgcaaggtcatgagatgtgggttaggcccagccttgatcccatacgcgttagggagaacaaaacttcgtgccaaaataaatccatggttcct

SEQ ID NO: 704933 - DNA, 118 bp, Homo sapiens
aatgattcagagagtctcacagttttatctttgctccctagcaggtgcacacatagatatggttaggagggtgtgcaaaacccaggcagcagagacttcaggaccactggtcacagcc

SEQ ID NO: 704934 - DNA, 136 bp, Homo sapiens
  misc_feature (58)..(58): n is a, c, g, or t
  misc_feature (66)..(66): n is a, c, g, or t
gtagagatggggtttcaccatgttggtcaggcagatttcgaattcctgacctcaagtnatccaccngcctcggcctttatttacttatttttttttaatagacacggggtcatgttgccagccatgttgcccaggc

SEQ ID NO: 704935 - DNA, 491 bp, Homo sapiens
gcatagaatttcttcttacattgggggaggtggggagaaaaaaagaacgtgaagaggacccacctaagatgacccttgtgatcaaagcctgagggctccaagggtagtgcgccggacaggagaaccccacatcaaaccaatacttgccctgatgaggcagggtgactccagaagaggacttgtgataagaatgtggaaaagaggatgaacccaggcccactagccatagctgtgctcatgttggccacacagtaggtgacaagactaagttacctgcattcctagaggtggggcaagttcactttgggcatgtgggctagccagggtgtctatatggtaaaccggaacccagcatcatgcccaataatgaaactccagagcattcccagcaatggcagaaaatccatcatcatcacggacagctagcattcttctagaggtactaaccaaagcagttgtataagaggaagagataagttcaagtagtagta

SEQ ID NO: 704936 - DNA, 464 bp, Homo sapiens
caataatacctgtaggttcagcctgtgacaggcagagactgctggactatatagcatagctcctaacccaccacgccttccaaactattattttaccaaaagggcagaattagggctggtaatggtgccagactttcttagggctgccgctgccaactctcacccccagtgcatcctagttcaggaaaagagtatttcctaatgtaaatgacgagttgatgggtgcagcaaacaaacatggcacatgtatgcctatgtaacaaacctgcatggtgtgcacatgtgccctaaaacttacagtataataataatttttttaaaaagaaagaaaagggtatttttggccaggcacagtgactcacacctgtaatcccgacactttgggaggccaacgtgggcagattgcttgagcccagaagttggagactagcgtggacaacatggcaaaatcttgtctctccaaa

SEQ ID NO: 704937 - DNA, 434 bp, Homo sapiens
aggactggcagtatctcatgtatgaagagccaaagcgactgccacaaaagaaaaagttgacaaatgggacataattaaactaaagaacttcttcacagcaaaacaaactaacgggattaaacagagaacctacaaagtgagagaaaatatctgcaaactatgcatctaacaagggtctaatatccagaatctgtaagaaacttaaataaattaacaagcaaagagaaaacaagaatgaaacattaaaaagtgggcaaaggacatgaacacttttcaaaagatatacaaacatgagaaaaatgaacattatcacccatcactaagaaatgcaaattaaaaccacgatgagataccatcttataccagtcataatgctgttactaaaaactcaaaaaatagcctgggcagggtggtacatgcctgtaatcccagca

SEQ ID NO: 704938 - DNA, 918 bp, Homo sapiens
  misc_feature (906)..(906): n is a, c, g, or t
cgcccactccggctcggcggctctgggcctgcggcgggcgctgcgggttggagctcgggacgtggtcgtgggcgcgcagccagcggctccctgcccttcccctccgggccctgagtaccggccccccaccaaggaggagcccgaggtctccgtcccggcggcgatgctgccccgtcggcctctggcgtggcccgcgtggctgttgcggggtgctccgggagccgcgggttcttggggtcggccggttggccccctggcccgcagaggctgctgctccgccccggggacccccgaggtgccgctgacccgggagcgctaccccgtgcggcgcttgccgttctccacggtgtctaagcaggacctggccgcctttgagcgcatcgtgcccggcggggtcgtcacggacccggaagcgctgcaggctcccaacgtggactggttgcggacgctgcgaggctgtagcaaggtgctgctgaggccacggacgtcggaggaggtgtcccacatcctcaggcactgccacgagaggaacctggccgtgaacccacaggggggcaacacaggcatggtgggtggcagcgtccccgtctttgacgagatcatcctctccactgcccgcatgaaccgggtcctcagcttccacagcgtgtctggaattctggtttgccaggcgggctgcgtcctggaggagctgagccggtatgtggaggaacgggacttcatcatgccgctggacttaggagccaagggcagctgccacatcggggggaaacgtggcaaccaacgctggaggcctgcggtttcttcgatatggctcactgcatgggactgtcctgggcctggaagtggtgctggccgacggcactgtcctgggactgcctgacctccctgaggaaggacaacaangggttatgaacc

SEQ ID NO: 704939 - DNA, 156 bp, Homo sapiens
cctccacaccagttttccatggtcccatttcatcagcattccaatcggtcgtctgcagtcatcatcagggctggcaggttcagccacagcaccctcaacacacaggtcccatgggcacaccctgtggcttccaacacacacatgcaacacaccacc

SEQ ID NO: 704940 - DNA, 292 bp, Homo sapiens
  misc_feature (19)..(20): n is a, c, g, or t
gatcgattcggtcccgagnnctctgcatacgacacagccccgtgcgcgtctctcctctcataatcccctccacgtacgtgcgcgatcgacgatcacggggctggcgccggcgcgctggggctgccaccgacaggccccacgcgagcccgtgcatgcgccaccacccccccgatcgcccacgtacatactactgctatatatccttgcagcagcaaaaaattccatcaatttttaaaaagtagaaaaaccgttgcagagaaaaacagattcaagggttgcgatggactaaatt

SEQ ID NO: 704941 - DNA, 811 bp, Homo sapiens
ggggagaaatgggacccatgggagggggagtcgtcatcccttacacaagaaatagccactttcctttggttgtcattcttgtgatcctgggtgggtttctgtggcactcttttagaacatgtagcatcatcttagaggtctatttttaaaaaatgtgttgaagaggaaaaaaccattctcacgatggggcttaagtcattgtccaggaataagatgtggcgtggtgcccatgacatcaccgtcactctgcctaaaaagcactctagagctactgtgttcacgtggagaggcaaggataatttgcgaagaaaaaggcgcaggtggagagcccttgttcaccttgatagggtctagctgtgatagtaaatataataccggtgtttcctttggtaccagattgaggtgtcatgtgatgaggactgtaaacctcattttgcggttcctctgtttaaaacaaacatcttgaaggatgaactaaggctgtggtgcctgagcaatgatatgcaatgtggccaacagtgtctgttacaactctagcctgtcatatggacaaattcaacaagaactcaagaaattgtacctgcgaattatgcttcatgtaacaaggtggggaggggtgtctaggggtgggggaatttttcaaaataatttcaatgttctggccggtttcaaacaatacaggtggtggtttaatgtactttggacatgacaatttttgaaacataggggaatttttaagagaaaaaatttcgcgcccgcggagtaaattgggggcaaaaagtagtcaaaagaaggggacaaagggggaagg

SEQ ID NO: 704942 - DNA, 768 bp, Homo sapiens
  misc_feature (146)..(146): n is a, c, g, or t
  misc_feature (282)..(282): n is a, c, g, or t
  misc_feature (768)..(768): n is a, c, g, or t
actgatttccaggatgagcggaacacatatggaaggccttagcttatctttagcgcctcatacacccgttctggacttcagaaaggccagtgagtgggattaggcctcagagataggatgtagtccagtgaggatggcctagagcnttctttaattctttcctttgggtcacacataagaaacaattttccagcactgatgagtgttattaacatgagatgggatagaatttagttttccctatggctgtgcttcaaaaatagaaaagctgtcttttctctngaatgattgaatgaagctctggggaggaaaaggtggattggcagatctcttaaaggaagcttctccttctaggcactgttctaagggttaatattttagctccctatattaacctagttcaactaaacagtgatctgagtaattttatttttattaaggctcagatcaaaatgccattaacattgattgagaaaatcaaaggaatctttgatgcgagtggttaaattgctgaattatttcagtcccataccctcacagcatgagtacctgatctgatagacttctttgtaattccttttttgtttgagacagaatcttgctctgccgcccaggctggagtgcagcggtgtgatcttaaccattgcaacctccaccttccaagttcaaggggattctcatgccctcagcctcctgagtagctgggattacaaatgtgcaccaacatgcccggctaattattttgattttttagtagagatgaagttn

SEQ ID NO: 704943 - DNA, 1007 bp, Homo sapiens
gtggactagtaggatagtagctcttctacactaggggttgcgaacctggaggttgagacgcagtcgctcattagtcctgccctgtcagactgctctgtatctaggtccagtgagtacgtgaaagaagttttgagtgacaatgaggtccacattggcgcagtgatagactatgagcggttagagcttaaatctgctagatactttgagcgtgtcacatatgaactaaggcaagtctttagatgtgtacaatgtagtttgatgacaggtactgatgggtggacagtaatgagactagtaggggtcgtgtagtatcatgtaagttatatgaatggagtcatgggatgttggtttagggaaacactagggagacatgagtttagagctccaaattccttaccatatttatgtaaggtgcataagaatatacagtaggtgtcagatatagtaatgtgttgaacatttagatagctattttagtatgagtggaaaataagtcgaaggagatttaattatttgagtaggggagatcctcttcaaaaccgtagataatcacgttaagttgcctttttataatacgtatattttactgaatgggaggcagaatgggagtcaattttgtgagtagtttccttttatgataaatgaaatcgatcttgtgttcgaataatatggagtggtctgatgatgaaatagttcttgaaaagtccgagtgtgaactatgaaatatgaagagcaggagtgatttggcttatgctaactgtgggaagctccgagagctggttcgggaggcagatgggattgtgtgaagggcgctgatttggggtagacagaggttgcaagtacattgcgatgttccgtgtttttggccacggggcggaagttgggggggggggggtgaaaaaaagggtcgcaaagttttggggtaaaaggtagacaactggtgtggggaggaaaatttttttaactgctcgtgttgatgatgttctcttcgtaaggaaaagaaaagc

SEQ ID NO: 704944 - DNA, 681 bp, Homo sapiens
ggccattctcctgcctcagccttccgagtagctgggactataggtgcccgccaccacgccaggctaattttttgtatttttagtagagatggggtttcaccgtgttagccaggatggtctcgatcttctgacctcgtgatccgcccgcctcggcctcccaaagtgctaggattacaggcgtgagccaccgcgcccggcgagcaaattttaagccaagaaatcgaatgtgccagaaacccaggaaccacccagactcttcccatatgaccacttccccacatctccaccttccttacttctatgatgcccctggcttcagatagaaaggccctgaacatctactggggttctgagaagaatatcaacactttcctcagagaattgtctatctgtaagatcatatacttgactggaaatggctttgctaactggtatatttcattcatttgatcaacttaaatatacccttacaaaagaagtttataccaatacatcaagcgtacaaaagcgtgaacaatagtgactggaaagccagatctgtaggcctcatgctccaaatactgagacatggtgatttttttcatggtgcaaacaacttgattatgaactctgatgaaatatccgctaaaaatatggggactatttatgacaaagcagttgggaacactcgatattgtattc

SEQ ID NO: 704945 - DNA, 795 bp, Homo sapiens
cttagtgacaaggggtcttggtgtgtgtgtttagttgagtccatgattaatttgttcaattagtgacttgactatcagtcaaaccagaatatagcaaatctagtaaagaataattaatagtagtaaagcgttctgaaacaaataattctggttctctggtgttaacttttgtgaggtttttgttgttgttgttatatgtttatatagtgtccagtagtgtctttgatatgtgtgaattaattttatgccctgaaaatcagcaccttcaaaaaggaactcgattttttttggttattgttctctttctggagaaaaaaggagctccatttaaaagataaggcctacatacctagtacttttttcttcgttgggcaagtcaacttgttacagatgggtcatcttcaagagccagctccggtgtcctctagctatgctgcactcatttcataccaagcagctggaactgagtcaccagcccagcttcctccaattgttgcaattgtactgaactacattttaatagaaattaagccactcaagtctcttaaaatattagctcctataggattcctccttttcattcgtttcttttcctttgggtatagtatcatttccttttcttcatctagaagaaacactgggaaacaacagacttaactttatttcatctgaaagacttaccatgatacatgagggtacacaatactaaacccaaaacacctggacatatttgcccctgttgcaggcatgagtctgtgcacttcgctctcgatgtccgtacgggacatattcgag

SEQ ID NO: 704946 - DNA, 111 bp, Homo sapiens
ggcttccctttctatgcaagtgtaaattaatgaacagagaaggtatttcggaaatcggtaatacatttgtcgacaggatttgtataatctatacagcattggaaagtgtcg

SEQ ID NO: 704947 - DNA, 195 bp, Homo sapiens
  misc_feature (33)..(33): n is a, c, g, or t
accgtgactctgtgggttttggggttggtgtcnccgtggtggtggtggtgctagggtgtcagtgattgtagtctgtgtgccggtgggtgttggggttggggtccccgtggtggtggtggtgctgggtgtcgtgggttggcgtctgtgtgccggtgcgtgttggggttggtgtcacccatggcatgtgaatcacaa

SEQ ID NO: 704948 - DNA, 884 bp, Homo sapiens
  misc_feature (2)..(2): n is a, c, g, or t
  misc_feature (84)..(84): n is a, c, g, or t
  misc_feature (159)..(159): n is a, c, g, or t
  misc_feature (214)..(214): n is a, c, g, or t
  misc_feature (216)..(216): n is a, c, g, or t
  misc_feature (345)..(345): n is a, c, g, or t
  misc_feature (348)..(348): n is a, c, g, or t
  misc_feature (365)..(365): n is a, c, g, or t
  misc_feature (384)..(384): n is a, c, g, or t
  misc_feature (395)..(395): n is a, c, g, or t
  misc_feature (403)..(404): n is a, c, g, or t
  misc_feature (407)..(407): n is a, c, g, or t
  misc_feature (412)..(413): n is a, c, g, or t
  misc_feature (417)..(417): n is a, c, g, or t
  misc_feature (423)..(423): n is a, c, g, or t
  misc_feature (674)..(674): n is a, c, g, or t
  misc_feature (696)..(696): n is a, c, g, or t
  misc_feature (700)..(700): n is a, c, g, or t
  misc_feature (739)..(739): n is a, c, g, or t
  misc_feature (782)..(782): n is a, c, g, or t
  misc_feature (822)..(822): n is a, c, g, or t
  misc_feature (876)..(876): n is a, c, g, or t
tnggaggagcccggggcagggaagggcgggcggtgagattgtcaactcttcatcagggaggctgagaggaggggagtgggaatngtcactttaatgtccaggtatcaagccgcatcctcttcacagctgagccctcagcctcaggctctggggctgggngcagaggcccagtgtgggcccgaagtccccccgtccgttatcccggtctcccgtntnataggatcccccggctgggctgctgagaccatcgccaggctcagggcgggcagctgggaacacagctggagggggaggcgcagggctgcgctcacggcttggggacaccggttctgacttgatgctgangtnggggtgggtggtgattnttagggcagcacccacgtngggcagggggntgcttggnntgnggttnntganattttntagggaccaggtgggatttttgctgaggtggctgttgcggctgctgaggctgctgttgctgttgctgctgttgctgcggtggctgctgctgttgaggctgttgcttctgcggctgctggggctgctgttgctgttgctagagaagtaacattacctagcgacacaccccaggtgaactaaaggctggtaaggaggagagctctgcactggtcaactggtaatctgtgtcgtaggcagttggcatggaaganaaggggaggccctggctgagtnaacncggcgttgccacagaaaccactggggtggtgagcaaatnaatagactgggagacccaaggcgctgggcattgttcagatctnaatggtcctcagtcaagtaatgcattaaccctttcctgcntgggaagtaatgactcgcaggtcgggctttcggctggggggtccaagctgggtnctgtgggt

SEQ ID NO: 704949 - DNA, 388 bp, Homo sapiens
  misc_feature (315)..(315): n is a, c, g, or t
aatatggaccaatagtattttttaatgttcttcctctcacactcacaaagggagtcagaatggctgagtttgagtcatttgccccctgccaggaaccacggcaactgattaacagttctcaaaagactgcctgtactaggagagagtaggtcccaaaggcaactttaaagttctggaaccaagacggagggcgaatatgggggcaaataaaaacaatagatacctcctaaaactctttttcataagtgttatttaaagccatcaaactgtccaggtgcagtggcttatatctgtaatcccagcacttttggagtntgagatgggaggattgcttgaggccagaactttgagaccagcctgggcaacatagacccctgtccctacaaga

SEQ ID NO: 704950 - DNA, 278 bp, Homo sapiens
aatttttggggggggggtcccccggggcccctttggggggggggggggcccctttcccccccttttgggggggggggggcccccttggggggaaaaaaggttttcccccctttttccccggggggcccccccttttttgggccctttgggtttttttttttcccccaaaagcaaattttttggccggggggaatttttttttttttttttttttttttttgggggccccccccccggggggtttttttggggcccctaacccggggggggccccggga

SEQ ID NO: 704951 - DNA, 266 bp, Homo sapiens
gttacctccaccgtgaagtgcaagcagccggggtctccctcccacagccaaggattagccatgagggactgtgctatacggcccagatactatgcttttcccacggtttctgcaatctgcagatcaggagattcccttgttgcctacaccaccaggactttgaattacaaggacagcactgggtggatgtctgggcagacaccaagctagctgcaggagtattgtttgttagtatgtttgttattcgtttactttttttaatgcca

SEQ ID NO: 704952 - DNA, 454 bp, Homo sapiens
  misc_feature (27)..(27): n is a, c, g, or t
gtgatgttatccccaacacttacggangccagggcagaaggattgcttgatgccaggagttagagtccagccttgtgaacatagtgagagcccgtctccacaataaaattaaaaattaagggcaggcacggttggctcacgcctgtaatcccagcactttgggaggccaaggcaggcagatcgcttgaggccatgagttcgagaccagcctgggcaacatgggaaaagcccgtttctactaaaaatacaaatattagccaggcatggtggtgcgtgcctgtaatcccagctactcagaaggctgaggcttggagaatcgcttgaacccaggagggagaggttgcagtgagccaagactgtgtcactgtacttcagcctgggcgatagaacaagactccacctcaaaaatatatgtatatattaaaaattaaccaggtgtggtgttgggcgataa

SEQ ID NO: 704953 - DNA, 797 bp, Homo sapiens
cgaccgttgactattctcgtacaaaccacaaagacattggaacactatacctattattcggcgcatgagctggagtcctaggtcacagtctctaagcctccttattcgagccgtagactggtgcctagccaggcgaacgcttcataggtaacgcaccaatatctacaaccgttgatcgtcacaagtcccatgcattctgtaataatcttcttcatagtaatacccatcataatcggaggcttatgtgataactgactatttcccctaataatctggtgcccccgatcatggcgttgtccccgcataatacaacataagcttctgactcttacctccctctctcctactcctgctcgcatctgctatagtggaggccggagcaggaacaggttgaacagtctaccctcccttagcaggaaactactcctcagccctggatgcctccgtaagacactaaccatcttctccttacacctagcaggtgtctcctctatcttacggggccatcaatttcatctcaacaattatcacatatgaatccccctgccataatcccaataccaaatgcccctcttcggctgatccgtcctagtcacaggcagtcctacttctcctatctcgtcccagtcctagctgctggcatgactatactattaacagaccgaaactcgaagagcacttcttcgacccgccggagggaggagaccccattctataccaaactattctgattttgcggtcaaccccgaagttattattcttatcctaccaggcttcggataatctcccctattgtg

SEQ ID NO: 704954 - DNA, 958 bp, Homo sapiens
  misc_feature (3)..(4): n is a, c, g, or t
canncggacaggtccgagcggaacaacaggcagagtttatgttcacctaatggaaccctctcaatggcactacgagtcgtcaccattagctgtacaaaactaccgtgagcaagcggctacgtaccctatacagatctcgtggtggggacaactccgcatggtgcgccaacacggaagcttgatgtttgttacaaacaggccgatcaggggctacaccctttaacgccccttcgtgtcattgggcctatacccaggggggcacctctctattgcacacaccctggggacgatgcattcatcatcccgcaggagcagccaacaaatactccccctgtgtacccccctgcgccttacagccaagcggtttttttcgcaccccgccgcaggtgaggtgttctggaagcccctttcatgaggcctcttccgccttcccttacagtgttctgctgcccgctgtaaaaccagcctttctttcgtgtttccccgggagttttgcccctctcttgtggggggtcttccaaccaaagcgtgttcaaggtcctgagtgtgcttttccagatgatcaccatgctcaccccaacctttttttgtggcgcacactctgggtgcctcccacccttcgtttttgtaaaccacctgggtcgacccatttttccgggcggccccaaatccaaattgtgcaagaaaaaaacagggtttatacctatttcgctctcattatcattcaggcagtttcatgcaccgtacgggaggaaccccggcccctgggccaggcctcaccgaagactcgcgacacccctggtgggacgcaccactgtctaccgccaccgcccgcgaccggagcaaacgagtgctgggtcgggcggccccctgagccggctcggtaggtatgcatgggaggggataaactgggggcaccgggggtaaaaaaaccaagagggggggcccccacaaaaca

SEQ ID NO: 704955 - DNA, 405 bp, Homo sapiens
  misc_feature (10)..(10): n is a, c, g, or t
  misc_feature (18)..(18): n is a, c, g, or t
  misc_feature (49)..(49): n is a, c, g, or t
  misc_feature (401)..(401): n is a, c, g, or t
  misc_feature (403)..(405): n is a, c, g, or t
cttgagtatncctcctanttcccaacccgggtttagaggtcacacagtncagtttgagataaagtagatctaaaaatctggtttttctagtctaaccctagattggtttgcactaaactagtggtagttctcagcctgcccagaggagtgaaatatagaatgcaggcacatccccttcctgcaatgagatgaccacaccacacaaatgtcatagcactgagaaggaaatcgtttacatttcaaagaaataaaaccctatataacatgtaaagaatattagagttggccgggcgcgggtgtcacgcctgtaatcccagcactttgggaggctgaggcgggcagatcacgaggtcaggagattgcgaccatcctggctaatgcggtgaaaccccgtctctacncnnn

SEQ ID NO: 704956 - DNA, 1249 bp, Homo sapiens
aattggggcacgaagcggggctttgatgacccgcaaagggcgaggtcatgcatgtgacgtgtggagcgaattaagtgaaacagtgcaaggtagttagacagcaccgatgtgtggcgagtgccttaagggtctgtggtccttgtcttgtgctggtggtcttttggtgcgtcgactgaggccttggttctgttgtaggctggtggctactactgtgtggcggtgcctgctttgtggaaattgccttgccctgctgcgctttcttgcccagtgccgcattggggtgcatctgtaactactaaagcctacctactacctagcccctagtttgtgggccatacaccatacacactgtaagcgcctacagactcctagataactagtcggccattgggacactagtgataacttagccattaacttaggtaccagatactatttcctgggttgggaagtgtggaggcaataatgttaccttaggcaacaacttgtgtggtagtttgcgtaggtaaacattaaatagctgtgaagtacagaacggtaacttagtgaccaatcctaagagcttacaaagacaacttggcatatgaaatgaccaggacttccgcgaactattggacaaccatttgatatgtaaaccctggatggagcaggaaacgacatgagaagccacaaaggggactaaggaccatgtggcgccgcaagcagcccgagggaacctagaacggccttatgtggaagagtggacctgattgccatagcaagaagagataccctattccgccagagccgtttacagaagtttgttcaaacccgacataggtagagttccaaaacacgatgatgttaattacgagcagtcaaaacatcagcagtgagaggtatatcaccaggttagggcgaaactattcagcacgaagcgattatactcgataaatggaaatggtcgtttggctgctactccaatagtcaaagacatattatacgccgaagtgtgggtgttggtatggcacggaaccattgtcgttatgttcgataatcataaagggaaatcacccgccgaaattaccgacagacaattggacctcctatataagatagctttgcgtttgtattagtatgatcgtatggcgatccccattccccataaggatagagtctcagaacgcaattacaggtagcccaggactgatatacaactattgtgggagtatatgtgagttgctgaagtactgcgcagctaggttacaca

SEQ ID NO: 704957 - DNA, 192 bp, Homo sapiens
cggaccggactctgggctgtgctacacgcctggctggtttttgtaattttagtggagacaggattccgctatgttggccagactggtctctaactcctgacctcaggtgatccacctgcctcggcctcccaaagtgctgagattataggcgtaagccaccgtacccggccatgcgtgattcacttcttatta

SEQ ID NO: 704958 - DNA, 252 bp, Homo sapiens
attcccccccccctccccggggcaaaaagtaaatttttaatccccccggtcaaacggccggggttgaggccccccccccctttggggccgggggggggggggcttttggggggaaaaatcccccccccccttttctaatttttttttttttggggaaaaatcccctttgattttttttcccaggggtcaaaaatttttgcccaaattttaaaaaaggccaaaaaagggttgggggggttgggcccctgggga

SEQ ID NO: 704959 - DNA, 645 bp, Homo sapiens
aaaaaaaaaaaaaaaaaaaaaaaaaaagaatgtcctcatgatggcctcaagcacattggtccctgaagagagtcaaggaaggcccactttactctgcactgcaaagcaggcaggtggacaggaatctgagaagtggattcagtgagaggcattgacccaaaggattttctgcctaatggtcggtccagcagaatattaaactgagcacagcatcctgttccctgaaaccatctggttggtcagtggggaatgttcttgtctcgttaaatgtcctcatgctactgtcaagatatcctgttacaaaacgtcataaaccaggtttacaaataggccaggtgattgtggaatttctccttggcaatgccttagctatgggcgtgcgattagtgtgcaataatcacagtgttccgggccacttgagggataaaatataccttaggtgattaactgttgtattttaatgtgaatatttccaccaacattaaacagtaactccatgagttttctcatacctgttacactctggagttgcaacaagctgacatgaagcaagttgcaacataattatcgtatttggttcctattcacagcaagggttcttcaagctgtacgtggggcagtcttcccagctgttgtactgggggt

SEQ ID NO: 704960 - DNA, 614 bp, Homo sapiens
agcttcaagctacagacataacatcactgagacgtcactgaccttggactcgggaacagatgagcacacccagctctcacaaacacatccccggtgctgattttaccccatccagggctgggcacatgacccaaagctgccctatgggagttcctcagggccatcagaggagactgctccttttcttaggcattgctaaatagaatgttagttggggactgccagcagccatcttgccagctctagagagagaatttggttgagagggggagaaagggcacccatgacatcctctgaacccctgaagccagccatacctgaagctggtgtattcctggactttccaactacacacatctctagcccctcttctttgcctaagtagtgtgggctgagtttctgccacctgccaataaaatgccaagaataaaaaaaatgggtcacccattcaaggaagccaatctaatagatctggctttatcttgattgtggtggtttcccaggcatatgcaactggtaacattcactaagttgtacactttccgttactgcagcttcttgtaagtaaattctagctcaataaaactgttaaacatataaaaaacaaaaaaaaa

SEQ ID NO: 704961 - DNA, 854 bp, Homo sapiens
gcacgacaccgacatggcggctgagcgccggatgcgtgggtccgcgggcccgagggtggctccgtggatggaaacgctgggaatggtagaaccagtggtgagcttccgtcgtaggttacgggcggctgagcatctctggtgggccgttggtcgacgggacagttgcgaagcgggagacacaggaggaccgtcaagccggcgtgtagacttcagaagtgagagccgaggtcactgatgcgaagttaggagatgagatgcacgcagctcactcacaatgctagtggagacgcgcgttgggatcaagatggactctgtagacgatctaaaagtcaccgcttgcgaagcgccagatcctattcgtcctctgctccacatgagcctaattacaggcatggtctgtaggacttgggtctggaatcttcgttaccatggggggggcactcctcctcacaggggaagtgaagggaatgttcagcaaggaactgtattgggccacgcgtggcacgcaaaagacaggaaaccggctgtccgggcacaaggcggcgaccgagtgctctacaacggggacaatgtatgctttggcctgatttccgttcgaaagctacaccgaattggggtaccaccgctcggtgcatctcagcgcgtttgtgtgtaaaggtagcataccaaaggagacagcgttcgggcgctacgcgtgcgcgtattgcactgtggcggcgggccgatcgtatgcgcattcggccctacaagctgcttcgcgtattcgggctctccctctggtcgctgccacgcaagggctgtacctgtgggagagggtagagcggaagggtactccccggtggcacattgggcca

SEQ ID NO: 704962 - DNA, 985 bp, Homo sapiens
gtaggaggaccacttgagtccaggagttggagaatagcctgggcaacacagcgagacctcatatctaaaagtgaaaaaaaaaaaaaagggaatttcaaaaacgggacaaaggaagggagggaaacacacaccacacacacacacacaccacacacacgggcacacacaccaaaacacaccaaggggaggggaaaaacacccccacccacccaagggggagggaacacacacacaacacacacaatcacacacacacacaccattcgtgggcgtaggacaacggtgtgccaacacagcgttaaggccatcacaagcaacttgggggggccccaggagaagggagcaaaatcatcattgggggccaggcaccgggtggtgacaaaacaccccctgtctcttaggagcaacaactaggccaaaaagtgggcgacgcaacaggggtggcaacaacccgtgtgaaaccccccacgcatgaggagcacgaccgtagagggggcgagcgcacaacagaggacgggaccaaaaagtgcgaagaccacctcgcgggcacaatgggggggaacccccctgtttgcggcaaaagagaggcaaaaaaaccgcggggctaaggacggaactatgcagcgagtacacccacagagggcacgagacgacggacgagcacaatcttgcgtaacacccggggagggtgaagtgtcgccagctaccagaataatcagcacagggcatccaacccgtggtaacagatggagcctccatcctaagcagcatgaatacaggaaaaaaaaagggtgcgcgcacgacgcggaaatcatcaaaacacgtggtggacgacccaaaatattggacggtcactgcttacaggaaacaggagagagtggtgtcccacaaaaccgcgggacgagttaaactagggtggcaggacaggcagtagccgcggagcggaagacacacaacgacgcacgaacacgcagccacataggcg

SEQ ID NO: 704963 - DNA, 802 bp, Homo sapiens
agcggggtcgtctcgcgcccggtcccgctggtcgctcgtccagccgcctcctccgcgcggcctgcgcctcaaggtgctctgcctctgtgccggtcggtccgtcgtccggcgactgtgggcctgccagtcggcgccgctccgaaggcccgtgtcagggccgccccagtgtcctcctccgttctccggccagacccagcgcccgcggaagatggctggaccggggagcaagctggtgcagagaagcccggcgttggccgagcaggcggagcgctacgacgacgatggccgcggccatgtaagaacgtgacagagctgaatgagccactgtcgaagtgaggaacgaaaccttctgtctgtggcctacaagaacgttgtggggggcatcgccgactcttcctggagggtcatcagtagcattagagcagaagacatctgctgacggcaatgagaagacgattgagatggtccgtgcgtaccgggagcaagatagaccaaggagtaggaggctgtgtgccaggatgtgctgagcctgctggataactacctgatcaaggaattgcgagcgagacccagtacgagagcaaagtgtctaccgtgaacgcatgcacgggggactaggtaccggtacctggctgaagtggccaccggagagaaaagggcgacggcggtggagtcctccgagaaggggctacagcgaaagcccacgagatacagcaaagagcacatgcagccacatcacccatgcgattaggcctggctcttaactactccgtcttctactatgagatacagaacgcccaaa

SEQ ID NO: 704964 - DNA, 147 bp, Homo sapiens
actccttactttctttctttctttctttcttctctttctctctttccttccttccttccctccttccattccttctctttctattctttttgtactatctttatgctgtaatattctatgaaggagagggtgatccctctaaagtta

SEQ ID NO: 704965 - DNA, 541 bp, Homo sapiens
atatctagaggatccctgcacggtagatcgtcatcatcattagctaataggagctatgtattcagcacctacttactagccaggcaaggtatatgaagtgctaagcacaggacctattacatcataagctctcaataactgatgactacttatacagagatttaacttcttaaaagagcttagaaaaggaaactggaacgaaacagaagttaactggaaactcacaggaaactgaaacagaagttaaccgggcaaaaaaaggggaagaacataccagagtggacattttagagaatggcaatgtataccaaagcatacaagtgaaaaaaagcacagtgcattcatggaagtgcaagtcatctggcatggctagagagcagacaacaaatatagacagagcaggaaatgagggtaaaaaggcaggcaggtcttggtatacaaagaaagatgcttagagtttatcctgtgactgagagaagccaaggaaaacttttaaacagggaagagaacacaattaggtgagtgtgtcaggatgatcaat

SEQ ID NO: 704966 - DNA, 196 bp, Homo sapiens
atagcctggaaaaggcggtataaggcgttggacagaaatcatctcttatactcaggacaaaataacattagggttaagggggataagagagaagtattataaaagagaaaaaaaacaaatgtaatcctccgggcaagcccagcaaaattaccggaagacccacttatatctaaaggcaatataggtaaaaaaatag

SEQ ID NO: 704967 - DNA, 301 bp, Homo sapiens
  misc_feature (109)..(109): n is a, c, g, or t
  misc_feature (250)..(250): n is a, c, g, or t
  misc_feature (278)..(278): n is a, c, g, or t
gaggccctggagagctatctatgctgagctctagaatgctgagtcttacggctataagccgattgcggctttgaagtctgcttcgctctctgcttgggacgagcccttnaaataaccgaggggaggatctgattgctggcacgataaatcttcttgcttctcttgcaactgggcttgggagaatcacgagcaatgcgtgcccgcctgctcggaacccgcaccaaattccggccctccgggcaatcggaancagcaaagctttttacaccactaatttngcctatgacgcttaccgctggca

SEQ ID NO: 704968 - DNA, 806 bp, Homo sapiens
gggctcaccaaccccgtaactacactctagaaggaagctacgtgtacaagtgtctacatcacagcacggccgccaggaccagatacagcaagttgggaatcatggactagtcccattccttgtcagtgttcttctctaaggcagattctaagacacacaaaggaagctgtatggaccgtgaccaactataccagctggtcgaacagttgaacagatctcgtgtaccgttgttcagctgtggcataatagaaccagctggatgtacctacataaactgcagagaatgataccaagatataattactggtttatacctggatgccagtgctcaaatatactattcaggctgctgagaaagtagggtgaaaactgagaaagcttagtataatgatttgaagaatcgtgtgaggcttaggagcagagacattgaagcatctacaagaagccaatgaagagagtgagtcttgtgtataaggcttcgttaagcttaattgagaagtatgttctctggtagaggaagaggaagatcacacgttgtaccagaactacctactgaaggctacactttccaagttcaggatggggctcctgggacctttaacttttagatcatgtagctgagacatagaatttgttgtgtactacgtttggtattttgtctcattgtttctctactgagaactctttcttaaatgtggtttgttacttgtagcactattacactgaactctacgtgaactgttccaactgtacatacatactgtatgaagctgtcctctgacaggttcaaaactacccgattcttt

SEQ ID NO: 704969 - DNA, 272 bp, Homo sapiens
gactgtaattacatggaaacttccctgtgaatgaatgtgcagcatctctcgccttctcctctgtgcttggtggtcttttggtctctgtctgtttttctctgaatcttctgtctgacctctcttctttattcagctgtacctaatatgttgttaaacatattcattgagtttgtttccagttattgaatactttgactcaagagcttccgtttgtttctttcctggagttcttacttctccattgagatagtcaaccttgccttctacctccg

SEQ ID NO: 704970 - DNA, 173 bp, Homo sapiens
tatgcgtggccggcctgaccacacaggtcgttgttctttgttgagacggattctccgccgatctgtccgattacgcccatgaaatgctctaactgccagcagggtgctctctttgctgacgtgcagctgctctcgtggtcgttcggagataccgacgccttcgaatttcgata

SEQ ID NO: 704971 - DNA, 85 bp, Homo sapiens
taagggggcgaactgacctcaggcatgttttgtaactgtagagcgcctgccattaaacgtgtccgctgctgtggcgacagaaaaa

SEQ ID NO: 704972 - DNA, 218 bp, Homo sapiens
cacgcgcagcgggctactaaaacctataaactcttacaattcccccgttttacctgtccaaaaaccggataagtcttacagattagttcaggatctgcgtcttatcaaccaaattgttttgcctatccaccctgtggtgcccaacccgtacactcttttgtcctcaatacgttcctccacaactctctataaacttttctcttagaactgttttcact

SEQ ID NO: 704973 - DNA, 180 bp, Homo sapiens
tggggtttttttgggcccccctttagaaccctgttaggggacctaccccccctttattaaaggggcccttgtgccactgttgtcattttaaaggcttttcctcccctgtgctttttaatggggaattaaagtgaggagaaattaaaaactctgagggcgttttatataataaatttgtta

SEQ ID NO: 704974 - DNA, 225 bp, Homo sapiens
attttctgggctgtggggggtagaattggtgcttaaaaaagaaaagcctccccccaatataaattactaatactatgaggcagttgttttattttgatgatcccataaatacctttaaatctacatccttaacccatgattttatagtgggaaaaaaataaggtctgccttttttaatgccccctggccctgaaatgatttttaaatcagtggcgcccccccata

SEQ ID NO: 704975 - DNA, 879 bp, Homo sapiens
gtcacaccactgcactcctggaggggtgacagagcaagaccctgtctcttaaaaaaaaaaaaaaaagaaaagaaaaataaaatgtccagatactacccatggtttttaaaaaggctacacaggtttcacacactcaccagcagtaaatacatacattctttcaataacatttgggtgaatatcaaataagtgggatagtaagtacttgtaaatttggtgttggtgtggataagctacatggtggcttaacttctatttcctggattacttataagggttaatggattatgaaattccctaatggtttcactccggagttattttcttaggcctggcctgggggtattttaacatctttttattccaagggcgctttatttagaagttgggttggttacccatagctctggtaaacaggcaacgtagctggatttccttggtggaagttcttataaatttgacctggatctgggcagttgaaaaaaggggaactggcaaaatttaacaggtgtggtaatggacaaatcactaagttggtttaacaagttgtctatgtggccaggtatggggctaagttgacgcatataatccaatggcgtggacaacttacaacgtgatttatatagacatcacacggggggggagagggggggtagaaacaaagcctggcctgtgcgcaaggtgagtggcagcgggccagtcaaatcatggacctctggcccgggggcaaggcaactgggtgcgcgcccggaaaggggatacggggggccaccagcgggcacttgttcacagaatgggtcacattggagaggggagaactgagcaaagggccctggtcaacggtgggggggcagcccctagtggaagacggagaaaccg

SEQ ID NO: 704976 - DNA, 239 bp, Homo sapiens
  misc_feature (202)..(202): n is a, c, g, or t
  misc_feature (221)..(221): n is a, c, g, or t
taccccttttactctagtaaatataatgagtttcctaatgttaacccattcctagtcccagctacccaggaggctgaagcaggataatcgcttgaacccgggcggcggagattgcagtgagccgaggtcatgccactgcactgcagcctggggcgatcagagcgagattctgcctcaaaaataaacaaataaattttaaaantaaataaataataaaaggntgtgttaggacaatgtaa

SEQ ID NO: 704977 - DNA, 843 bp, Homo sapiens
ctaaagaaagatcacgttgatgaatgagaacatcctggccaggacccgatcgatacgatattctgtgcaacgatcgtatgatgtgtaatcataatacaaacgtgtagctgtctgacagttgaacaacatataatcacaactgagaaaattaccagaaaaataactcaaaaaatgaagaaaaagagaaaaaaatatatctccaatataaaatgaatataccaatatataatgcaagaataaggatgatgatggtcacagtgggggagctgtgaagtaccaccgctggtctaatgcaaaaatggacgattgcctaacaaaggacccttttaaagccctattaaacaagatgtgacaacaaacggaaaacttcgcttatgttgcgaatttgttcccgtataagaggatatatctggcaagctatgcgtgccatccctcagactttgcggaacgaccccagggcacaatgataagacaatactggggctgtatgtgggtgaccaatgaccccaaatttgatgtgtcgtgaacaatccggaagcaaggttatgtgcaacgaggtgaaactaactgtggcgtcgacaaggtaccttaggccatacttgcgggccttatggaatttggaccgaaagggggcaaacctggacctggggaagcgggccccgtcttcgccccatttcacctcgtcgcggattgcattcccctggattgccaggcccaacttctattccctggacttctccccacctgccatgttccaaacacgggctgtgcacaacctggcgcttacctcagcaacgccttcactggcggggaccctggcctcctagcgacagcgctacttac

SEQ ID NO: 704978 - DNA, 1144 bp, Homo sapiens
gctcttgttcttttgtttttttctcgaagagagcgacaagtagctgcaggaagggtatcgacgaggagaaaatatatcggcgcgctttttatatatgagatgtgtggccaccgacaactttcgcgaaaaatcaaatgtgtgcgcacccacgagcccttttttcccggcacagtgacaaaattccttgaaaggttccaaggcccttttctggaaccaggggtcccaaagccacttgcgagagagaccacaactgtcttttgggcggagagcccaagatgcgcactactggtagcgcgccctccggtagagcggctcccctacgggattttggggtcccctcttcaccaggccctttatccttgcgggctaccacattctccggcctacgggggcactttggacgcgcccgagtacacccagctcctcggttttgcgccaaaacctttaggcccagatgtgagattgttcccaaagcagttggagcaataggacagtagaatagttgttcccaggaccaacttgcccccggagttccagcgtatttcgcggtaatgtggccaccacgtgtgcccctcgggagccacggccaactgttatggccgacttctgggcgtgaccgtacacaccattttctaggccctccacgctgtcgtcccaagcccctggatccccagttcttaacagcggccatcccgggatccaccgtcatctgcgggtgacatggactcagacaccttctaaccatatgtgtgctccatcacaccaggtataaagatggcctgtgacccaccatctgggagagcccccgagatgatgataagagaactggcccctgggagccccacttgctctcgtgtctcctatcggtgccttcgagagacatttgtctttcgccggcgatacaggattcccctgggaaaagccccctcccagacgggtggctcggtggtctcaaggctcccaccatggcccaccgggagcttacttaatgatgtaccccccgacccacacgcccgtggtacaccccgtcttcccgtgagaaagaaggttctggctccccgggtgaatctgactttttgattaaattttgccttacttaaaaataaaaccctttttaaccagtttaaaaaaaaataaaaataaa

SEQ ID NO: 704979 - DNA, 114 bp, Homo sapiens
  misc_feature (5)..(5): n is a, c, g, or t
caacncacctggagacaggtgcagaagattgaagctgattctcgcaccctctgggcccactgctggtgccctttactgcagggtattgcctgcctgtgctgcgatgcccggcgc

SEQ ID NO: 704980 - DNA, 779 bp, Homo sapiens
ggcgcgtttggcaatgataaccaactgcagatcatctcaatccctggagagcacagacgtggggaaagcgcatgtacgagcagctgtagtgaccggcagcgggagctgaaggagctgcacaggaaaggcgggcccatcaggttaacactgccctccaagtccacagacgctgaccgttggctcgtttgctgagctccggctccttcggaaacctggataacctcagtttggcacttcaccaattgtaatccaagtggcctgcgccgacgcacctcatcataactgccttcgcgtcataggcagctgaaccctgtggtccacgtcacgttatggaggacgctggccttcggctcctgtcaggaacagcctccaccgatgctcgcatggtgcttgaaccctgtggctagaccccaggatcacagagatcgctgggcttgctaggggccctgtagctccattgaacgacgtactctgcgaggtttgattactatgatacatgcaacctaacagctctcacagccttgacaccctacggaccgaattctgacaggccacagcttccccgaattttgaacggacatggtggcaccagtcctgtcttaacaacctgcacaggccctgtgtgaaatggctcccatgacgtcacagggcacggggaagacgttcttgcaaagcccggcgcaccaaaaaattaggcctctttgcacttaaccaaggcctgtcacgaagccaagcccgggtccatagggggtccccaacccttggtccccctggagctg

SEQ ID NO: 704981 - DNA, 183 bp, Homo sapiens
tgctacgagcgcactatactcagcccaagtgacaggcacgctctgtctcaaaaataaataaataaataaaaattaaaattaaataaaaaaaaaaaagatcaaactgattccaagtaacttaagtgtgaaccagaaaaaaagtccaactttatttaaaagaaattttaaataatctaggaaccc

SEQ ID NO: 704982 - DNA, 187 bp, Homo sapiens
ccccacccctgcccccagggccagggtgggtccttttgtggggtttccttgggaaaagcccaaagcccaaaaaaacccagtttttttttttataaccctttttaaaaaaaaaaatgaataaaaagcctccttttttttatggatttttgggggggggggggggggtcagggtttccctttttttcca

SEQ ID NO: 704983 - DNA, 298 bp, Homo sapiens
catacagcagccccagcacacttcagcagccaagggcagcatggtcaagtgcaccagggcgcacagcaaactggctcagtggtggtttgctgttttccaaggctcgtctggtgccaagcaaggcacattcatacattgcagctgctcaaaccatcatcaccacacagttcttcctttcttccatcactcgtctcatctggaaatctcacactcatcctctctttcctgagcccaattctcaacgccatcaggcatggggacccaaagggcatcagttcagctctttcccaaggcatgt

SEQ ID NO: 704984 - DNA, 1011 bp, Homo sapiens
aaactgttactagtcggcccggtgtaattcatcgaggcgcgatcgagttctgaaccttgtgattgctccgtcacgtgctccgctcgccatgacttcctacagctatcgccagtcgtcggcacgtcgtccttcggagtgcctgggctgggctggctccgtgcgttttgggccgggggtcgcctttcgcgcgcccagcattcacgggggctccgtgcggccgcggcgtatcctgtgtcctccgcccgctttgtgtcctcgtcctcctcggtgggcctacgtgctgggcgggctacgtgctgggcgtcctgacctgccgtcctgacgtggctgctggcgtggtgcaacgatgaagctaaccatgcagaacctcaacgaccgcctggcctcctacctggacaatggtgctgctgccctggaggcggccaacggcgagctagaggtgaagatccgcgactgtgtaccagaatgcaggggcctgggccctcccgcgactacatgccactactacacgaccatccaaggacctgcgggacaatgattcttgtgtgccaccattgagaactccaggatttgtcctgcagatccgacaatgcccgtctggctgcagatgacttcctgaaccaatgtttgagacggaacagtgctctgcgcatgagcgttgaggccgacatcaactggcctgcgcagtggtgctggatgagctgaccctgtgccagagactgactggagatgcagattcgaagggcctgaagtgaagagcttggtctacctgaagaatgaaccatgagcgatggacaatcaggtacgctgacgggccatgttgggaggccactgtcagtgtggagggtggttccgcctccgggcaccgatctcgccagatcctgagtgactgcgcgcatattacgccttggcgagccgaccggaggttttgacttttccccccggctaatgaccgggttctcgcccgggccccgatgcgccaggtctgctcccgcccttggtctatagggc

SEQ ID NO: 704985 - DNA, 304 bp, Homo sapiens
ccttcgtgaatcataagattacaatgcactattttacgtgtactttttaatgtttagatacatagtatgttactattgttttacacttgtcatagtattcagtacaagtaacatactgtacaggcttgtaccgtatgagtttagacacatatatatacacatatatctcaaaccatcctttgctggcattaaactctccagctgtaagttcttcaccttgtcaagtgcagtgggagcactccagcactttgggaggccgaggtgagaggatcacttgagtccaggaatctgagaccaatctggg

SEQ ID NO: 704986 - DNA, 128 bp, Homo sapiens
ccaccccgcgccctggcggggggccggcgagacggagtccacaggctaccctctcaatttgagcctgaaagaagaggaagaggaagaagagatacagagccgggaactagaggacggcccggcagaca

SEQ ID NO: 704987 - DNA, 232 bp, Homo sapiens
ccagtatcgctcgtaccgtagctggactacaggtgccgcgagcttcgcgtgggtatttgtattttagtagagatggggttcaccttgttagccaggatggtctcgatctcctgacctcgtgatccgcccacctcggctcccaaaggctgaggcaggagaatggcgtgaacccgggagacggcgcgtgcagtgagccgagatcgcgccactgtcctcgcaacctgggcgacag

SEQ ID NO: 704988 - DNA, 521 bp, Homo sapiens
  misc_feature (4)..(4): n is a, c, g, or t
  misc_feature (20)..(20): n is a, c, g, or t
  misc_feature (53)..(53): n is a, c, g, or t
  misc_feature (78)..(78): n is a, c, g, or t
  misc_feature (149)..(149): n is a, c, g, or t
  misc_feature (193)..(193): n is a, c, g, or t
cttnaggaaaatgggccagngcccattcagctccagtcccagagagcttcctntctaactcagagccaactgaactgngaccagaggaggaaaacagagcatcagaagcctgcagtggtggttgtgacgggtaggaggataggaagacnagggggccccaacctgggattgctgcagcagggcaagctttgcnatgttgctctaaggtacatttttaaagagttgttttttggccgggcgcagtgctcatgcctgtaatcccagcactttgggaggccgaggtgggcggatcacgaggtcgtggagtttgagaccatcctggctaacacagtgaaatcccgtctctactaaaaatacaaaaaattagccaggcgtggtggctggcacctgtagtcccagctacttgggaggctgaggcaggagaatggcgtgaacctggaaggaagaggttgcagtgagccaagattgcgcccctgcactccagcctgggcaacagagcaagactccatctcaaaaaaaaa

SEQ ID NO: 704989 - DNA, 265 bp, Homo sapiens
attatagcattagtgaaaatatatgggatctgtgcaaagtctgactttgtgaatactctttccaattacataataactacttagattgagttgaaattaaaaatagccaacctcaaggaataattcagattcaaagctattctctttcagacagtgctagcataatatacgtatttctacaatactgatttatggtaaacgaagagagattgcagagagagagcgtcgagagcgagaacgcattagaataattcgtgaacaatct

SEQ ID NO: 704990 - DNA, 212 bp, Homo sapiens
  misc_feature (112)..(112): n is a, c, g, or t
  misc_feature (172)..(172): n is a, c, g, or t
  misc_feature (199)..(199): n is a, c, g, or t
ctggggttccccttctgtgcatgaattggctccctctttcgtaccctgctttctgtctgatacttgagcatttagtttcccagatgcctttagtgatcgcaagttgcaaggngcagaaatctgctcacattggtccaaataaagggattgagatctcatggaaatatgacancgctggacttaatgagaactggagttnggaacggggtact

SEQ ID NO: 704991 - DNA, 844 bp, Homo sapiens
gaagaattaaagtacacttgatttgagaagaatgacaccaaatcaccatcgctgaaaaaaatttaagtcagctcagcacgagttgaaattgactacattagatttctttccacctagaatcaacaggatgtttatttcctatgctgattctggaggagttaacctccgtgctaaaaaggcatcttgtccctacatcttctcttctgacttgggcgtacatctcatagtcaagttcagagtgagttcatgataaagttgaaaatagtaatggtcattgccgcacaaatgtattgatgttgtaactgtccacccaagtaagaagtgtatcgtgcctttccatcgtttaggatttcatgctgggacatgtgcgtattgaccagaatatgactaacacgttatcattgtacagatacccttcatttgacacaggttctgaatgagtgatttagtttcctctgtatttgtatgtcttagagagagtgatctagaaatatgagcagctgtacttcataaaggaaactgcgtatgcagattcagtatagtgtatctttggacagtcagaatggacattgaacatggaagttctgttatctgacaggatcagctacaatgccctgtgttaacatgtctaaacagtttcgcttttcttttcagccactagaaggttgggtaaattaaaagcacccaattcatggcctttaaagattcccaaaaacaggagtgacagccgaccagcagcgtgtaccacacaataagaatgcataacccgtaccgcgagctggacgcaatgggacgacgactgcacgacccatgaaaagagctccgggacagtggcggccactct

SEQ ID NO: 704992 - DNA, 732 bp, Homo sapiens
taggcacggcctggagtgggctgcccgccggatgcttgcgggtgggttttctggctcagagatgacggctgtggtgcgcccccccgcggtgggtttctcgatcccaagcatgcttctgtgcggtagccccgtctcgcgccggacaacgtggttccccggggacgctcattacagtttgtctccccgccgttggccggcaggataattcccgccctcacccgatcgcggctgccagccgcacgcaatgttcggttcgtcgccccctcagcctgctgttgttaacacccgtggcgcgtgtttacacacacgccggaacgtacgtgccttgacgcccgcgcggtggtggcaccgatcgttcccctccgcgccgagttgtgtctctctgcgggggttgtcccaccacggcacccacagacttctcttcggggggggtaccactctctcgtgacgactgcggtgtaactatcaacctccgccgtgtactgacgcgggttcctccactacagtatggggcgccccccgggtctcgtcgccaagccccgcgagggcgggtagtacatgcttgtcaaggactcctcaagtttcgcgccacctctatcttggcgcccccctggcacgcagtgatttctggactgcatgacttcgccgcaccgtcctggcaccgtcgccccccagacactccatttctgccccccccccgtcgggtccaaaaaaccccccctcaacaaaaca

SEQ ID NO: 704993 - DNA, 286 bp, Homo sapiens
  misc_feature (264)..(264): n is a, c, g, or t
caaccccccaggtcccagctcaggctaaagggctcttcagggccttggggagctgcagggcagaggtgggggcacccagggaaaggaggcctgcggcctgcgttcattcctggttctcccctcccagccgtgagtccttgggcaggggggttcttcttacagagcctcagtgtccccacctttaaaatagaggaaaagtttccttcccctggctgcccctggagagttgggtgaatgaattgggatgcgcctggccccccgctncccgcctcgcccccgcccctcg

SEQ ID NO: 704994 - DNA, 109 bp, Homo sapiens
atcgccgtgtagaggacccccaaggtccttagcgtacatatgtctacatatgatttcttcctcttcagtgtctgttacatcctggaactcatggcttaagggaccttgt

SEQ ID NO: 704995 - DNA, 694 bp, Homo sapiens
  misc_feature (309)..(309): n is a, c, g, or t
  misc_feature (385)..(385): n is a, c, g, or t
  misc_feature (534)..(534): n is a, c, g, or t
attaatcccctggcccaacccgtcatctactctaccatctttgcaggcacactcatcacatgcgctaagctcgcactgattttttacctgagtaggcctaccaatatataacatgtcgtagcttgtaattccgagtctctaacccaataacaaataagaccctcgtgtgccacagtaagctgcccgtcgagtattgtcctgcacgcgaaggcaaccggcatgccatatgtccttctatatagctgatcctctttcgaagcaatatactctccggacatatgataccgatatacacaatacgtagccaantaacaaataactgcattcatgtaagtaagtgcagtaaatgggctagtatggcaattatgaaaactagtgaaatagnccccgctttatacatcttgctgagatcccagtaggttcatccccaaaaggacagcccacttctggacattgccggcctcggtcttccttctcatcagtgtaccaaagataactaagctccctcatcttcaatcattataccaataatcntcgtccgctcacttaaactgttaagcgctttcgtcccttcacgtctgcgtcaaatcttgtatcctatcgatatgctaggccagtctcgaggttgggattagactcgaaacccgagctgagtgcacagatcttagcatagtcctctatttaccccacatag

SEQ ID NO: 704996 - DNA, 361 bp, Homo sapiens
tcccaccactttggaagacagaggcgggtgggcacttaagcccaggagtcatcactgagcccaggagtttgagaccagcctgggcaacatggcaaaaccccgtctccacacacacacccacacaaatagaaaaaaatttagtcgggagtggtggcacacacctgtggtcccagctactcgggaagctgaggtgggagggtcacctgggcccaggagtttgacgctgcagtgagccttgatgacagcactgcactccagcctgggcaacagagtgagaccttgtctccaggaaaaaaaaaaaagagaaagccatccccttcctggaaataatcggtaatgagtaaccagccttaaaaaaaga

SEQ ID NO: 704997 - DNA, 117 bp, Homo sapiens
tccatcccttatttgtgtcatttttatatctattttcttccaatcacctttggtacacacacctcctaggtagctttgtccagttattttgttggacgattcgtggtatagaaatca

SEQ ID NO: 704998 - DNA, 255 bp, Homo sapiens
cttcggggtgactctagaggtccctgggatagtactccatcacagcattatccaggcgtccatctggcggggattctctcatctccaactataaggcgggcaaggtggtcatggtccatcaagggcacccggtaattgtcctttccgtggataaaatccggagggttggcaagggaaaacacttttacaggcaccgggacgctcatccaaggagccttaatatactggtccatatcgacctcggccaatcaacat

SEQ ID NO: 704999 - DNA, 840 bp, Homo sapiens
agcgggggtggaagccctgtgtgtgagctgtggtgccatggagcggtgtctgccgatcttctgtgtgaagactgtgatccgtggagctgacgtccagggaacgcgtggagtgaggagaatggtggggctgccacccctaatgacgcgagtcctcaagttcactttccgacatgcactcgtatgggaatgacagatggatgatgtccgagcagcttcattggtgcttactgcttgggatctcttacttttatcgactattggtctgtgaggaaccacacgtctgtgctacagaggatgaaaggcacgcttgcatgaaacatctgcattgcacaggtgaagggagaaattcccgatgctcattagcgctacagagaagatcatgattgtacgatgactgtaggcaagtcgtttaagaacgatgtcacggggtacagacataacatgtccttgcagactcatcccccgggctttcgtatgatagcctaccaaggaaaaggtgacatatggacccaaatcggatcattgctggacttgcgaggagaacttttgactcaactcacatcgggttcgaaagaaacttgacaacgcacatgatgcacagtgcacttcgcacgcagctgacttccacggtggcaaagtagatggaagagaagtcgagggatatgaaggaatagcgtaaacagaacggcctgtgacagcgcctcctgtgtgaatgatgggccaacttgcagcgaagacacgacgccgcctgtacacaagggacagctgttgtgccaacagcctgaccattgcaatggcttgcagaagccgcaagagccctggcgtggtactctacccccc

SEQ ID NO: 705000 - DNA, 349 bp, Homo sapiens
  misc_feature (111)..(111): n is a, c, g, or t
  misc_feature (135)..(135): n is a, c, g, or t
tattttaaagtgagaagttcaggtgccacttaggtattgttaacaattgttgcataaccacccccctttattaaagttccaaaaaaaatgttctcctctaaaaggaaaccncccatccattaagcagatactctnccattccttccttcctccagcccccagcaatcaccaatctgctttctgtctctatggatttatctattcttgctattttatataaatcgaattgtatgagaccttttgtgtctggcttctttcacttagtacaagtttttgagatttatttacatagtagcatgtatcaacacttcatttttatggccaaataaaattgtattatgtgtttata

SEQ ID NO: 705001 - DNA, 540 bp, Homo sapiens
gcttcgataacctgcttaatactgccaaagtgtgagttcctctgatctcttgattccgtagttctaatctcacgttttgtttataagagatggagtctctcactactgtggcccaggactggagatgcaagctggcaatgatcatagctcatatgcatccattgaaatcctgggatcaggtgatcctcccgcctgagcctccagagtatctgggaatacagaatgacgtgccaccaagcactggctaattttgtctcatgtcttagtacaaagtattttgtgaagccccttcacaagaaaccttaagggaaagtctgatggtgctcaggaatctaagctctcccataaaccatcctctttaactgcgttctaaaatatctctgttggccgtttcttagccttgttcatgtattccattcagtgctccaagcgctttttgtttgtaagcttgagtgcattgggatatgacaggtagtgacgtgtagcatgacagctgttaaccttgtaaatacagatacagcataggagtaagaatgggca

SEQ ID NO: 705002 - DNA, 468 bp, Homo sapiens
ggtgtcatcgatgccacctcatggctacaccttgacctaacgtctttacgtgggtacttgcgcttactttgtagccttcatcagggtttgctgaagatggcggtatataggctgagcaagaggtggtgaggttgatcggtgtttatcgatgccacctctagagggatatgaagcatcgccaggtcctttgagtcctaagctgtggctcgtgtggttcggacgatcagggtggtcgatttagttgttgaggttgaggagctaagcatagtggggtatctaatcccggtaatgggtcttagggatcgtgtgtacagatatgtcaaatctattatagtaatctatgtagtgtaaagtgtgttatttgacaattcaggtgagtcagatcagtatgggggagggggtgatcgaaatagattcataacgccgtgttacgatggattcgattgactcgtgtgatcgtggtgagtg

SEQ ID NO: 705003 - DNA, 629 bp, Homo sapiens
agcggagtgacgcgcgcgcgcgcgatcgcgctcggaccccggccgctgccgccatcactgtcgcccgcccagtcgcccctcagccgcttcccctcgccatggaggcgaggccgccgccgccgacgcggggctcggagccgcgggtccgggcggcggccctgagggctagtggcggcccgaaacgccgccgcggagccgaggcggagccgctgtcctcgtccccagcggtcccggccaagcgcccgactctgtgacacaacgtaagagaaaaagacaaaggtattgatggaattccactgagtggtaacgggatgatgcagttcaaataacctaatgttaatgcatggattccgtggtttcattctgtgttctgctcggcagtgggtctgaatatgtgtcgggtgccaactaatgctaccacagtggcacctgtcttgtaggacacttacacagattaagttacgctcatcagacggcagaaccagttgaaagaagaggccaaaacgttcaaatccaacttcttcagtaacttctctttctgtgggcaccaacattcagcccgaaagtataactctgggacccacctatttagccactgtcaattcttcagactctgacaatgggaccaa

SEQ ID NO: 705004 - DNA, 316 bp, Homo sapiens
tgctgggattatgggcgtgagccacggcgcccggccgattgacccctttcaacaagcccagagggatgaagcaactaggccaaggtccagtgctagtcgtggcagcagtgggactagaacccaggtgtccaggactccaaatctggactcgctgctgcatgacacccatgggcccacagcagcctctgggatttctttaacataggagaaccaaaggagacacgggaggccctgaagggcccagctgagactgtcccatctcaggctccatcgaagtccaagactccgggtggttcactccagacctgcccgccaa

SEQ ID NO: 705005 - DNA, 346 bp, Homo sapiens
agtgtgaggtcactgtaccaccccagaacactggtctcgggcccgagaagacctcagggggccaggcttcaggtatcaccactaaaatctccaggggcaccattgaaatcctgagtgatgtgcagctgagtcaagactggaggacaagtgggagccggcgaagccacgctgctgaacatgctcgacatctcccccttctcctgtgggctggtcatccagcaggtgtccgacaatggcagcatctacaaccctgaagtgcttgatatcacagaggaaactctgcattctcgcttcctggagggtgtccgcgatgttgccagtgtctgtctgcagattggctacccaa

SEQ ID NO: 705006 - DNA, 1135 bp, Homo sapiens
gagaagaggggagagtggagggccgatggataagcttccaaaatgatgccgcacaccagttatcctattgaatcgaggggactgatagctcccaaggcatcccccagcttgtgcagtaacatcagtgcctgccaggtgcattgctgcaggctgtaagcaactaccctgggtccccgttggccatggcacacagcttcatagtcagcatggccagcaggcacacagccaacacatcctcgtcacactgccatggcgagcccaccaactcactcgcagacaccaacctacgcacagctacgctcccatccccagcagcaaacagcacctaccggcccagccacaatgggcccaaaatcgccaacggcatgaccacgcagcgcctgaggatggcactggcaaccacaacccatcgacgccgcacccatatgccacgccgcccggcccacacgccttcacatcgcacagcccagggccaagcaacaccccccataatgctcgcgacgcgacagcggtcagcaaccaccacccaccacgaacatcgagatcaaataacagcacgggcatatctgtcgcggcacaacaacgacccaaccccccagccacgtagcaccaacgccacaaacacccccaagcaccctcccacccacgcaccgcactcctgacatacgcccacaccccgggtgcaccaccaacaagcgccacagcacctacacacgccaggcacgcccaaaacgcgccacacggccaccggcgcgcccacaaaccccgggttgcatgacccaaactgaaacccggcacaccctgcacgcccaacccagagccacggacgtcccccccccaagaccacacccaagcgccccacccacgaccgggcatcacggaaccccgcaggcgccccggcacacccacacccaggaacggacaatcgcccccccgcaacggcacaagctcggacccgcacacgccctccacacacaccggccacccggcgcaccaccaaaggcaccggggaccccagagccaccggcaagaaccaccccgcacgggcacccacaccacaaccacaacggcacacagacctcgcgacagacacccgcgaccaccaaccaccaccgcacaaccagcaacaccacac

SEQ ID NO: 705007 - DNA, 202 bp, Homo sapiens
gagtactccagacaagtgacgggcgctgtggtcatgcctgtatcccagcaccctgggagtgctgaggtgggcagatcactgaggtcaggagttcaagaccagcctggccaagatggtgaaaccccgtctccactaaaaacacaaaaattatctgtggcatggtgtgtgggcaccttgcaatcccatgctacttgtggaggct

SEQ ID NO: 705008 - DNA, 809 bp, Homo sapiens
ggacgacgccatgttggggtttgtgggtcgggtggtcgcttgctccggcctccgggggcgtgcggagactcaccccttcagggtcagctgcccccagctcagctcttactgcgggccgctccagacggcgggtccatcctgtcagggagtatgcggcgcaaacatctccttcgcacaaaagcaggcgccgtgcaccgggcgacatcgtgggcggtcattggcagcagtggtggtagcgtccagttttgatgagggactatcaccaattctaagagtgccctggaatgtgcaaggctagtgaagaccagactgttgtatggaggtggcccaggatttgggtgagagcacatgtaaggactatgtctatggagtggaacgagatagggctatggttagtatggcctagaaatgtacgtggatttctggttgcaccaagtcaagattcctgttggtcctgagaggtaatgggcggaatcatgaatgtcgttggagaggctattgatgaaagaggtccctagtctaaagcaaacaatttgctcccattcgatgtctagaggctcgcagagttcatggaaatgagtgttagagcaggaaattctggtgactggtatcaaggttgtcgatctgtagcttcctatgccaagggtggcaaaaatgggctttggggatggtgctggagttggcaagactgtactgatcatggagttaatcaacaatgtcagcaaagcccatggtggttactctgatgttagctggtagtaggtgaagagggacccgggaagggaatgatttattccatgaaatgaatg

SEQ ID NO: 705009 - DNA, 1449 bp, Homo sapiens
  misc_feature (980)..(980): n is a, c, g, or t
  misc_feature (999)..(999): n is a, c, g, or t
  misc_feature (1051)..(1051): n is a, c, g, or t
  misc_feature (1070)..(1070): n is a, c, g, or t
ctgtcttttttgtgggcgttctcttcccccccccccccccaccagcgttgtggtcgtcttttgtataactttgtagtgtcgccccaccatgggatttgtgaattgtggatatatattgcgcccgtcgtccacaacagttgtcttttctccgcgacgtccgtcgtgtcttttttcggggcgtacgctttgtcactgcggccccccaagcaggtgttgtgggcggtgcggatagggggggcccccccccccctcgggttttggtgtttgggcgccccacgcggtgggatggaggaccgtttgcgcccccccgtctgtgtttccctggaagtgagtcctttttacaagcatccccgggctggcgctttttaaatgtgcttccgctccccccaacagggggcgtcccaccacaaccaaacggggtccccccaactagtgcgcccccttcgtgtttgcgccggcgtgggggttgcccccccaagcaggcagcccccgttggtaagtctcggccccctcctttatcatcccttctgggggggtgtcaccacaggcggggcccccaacgccaccaacggcgccgccttcgtgttgttggggtggtttgttttccttccgccctcatgaagaaaaaatatggcgtgtgtctatggaagtgccccccgtcccccccccgtcctttttggtggttaaacccccccgtccgttaagaaagagttttgttgggtacgcacctcggttgcccccctcttcggcccaccagagcgggacaacttgtgtggggaaacacaacaaggttgggtgtgttgtgatctgttgttggtgggttgttagaatatttccttcttttcctccccactactggttttttgcggaggagagtttggagaggagatattgcccccccgtgagccaccccctctcacgggggtctctgtctccggttgtgtgcgcctctgtacacagccctctcgcccacccacagngtgggggtacacacacccnccgtggcgcacagcacaccacagtgtgttccgtgtgtgtctccgctctgttntgtgggggaccccgctgtngtgtagacacacacgtggacccacctcgtgggggttctgagactctttctgtctttctaacaccgctgcgctcttgcctcgagaagttgttcgaagtcccacgtccctcttgttgcctcgttggctcgttgctcgttgctcgttgctcgttggcactcttgctgcgtaaatcctcgagggctggtagcacgaaatgcaccacttggaagctctccacccccactaattgtttcttcacaaagtggagaggtctcccctgagtccacgacccaagtgggaggaagcccctgggggccggggacctggagctgcccagcccccagcgtgattcctgctgccctgtattctctattcccataaagccgagtttgacccccgt

SEQ ID NO: 705010 - DNA, 165 bp, Homo sapiens
tgaggcagctggcgcggatggacgaagaggttcagagcatcagacgagatggcccgccacttgcaggagtaccaggacctgctcaatgtcaagctggccctggacaatcgagatcgcacacctacaggaagctgctagagggcgaggaagaaccggatcaccatt

SEQ ID NO: 705011 - DNA, 753 bp, Homo sapiens
aggctgtacggtctggaattttgggatacgggacttctgcccagtggcagagagggcggcgtcctgtcatgtgcccctggtgtgtacagattctgctgtggctgtccactgcccaagtgtggggcctgacccgcctgatgctggacaggactgggggccgatgctgggactgcggctggcttccagtaggcgtgtagccggctgcggctggtgggcatggagctgtgttggcatggtgtgggtaggactggtgaacagatggcataaagggcttggggggtaggctgctctgcagaagggtactgaggggtagaggatgacacgatggactggtgaacaagtggcataaaagggcttggggggtaggctgctctgcagaaggggtactgaggggtaggaggatgacacgatggcctggggatagggtgcccgacgtcagcatgcgtagtgtttgctctgaagcattgggggccaaacaccgggtgtgaagggggtagatgagccatgtggctgcatcatggctggctggcctggggaacttctgagggtagaaggggattgtaggaaagaataggggctgttgtaagcaccagaggcgggccaggcagacgcgggaggacttgcattccatcggcaggggctgatgctggctggatgttggtccgaggcgctgcgggaggaacgggagccttttgctaccccgagtacttgacctgcatgccagggcactgtaattggatacagggacatatg

SEQ ID NO: 705012 - DNA, 846 bp, Homo sapiens
gtaaattaaaaaaaaaaaatttctttttgagacagggtcttgctgtcacccaggctggagggcagtgacacaatcttggctcactgcaacctctgcctcctgggctcaagtgaccctcccacctcagccacccaagtagctgggaccacaggcgcaagccaccatgcctggcttatttttggtatttttggtagagacagagttttggtcatattgcccaggctggtcttgaactcctgagctcaagtgatccacacaccttaacctctgaaagtgcagggattatagacatgagccaccatgcccagcctacttgtgctttttttaagttgggaatcctttgactcctttttgggctgccagaatcctactcgtaatctaaggtttatgtactgggactatgtgggtaggctatgtggatcagaacatagaattttgcccctcaaatgcaggcttccgggagactggagtcgaaggccgtgagttcagcataatggcaggtgaagaaacttattgaagactatccagtaaaattcccgagtttttgtcagcgtttgagattcctgggtgctgggatgaaatgctgagaaccaagatgtctgttctagaatgaattgttgccgaagtcgatccttgaacagccagagtgttggttctgcttccaataatccagtgtgggttttgggcaccaggtatccaggaatccgaaggatggaggacggtctttgaacggcgaacagacaaagggggcgggacaggcctcatgaaagctgggcagaaaaaaaaattgcccgcaatacaaggcacaaaaatgacaaagggtcaaaggggaaattaaatagctgt

SEQ ID NO: 705013 - DNA, 144 bp, Homo sapiens
ccatgctgcttggtcagttaggctgtcaaatgagtttgtcccagaataatagcttgtctttttttgtcttctattttgtactacgtgctcagactacgacagttctcttttatcttgccttatttttttctttttttttagcac

SEQ ID NO: 705014 - DNA, 129 bp, Homo sapiens
ctcaggctcgctccgttcgcctgctgcgggtatgttgtgttgctcgcttactgaacccgcttactgatgctccgcttactgatgctccgcttactgaacgcttactgatgctgtatgatgctccgctta

SEQ ID NO: 705015 - DNA, 1366 bp, Homo sapiens
  misc_feature (56)..(56): n is a, c, g, or t
  misc_feature (86)..(86): n is a, c, g, or t
  misc_feature (100)..(100): n is a, c, g, or t
  misc_feature (119)..(119): n is a, c, g, or t
  misc_feature (185)..(185): n is a, c, g, or t
  misc_feature (281)..(281): n is a, c, g, or t
  misc_feature (319)..(319): n is a, c, g, or t
  misc_feature (345)..(345): n is a, c, g, or t
  misc_feature (347)..(347): n is a, c, g, or t
  misc_feature (376)..(376): n is a, c, g, or t
  misc_feature (382)..(382): n is a, c, g, or t
  misc_feature (394)..(394): n is a, c, g, or t
  misc_feature (428)..(429): n is a, c, g, or t
  misc_feature (450)..(450): n is a, c, g, or t
  misc_feature (493)..(493): n is a, c, g, or t
  misc_feature (567)..(567): n is a, c, g, or t
  misc_feature (572)..(572): n is a, c, g, or t
  misc_feature (640)..(640): n is a, c, g, or t
  misc_feature (659)..(660): n is a, c, g, or t
  misc_feature (676)..(676): n is a, c, g, or t
  misc_feature (702)..(702): n is a, c, g, or t
  misc_feature (917)..(917): n is a, c, g, or t
aaagcgagaggacgggagcctgagcgcctaagtaaggtaagcttcccggagtgagngcttatcggagtcagaggcagtcagcctanccatataccatagnatgcgccctgcgaacgtgnaagtcgtccgagcgttctgctgagctagcttacctggacctttcagcgtactccagcagtagtgtntcacttgtcctagtcttgagtgcaatcaggcatcacacgtgagcctcatgcaagctagggccggctagctgtgcacagtctgacgcatcttggctntctgcgagatcccttccttctggtcagctgcacttcgnatcagtttgatgccatctccagagananacgtctcggtccaggagtgaagggctgcncctgcngtcaggtctggncgatggccccttaccctgctgccctggctttggnnttgaagcaattcctgagttgngggtactgggcctgccgcatcctgtcctgtccactgcccaccnccgtgtgctggctccctcacttctggctgcagtgggagccgccagtctgacccttgtcaccgcacgctctgccnccacnccgttgcaagaggtcacaccatgtcagcagccttgcactgaccgcagccggcccccaggcctcagagntctggatgcttccgtgcgnntccaacaggcatcgtnttcccttccgcaggtggaggggccgnttcccgcaggcatctgagctctgtgccggggccgtggccatgggaagatgttccacgctgcctcctcctcgagttttcctcggaaacactcttgaatgtctgagtgagggtcctgcttagctctttggcctgtgagatgctttgaaaatttttatttttttaagatgaagcaagatgtctgtagcggtaattgcctcacattaaactgtcgccgnctgcaggcgcagtgactgctgaacataaaagaactactgtcaacaaaggccgcgcctgcctttcccatctgactatctatctggctggcagggaaggaaagaacttgcatgctgctgaaggaagaagcgggctggaagaagccctgcggcaccaccaggtaaatttagcggaaaaccatgcctggcccagcctgtcctccatggctgctttgcactcctactcagctgtgactcttctcaagcggtgcaatacctctcaatctattggaatcacctggagtctgtacttaccctattaaaaagttccgaaactcagctcccccacctcactcactctgtcagccccgtacacccacggtcgcccctcccttactcattctatttgagcccccctctatggtttaatagttcgtcattattatcttccgtatcccaatctatccctcaat

SEQ ID NO: 705016 - DNA, 365 bp, Homo sapiens
cgggtggatcacgaggtcaggagatcgatatcatcctggctaacagagggaaaccccatctctactaaaaatagaaaaaattagccgggcatggtggtgggcacctgtagtcccaactactcgggaggctgaggcaggagaatggcggaaacctgggaggcagaggttgcagtgagctgagatcacaccattgcactcgagcctgggcaacaagagcgaaactgcttcttgaaaaaaaaaagaaagaaagttttatctaatggttttagttggaatttctttaattactaatgaaattagacattggcatattggttatttcctctttcatgagcggtcttggtctttggccggtggagtacaag

SEQ ID NO: 705017 - DNA, 432 bp, Homo sapiens
ggctttatcaggctcactggtgtaagcttttttgacctctgaagtcaggatgaaatgatctccaaggaaaggctaggcaaagggcggtgagcccatatgtgtgtttctcactatcagggtcctggggagctggagggtccttgtcctagacccatccccttgcctcctggccaggccaagcttagcttcctagtaagacagtgaggcttccccctgagtgcttggaagaggctcacctaagaggctctggaagactcaggacatttgcaaaaagccaagctctgggcagagactttggggacaagaggcagaaacatcgctttctgaccatgtcagtgtgatggcatctggggcatgcacacatgtgtgtactgaacttgacagtccacatccatgcccagcttggccatggcacaagccaccctccactcc

SEQ ID NO: 705018 - DNA, 315 bp, Homo sapiens
tggggtacccttctctgatatctcaaaatacgttgtgtgtatctcttttacctgtagtgattagaaactcccttataaatcaagaccatgattcccagacaaaattatcagaagagtataaaagaagtcttctttgagtgtgaaatatctcatggaatatagcacatgggctcttcacgaagaaactactagaagagaagaagacaagctggaagaggccagggaaagggggttagtactattttacagtgaggctgggctcatacagtggctcacctgtaatcccagcactttgggcgtacggggagggtaccg

SEQ ID NO: 705019 - DNA, 579 bp, Homo sapiens
  misc_feature (413)..(413): n is a, c, g, or t
tggcaaacgccaccgccgaggaaaaccggtgtactattagccagtggtcaaccccaccggtgttcttcgacattgccgtcaacggggagccctggggccgcgtctccttggagctgttggcagacaaggtcccaaagacagcagaaaattttcgtgctctgagcactggagagaaaggattgggttataagggtcccgtgctttcacagaattattccagggttaatgtgtcagggttggtgacttcacacgccataatgggcacgggggtggcaagttccactcatatgtggggacgaacatttgtgacagactgaagaatttcactcctataaacgcattacggggctccgtggcactcttgtgtctccagtggccaaattgcttggacccaaccacaaatgggttcccangttttcacattctgtgcactgtgccaagacgtgaggtggtgggagtggcaacgcagtggtgggtgttgggcacaaggtgaaagaaggcatctgaactactgggtggacggccatgtggagccgcttggggctccaggacagtggcaacgaccagcaaagaaagatc

SEQ ID NO: 705020 - DNA, 1557 bp, Homo sapiens
  misc_feature (283)..(283): n is a, c, g, or t
  misc_feature (355)..(355): n is a, c, g, or t
  misc_feature (376)..(376): n is a, c, g, or t
  misc_feature (1204)..(1204): n is a, c, g, or t
ttctcatcaaaggggcgctgcttgtgtggtagaaaaagaggggggtagatatagaaggcgccgcgcggtgtaaatgttgtttggtgtgatgaagaccgcccctaacaaagtggtgtgtgggctccccccccaagggtgtgattcgtttgtgggagaggagtgttattaatggggagaggtcggggggggggcatcaactccaagttgtcttacaagggagaggtgccgctgttgctgaagtatccccccctgtgggagcgccactagtcgtttggtggggggngcccacccatctcaccaccacggggggggcgcctcattgtggttagccagccatctagtgtttgccccatcncagcggcggccgcctcctctntcatggggggggataaaactcctcttgtgggcgctgtgtcccccccccccccatgttgcgtcatgctggccgctgtgtctgatgggcagatcatggtcgtgtaggcattgttggctagctgggccgactacctcctagttggggggccgactcggttggtgctcgtcacaaaaaggagccgtttgtggcgcgccgagaaaaagggcgcttgtgttttctcccccggagagggggcgccacataggagaacacccacaggggggcgcccctcctttgttgctctgctcactagaagaggggatatactctacgcccccaacagagggtctcttctctctggggtgtctggggctctacatattattatagagagagggttttttttttgggggagaattgggtgagagagagagatattcctctctggagccccacactctcctttggggtgggacacaaacacacagggctcccttcggggacctctgctcactctgtgtgtgagacacagagagggttagagcacacacacacttggagtagtgtcccgcacgcaccctctcaatactctctctttgtccgcgctctgtgtggtacaatagagagagtgtgtctctgtgtgttctataagagagccgcacatgagagatcccaaaaggggccctcccacgaggaacacccctcttggggtggtgtgtgtctctctctctgttggaaagcgcacactggagaccacgccacactctgttgaactcttggtcaccgcgcggggttgttgttgtgtgttgttttcttatatttgctctgtggcggaacctctctctttgnggagaggagacctgtataaaggcggggtgtgttgaactctggttgtttgttaaagagagtggtggtggaaagtggggtgtgttgtgaagaagttttgtggagcaactgctgtataataacacacatcggccaatgccaatacgcctcaattttaaaacacacctaaccggaattctgagattgagagaaggaacacatatagtttttttttttataccacataaactgaaattatattttaattttcttaatggtaacctgagaaatgtatgcccaatagattagttgaagtaagttttttaaattaaaaattaaattaaattatttggaagggaaaaaaaataaaaaataaa

SEQ ID NO: 705021 - DNA, 108 bp, Homo sapiens
tttttgggtgctccctggccccagggtggggtctggttaccatggctgtgtgtgtccatgtctgcaagcagtttttcaataaatggcctgcctcccccaaaaaaaaaa

SEQ ID NO: 705022 - DNA, 679 bp, Homo sapiens
  misc_feature (28)..(28): n is a, c, g, or t
  misc_feature (245)..(245): n is a, c, g, or t
  misc_feature (270)..(270): n is a, c, g, or t
  misc_feature (287)..(287): n is a, c, g, or t
  misc_feature (344)..(344): n is a, c, g, or t
gctactctttctggtgttagatcgagcnaccctctaaaagcagtttagagtggtaaaaaaaaaaaaaaacacaccaaaggctcgcagccacaaaggggatgaaatttcttcgggacatcctccggcttctcccggttactggatcgtctggctccctagagtccttcgtggaagctttttattcctaagaggagaaaatcagtcaccgggcgaaatcggtggctggattacagggagctggggcntgggaattggggagactggactggnctatgaattggctaaanttaaaagcaagctgggttctcggggatataaataagctgggactgggaggaaacagntggccaaattggcaggggactggggtgccagggttcataccttggtgggtagactggcagcaaccgagaagatatttacaggctctgcaaagaacggtgaagggcagaaatgggagatgtcagtattgtagtaaataagggcggggtagtctatacattcagattgtgttggctacacaagatccttccggattggacccggactttgggagaggttaaagtggtgaccttgggcgccatttttcgtcgggagcttaacaaggggggcgttttttcttctcccccgtgggcgccacatgtgggaccgcgaaggaattaacccgttgcccaattgg

SEQ ID NO: 705023 - DNA, 664 bp, Homo sapiens
  misc_feature (282)..(282): n is a, c, g, or t
  misc_feature (655)..(655): n is a, c, g, or t
tttttttttttagggggggggggggggggttttccttttttcccccaccccccgggggggggggggggggggtttatattttttttttgtttggggggggggggggcccccttttggggggtgaggaaaaaaaaaaaatgtttttaaaaaaaaaaaaaaaaaaaaaaaggatggtggttctcctccccccccccgggggcaagggagatgggggttgaggggggggttttcccccccccccccccccacacaaaaaaaaggagaggaggggggggggggggnccccccattgggtgccccctttttaaaaaaaaagggggggggggggggggggggaaaaaaaaaattttttttcttcctccccaaaaaatttttgtttggggggggggaggggggggccgcgcccccctctttttttttaaaaaccagtttttttttttaaaaaccccccccccacaattttttttttaacccccctcccttttttttttaaaaccctttttttttccaaaagaaaaaaaaaaatttgtggttactcttttcaaggggtttaaaaagaaaagccccccctttttagacccccctttgtgcaatgtttttgccaattttttccaatggatttcatggtatttgccccgtgtcctttgaccggcangaagctcgt

SEQ ID NO: 705024 - DNA, 298 bp, Homo sapiens
caagccaatgacgcacagatatgctcatgatgtacatttacaaagcttatcagacaatagtctctctctgtatatgtatttctcagagtgtatgtatatatgtgtgtcggaagcaaatatgtaaaaccatgacctggaagaatacaccacaaaccaagattgtgactgcctctgggaggggactgcacattgggaggaggtccaaggcggtatccagccacaggggtcatttccattagtgacaaaaatgtctaaggcaaaatatgcaaaaaatcatttgcatccgcacaacttctag

SEQ ID NO: 705025 - DNA, 207 bp, Homo sapiens
  misc_feature (143)..(143): n is a, c, g, or t
caccatcatttggtctgaaacaggagataaagttccaagtaaaacggtagctgctaaaaagggaaaccgtcttcagatacagtcctaagcccaagagagccccaaacagaggacagtagtagaggctgtaaactctgactcgnattcagaatttggcattccaaagaagactacaacaccaaaaggtaaaggccgagggcaaagaaa

SEQ ID NO: 705026 - DNA, 229 bp, Homo sapiens
tgcccacaagataccaatcacaaggggtgctggtacgctagctgactttgtgacaatcaaatcacaaggacgaataagaaagtcaaaactaattcggacatgaaggctgtcaaggctcattggcaaagtttgtttgtcccaaaccagcaatgtcaacgaattgttgcacagtaatcttttgaccctgacaatgctttggtaacagtacctgacttcaagtgggctgggt

SEQ ID NO: 705027 - DNA, 90 bp, Homo sapiens
gtggacacaggcacatattactgtgcacacaggacggtttcgtacggtgcctacaaagcagaccattacttcgatctctggggccgtggc

SEQ ID NO: 705028 - DNA, 376 bp, Homo sapiens
gatggaccccggattataccagatacaggcgttatacggtaggaaaggcgccatccgttcggtggttcttgcttggtcgtgactgtgactctcctgcgcggcagtgcatgtggcttccccagcacccagctcctgaagcaccaggcggtcagcagctgcccttggcaccctccagccctcagaagttgcgtaggagacacagcgcctccactgaggcacctctctgggaataacgttccccagcaccccaaatggatttccagtcaattcagaagcattttaccagtgaagccctcattattccagttcactgttaaagccagtaattctctatattaaactttccctgttcggtttatactccgggtaccgagct

SEQ ID NO: 705029 - DNA, 549 bp, Homo sapiens
taccgtctacggacaggcgacaggtgcagaacaaaaacagcaggacaaacccacgagtttgaatgttggaaagacactgacaaatcgccgcacgggccgggcagttggcaagtggtgcaaccagcccgattacaaccccgggcagccatcctctcatggtgtcgagatttggggcgatgcctggaaggatctgggggaatgcggtggcttccagggtaaccgtctgaccctgaacttcagcacgttaagcggccgggggccgatcagccagccaaccccgggcgtggcgcgggccgatcaggtagtcactggcgtattgcgctgcaaagccgcaggagatcccgatcagtgccaagtccggcgaaaccattcacctcgataacctgaaggcctgcgactaccaacgtggtgatgaaccccgctggtgggtttgtgcccttgaacacaccgcgtatcgtttccttccagcgagaggagggtgaggaacaggcggtcaccactgaagtatcgccaccgtgcagacattcgtgctaaggatcctctaagtac

SEQ ID NO: 705030 - DNA, 86 bp, Homo sapiens
gaactgctggaccatgtactgctgccgaccctgcagagttataagccccaaacaggtcatgctccaataaaaatgattctacctac

SEQ ID NO: 705031 - DNA, 995 bp, Homo sapiens
  misc_feature (23)..(23): n is a, c, g, or t
  misc_feature (73)..(73): n is a, c, g, or t
  misc_feature (82)..(82): n is a, c, g, or t
  misc_feature (100)..(101): n is a, c, g, or t
  misc_feature (104)..(104): n is a, c, g, or t
  misc_feature (109)..(109): n is a, c, g, or t
  misc_feature (111)..(111): n is a, c, g, or t
  misc_feature (115)..(115): n is a, c, g, or t
  misc_feature (118)..(118): n is a, c, g, or t
  misc_feature (120)..(120): n is a, c, g, or t
  misc_feature (124)..(124): n is a, c, g, or t
  misc_feature (129)..(129): n is a, c, g, or t
  misc_feature (140)..(140): n is a, c, g, or t
  misc_feature (142)..(142): n is a, c, g, or t
  misc_feature (170)..(170): n is a, c, g, or t
  misc_feature (174)..(174): n is a, c, g, or t
  misc_feature (197)..(197): n is a, c, g, or t
  misc_feature (204)..(204): n is a, c, g, or t
  misc_feature (222)..(222): n is a, c, g, or t
  misc_feature (226)..(226): n is a, c, g, or t
  misc_feature (234)..(234): n is a, c, g, or t
  misc_feature (251)..(251): n is a, c, g, or t
  misc_feature (253)..(253): n is a, c, g, or t
  misc_feature (264)..(264): n is a, c, g, or t
  misc_feature (268)..(268): n is a, c, g, or t
  misc_feature (287)..(287): n is a, c, g, or t
  misc_feature (292)..(292): n is a, c, g, or t
  misc_feature (303)..(303): n is a, c, g, or t
  misc_feature (312)..(312): n is a, c, g, or t
  misc_feature (435)..(435): n is a, c, g, or t
  misc_feature (458)..(458): n is a, c, g, or t
  misc_feature (477)..(477): n is a, c, g, or t
  misc_feature (495)..(495): n is a, c, g, or t
  misc_feature (528)..(528): n is a, c, g, or t
  misc_feature (550)..(550): n is a, c, g, or t
  misc_feature (564)..(564): n is a, c, g, or t
  misc_feature (793)..(793): n is a, c, g, or t
  misc_feature (838)..(838): n is a, c, g, or t
  misc_feature (864)..(864): n is a, c, g, or t
  misc_feature (921)..(921): n is a, c, g, or t
  misc_feature (927)..(927): n is a, c, g, or t
  misc_feature (962)..(962): n is a, c, g, or t
aagggggggtgggggaagagggncagggggggggggggggggggggggggggggggggggggggggggggggnggggggcgngaggggcgggcggaggcnnagnggtgngngcgngantngggnggganggggtgggagngngagcgccggaaggggagaggcaggcgcntgcnatgcctggggcacggggcctctncaggganagagcgagctccagtgtntgcngagagggnacgagaatgacccaaanangcgatgtccanagcnagtgccttgggatattcanagcanatgcggccagnggacgagcngcgacaccacgtgaggagcacctgtgagcggccacgaggcgtcagctccagagcgggcccgcagcccatcctgctgggggagacccttgctccaggcttcctcacagggcgctggtcaaaggnaccaagtcgacaccccccatgcnagaggatccccctgtggcnccgggaagggctgcgaantggagctgtctcaggttcccgttgaggcccagngccgctgagtgccatgactccntgggggacagagcncaggagggaaaaggggaatggacttctacaggatggggtgggggacggcctgtcccggggacaccctggttctttctacgcgatggccgctctggcctgggagagaagctggcaaggagagggcaccgggtaaggatggggtgctgcatgacccagctctgcccaaggtggccagggagaccactatgaaggctgcctggtgtgagcgggaccctggtggggtgcagantgaggccctgtgtggggactcagggagggatgctgggcgggaganaggcccagggtgtcccctcacccatncaggtccctgggtgtgatcatggaggactggtaaagctgctgctgcccagtggcgancatcancagggtcaggagtaggggagtgagtgcagaaaccnagggaagggcccacttccaaggacgtttaatgt

SEQ ID NO: 705032 - DNA, 134 bp, Homo sapiens
ggcacgagcaacagcttttcagaagcttgaggaagcttagaaggcagcagatgagagttagagaggcatgaaagtcatttagagtcgagcccaaaaagatgaagaaaaaatggaaattcatgagtatccaactt

SEQ ID NO: 705033 - DNA, 157 bp, Homo sapiens
caagggcagatgccttgcacttcgagacaggagtatgcaggggcctcagcctaccttcccaatgcagtgctcaggataacgtaagaatggctttgtggtgctcaaaggccggacatatgagatcgtcgagatgtctacttacgaagacgggcaaaca

SEQ ID NO: 705034 - DNA, 944 bp, Homo sapiens
gggaaagaggagaaactcctgtttggagaagggttttctcctttgcttccagttcagactatcgaggaggaagaaatccagcctggggaggaaatgccacacttaggctgagacccatcaaatgtggagagccctccctttggaagagtggccctctccctggctcccatcgtttcaaagaggaatcgatctcactcctgtggaggattcgtcccaatctcccaccccaatgacccaagaagtcctacagttgggcttaggtccccaacccggctgtgtctcggaagatgcttgtgattcaacacacgggatgaggagggatgaggagcctggtctcaggaggaaacagcatcatacgtgcatcactctgtgtggatcagccggagctgctcttctcagaggggcccagtacttcaccagctgggccgctgagctccctgttccgcagcgagacgtacctcttgaccctgtcgtcccaggatcgagcgtaacgtcccaaggaatgtgggaggacctattcacagacatccctattaacgaaacgcgtgccacatctcctcgcaccccgagcaaattctgtcctccccagaacgcccatgaatcctggaggctcacgcccccaggccaaagtacgggggactggatttcagcccagtacaaaccccccaggttgcctctgagcccttgtcctgaacccctgtgggctgatggatctcaggaccactcccttgcaaagtgctcccccccttgaatcaccgcaaaggctcctcaagttcagaacccttagacctcatctccgtcccctttggcaactcttcttcgctcagatatagacgtccccaagccaggctccccggaggcacaaggtttctggcctgggaggccaatcgtctcctgacagaaagcctggtccctggagccatgaatgacagcctcaggagatc

SEQ ID NO: 705035 - DNA, 435 bp, Homo sapiens
  misc_feature (26)..(26): n is a, c, g, or t
  misc_feature (33)..(33): n is a, c, g, or t
  misc_feature (35)..(35): n is a, c, g, or t
  misc_feature (37)..(37): n is a, c, g, or t
  misc_feature (53)..(53): n is a, c, g, or t
  misc_feature (55)..(55): n is a, c, g, or t
  misc_feature (57)..(57): n is a, c, g, or t
  misc_feature (66)..(66): n is a, c, g, or t
  misc_feature (73)..(73): n is a, c, g, or t
  misc_feature (85)..(85): n is a, c, g, or t
  misc_feature (94)..(94): n is a, c, g, or t
  misc_feature (290)..(290): n is a, c, g, or t
  misc_feature (295)..(295): n is a, c, g, or t
  misc_feature (301)..(301): n is a, c, g, or t
  misc_feature (364)..(364): n is a, c, g, or t
  misc_feature (407)..(407): n is a, c, g, or t
atgcttatcaaagaacccaggggagnggggggncntnaaaatgctccaaaccncncnttcatcaancggtccnaggtggaaaaantggattttnccggctggttgtgtaaaaccctgcggttgaaccagcccggcacacccacgcgcacccccgtgtgacagtggccgggctccctgggtcctgctggtgacctgccccccgtccctgtccatgccccgcccttccagttgaggacaggctggggcctcccccccccctcctgcctcacccctgcggaaagccccgtggnggggngacagngcatgcaggaacgggggtttcctttcctgcccgtcctggccggggtgcctttggggacgggcnacccttctgtgtgtggtttcaaaggctttgcttccttaggttncaaaacaaaacagggaaagaaaaagcca

SEQ ID NO: 705036 - DNA, 117 bp, Homo sapiens
aaaattacgggctaaggtagcgaggcctgggctgtagggcctgggcctggttcgggagctcaggcagccaagaggaggaggaggagccgggactggtcgagggtgacccgggggacg

SEQ ID NO: 705037 - DNA, 739 bp, Homo sapiens
gactccggaccctacagtggtatggctgagccgactagtgatttcgagactcctatcgtggtggcatgcgtctcccgaggctgactcccacgttagggtcccctgagacgacactgccccgccgcgggacaggtggatgttactgggcaatgctgccgacaccgccaccaccacttacgtcctcgacttcccgcagccgggatcaaagccttcctctgagtcagcagccgccccatggatgcccagatctctccccggggcatccgaccaccacttcgacagcccagatacttcccggggacgcaaacaccccattcgaagcccagtctcaccacttgattctcagcccatcaacccagcggccagactatggaattaccatgctatccaacatcgatggtattggaagacagacattctgatagagtaacactcggacatcaagaagtccttcaacccatgccagtataaaaatccattattatccacgaacaggtatgactgcaaaaatatcacagaactccaggacgtaaccccatccccaagggtaggagaagagcaagaacgaaaaagagaagaaccacaaagagaagccagaaaggcacgagagcaggacacgggaggcgggcagcgcagagagagagaagaaagcaagccgagacaaacgcccagcgagcccgacaaagagaagcagacgaaacagtagatacacaggagaaacaacgagcagaggcccccg

SEQ ID NO: 705038 - DNA, 764 bp, Homo sapiens
agcggctggaggacggagcacggaaacaggagcccgatgccataaatgtgaatacccagcagaactggattgcgccgtggggaaggctcctcaggataaaccctttgtagggaagaagaatactagcagagatgcccaagctgcaggtgtgaactctgtgataggaggacaaagcagtgggggctggaaaccaaggaaggccccagccgacatcttacttctcgggcatatgcctgcgagctctgcgccaagcagttccagagcccttccacactcaaatatgcacatgagatgtcacaccagtgtggagaatgccactaccagttgcaacgacctgcgtgactggctgcattttcgggtgcacaggaaacttagcaggaagagcatgaagcgcatccatcctggagcttgaacggagttgcgtctgatcagtattgcataacaatggcattgcaccgttgacatgagaccctcaaaattccagtgaacagaatccatactggcagaacaagcgttacctactgtcagttctgcgtttcacgagattgtccgtatctctccagcaagaaggaatcagcgagcagaggcatattcgtggagcataatgggaagggctatgcctgcttccatgtgccccagtaatttgcataagcgagctgctggccgtggaatgcagccaaaagaaagcacttattcatagagcccaagtcagcaggagaaaataggtgacgtgtgccaggaaaaagtcaaatccttggagaatc

SEQ ID NO: 705039 - DNA, 387 bp, Homo sapiens
tgagtgagatctagaggatcccttcatgtcgagacatggtgggtagaactatgtaagaaaaggccattcactaaggacgcaatgttaacagaagggtattaaaaccacagctaagtagctctattataatacttatccagtgactaaaaccaacttaaaccagtaagtggagaaataacatgttcaagaactgtaatgctgggtgggaacatgtaacttgtagactggagaagataggcatttgagtggctgagagggcttatgggtgggaatgcaaaaattctctgctaagactttttcaggtgaacataacagacttggccaagctagcatcttagcggaagctgatctccaatgctcttcagtagggcatgaaagccctcgata

SEQ ID NO: 705040 - DNA, 276 bp, Homo sapiens
agcctagaccactgatactgagatctacgggtcatgtagactgtgtatccaggagcagaaacttgtattctacaggatccaggatctacccagacaccaaagatgtataaacagagagaacagacctagaaatgggcctgtctggcatttcagagtcaggcaaagcaggcagggccaggaagcatctgtgggtctacacaagaaggtacctgtgagggctatcagtagtaagccttctagacaagctaggaaacttaggcgcctaccgccaaagcc

SEQ ID NO: 705041 - DNA, 119 bp, Homo sapiens
  misc_feature (7)..(7): n is a, c, g, or t
  misc_feature (15)..(15): n is a, c, g, or t
  misc_feature (34)..(34): n is a, c, g, or t
tacacancaggagtnggtctatgccagtcccctnatgcatatgaggcaggctgtgctcgaagccctgagctgggatgtctgagagtctgggacatccaggggctgcatcttcatcctca

SEQ ID NO: 705042 - DNA, 101 bp, Homo sapiens
cggatcacccatttcaccagcccattgtgcctagtggtccggctggtgtccacgcccgaggattggaagggggctctggaagggcaggtccatggtgccat

SEQ ID NO: 705043 - DNA, 278 bp, Homo sapiens
  misc_feature (20)..(20): n is a, c, g, or t
  misc_feature (31)..(31): n is a, c, g, or t
  misc_feature (128)..(128): n is a, c, g, or t
  misc_feature (227)..(227): n is a, c, g, or t
  misc_feature (235)..(235): n is a, c, g, or t
  misc_feature (266)..(266): n is a, c, g, or t
caattggccttcctctgatnacaaatatgtncccttacaacatatgtcatggatttgcatacaaagattcttgtcattccttaataaactgtggcacttggtatttgaatgtgtgtggaaataagggnagtcaagaggttaaatgctggacttattaatgggataggaataataaggaggctgaggctggagaattgcttggacccgggaggcggaggttgcagtgngccgaggncgtgccactgggctccagcctgggcatcagngcaagattctgt

SEQ ID NO: 705044 - DNA, 175 bp, Homo sapiens
tgggtcagtctagaggatccctaatgtgatactatcacacaatcaggatgactgtgttaaaaagtcaaaaataacagatgtgattaggttgtggagaaaagggaatgctgatgggaatggtatattagttcagcctctatgggaagcagtttggaggtttctcaaataacttaaa

SEQ ID NO: 705045 - DNA, 1893 bp, Homo sapiens
  misc_feature (412)..(412): n is a, c, g, or t
  misc_feature (1311)..(1311): n is a, c, g, or t
  misc_feature (1465)..(1465): n is a, c, g, or t
ggccgcgtccgcgacggcggcacgtgctctgcgaggttgtacggaccccgccgcacggacactagcgaatcgatggcggttgagctgttctgtgctgctgcaattcgcgctgctgggcccccacgggatcctccggcgcgactggcccgggcgatggatcttcattactccgacgaaaccatccttgggcgtcccgaggatacctgctctcagactgccgtcccttgcagttgagcatgcgccggcagtacggtcatcacgggctagcgcgccctgggccgttgcaccgcggggaggacgattgggttgccgttcaagcgatgcgaccggccgctcgtcgcacgggtcgcgaggtagatacctcgggatgttgtcccaagggtagcgcagcgttcccgaagcttatctcaanctggtggaggatgagggtatcgtacccttgtctgtgctgtccctacgcacacagtatggtccccgagttggcattcacccgcggcaccaaatcaatttcgcaacgttgctacccgcaagtgggacgccttacctcatagaggcatgtagaggaggtcctgtttcgaataagctcagagtcagggcagacccagcgaattgagaggcagacgcgcgaggcaatgacccggagttgcctactgaccttggtgcatctcgaacaagaaagcttgaggcaagattgccaccggacgtccaacgaatccccttggggttactaagctttggaagcttcggagaggaccccataggggggattagcctacaaccgacacttccgactcgtggggaaatcttcaattggcaagaggcaaccagaagaggacctgctttccaatttggaaacaactttggggttccctccgacaaccgaaaagcccttatgcggttgtccgtgtttcccgcctcgacagtggtattcccacgttccggcctacgggtgacctcgtgttctccaagaaggcctcaatatacaaattttggaatgcacaaccccattgaaagacctatttgtgtaagggcccccgtgaatacccctgagacacccaagttaaccacggaggttggccaaaaacgggagaaccacaaggtacttaaccacaagggggcctctcctgaaaccccaagaggtcaccatctccctttccagatggcttccgcgcgatttgcacgccagactcagcttattgagccgggcccctagctgtagggtcgcctattagctatggcgaggcaaaattcgatgggtcctatgataaggctgcattatggttgacgtttcggcctaacgcagttcagatnctgtgcacatcactacgcaaaggaaaggcgcccgaggaaaatgccccagaaaggaacggtgacccctgtggaaattaagtgaactgaaaaggaccgagaactatcttggcagccccctgttaaaaaggaagagggtcgacagacaccaatgaanattatcaaaatggcgagcaactgatccgccgaagagtgaacattatcctgtaggaccagaggtgacacctaaaggaaaggaccccatgagaccaatggtattagcaccgaccgacgggagatacagcacacacacagggatgaggaaagatcaacagcgttcacagctcatgaagaaaaatacgcacggagtggaaatgcacgatcgaatgacagtctattcttagaaaaagtgaggtgtctcacaacgagaaatgaagcagtgagattagtacgaagaagaaagcaccaaagttaagctgcgcagagaataattagtagatcgatggagacgacaatcagacagatatcgatagatcagtcggtgtgtctgttatttctccgcggtactcgtctctgtagaaagaaagaagaggaaggaggaaaaca

SEQ ID NO: 705046 - DNA, 1335 bp, Homo sapiens
tgcaaaacaccaaatggctggatgactgccggtgcatgcgtgtgggggccctgggggccctgtgtgtgccctgtggatggggaaccgcggtgggcttccgcggagtgtttcggcatgttgtgcatcctgtgggcctgttggtctgcaggccggtggactggggcctgtgtgtgccgattgcctgctggatgctctgctgtgatgtgcatatggccggaggactaacggatgtggattgcccgtcaccagagttgggccggttggtcaattgaccattgaagatcaatgtcccttggatggaggatctagtctcgttcttcccatggcctacttaagcgcgaaactcatgaataattcacttgacgtttcattacgcttggtggggcctcgtctcagattggactgagggtttctgacacgatctaattgcccatggttgcaatgagaggccatggaccccggttgccggtgtccaaggggccagccagtgtttcaaatgggccgatttctggttaggcctagtactggctgcggaactttatcaatatttgggcccaactcgtccgcgacatatgggaggatggttaaaatgtttgccttccccagatcggtgcacggggtagtggccagcccgtggacgtagttccacttgtttggtcgtagccgaagtcgacgtccacttgtggcgcaaaaggctttctacccaggttccggttcaccgccctgtttgttctgcccagtaaggtggcatttagcttgctgctgtgtgcaagcctcgacagcggcaggtccggcgctcgctaatgtcttcccgctcactactctttggttctcccgttttggcgtcgtgtgggtgtgagccacgggtgccggtctttggctgctgctatcctttggttgtgcttggggttatgcggctcctttcgaattcctccgttgatcagactgcctatgttggtgttccatcgtttgggtcgtcttccgggttcgttaccgggtcgcgcctttggtttggccgccattatatagtaaacgagggacgtttcagtctaccgagttagagcagttagtgccgtagggggtaagtcttcgggagtttcggaccctttgagctatagcaggcgcgcatttcaagggctccgcggggggtagccgttagtacacacggtgtgcctccaacccacatttggttggacagtaacgctttatctgcggccaagaagttggtcgcaggacgcttttagtcgtgagttgcgcacaattattccgttaaggtcgaccgcctaaacgcggggctataactctttgagccccaccgagaaagccatcttgtgg

SEQ ID NO: 705047 - DNA, 950 bp, Homo sapiens
ctcggacgacgcgagcgccgcgcttcgcttcagctgctaggctggcccaaggtgaggcgaccgcggagggatggctgaggggcgagcaggagccggagccccggggccgggccggatccggaccgccagggagggcagaccatttcagagatgtcttccagacgtaccaaagatttacttcagagagtacagtggggatcgaatgtcctagtaactccaaatccgaaactacattagaaaaattcacagggagaaattgcacacttacagacatcagtggctgaaactcacaagtggcgacaacggcaagctgactgataaccgagagacacagaccttttggacgtttatgtctagaacacttcgacgtccttgcaggctgagacggagacgacatgctatatcaagctcacagataacggaacaaaggaaatacagccgactgacgcagaccaacctgaccggccacgactactcgtacttaccgccattgcttgacaccacgctggcacgagacaacgagacgaacggacgcacacacggacgggagcaagagtgtcgaaaagcccttaatctgaaaggagacacagacggtattgaaacgcaacagattgtctgcttgcaaccgtcacgaacttgctgaaactttgaaaagccaaaccaacttacactcacggatctatatcacgagaaccttgtggctccccacactggcatttcaacgctcatttcacacattaccagtaagattagtttcccgctgcaaccatcggggacaccatacccacagcgctggacaacgaaattgcatcgctggggcaacaaaaccacacttccaggaccaacgtgggactccgaagggttcattggcatatcacggacgaagcccgcgcagcaacagatcactaacggataacacaggggcacctatttgaaggccacaaaagaat

SEQ ID NO: 705048 - DNA, 107 bp, Homo sapiens
ggcaacatcagtgaatataagcatctatggatggcaaatacagctcctattgataggacatagtggaagtgagctacaacgtactacgtgtcgtgtagtacgatgtc

SEQ ID NO: 705049 - DNA, 458 bp, Homo sapiens
gccaggaaggcagtgttgtaaggtgtcctcagccacataaagatgaaggtccgcacgtcacaggccttccggcggccgaagacactgagtcttcggagtcagctcgaatatcctgggaagagcgctcccgggagggtcaagcttgtcactagtgctatcatcaagtttgcgctgtccactgagtgtgccatgtagaagatagaagacggcagcacacttgtgttcagtgtggatgttaaagccacctggcaccagattaagcgggctgtgaagtacctgtatggcattcatgtggggaaggtcagcgccctgattgggcctgatggatagaagaaggtatatggtcgttgggctcctggttacgaggctttgggctgttgtcctcactcccccctcccccctcctcaatgtagtggccttggatatcctgtttgttaataaagacaattctcccagca

SEQ ID NO: 705050 - DNA, 1104 bp, Homo sapiens
  misc_feature (330)..(330): n is a, c, g, or t
  misc_feature (854)..(854): n is a, c, g, or t
  misc_feature (875)..(875): n is a, c, g, or t
  misc_feature (896)..(896): n is a, c, g, or t
  misc_feature (948)..(948): n is a, c, g, or t
gagcattgataggcttcggtctgagcacgtccgcaagttcctcctgaccttcagggagcctgacttagagaagaagtactccaagcaggtagacgaccgatttggtgcctatgtggcgtgtgcctcgctcgtcttcctcttcatctgctttgtccagatcaccatcgtgccccactccatattcatgctcagcttctacctgacctgttccctgctgctgaccttggtggtgtttgtgtctgtgatctactcctgcgtaaagctcttcccctccccactgcagaccctctccaggaagatcgtgcggtccaagatgaacagcaccctggnggggtgttcaccatcaccctggtgttcctggcggcttttgtcaacatgttcacgtgcaactccagggacctgctgggctgcttggcacaggagcacaacatcagcgcgagccaggtcaacgcgtgtcacgtggcggagtcggccgtcaactacagcctgggcgatgagcagggcttctgtggcagcccctggcccaactgcaacttccccgagtacttcacctacagcgtgctgctcagcctgctggcctgctccgtgttcctgcagatcagctgcatcgggaagctggtgctcatgctggccatcgagctcatctacgtgctcatcgtggaggtgccaggtgtcacgctcttcgacaacgccgacctgctggtcaccgccaacgccatagacttcttcaacaacgggacctcccagtgccctgagcatgcaaccaaggtggcattgaaggtggtgacgcccatcatcatctcagtctttgtgctggccctgtacctgcacgcccagcaggtggagtccactgnccgcctcgacttcctctgganactgcaggccacagaggaganagaggagatggaggagctgcaggcctacaaccggcggctgctgcacaacatnctgcccaaggacgtggccgctcacttactggcccgcgaggcgcacatgatgagctctactatcagtcctgtgagtgtgtggcggtcatgttcgcctccatcgccaccttctccgagttctacgttgagctagaggcaacaacgagggtatcgagtg

SEQ ID NO: 705051 - DNA, 412 bp, Homo sapiens
  misc_feature (270)..(270): n is a, c, g, or t
  misc_feature (287)..(287): n is a, c, g, or t
  misc_feature (298)..(298): n is a, c, g, or t
  misc_feature (363)..(363): n is a, c, g, or t
aaaaaaaaaggagaacaggacaaaagggggaaaaaccaaagaaaagaaaggcaacacaaaaaacgggaggccagagaggaaaaagaggccgaaggacgagggaaggagagaaaacacccagaaaagaaacgaggaaacaccccccaccccctccctgaccccacgagacttcgaaaaaccccgtcccggtaaactccccaatctgaaagtcacgacggacggaccacctgaccgaagactgcccccaaactcctcccacaaccagcgagncaggggcccgctccctncgaagatcggnacaccccgcgtcggggcgcgagactgagggtggggtgggtgacggaacccgggaccggaaggggncagcgggacagactgtggagggcgggaaggcggggcccgggacgctgga

SEQ ID NO: 705052 - DNA, 867 bp, Homo sapiens
  misc_feature (330)..(330): n is a, c, g, or t
gagcattgataggcttcggtctgagcacgtccgcaagttcctcctgaccttcagggagcctgacttagagaagaagtactccaagcaggtagacgaccgatttggtgcctatgtggcgtgtgcctcgctcgtcttcctcttcatctgctttgtccagatcaccatcgtgccccactccatattcatgctcagcttctacctgacctgttccctgctgctgaccttggtggtgtttgtgtctgtgatctactcctgcgtaaagctcttcccctccccactgcagaccctctccaggaagatcgtgcggtccaagatgaacagcaccctggnggggtgttcaccatcaccctggtgttcctggcggcttttgtcaacatgttcacgtgcaactccagggacctgctgggctgcttggcacaggagcacaacatcagcgcgagccaggtcaacgcgtgtcacgtggcggagtcggccgtcaactacagcctgggcgatgagcagggcttctgtggcagcccctggcccaactgcaacttccccgagtacttcacctacagcgtgctgctcagcctgctggcctgctccgtgttcctgcagatcagctgcatcgggaagctggtgctcatgctggccatcgagctcatctacgtgctcatcgtggaggtgccaggtgtcacgctcttcgacaacgccgacctgctggtcaccgccaacgccatagacttcttcaacaacgggacctcccagtggtgagttgatgctcctcggatagggtcgctccctgccctcagcacagagcagacagggagggcagctggtgcccaggtgggaggggccttggtggcgaggtgggaggagaggaagtgt

SEQ ID NO: 705053 - DNA, 747 bp, Homo sapiens
gcagacctccgtggcacccaggttgcctctgtagtgaacttctttgtaacctaccaggccagttgtatatacagtgtgtcaggtttatccgggtttcagttgtgaggcagtttattcaaagtgagacagaagtgccacggaaaagaggcaggagtgtgttaggtggtgggtccattaagactctgctgtgacattgacatattcagctctgcagagcactggacttcctttacaaactctaccgagatgctggattacgacacaatgaggagaagctcatcgggccatcagacagatgctcctagagggtcctgatgtttttgtacgctccaggtcaggtggatcgctggttttcccagttccctttgctcatgcttacttagaggaagaacagacaaggggggtacctctttccaagtaccttctaagatgaaacactcaagggagagtgctactcacggcaaactttgcttggatcctaaacatggactggtcttggggtgtgtaactcccggtgaacgttcatagacatccgccaacagttcgagcgtgaccagacacggaagtacacagaaggtgtaaagactggcacaagcggcacagggaagcaaatgcacacgcggctacagagactacaagtctcggggacaacaccgagtacgcacagaacgactggcggaacatggacctctgagagactgcctcgaaccatcagccactggaacatagggccacacagagcaaact

SEQ ID NO: 705054 - DNA, 145 bp, Homo sapiens
gggtcgatcgagctcggtaccggctcgtagtgtggccgtcgaggggcaccttgcgtggctcgtggtgggcggcttgctcctgctgggccttgcctcgaacctgagcaatctcagcattggccctgtccagtttctcctccacgtg

SEQ ID NO: 705055 - DNA, 977 bp, Homo sapiens
  misc_feature (330)..(330): n is a, c, g, or t
gagcattgataggcttcggtctgagcacgtccgcaagttcctcctgaccttcagggagcctgacttagagaagaagtactccaagcaggtagacgaccgatttggtgcctatgtggcgtgtgcctcgctcgtcttcctcttcatctgctttgtccagatcaccatcgtgccccactccatattcatgctcagcttctacctgacctgttccctgctgctgaccttggtggtgtttgtgtctgtgatctactcctgcgtaaagctcttcccctccccactgcagaccctctccaggaagatcgtgcggtccaagatgaacagcaccctggnggggtgttcaccatcaccctggtgttcctggcggcttttgtcaacatgttcacgtgcaactccagggacctgctgggctgcttggcacaggagcacaacatcagcgcgagccaggtcaacgcgtgtcacgtggcggagtcggccgtcaactacagcctgggcgatgagcagggcttctgtggcagcccctggcccaactgcaacttccccgagtacttcacctacagcgtgctgctcagcctgctggcctgctccgtgttcctgcagatcagctgcatcgggaagctggtgctcatgctggccatcgagctcatctacgtgctcatcgtggaggtgccaggtgtcacgctcttcgacaacgccgacctgctggtcaccgccaacgccatagacttcttcaacaacgggacctcccagtgccctgagcatgcaaccaaggtggcattgaaggtggtgacgcccatcatcatctcagtctttgtgctgtgcaggtgcagtgctagctcttcgttccctctaaagggtgtgcactctttttattcctactcttgcaaaaacagatacgattatgatttcccatggaaattgaaaagtctatttaaataatttaactattaaacactttcactggtaaaaaaaaaagtcga

SEQ ID NO: 705056 - DNA, 269 bp, Homo sapiens
  misc_feature (171)..(171): n is a, c, g, or t
  misc_feature (244)..(244): n is a, c, g, or t
tacagatctaatcagtgcatgtggggatgtgatgtaggctgggcagaacctacaacgcgaggtgctcaaggtctggggaacccaagagtgatgagatgaatgttaaggttgttggatttgtgagcattttctgcccatgctgcagacagtggccaagaacaaggaccaggncacctatgatggattatgtcgaatggactctcgggtgtcttgacaacggaaggaaatcggcaccgtccatggngtgctagaaataccggcatgttctt

SEQ ID NO: 705057 - DNA, 99 bp, Homo sapiens
ttcgtaacagcgccatcgagcgggtcatgctgctgtgaggtgcagttgcagcaagcagatcactgcagatagcaatacaaaggcattataagactgcgt

SEQ ID NO: 705058 - DNA, 213 bp, Homo sapiens
ttccccccccccccaggggggggttttaagggcccttttaaaaagaggggggggtttccaaaaacctttccttccccccccctgttgggggggccccccccccaccccagccccttttttggggtttgggggggggggttccccccccccccctggggcttttttttttttagggtttttccgggggcccaaaaaccgccccccgttttttta

SEQ ID NO: 705059 - DNA, 445 bp, Homo sapiens
  misc_feature (195)..(195): n is a, c, g, or t
  misc_feature (216)..(216): n is a, c, g, or t
  misc_feature (237)..(237): n is a, c, g, or t
  misc_feature (289)..(289): n is a, c, g, or t
cagggccagcagtggctggggtcgggtcctcagagcccgttgttaggagccacggcggtcctcaggcctgtccaccacctgccccacagcccctgagcatgcaaccaaggtggcattgaaggtggtgacgcccatcatcatctcagtctttgtgctggccctgtacctgcacgcccagcaggtggagtccactgnccgcctcgacttcctctgganactgcaggccacagaggaganagaggagatggaggagctgcaggcctacaaccggcggctgctgcacaacatnctgcccaaggacgtggccgctcacttactggcccgcgaggcgcacatgatgagctctactatcagtcctgtgagtgtgtggcggtcatgttcgcctccatcgccaccttctccgagttctacgttgagctagaggcaacaacgagggtatcgagtg

SEQ ID NO: 705060 - DNA, 213 bp, Homo sapiens
ggaggcctcgctggacatcaggcgcatggaaggtcagctggatggccacttcggcagggtcggagccctggccgccatactcgaactggaatccatcggtcatgctctcgccgataccagacatgcctcttgtccttgcgggttcttgctagatgtaccatgttcttctggcgccacagctgccgctagagtggggtacacgctgcgtctcac

SEQ ID NO: 705061 - DNA, 1390 bp, Homo sapiens
  misc_feature (60)..(60): n is a, c, g, or t
  misc_feature (662)..(662): n is a, c, g, or t
tgtgtgtgtgttcatgctgtggaactggtctcacacaggatgtgtttccctcatttcagntttggcagttttgggttttccaaggtaccaccagagcagtgggtgtgtgcttttggggtaccatatgctcagattaagtaggaggatgcatggacacactgccccatcttttctgacacacgcacacgtatgtacacacatgcacacaccctccttcccctaagcaaaacgcagatggaataagaaaacaaaaagctgctttcccatcccaggccgagctggaaccaagggaagcaatctcatcctgcgacaggcagtgtggtgccctccacaccctgagatttcagacgtttgcggcttacagaggcagcgcccacagattccagagtgcttacagaaggccaggtgctttgcaggctgggacgaggaagccaagcctccctggcctactcagttggccaaggtgcaggtggctcttcctggagatgttcactcagactgggggatgcaatgtgcagccttcaggtttgcggaaagggagtggccttgacctccaccggcaaaccaggcagaggaatgggtagagcccagctttagagtccacagggaaagctagcaggaattttgttttagtgggagggggcagttaaacataccaaganaaaaatactatttttataacctatgaggaagacatttggaaaatgatactctagcacagaattcagtggaatccttagggcccatgcccaaatctttccattgcttctcaggttagaatgatcttcacctccaacatgagcttggaggtgatgaggcagtggctctgtgccagctgccacaatgtgactttgatgtccacctgtaccacctctcactgggctctagcaccaccctcccctccccgcacaccaactgaacacagctctgagaagcaaagtgtgtggacccaaaactgccaagcctgagtctgtcccgtgcttctgctgctccatcctttgagttctgcattgccatcctgacgtcggccacaggaggcctgctttcttccagctgttgttctcaagttccctgcccctccacatcgcccgccagtggtgttgggttttcgttctgcttccaacctgagtaaagtgtgtgtgctgagttcatcccatgttctcccatggtcatggcttcccggccccatggggacccctctcccatcccagcagtgactggtgacagtgtgcaggtgcagtgctagctcttcgttccctctaaagggtgtgcactctttttattcctactcttgcaaaaacagatacgattatgatttcccatggaaattgaaaagtctatttaaataatttaactattaaacactttcactggtaaaaaaaaaagtcga

SEQ ID NO: 705062 - DNA, 264 bp, Homo sapiens
cgacataatagcagcaaggaaaatcaggagaaacacaagacggcagagggacgcagaacgaacaaggaccacacataaatcaatcaccgaggggccgaagaagagaggacagcagataagaacacaagcagggccgaccgccacgcacaacagcctaaaaaggtagacaagaaaaggaagtaagaggccaaacaagaaccccaaacagagcaagaagtaaaagaacagggagacaaagaacacaaaaagatatacaactaaaag

SEQ ID NO: 705063 - DNA, 544 bp, Homo sapiens
tgtgtgtgtgttcatgctgtggaactggtctcacacaggatgtgtttccctcccctccccgcacaccaactgaacacagctctgagaagcaaagtgtgtggacccaaaactgccaagcctgagtctgtcccgtgcttctgctgctccatcctttgagttctgcattgccatcctgacgtcggccacaggaggcctgctttcttccagctgttgttctcaagttccctgcccctccacatcgcccgccagtggtgttgggttttcgttctgcttccaacctgagtaaagtgtgtgtgctgagttcatcccatgttctcccatggtcatggcttcccggccccatggggacccctctcccatcccagcagtgactggtgacagtgtgcaggtgcagtgctagctcttcgttccctctaaagggtgtgcactctttttattcctactcttgcaaaaacagatacgattatgatttcccatggaaattgaaaagtctatttaaataatttaactattaaacactttcactggtaaaaaaaaaagtcga

SEQ ID NO: 705064 - DNA, 1167 bp, Homo sapiens
  misc_feature (60)..(60): n is a, c, g, or t
  misc_feature (662)..(662): n is a, c, g, or t
tgtgtgtgtgttcatgctgtggaactggtctcacacaggatgtgtttccctcatttcagntttggcagttttgggttttccaaggtaccaccagagcagtgggtgtgtgcttttggggtaccatatgctcagattaagtaggaggatgcatggacacactgccccatcttttctgacacacgcacacgtatgtacacacatgcacacaccctccttcccctaagcaaaacgcagatggaataagaaaacaaaaagctgctttcccatcccaggccgagctggaaccaagggaagcaatctcatcctgcgacaggcagtgtggtgccctccacaccctgagatttcagacgtttgcggcttacagaggcagcgcccacagattccagagtgcttacagaaggccaggtgctttgcaggctgggacgaggaagccaagcctccctggcctactcagttggccaaggtgcaggtggctcttcctggagatgttcactcagactgggggatgcaatgtgcagccttcaggtttgcggaaagggagtggccttgacctccaccggcaaaccaggcagaggaatgggtagagcccagctttagagtccacagggaaagctagcaggaattttgttttagtgggagggggcagttaaacataccaaganaaaaatactatttttataacctatgaggaagacatttggaaaatgatactctagcacagaattcagtggaatcctaagcctgagtctgtcccgtgcttctgctgctccatcctttgagttctgcattgccatcctgacgtcggccacaggaggcctgctttcttccagctgttgttctcaagttccctgcccctccacatcgcccgccagtggtgttgggttttcgttctgcttccaacctgagtaaagtgtgtgtgctgagttcatcccatgttctcccatggtcatggcttcccggccccatggggacccctctcccatcccagcagtgactggtgacagtgtgcaggtgcagtgctagctcttcgttccctctaaagggtgtgcactctttttattcctactcttgcaaaaacagatacgattatgatttcccatggaaattgaaaagtctatttaaataatttaactattaaacactttcactggtaaaaaaaaaagtcga

SEQ ID NO: 705065 - DNA, 111 bp, Homo sapiens
tggccccgtccatgtacactgcttttgctgccgcatttgcgactgctgaactgtggaatggctgttggtccgtggcatgaggaggcgtgctcatagttcccgggttgttgt

SEQ ID NO: 705066 - DNA, 380 bp, Homo sapiens
  misc_feature (1)..(1): n is a, c, g, or t
nctttaacaggaaacagaggaggtgtggcaccgagtttccacattgttatttacctcaccgccactatttgggattggccttccttgttgaagcaaagcctcttgcaactcatatcttgtaggccacaacacccccaggtctggagtgccagctgtctttgtctgaacgagccctatagcccacctccaataatggacgtgtgggacaggcactcaggctggaacgctctcttctctcttcttgtcaaggggtcaatgaccgcgggcacaaagaaccctctctctacattgtcgttcacaccttgggacttatctagaatagcacacaatagtagcaataatacatgtctcatggttataagtgtgtggaatctccctgg

SEQ ID NO: 705067 - DNA, 928 bp, Homo sapiens
aggatcgcgacgggaactggagcccgaggtccccgcgcggcccgggcctggcgccctgaggggaagagcggcccggcccgagggtgctggggtggagagttttactccaatacctttcctagccatgacggacgggatcctagggaaggcagccacaatggagatccctatccacgggaacggcgaagccaggcagcttcctgaagatgatgggctggcagcaggacctccagcaggtgatggtgtcaggacccaacctcaatgaaaccagcattgtgtctggtggctatgggcggctctggctgatgcgactcatccccacagggctctggccgccatccatctcacagcaccactccttctggccctggagatgcacgtggctcggcggccattcgctggagcaaaagtcacgacatcgtcaacgaacactggcggcatcaacacctactaagtgcacaaagcaactgtcactcagcaacgactctcgcgccgacggctcccggcactgtggacctggcagctagcagctgccagcacttgagcttgcctgcgctgagcacgaagcgccacgtatgacggagtgtcctgcagcctggcgccggcgcactgacagcccacctctacagactgctgccagacccagcatgcactgggtgactgcctttgctgacctcagccagaagtccacagagcttcaggaggaattggctacaatgcagagaccccgaaactactatgccagaatgggcgaaacgccgccaggacccgcgcactcccccgcctctcaccatcacacactggacacccagaccacgcgagacacctcctgactgtcaaacggctgcacgcgccggcggacacgagcctccggacaaacaagaggacgcgatctggccccggggcggacagagccgccgcggggccg

SEQ ID NO: 705068 - DNA, 89 bp, Homo sapiens
gatggtactccgtttatttttttctactctatttcaggcgcactcttgataaatggttacctcagaataaaggtgactatgatatattg

SEQ ID NO: 705069 - DNA, 565 bp, Homo sapiens
cgaatgccaatccaaggttcccaaatcagcccgcacatccacaagcacataaacaagcacataaactttgggcggtgtgatgtttgtaacagaagcgactatgatctattatagtgtttcgcgttctgtttacgcgaattccctaacgctaatgaaatgagtagttgttaaaggtcacttgcgatgccgtttcgttttttaacgctgaatcgttggatgacgcgcgatctaggtacccttttctaagataaccgattcctgtcgagctatacgagcttacacttctctacgccttgtcccttgacgcccgggcgtttggtttcgctaataaagaatgagccttaggagcggtaggagaggtaccagtgctcgagctacgactaagccaacggactaactatatgcgaaggggttaaggacgcgcgataagctatacctcttgggagtacctttcccggccctccgttcgtaaagtacgaatctttctagactcggaaatagggagtaggtgcggtggcggccgtaggcccgcctcgcaaggactttttttacgctttaggcgagg

SEQ ID NO: 705070 - DNA, 1650 bp, Homo sapiens
gagcggggggaccgcggggagctctagctgcggcatgtctgcgtctctactgctctgggaggaggaagagaaggaggaagaggaggaggaggaggagggggaggaagaggagacaggcgcaggggatgggaagctgtatgccgaaagctgacacagcaagaaagttctccccacatcattaccgcttacacatactctcaaggtacacaatagaaagcgtaaggatactgacgacaggagctgcaagacagagtgaccagaagcagaagtagagaacaacagatcccaggggaataggaggagagggaactcagacagcatatggaagaagtacaaagagaaatgtgtatacatgagagagagaatggagcgaataagagataaacgtgattaaaattgggaaggtacaatcagagatgaagaattcagaatgaattaaggtgcgatatagaagagagtagaactggaagaacataataaaaataggggtaatgagaacagtcaaaacaaatgaaatataaatatatgaaaaaaaatcgtaacacagcgaaataaaccattaacacatgtgtaaaagatacatatcaagataatataaatacaccaataaaagacataaatccgcgaggagaatcaataaaattatacaaaggatgaaaacacattcaatggactaggtatgcttggcacagtagtaaaatacacaagaaacacacaagaaagtacaaaccatggagaagaagacacagcaaaagagacatcacagggagagaaccaacaaaaaggacaaaaatcacaataaaactgaaagccatagcagaacacatcagagaaccagagaaaacccataaggaagacaatcatccaaagagacagcacgaaaaagataacacgaaatacaacagccaacaaggaaaaccaagtaacgaacacggaaaaagaacaacactatgcgcaaaagaggacaaagcaacgccaagacacaaacagatgagaacgagcgaaaaagatacacaaaaagagcacaagagaagaaccagacgaaaccaaaaagaagaaacgaaaacacgacggcagcgacaccatgagcaaacgagcacaacgaacagacacacgagaccaaggtaggaaggagcaaaaccagagcgtcaacaagaagcgactacagacaagacagaaaagagaacagccctagaccaaccgacacagagagcaaggaagagaaacacagaaaagtggcaacgtacggaaaaggcctacaacgataccaggcacacacagagaagtagaaaaaaccgagacaggaaccgaaagagcagctgaggagagcgagaagaccaagcaggagacgggacgcatgaggaacaagacagggaagaagacaaagaaagaaccacaggagcaagagagcagaaggagagacaagaaagcaagggagacagagacgagagagagaagaagagaaaggccacgagacagaacagaacagacgacgaaacgcgacaggaggagaaaggggaagaagagaagacacgggaacacaggacgagagaaacaagaggaacgaagaagaaggaaggaagcaagggagaagagaacgcagagggagacagggaagagacagggcagaggacggaggagcacaccgaa

SEQ ID NO: 705071 - DNA, 821 bp, Homo sapiens
  misc_feature (755)..(755): n is a, c, g, or t
  misc_feature (771)..(771): n is a, c, g, or t
  misc_feature (807)..(807): n is a, c, g, or t
gtgaaatgaatgacagcaatattataagtcatccggttccaagatggccgaataggaacagctccagtttacagctcccagtgtgagtgacgcagaagacagttgatttctgcatttccaactgacgtaccaggttcatctcactggggcttgttggacagtgggtgcagcccatggagtgtaagccgaagcaggacgaggcatcacctcacctgggaagtgcaagaggtcagggaattccctttcctagccaagggaagcgtgacagatggtacctggaaaattgggacactcccaccctaatactgtgcttttccaactgtcttagcaaacggcacaccaggagattatatcccgcgcctggcttggagggtcccacatccacggagccttgctcactgctagcacagtagtctgagatcaaactgcaaggcagcagtgaggctgggggaggggcatccaccattgctgaggcttgagtaggtaaacaaagcggctgggaagctcgaactgggtggagcccaccacagctcaaggaggcctgcctgcttccgtagactccacctctaggggcagggcatagcagaacaaaaggcaacagaaacttctgcagacttaaacatccctgacagctttgaagagagtagtggttctcccagtacagagtttcagatcttgagaacagacaggcttgcctcttttaaatgggtcccttgacccccaagtagcctaactggagaagacacctccaatangggctgactgatcctnatacagcttgggtgcccctttgaaacaaactttcanaggaaggatcaggc

SEQ ID NO: 705072 - DNA, 117 bp, Homo sapiens
atcacttctgtagtattatccataacaattttgttgtgtgtgtttgagacaaggcctctgtcacccagactgtagtgcagtagtaccatcatgtcttactgcagcctctgactctca

SEQ ID NO: 705073 - DNA, 759 bp, Homo sapiens
  misc_feature (154)..(154): n is a, c, g, or t
  misc_feature (470)..(470): n is a, c, g, or t
gaggacagccgttattccccttctttttctctgcagctcggcttataccaggggtgtgttctcgcgacatgcacacaggagtgaggttgctcatcggttacatgattgaggagatgacacttgcaaagccttggtgatgattgcctctgctcantatcttcaccagtgttcatttgatgatcatgccaaattcctgaatgaagcatctgaattctgaacatcatgtcgttgctgatgagtcagctgataatggagacagatcactgcgtacccttttgggcgacaaatgatgcactgctgcaactcttcgtgaatcctatggtgaagtggccgactgctgtgcaaatcatgatcctgagagatatgactgcttgttgcatcacaaagatgacaacccaatcctccccttattgatgagaccagaggttgatgtgatgggcactgcttctcatgacgatgaggagacattntcgaaatactacttatatgaagctgccagacgacatccttactattatgccccagaactccttttctctgctaagaggtatacagctgcttttacagaatgttgccaagctgctgatgaagctgcctgcctgttgacaaagcttgatgatcttccggatgagaggaatgcttcctctgccaaactatactcaagtgcgccagtctccaaacatttggaggagctttcacagcgtgggcaggagctctgctgaaccagatatttaccattgcttattttgcagatttcct

SEQ ID NO: 705074 - DNA, 651 bp, Homo sapiens
ggagcgcccccgacccccgtcccgtggcgcccgcccgccgcctgaccatgcccttcatccaacagccacaacgcactgaagctgcgcattcccgagccgaggacaagttccaccgaccttgagcgcccacaacaaccacaatggccaaggttgctgaccccgcgaagctgtacgtcggacgctgcgcgccatagactcacgccgagcggcattcacgcatggacgactgctcattccagacctaggcgttggacaaccctgggccacccgtacactcactgaccgtggagctgcgctggccgggggacgtaggagctcctatcgaaagtgttcaacggcatctctatcgtaccaccatcatcgaggacccgcgcaccggtacgggctacgacgccccagcgactgagcacaacgcaccgacgctcaaccccgacagaccttgccaggctcgcgagacgacctggaccccaagctacgtgctgaagctcgccgggtgcgcaacggggccgcagcatccgtgcgcttctgactacccccgcactgaggcccggggaggcgccgcgccatcgagaagctcgcggtggaatgcccttgtccaggcctgacggcgacctggcgggccgatactacggcggctcaagagcatttacg

SEQ ID NO: 705075 - DNA, 835 bp, Homo sapiens
ctttctctcaccttacctggtgataagttccaaatatgttaagggctattaatacaaaaagcaaagaatgtcagtgtaggatgaaaaaagccttagggcaggaaagaatctcttgagacataaagtagtaatcataaaggacaagatggtgaagtcaattctgttaaaactcaaggcttatattaagcaaacacttgaagtgagaagatgatccacaacttgagaagacattctataaatacaacataactgatgaaggattcataaatcacaaaatatagagaactcctattgagcaaactagaacacatcgtgaagacaaccacaagaggaaatagggctttgaaactaactagatgttctgtaagcattggtcagggaaatatgaagtaaggaccacaatgagatcccattttataatccataagattgcaaaggttgggtctgacagtaaccagtggtgagatctgtagggacttgtaacaaccatttgtggatgtgtaaacaggcagcaatgtttaaaaacacaatttatcccttacagaacttgaaacatttgcagaccgtaaatgatcttgtatcaatcccaacctgtatgtcagcaaactctaggcatgtggccactaggaaggcactgtgtacgaactgtcatagttaaacatattacataatagatcaatagcgtgacaaaagtgaaaggatgtctggtgtacagagaacaatgtggataatagataattaatacaaacaagggacaaatacaagaggaaatgactgaacaaggaaaaacacaagaacaaagaaatagaaacaaacgaaaaaagataaagacagg

SEQ ID NO: 705076 - DNA, 1299 bp, Homo sapiens
gtgtgggtgctgtcgtgtattgtgatacgcggccgcgcgtcgggaggaagggcgggagcgcagaatcagagaggacagcgagagaagaaagatcgctggtggtctgcttctggtatgacttctctttggctgtggcgtgtgttcagtcgcgccagtgcttgtttgtatcactgctctgccgtcagggatgcttgcttgtgcgctgcgtccatgcgattatttctcccgcggtggtgtgtgtgtgcacaaattgttcgcgcgcggcgcgctcgcgcttcttgtgggtggtctctcctctccgcgaagtgtgtgtgggttcgcaaggattggtcgtgtcgggacgcgtgttctccccccctcggtgttttttggcggggccctttcttcctggggttgcggggcgtatattgtctgctccccgtggccgcgcgttggagtccactcttgtaggaggggtcttcgtcccggcaaggggcgccgctgcgtgctgttttctcgcttggacgcgctctctttttcttggggtccgcccgcggtggttcctataaaggcccctgctgttttgacgacgtgagttccggactgtggtgtggctgtctgccccccggtgggtgcattcgccctgtggtggagatgagcgtcgccccttgttggcgtctccacgtaggaccaacgccgtgagagggtggggtcccccaagagcaaatgaggtcacgcgcgcccttgggctttggaggcacacccgggaaggaaattgtttatatagactctgataattgtgctgggggatagtagtcgcccccttcaatgagagcaattgtgggccgctcaagcttcttttgagagaacactcgctctggaaatgtgtgaggcactctattgtaggttcgagaagacattttaccagactatccctcggtagagcacccgcgggcacacagcagggacacacaaaatttctctttcatagagcgaacacactgggggctagagtactagtcaccacacatagacgcgaccacacgattatgtcaggaaatgtcagcgtttatacgccacccgcgaatagggggtcattattgctggggagcaggtcaccacacacatagtcgtgagagagagatttgtgacatcagagtctccaccccctatttaatattgattcgtaaaatcaatcttcccctccatctgattcacatgcttcgttactccaccccctctatttcatgtaataagccctttattattatccatagaacaccttgccataaaccttcgaaacaaacaatgaacaaaaaa

SEQ ID NO: 705077 - DNA, 1082 bp, Homo sapiens
  misc_feature (570)..(570): n is a, c, g, or t
ttacataatatattatactagcatttaccatctcactctgctaggaactactaggtatatcgctcacacctcatatcctccctactatgcctagagaggaagtaatactatcgctgttcatgatagactactctcataaaccctcgaacagcccagtccctcttagcgcaatattgtgcctattgccatactagtcttgtgcctgctgcgaagcgagacgagtgggcctagccctatctatgtctcaatctccaacacgatatggcctagacatacgatatcataaacctaatatctactccgaatgctaaaagctaatcgtcccaaagcaagagttatattactaccaatctggacatgactttccaaatacaatcacataggtttgaatcaacgacaagcacccacatgtctaatatattagcatcgatccctctagctactttttgtaactcaagattcaacaaacaaacctgagtttagactggtttcccacagaacgctttttccactccggaagcacccttgaaacagaacaccgctttgcgctatagttacatatatcgtaancgtgaacttacctgagccccgtcatcgagatacactagagaaagagcacaaacagcctactttatccgatgtggaaccaaagcttatcggcgcaaagacatgagacatcctataccgtcctcttatgacattaaagtcctccacgtaacgaaaattcttcccttggcgattcactaaacagttaccatcatgtggcatcggagaacttggtatccataattaggcaatagtcggtgtcttgtcggaataccaaggggtgtaattcccccacccgtgggggatatctcattcgaccccgtagtggaaggctgaaaccagcccaagaaagcggccatggaaatggcacggcctcaatagcaatagcgataattgcctagacagcccttaagtaagggcttcgccttatcaccactaagttcattcgggaggtagttaatcacttcgagaaaagaccctaaggggccacaattaacagcattcctagttactacaggtctgcactggccaaggaa

SEQ ID NO: 705078 - DNA, 157 bp, Homo sapiens
ctctagaggtcccgaatgagtcactctgaagataaacctgaagaatgttactgggagctgctattttatattatgactgctttttcagagattttgtttatggatctgatcaatctagatctctaatatttttaagcccaagcccctttgcgagtcg

SEQ ID NO: 705079 - DNA, 127 bp, Homo sapiens
  misc_feature (11)..(11): n is a, c, g, or t
ttcgtcgacanaacaacgagctagtgtcagcacccgcttctcaaccatggtgcactctacgtcgtcgtcgactcagggaccacgtccttctatgagaggccttgagtgtgcgaagtactctccgtct

SEQ ID NO: 705080 - DNA, 329 bp, Homo sapiens
  misc_feature (41)..(41): n is a, c, g, or t
tttgcatttaagaaaacaattttgaatttatataggagaancatctccttaaaagtgcccataaccaattaacaccaaattcttagagccaatcattgattcttcttgtctgaaaagttttaggaactccttaacacctacctttgaacacatccacactcaatatttactgaatgaatgatcgaaatgaacgagcaaatgaataattagaatgaataatggtttaaaatccctagcaggcctttccatatctgaacttctttgctttctattataatttaataataagccttttggaaattaactcaaatatataccacttgaactac

SEQ ID NO: 705081 - DNA, 362 bp, Homo sapiens
actctaataggtgcgccccgcacatcagaacgagtaagattgaagccacctgtcccgaagggtatgcgctgtgcgcccccaacgtaatggatagatgtgtctcaaatgctgttcagtagagcctaattcaaaaagtaagctcggacggtttcttgggacacgccccatcagtagggcaccaccaatgtgggttcgtgtgatcgcacaagccaaagtcaggaattcgcgcgcgtattcacaacagcctcctgctcttaaccacacggtctggtgcgaaagcccactcctctggtacacctcccatagttctctaaaggtcgcctcaagagtccgcctaaggtgatcctcccctaaaacattcc

SEQ ID NO: 705082 - DNA, 303 bp, Homo sapiens
  misc_feature (184)..(184): n is a, c, g, or t
  misc_feature (195)..(195): n is a, c, g, or t
  misc_feature (199)..(199): n is a, c, g, or t
  misc_feature (219)..(219): n is a, c, g, or t
atacatggggattttgaatagttttttggttatataatactggaacatctctcaatattatggaaaatggttaaaattgtgtttgctgtttatgtctaacattaatttgtctagattatcatcttaatgacaaagggataatgaactagaaccagcaagtgaagtgtttatttcctattttctnaaacagttgtntttntacctatttccttaaaagcnctggtttagaaaaagccataacttaaatagtgttataaaatatatatcaggtttaaacataaatttagcgaatatggtagaagg

SEQ ID NO: 705083 - DNA, 467 bp, Homo sapiens
ggttcgaccagtttcctgataaatgtgtactttctacattgatcacaacctggggtagctgctcagaatgcttcgattcctctcacttaccctgagctctatgtgtgatactatgtgttctacctcttactaatttaggatttttgcaatttttttaaaacaagacaaatataggatagcatccaacagtatatgaacagtaattttacaaggcacatatctcatattctaacgatgcaagactagccatgaattcacttgagtggctcaatttatagaacactctatctctagttctttcttctccttcaactttgaaactcacaagtgatactggagaaacttcctgatcaccagggctctcgtcacactacactgtttctcaagcaattggcttattggagagtccagtgcagtccatgcatagcgtgagcgatataagtctgtgttaacacctatttgcttac

SEQ ID NO: 705084 - DNA, 382 bp, Homo sapiens
cttcaaggggcctaaggccgtttgcctggttttaaaaatcgttgccgccatggttggccagtctaagggaattaagaagttgttgcaggccgagaagcggccagccgaaaaggtgtccgaggcccgaaaaagaaggaaccggaggctgaagcaggccaaggaagaagctaaggctgaaattgaccagaaccgcctgcaaagggagaaggaattcagggccagggaagctgcggaattggaatcccggggaagttgcagcactgaaggggaaaaggggacccaggagaggaggaccatcttccagacatacttccggcagaccagggatgaagccttggcaacctctgggttttggcctgtgacattcggccagaaatccatg

SEQ ID NO: 705085 - DNA, 269 bp, Homo sapiens
  misc_feature (154)..(154): n is a, c, g, or t
  misc_feature (212)..(212): n is a, c, g, or t
tatagatagtatactttaatttataaaaaaaattcaaatttggttctttatttggtgtgtgcctgtgatgtttttctagagtgaattatagtatggacgtgaatcccactgtggtatagattccataatatgcttgaatattatgatatagccnatttaagtaacattgtgatttcattctggtttaagtgaatttgggaaatatggcactngaaggaaatgtaaaacatttagaactagctcggtgttatgggaaaacaaagtgcact

SEQ ID NO: 705086 - DNA, 292 bp, Homo sapiens
cgggctgtaggaatttggaccaagcgcactccagctcgcgttactgaggaagttctcagaccacacctttattaggtgatccttggtgtaagatgtctattattgcgctcggttctggaaggtgcgccatctcttcgttaaggtgaggaactggccacatggcctgtctatggctcgatcttgcgattggagacatgccttgtcctgcaaccatcctagtgccttacccctgcgaagagcaccgggatgagcccacattgcattcacgagctcgggtatctttgctgtccgc

SEQ ID NO: 705087 - DNA, 226 bp, Homo sapiens
cccgctctcagccccggcacacgaatctactctctatctctatagattgcctattctggacatttcattgctctttgtgactgactttttttcacttagcataatatttttaagtatctatgctgcagagtgtatcagtacttcattcttgttatgcccaaataatattccattctataaatataccacattctgtttatctattcatcagttgggagcggtggag

SEQ ID NO: 705088 - DNA, 350 bp, Homo sapiens
gagattgcgccattgcactccagcctgtgcaacaagagcctgtgcaacaagagcgatactccatctcaaaaaaaaaagtagagtttcacaattgtagcccaggtgggtctcgatctctgggatataggtgacccacctcccttgacctcccagagtgctaactacgttacaggcgtcaaccaccacactcggccctccttgcaataaatttacgtcgaacgtgatcatgaatataatgccccaggaaactccgtatctctgctctcaccatagtaggacctaacacactatccttaaccaggatcaggttggcaaactccgccagcagcacagcaagctcaacagataag

SEQ ID NO: 705089 - DNA, 1059 bp, Homo sapiens
gtttgaatggaaggagccaagaggccagcacaggagcggattcgtcagcatttcacggaacatcgagccgaacctctcgcaagtcctgtgagccgttaaggaggcccccagtcccgacccttcgccccaagcccctcggggtccccgggcctggatactccttgccacacgggaggggcgcggaacgccggggcggaggaggagccaacacccggagctgggctgagacccgcagaggaatacgctctagggattaagtcccggactagcgagatggcaaggctgagagacgggaggctgattgagaggcgaagagtgatcgatgaaaactaccccataaaagaccaaaatgggacaaggaaaagacgtcaatatcaacacttgtacgatcattggacacagatagattcgaggcaaagtccacacactactggccatcatgaatctatccacatgcggtgagccattcgacaaaaagaaaccattgacaaatttgagaacggaggcctgctgagtatgggaacaagggcatccctgtcaagtattgccatgagtcttggattccactgacaaagcactgacgcggtgaaccgatggaaatacaccaattgatattcgtcactttgatgcgacaaaaattatcgaagaaggccagggacaggttgcaatactcgttgcacttacatccgactatgaatggaccccgcaaagagtaccaaacaagaaagggcaaacttttagtgttacagagagcacaacacctatgaaaattatcacacagagggacaccaaattcgtacacagggggcattaccaaccttgactagccaatgcgatcacccagtgagaaactaggatagtgaactagaccagagggagtgcaattggggccgcgacaaatattgatcacaaagagcaaggaggatgagatacgctccacacaacagaaaactgggcagagacagaacacaccagaagacagagcatattagaccccgaattacacaaggaggcagatagtacaacacacaactgcgtgtagtgtacgaagacagccaa

SEQ ID NO: 705090 - DNA, 244 bp, Homo sapiens
ggctatagcataaaaaaggaatagccccctatacacttcagagtcacagaggtagccaaggcacccctcagacatccggccgcattcttctcacatgacaaaaactagaacacatctcaaacatataacacatctctccctcaataaacgtaagcatactcctcaatctctcaatataatccaatcatgcaggcagaagaggatgattaaaacaaaaccagatacgcaaaaacttagcatactc

SEQ ID NO: 705091 - DNA, 152 bp, Homo sapiens
attcgcgggcgcgtcgacaacagctcattaaaagactactagcaggaccacaaagtttacatttcagaaatgccaggatagattagtattacgaaaggcattcattacaagtcaccatatgatatggtttcactttaggtacagcacccaaa

SEQ ID NO: 705092 - DNA, 926 bp, Homo sapiens
  misc_feature (143)..(143): n is a, c, g, or t
  misc_feature (183)..(183): n is a, c, g, or t
  misc_feature (274)..(274): n is a, c, g, or t
  misc_feature (288)..(288): n is a, c, g, or t
  misc_feature (300)..(300): n is a, c, g, or t
  misc_feature (341)..(341): n is a, c, g, or t
  misc_feature (361)..(365): n is a, c, g, or t
  misc_feature (367)..(367): n is a, c, g, or t
  misc_feature (369)..(369): n is a, c, g, or t
  misc_feature (377)..(377): n is a, c, g, or t
  misc_feature (394)..(394): n is a, c, g, or t
  misc_feature (397)..(397): n is a, c, g, or t
  misc_feature (400)..(400): n is a, c, g, or t
  misc_feature (450)..(450): n is a, c, g, or t
  misc_feature (452)..(452): n is a, c, g, or t
  misc_feature (468)..(468): n is a, c, g, or t
  misc_feature (474)..(474): n is a, c, g, or t
  misc_feature (478)..(478): n is a, c, g, or t
  misc_feature (480)..(480): n is a, c, g, or t
  misc_feature (486)..(486): n is a, c, g, or t
  misc_feature (509)..(509): n is a, c, g, or t
  misc_feature (515)..(515): n is a, c, g, or t
  misc_feature (517)..(518): n is a, c, g, or t
  misc_feature (521)..(521): n is a, c, g, or t
  misc_feature (531)..(532): n is a, c, g, or t
  misc_feature (537)..(537): n is a, c, g, or t
  misc_feature (546)..(546): n is a, c, g, or t
  misc_feature (552)..(552): n is a, c, g, or t
  misc_feature (554)..(554): n is a, c, g, or t
  misc_feature (556)..(556): n is a, c, g, or t
  misc_feature (561)..(561): n is a, c, g, or t
  misc_feature (579)..(579): n is a, c, g, or t
  misc_feature (584)..(584): n is a, c, g, or t
  misc_feature (596)..(596): n is a, c, g, or t
  misc_feature (606)..(606): n is a, c, g, or t
  misc_feature (614)..(614): n is a, c, g, or t
  misc_feature (627)..(627): n is a, c, g, or t
  misc_feature (632)..(632): n is a, c, g, or t
  misc_feature (635)..(636): n is a, c, g, or t
  misc_feature (653)..(653): n is a, c, g, or t
  misc_feature (697)..(697): n is a, c, g, or t
  misc_feature (738)..(738): n is a, c, g, or t
  misc_feature (752)..(752): n is a, c, g, or t
  misc_feature (803)..(803): n is a, c, g, or t
  misc_feature (830)..(830): n is a, c, g, or t
  misc_feature (842)..(842): n is a, c, g, or t
  misc_feature (854)..(854): n is a, c, g, or t
  misc_feature (903)..(903): n is a, c, g, or t
cctcatcttaatatccactgatccatctcattcaatggtaacagtcaatgttttctaaaggaacataaaaacaaacatgcacacaattgcacagttttcataaaggcctatttcattattgggggggagcgcatttaacagtnaaatacatttaaataatgtataggtgactgcaggactgcngcattggtaactagataaccaactagaaaccagctaacaaagaactgtctaaatacttaaaatacagctcttgttgagatcatcctttgtnttgatcatcttctngggggaaaaaancctgctgctggtcacaatggaaatatattaaggccaaatcntctgacatccattcccaaannnnncncncagctggnttccccctccaactccnggncgngcccaaccttggggcctccagcattaatgctcttcccatctaccagggcngngagtgtaagcttcacnccaggnctcngngtctgngtgtagcctactccaattaagcnagggtngnnganttttgcgganntggtngcggtgggntccaantnanatttngctgcaatgccaaaacgngtgcngttggtacctgntgtccaagcnaggtttantgaagtgtcaagntcttnacnnactttctgataaattgntcctccaaattctgtcccatcattgacattagtgtgtagctggnagttcccagttctgtagcccactgcaaagttattccttgtnagctttgatttggnactgtcaaaggtcatctggtagccagcaagccagccctcataaccaaaganagctgaaccatggattgcaggtccagntaaatcaaagtnaacatcacaacnaaggtttatacactccctcttgtaagaagacttgattttaccacttttntttcctgtgtttggtgagaaggt

SEQ ID NO: 705093 - DNA, 1389 bp, Homo sapiens
gccgcacacgacaccccttttgtcacccttgggtagagagtagggggagaggcctttccttctttgtaaggggaacccagatttactccagggagcggccgcgtttgtttcaggaactgctcgccatccctccaccccacgggtttttcctacttggaccggccccaccaccataggtgggtgtttttgttgttgtccccccaaaaaactccaccgcgggagggggggcgtcccgccttttggagggcaccatcggttgtccaagccggttttgtaccacgccgagcatgtttggggagggatgatgtgctcaaagagccttttttagcctcctgcccctcccccctgtctcactgtatggttgggcccctccccaccccgcgtggtttcgacaccagacacgtcttacaacgggcgttttctcgtcgggggggcccccccccaccacgatgtgtccacagaggttgggacacccgtctctgtgtcccaccagaggatgatatcccgtcgtggaccaacggcccccgtgcgacataatttagtttctacggccccaccagatatccccttctgagtcttctcgcggccggagcacacagcggggccactctgtggggtggtaagaggggcgcccccccgcagccacgaggcgtctcttcccacaccgggggtctcttcactcgggtggcccatctctcaggcgtgtcgcccacacggctgttcacacagggggggcaacttctttttcggcgcgcggctctctccccccagctggtgctctcccactgacacacacccacacactcttctccgcgtcacagcaccacagcggcgcgggctctcacgcgctatatggccccacgcgcacagcgggggtgtataaacactctccacccgcttggggcacggcggggtgtggccggcttctcggcgcacacccacacagggcgcacacagggtctccgcggttgtgacccacacccgctgcgttcttcttgtgtgcgcctctcacacacacacaggagatatcttattgtggcgccctttcacacacaggggcccacagcgggggcgctcccagagatgcgccccccttccacacacatgggagagccacaggagacacatgagaggcttctcccgagaagccacaaggagatttcacgccacagagatgccacaaagagcccctcacgagaaccttgagcactggagaagtccacacaccacctggaacccacggccctccaaaactgctgcgggcccttccacaactcctggtatatttgcaatcggcgagaatggccctttttgcccctgagatccccacagggagatggggagagggaaagtcattaaagttttgttaaaactgattttttcatgcca

SEQ ID NO: 705094 - DNA, 1008 bp, Homo sapiens
gggacaagaccttacagaatgtaatgaatgtggtaacagcttgcaattcgaacaggtcaagagctggatgtaccatcaacaggaaatcacactgaatgagaagccatacaaatgtattgaatgtggcagggcctttgggcggttttcttgcctcaacaaatcaccacgatgattcatgctgataagaaaaaacccttgataaatgtaaagagtgtggcaaatctggttcattagtcgctcaggcctcaataaacaatcgagacaacacacatactgcagaggagtcttacaatcaacaattcagtgtggaaaagcctttagcatgttctcctaacttctgggttcacatctaattcatacttattgatactatgcttgtaattatttagtcacttccgtctgaaatctcatgtggaattgtaaatccccttcattggaggtggggcctggtgccgacgatcgtcttggatcacgggggtgggtttctgagatacatggtataagcaccatccggttttggctctctcctgggatagtgaagttctcggtgagactctgagtgagagccgctcgtaggcgtgtctgggacgcgagtctctctctgtcggcaggatggctatgcatgttggctgccgtgtctatggtcaccttgcaggctctggtttcgaaagctgaagttgattggtccgtggcttgaacttccatgtagtagctgggagggtctatggtggacaccgtgcatgttggttcagatgggtccctctgggccgacctgggggttcgctcgtcggccgggatgggtccatactgagccaagaattgcggctcagtcgcgatctgcgatctgggtggtggcccacccgtggtgttgttgctcaacctggcgacgcggtggggagcgcctccccccagggggggcgcccggggccacccgccccgggcgggtcctccacccgcgggtggtctccttttccttttgtttgcctttttccttcttctttctgttcc

SEQ ID NO: 705095 - DNA, 780 bp, Homo sapiens
gaaggtggatcacgaggccaggagtttgagaccagcctggccaatgtggtgaaatcccatttatactaaaaatacaaaaattagccaggcacagtgacaaaaatttagcccaggacttcaagatcagcctgggcaacatagtgagatcccgtctctttaaaaaacaaacaaaaactgggcgcagacaaggcgcagtggctcacgcctgtaatcccagcacttcgggaggccgaggtgggtggattacttgaggccaggaattacagaccagcctggccaacacgatgaaaccccgtttatacgaaaactaaaaaaattagccaggaactggaggctgaggcaggaggatcacttgaacctgagaggttcagtgagtttgcagtcagctgaggtagcatcactgcactccagcctggacgacagagtgagactctgtctcaaaaaaaacaaaaaaaaaaaaaactgggcgtggtggctcacaccagtaatcccagcactttgggaagccgaggcacgcacatcacgtgaggtcaggagttcgagactagcctgggctaacatggttaaaaaccctgttctttctactaaaagaagaacaacgcacaacgcaggagacgacaacaacgtcgctacaccacaaaccaaggaaaacaaattcgtggcggggcacgggcgccccagaagaggttttaacacaccctcggtgggcgcgcgcccccatgtaacaacggggccccgggcgccagaaacagcgcccacaaagtgggggtttccccaaag

SEQ ID NO: 705096 - DNA, 305 bp, Homo sapiens
  misc_feature (38)..(38): n is a, c, g, or t
tgatatctacacattcacatatccacagacaccacacngcacactacacacaagtacatatgcaactccacacacacaccacacacaatacattacatatcacacatacgtatacacacattcacacatctgcacaccatatacatatacacacacgcacagcatatacacatgtatatatgcacacatgcacacatatacacatgtgcaaaccatatacacacatgcacacccacatgcacacacacatgcatacccctaaacccctcacataacatactccccagcttccacggggatcctct

SEQ ID NO: 705097 - DNA, 131 bp, Homo sapiens
ttcatgtcggtacctctccctatataaaacagaagcatgaaacacatcttagagggttgctgtgaggttcaaaggcaattgtgtgcaaagcatacggctgggcttgcagtgtagtgatacacgtagggaga

SEQ ID NO: 705098 - DNA, 249 bp, Homo sapiens
  misc_feature (176)..(176): n is a, c, g, or t
  misc_feature (228)..(228): n is a, c, g, or t
  misc_feature (239)..(239): n is a, c, g, or t
agccctgtttattttggctttcccccaacaccccggcatcaacttaaaaaaatgtggcttctttccagaagacgggagcacatgggattcccttgaagggtcctttcacaggccccttcattttgcacttaaatggacatttccccccccctctgtaaaaaacccggtgttgctanaaatttagtaaacaaaaaaaaaacgtttccaggggtcggggctttaaggctntgttcccttanccgcccccca

SEQ ID NO: 705099 - DNA, 600 bp, Homo sapiens
  misc_feature (460)..(460): n is a, c, g, or t
  misc_feature (475)..(475): n is a, c, g, or t
  misc_feature (481)..(481): n is a, c, g, or t
  misc_feature (490)..(490): n is a, c, g, or t
  misc_feature (502)..(503): n is a, c, g, or t
  misc_feature (506)..(506): n is a, c, g, or t
  misc_feature (510)..(510): n is a, c, g, or t
  misc_feature (520)..(520): n is a, c, g, or t
  misc_feature (526)..(526): n is a, c, g, or t
  misc_feature (528)..(529): n is a, c, g, or t
  misc_feature (536)..(536): n is a, c, g, or t
  misc_feature (549)..(549): n is a, c, g, or t
  misc_feature (557)..(557): n is a, c, g, or t
  misc_feature (567)..(567): n is a, c, g, or t
agacggagtcttgctccttcgcccaggctggagtgcagtgaggctatctcggttcactgcaagctccgcctcctgggttcacgccattctcccgcctcagcctcccaagtagctgggaccacaggcgcccgctaccatgcccggctaattttttgtatttttaatagagacggggtttcaccgtgttatccaggatggtctcgatctcctgacctcgagatctgcccacctcagcctcccaaagtgctgggattacaggcgtgagccaccgcacctggccaattttttgtatttttagtagagacagggtttcaccgtgttagccaggacggtctcgatctcctgacctcgtgatctgcccacctcagcctcccaaagcgctgggaccacaggcgtgaggcactgcgcccggcctccaacagaacgtgggaaatcacatagacccaaacaatggcccccntgggtgaccactgtnttgccnccagatggnctatcaagaaannatntgcngtgatagctncaaaangnnaagctgngcttggtgctggnttttcggntttaagcccntccaatgggtggagggagaggtaacccaaatcc

SEQ ID NO: 705100 - DNA, 914 bp, Homo sapiens
aagcagtggtatcaacgcagagggcccattagggccggggtgaaatctggcggtttgttttgtacagccgcgtcgcgggtgatggctctcgtatccaggcctccacggtgtgcaccgtgccgtcaggagcgcgcttgtgcgtccacgttcggtacagcatgtggaacattggcatcagtgagctgtgtcatcgtttccagataccagaacatgtcaccgtggcctgagagatctcctgggatcactctgaggagttactaaaagatgtacctgaactgcagatccttggtgaaatatcttttcaacaaatctctatatgagggcctgaatgcagagaaccacaagaatacagatcactgttgtcttcctgaagatgagaagtaccatgtctttgctatcatcattaaatggcagcgtgggtgggccttctgttgtgctcgtgatctggttcatcctgtcacagtgtggcgtttttaaaccgaagatatcacaattgaacttggagagcatcaggaaggcccagctgagaatcagagaatctgtcgagggaagagaattaggccctgctaatccacgtggggagaggctatcagccagttctgggactggagacccagatccttggattaacttgttcccttcaggttgcatcaagagcgcagggaccgctggtcggactactagttaacccatccttggtccccaaggttcggtgctgtggcacagtaacttggtcacttgtgtatcatacttacctttctggcgacgaaacacacacaaactgtgtgcgctccccgaacttaacactgggcgcgcctgacagagccgtcgagcccagcggtgctccaaagcgggcggtgaacggaggtcgtcacagacgacacgcgctggccagcacgaaaacaaaggccggg

SEQ ID NO: 705101 - DNA, 335 bp, Homo sapiens
gggggttaagggaaaccaaaaccgggcgccccccgctttttgtgggttcccggggggtttaaataaccacacccccccgggaaaaacgggcgcccccggtttttttttttggcccaaaagggcgcgggaattttttttttgggggggggggaaattttaaaatccccccctttgggggggttttttttggggaatttttggggggggccccaaattggggcccccccctttttttttggggggggggcgggggagggggggggttttttttttttaaaattttttttttgggaaagcccattttttgggttccccccaaaaccccgggggtggga

SEQ ID NO: 705102 - DNA, 284 bp, Homo sapiens
ttgctcagtcggatacaacatcctagatgcgggctagtgtagatttatcacacaattcctgaggtggagatgtagtgatggtgatgtcagatccattctgaaatggggcttatgtcagcttgctggaatacaacaacatttgagggcatgattcttcttagtgaaattatccaggagggggtatccgttctttcaacaaactcatccccattggcagggattagttttttggttgtcatgggggggacaaagaaaaagggtttttttttttttcaaaagagggg

SEQ ID NO: 705103 - DNA, 289 bp, Homo sapiens
tcatatagaggtaaaggctctaagactcctgagccaactttcatgtaactggctttcctaggctggggcgttgaactgctgtaaagcaagccaaggcagttcagatctagatagcagagtaagtaagtctcatactcaaaacattgcaactactggttagagtccaccccaatgaagctgtaacagatctgtgtatctatggactagagttctataatgtatatattggttcagacgtaaaacaaatgtggctagctatggttggcttgtgctgtctacagtaggacat

SEQ ID NO: 705104 - DNA, 445 bp, Homo sapiens
gaacggctaaccacgatcactgctcagctgagggagaagcttcacggagcgaagagggacttgagctttcgctctgcaaagcagagttctgtgcattggggtgaagagggtactccagcgaactgtgtcaagatgtggcgtcactaagtggacatctttgggtggaagcagaggtccctgtgagggagagaccttggcagaggtagggctgcagggagaagcacagagggctaactgcgcaatccccccaactgcagttcattgtgtcctagctgatggtgtaacttagaaaaaggagcagggaagacaggagttggggtcccagggctgtggagctggagcagccaactctccctttgtaaacacacaccaggcacactcagacacagagatgcccctagagctccagtcacacagatttgcacacacacccagccaggctcag

SEQ ID NO: 705105 - DNA, 1255 bp, Homo sapiens
gctcactcgacagccgtcccttccttctttctccctccgacctcctcggaggcgaccagcgcgctacgtgcaggcgggccactccagggataccctacgccgctcgtccggcacagcatgatcgcaggttgcgcacgggacggaagttgataggggactgacggtagacgggaaggggagagccgggaccgacataagccagagagatgccggagaacgggcgtctggtgggtggaccgcagagggacgcgaagcgaccgcgccgacaccctgatgataggagcccatagcgggtgctagaccaaacagtgcacaccgcagccgaaagcccagtgtaaagggaagctgatgttactgtagagagcactgaaggacaggcgtaatggctcatgcggaggagaagagagtgaacacattgggaagatgtgtactgtagaagaaaaaaagaaacaaagaagaggagaaagcacagagggggaaaagagaaagagacagaggtggggagaccacagagagcagatcaaatagacatgcagaaggagcaagagggtgacacaaaagcacagacaaacaccggatgaacccgacgaagataacgcagaaaaacaacacgggggggaaacacaccgcaccaaagaacacacacaaaaagaaagacaccacaaaaaagaaaagtaaacagcaaaacgagccacagagaaaaacacgtgggcacataaaaagagacaacacggcgaaaaagaagagacgcaagacagaagacacaacaagaacaggacacaaaacaacgaaaaaagacaacaaagggaaagaaagcaagacgaacaagaaaacaacacgaagaaaaaaatacaaacaacagagagagagagaaaaaaaagaaaaccaaaaaacaaggaagcaaagaagaaccaacagaagaaccaccagaaaaaaaacacgtgagaaaagaaaacaaaaaacaggaaaaacaacacaaaacaaccaaaaaaagaaccggagcaaaaaaccgacaaacaaagggacaaaccaacgagaaaaaggaaacacaacgagcagctcaagcgccacaaagaaaaaaagaaaaaaagacaccacgaaaagaagagcacaaaaaaagacacaccaagaaacagaagagaaaaacgcagagagggagacaaaacagaggaaaacaaacagcagaacaacaaaaacaaaaaaagacagaggacagaaaaacgccgcacacgccagcagaaagaaaaagagaaaa

SEQ ID NO: 705106 - DNA, 947 bp, Homo sapiens
ggaggagcaggctcattgttcctgggagccgtcaccacagtaggtccctcggtcagtcggcccagcccctctcagtcctccccaacccccacaaggcgccgcgcggctctgagacgcggcccgggcggcgggtggagcagtgcgatcatacctccaccctccagccatggaagagctggaccaggctcctctggtctcgtcctcggatagccaccccggccgcagcccgcgttccaagtaccagttcgtgagggagcccgaggacgagcaggaacaagaggaaggaggaagagggaggcacgaggcacgaagactgtcggagcttggaggtgctggagaggaagcccgcccgcgtcctgtcccgaggccccctagtgccccaactgggcacttgctcggccgggtgtgccccctgagtgggacttgtcgggccagttgactttcgtgcccggcggggggccccgggggggaccacgttgcggggacgggtaccccgcagtttgcgacgcaggagggggagccaggttcttgggggaccccgcaggccgcggcggtgtccggcggaactgggtgccacggtgcatatcccgggtttgtatggtggccgcagttctcagctctttccagggcttccttgaaggaacgaaaggaggccttccgggaccggggccagtacgcacttgtcgaccacgcgggtacaacgcgtaggacccatatgaagaaatcttgttgttgggcaccgccgcaaagaggagagggtgtcctagcctggcgccctgcctgcccggccaggaaggtagagcggaccacttgatagcacggaacatgagcagctaaaatagaaggagggcacgcggaaaggacacggggcccaaaaaggggtaaagcgcgaaaacaacgagcaagttggaagaactgaaatctacaatagagaggcgcgggaacta

SEQ ID NO: 705107 - DNA, 624 bp, Homo sapiens
ggttggtcctctctctgtggggctgaattgccagggcgaggacctctcctctttggtggcatggaaggggctctggacctaggtggcctgatagggcggtgggtatgcgataccagcacggtgactctgtttcagctcccgctgtggccgcagcctctccctgcactccctcctggactctgtgggtctctggagagaggaaccaggagaagggctggggccggggcatgaggtgcccttttccagcctcgagagctagctccgatcactgaactctgttccacacttctgtgtcatctccgggtctatgtcgagatgctggtgggcacaagagcccgtttgcaatgagggagcgactagggccctggacccggctgcctgcgagccatgggtgccttgccgaatccattctcggaaacacctgtgaggcagaggctgttcgaaacagagcctctggcgctgcttcccaggctggaccatccacaaggccttgcctgagctgtatgacaggtagggtgggtgggatgaagatttgagaataacttgggtgtcctgctaatagtagccgaggtgtactcgtcatgaagattaggataatgccaagtgtcggaattcagaaccccg

SEQ ID NO: 705108 - DNA, 232 bp, Homo sapiens
aggcgacgtctcgaggatttccacagtctgcgttccaatcaggcacgtgttgaaggagccagggtggaaaaagaaaagtgcccacttggcgacaggggagggccccagcatggcagaccccccaagccacatcagaggagttttcacttgtcttccgtgggctgcattatctgggaacggccttcaaagaacttcggttacacactcagtggcgagtgcacggacacggaag

SEQ ID NO: 705109 - DNA, 345 bp, Homo sapiens
tccccaccccccccttcctatttcctgaagggccctcccaagggtcctcccccccccccagttttccctgagagggatcacctccttgagttcaccacaggcagatgtgatagcaagggccccgggccccctggcaggggtggggttttcatgagggaggggccccaagcccttgtgggcgggcctccctgagcctgtttgaggggccagcccttagtgccttcagggttaggcccctgggcagggatgccccccctgctccttcggggggcgtgccctcccccctccctggtcccctgggttggggctccccccgtttgccccgttaaagcctttttgccgcca

SEQ ID NO: 705110 - DNA, 294 bp, Homo sapiens
ttccccgctggggggggccaagggccaaggaaaagggggggttttaaaaaggccgcccctttttgtcccctggggggaatgggcttgccccagaggtaaaggggaggcccaaagcccctggttttttatttcccctaaatggttggaggaaaaaaaaacccaaaaaaattttttttaatttttggggttttgaaatggttaaaaatcccttccccctgccccgaagcccgggggggacccctgaagaaaactggggttccttttaaaatggttatttaatggttggaacctgga

SEQ ID NO: 705111 - DNA, 169 bp, Homo sapiens
tcttatcatactactggtctgcttctagacatgaacagacctgaattctcaccgctccactgctaacacccatccaagccagcacaatcacttgctgggcactgaagcagattccaatcagtctctcttctcttttccttccttcctttggtaggtatgatgaaggacg

SEQ ID NO: 705112 - DNA, 179 bp, Homo sapiens
gtagggaggagtgaagcagaactacactataacccaacagggcaactggaacccctgtctgaccttacccagagaagcatgggccactgctctgtgccgctcctgaaatccagcatgccccaagtgagctctgaagctccctcctcaatcccttgatggcctcccaccctgtaagaggc

SEQ ID NO: 705113 - DNA, 635 bp, Homo sapiens
  misc_feature (538)..(538): n is a, c, g, or t
cggcacgagcgcaaacccactctacattactatcagacaaccttatacaaaccatatacccacataaagtgtatgcgatagaaattgagacctgtggcaatagatatagtaccgcaagggaaagatgattatataccaagcatatatatatcaaggactatacaccctatatccttctggataatgagattaactagaaataactttgcaaagagaaagcgcagacacttgtgccgaattcgggacgagaggccactgggcagaccagacatttgcttggacttgtgcgccttgctttgcttttccttcgcaaccatgtctgacaaacccgatatggctgagaacgagaaattcgataagtcgaaactgtagaagacacgagacacacgaggatcgtaatgaggcgtgcgccgccaatatgcactgtgcattctcacaagcattgtgcttttatattacactttttagactggtaactctgtgagatgcgcaaagggtggatcaagagtatatgactgtgctgtccctcttacatatnagaactactgtgaacgaaaggcgcgcctgtgttttccatatgtgtatatatatgggtgtgcagggaagagagaaatttcatgttggtgaagggtggt

SEQ ID NO: 705114 - DNA, 439 bp, Homo sapiens
gatctattatgtgtgatcagagtgatgaacaattatcacaggaacacgaaaatcgcgaaaaaaagccctgcctgacgcatttccggccgttaattttgagagggaacagtccgatttacctgaattttgtgaattatggccaattcatcgcgatctgcaacagacacgcctgaagaatactgttttaccatccggtttactgtttgtggcacacaaatatgatccgacaactccctggataaatgcccgtaaaatggcagataaattttcagctccgttactgactattaacggtgacgggcatacgctggcgcttgctggcactaatttatgtgtggatgaggctgtcgttcgtcacctcctgtttccggggaaatctgacgatctaacgtgtcagggaagtggtaccggagacactaacctgatatcccataaaact

SEQ ID NO: 705115 - DNA, 1005 bp, Homo sapiens
  misc_feature (20)..(20): n is a, c, g, or t
acgaggcagatcaggtcctngctattaattcgacgagggtggtatccggagtcggatttgctggggctgccgcagctgcagtgtagtgtttatttttagagttggccgtctttacacatctgccggttcatctccccccgccttgtgaggcctcatgagctcggacgttgtatctatccgctctagagaatatgagccgcggcacgcatggaccgcagagtagggctgaggggtcaaatcccggtattgtggagactctttagcgtggcttcttctctctgctgagaccccgagagctttcccagttctcctcccaggaccaccggggttcctgaagatcgggacttttctgcgcccctccaccaacagcccatctcctgtctatgaagaaagacccttcgtagaaacaacttccccgctgctgacgcgttttcccgtcccgtccccgaagtagtctactatgacctcgttgtgagcctctgaacgattttgacactttcccgaggcctagggtattatatcctaaccttactaaagaccacagaggtgcttgccattatgggcaatcagcttgctggcattgctccctcccagatcctttctgtagagagttatttttcagatattcatgagtttgactatgataaaagcctgggagtactcggttttttaaagttgctcgagccgaagcacgagaagggcctggtcgttgtgcaaggtttttgcattcaggaatcccacattggctttacccagtaataacaagagcttgagtgactgaaaattcgggttactctggcagaatgttacttccgaagcgtcgacaggttgaacagcggaaggcctaagcggttgggcgacaatctatatgggttaccgggctttaattcattagaaggggtgtccgctctacggggccgccatggtctctggcccggagtggccgagggtcgtaggacgctaagccatttggagcgacaggaggaaccccatcgcgtttccact

SEQ ID NO: 705116 - DNA, 2131 bp, Homo sapiens
gttgactattctctacaaaccacaaagacataggaacactatacctattatcggcgcatgagctggagtcctaggcacagctctaagcctccattattcgagccgagctgggccagacaggcaaactactaggtaacagaccacaatctacaacgttatcgtcacgagcccatgccattatgtaataatctaatcttcatagtaatacccatcatacatcggcgggctatatggcaacacatagactagaattccccgtactaatacgtgtgcccccgatatggagtaacccccgaccataaaccaacagtaagcattctgacgtctgaccatcccatcgtcataccatactcctggctcggcatctgcttatagtggaggccggaagcagggacacaggtatgaacagcactacacctcccttagcagggcacgtactacccaccctggaggcctgccgtagacccataagacactcttacacacatctaacaccatagacaggggtgtcgtacactaatcatatagggggccatacacattaccatcccccaacaattcatcaaatatacaacccccctgccacaaaaccaaataacgagacgccccatattaggactgatcctgtcctaagtcacagcagtcctacatctcctaacacatccccagacctacgctgctggtcaatcacctaatacgtactaaccacggaccggcgaccaaccagaagcaccagtcgtcgaccccgacagggaagcaggaacccccatctaaccgcaccccgacaggaacgcaggcaaccggaaatgagaaacgcaccaacaggcaccggaaaaacacacatggaacaaaacaggaacaggaccaagcgccacgcggcaccaacacacgggtccggcaaaggaccaaccatgagcgaacagaagacgaggcagaacaaagccaacacgctcgcgcaccaacgaggccactcggcagcacacactgacaaaggacaacgacgagcagagaacgcagctagagaaaacgaaaacacggaggaaaaggaaacggacgagaaagagacgaaagacagacaaaaagaacgaacaacgaagcgaaagacagaggaggcagacagaaaaagagagcaaacagaaagacgaacacacggacaagacagaagaagaacaacaacaaagcaagaaaaaaagaggaagagcagaaaacaaaaatgagcacagaaccaacgagaagagcagcgaaaagaagcgcaagaggaggaggaagagcagacagaggagaagaaaaaaaaagcacgagagaccgacaagcagagagggagacgatgagaagcgagagaggacgacgacggcaggagaagcagcggaggggaagagaggaagagcagaaggaggagaagggaaaaagagaaggcgaagaacagaaggaagtcgaaagatcagcagaaaaaaagacagacgaagaagaacgagagagaaagcggagggagacaaggagcaagggaagagcggagagataaagacgaacagagagaagcacacagcacacgacgagaagacagtaggagcaagagaagagcaaggaacaagaagcaaacgcaagacaagacagaagacacagtgcaccaaaaagacaacagagcaaagagacaagacgagcagacgacgacaacagaaggcgagaaaaagagagcacaagaacagaagaaagacgagcagacgaaggcgagcacggagacaaacaaacacaacaacacaaggaggaaaagcagaacgaagaggagcaggaagcacgacaacgagagacaaagagcaaggaaggagaagaggcaagcacgacgagcacacaacaagcagcgaaccgcagacacgaacagaacggcgcaagaggagacacgcgcaacaacgacgaagaaagcggagggagagagcacggggaggacgacagaaaaacagagcagaacgcaagcggaacaaccgcacacgggcgagaccacgcaaggtcgaacacaacaacaacgaatacagaagcaggcgagcagacacagcagagaacgagcacgaccgagcgacaggaagcgcgaggagcagcgagaacagtgacatcacagcaactaggccacaggaca

SEQ ID NO: 705117 - DNA, 1063 bp, Homo sapiens
agcgagtgataaatcaggaagaattgcggcggttaatgaaggagaagcagcgtctgagcgaccagtcggaaacggatagaatctccattcgctgaagtacaaccgtttggggcatgctgagttgtgccctgtgtaacactccgtgttaatgagctgagctcctgtggcatgactcactgtcctggtgaaatgcatgcacctgagagaacagtggcctgagctgaaatgtgcgctgaaggaagccagccatgggttctgtcctgccagttcagacgccatcagtcctgtcaagacggacaagcgcctggaccgcagaccgaccatagatgtcaagcagagcgcaaggccaccgttggtgcctcagtgtacacgaccatccacgatctgcgtggaccaccaactattgacaaaactaggaaaggagttcattagagcgaatcccagtaagccttcaggactcactttactccccgattatgaagatgaggaggaggaggaagaggaggaggaaggagatggagaaagaaaaaggggggacgccagcaagccagctctccgacgcacagtgacaaggagcactcagatatcctcattcacgggaggtaacaaagtagatgtgctggcaaaagattcatatagatactactcctcccaaggaccccaataattcctcattcaggggtcaatttgcagaaagcagcaaatacatgaaaagtggtggaaacggagagaaaacaccgagagaagggtaacgggaaagataaaagaagacatgaggtagattgaaaagtagaagagtatgaatgtcaaaagataaaatggaaaaaaatggaaaaataaaaaagcttgagagtgtaaaataataagaaaaagagcaaaaagaaacagaagaagacaccaatggaaataaacaaaaggacaagatggaagaagtgccagcgaaataaaaaaagaatggtataaaagaaagaacgaaaaaaaaggaacgatgacaggagaaaagaacgacaaaaaaagcgaaaaacaagagaaaagaaagtaagatagttgtattatgtgcgaa

SEQ ID NO: 705118 - DNA, 410 bp, Homo sapiens
ggtcgacataaattcagaactgtgagtaatttgacaaggttagagcactgcatacccatagggaatttcatgaggtaactttgggtggataagcaggatctcaattttgcggtaacttatatgccattttaaagagcttggataagtagcttcgtcagcttttgtattgtggcagcagtatggcaggtatacactgagtgtggtagctcatgcctgtaatcccagcagttttgggaggacatggctggcggattgcctgaacccaggagctccagaccagcctaggcaatatagtgagacctcgtctctacaaaaaataaaaacattagcggggcatggtggtgtgtacctgcagccccagctattagggaggctgaggtgggagcattgcttgaacccaggagactgag

SEQ ID NO: 705119 - DNA, 285 bp, Homo sapiens
ataagagctactccagcctggtgcatagagctactccagcctgagtcactaagagctactccagcctgggcaataagagtctagactccgtctcaaaagtactgttggctgtgcggtggatcacgcgtgtcatcccagcactttgggaggccaaggcgggcagatcatgaggtcaggagttcaagaccagcttgacctatatggttaaaccccatctctactagaaatacaaaaattaaccgggcatggtgacacatgcctgtaatttcagctcttattgcccag

SEQ ID NO: 705120 - DNA, 442 bp, Homo sapiens
gtatgttctcgatacgtgatcggaattaatcagacaaagtcgctcgaccgactaagaacggccatgcagccatcagccacggaatcgagaaagagctatcaatctgtcaatcctgtccgtgtccgggccgggtgaggtttcccgtgttgcccaggctggagctttttattcttcgtgtttgcacagtggctgtagctatgtgtagtgacagcagagacaggcctgagaggggcagccacgttccccctgggcaggatctgtctgctacgggaccgcaagctgcgactttttccttctaagtgtgcggagaggagcccctgcctagggacggggagccgtagcctgctgttttggtgacaagcatcttgggcgagggggcactgggctgtgctgcatagatggtgagcactggactcacccccagccccaagtcaaacgaatg

SEQ ID NO: 705121 - DNA, 867 bp, Homo sapiens
agcgggggaagtcaatgtgagaagagatgaagatatgggtaactaggagtatcattagtgatcttcaccagagatagttcagtggaatagatctgaagtaggattctactggattgagtactgaaaggaagaagaggaaatgtggttatcctgaggtgggtctattatttctaatgactgcttgactgtaattgggcagagagggacacaagagtaagtacggagagtggacatttcgtagtgcaggttgatatatgattaatggtagagagttagtgtaagtgtgacttactaagagcaaacgtagcaatggtaggagcttatagaccgagatgagagtgacgagggagaagtatcaatgaaacgaagtacctcagagaataagaaagaatggtgggcatagctggaaattggcagaactgagtgctctagcacaggtattatggtactggtaactttggtgaaagtgttccagtcaacagcggagaatagggaaggatcctccagtgtggaacacttcctggaaatccggtgagggaggccggagaccccgttgaagggggaggggcaaattaaaaattcgaagtggagttgctcttgtaccgcgcaggtggcgtttgcttccccaaaggctagtgtggagccagggactcccccggggtgaagaatgaggcaatacaagtgggaaattgacacctctgttttggaaacttctcttggcaacttgcgagagacacctttaggaccaagaaaacgcgtttatttgccccttgggcaatcttaagagggcgcggttgtcccaaccataggaagaatttttcccccttatccgggttacctcgggggaaaattttacgtccctctcca

SEQ ID NO: 705122 - DNA, 178 bp, Homo sapiens
cgtggacgtgcacatgcagcggtgcgatctcaggtctgagatttttttatggatagatcaagcaatgcacggacagatagattgttggtcacgacagcagaagatttagctctctgtaattgcaggaggaatatccagtgctcagaattataactgggatttcgcccctattggaggc

SEQ ID NO: 705123 - DNA, 396 bp, Homo sapiens
  misc_feature (26)..(26): n is a, c, g, or t
  misc_feature (47)..(47): n is a, c, g, or t
  misc_feature (61)..(61): n is a, c, g, or t
  misc_feature (296)..(296): n is a, c, g, or t
agctaatgcctaaactttcacatggnctaggcctgttctcctcctcnagacctagtaatcnaagttattaccacatagtacttttatgttacccatcatcttttaaaaaattataggctgggcatgcgtggttacgcctgtaatcccaagactttgggaggccaagacgggcgggtcatgaggtcaggagatcgagaccatcctggctaacacggtgaaaacccatgtctacttaaaataaaaaaaaataaccaggtgtggtggcgggcgcctgtagttccagctactcaggaggntgaggcaggagaatggtgtgaacccgggaggcagggcttgcagtgagccgagattgcaccactgcactccagcctgggcggaagggcaagactccatctc

SEQ ID NO: 705124 - DNA, 136 bp, Homo sapiens
  misc_feature (114)..(114): n is a, c, g, or t
tagagctccggcgtgtgagagggacaggtcctaccaccacatctatctcgggtgagaacctgcgtggacaggctcgctcaggatgggctagtttggctaacctcagaaaactgnggctggcacaactcttggtttc

SEQ ID NO: 705125 - DNA, 182 bp, Homo sapiens
attgagatctaacagctcaccatccagagtcaacctgctgagattcccgaagagctgcggtatctggcctagctgttgcaacagatacaggtctgtgcacaccagctgggtggctgtccttctgactcaatagcacagtagaggcaataactggcacaggaggcttcgtcgggatgcagagc

SEQ ID NO: 705126 - DNA, 220 bp, Homo sapiens
tccacgatccccggacacgtttatagtatgaattctggaacatggccttgttcaacctgagcttagaatatgtgtacagcacgttttttgctgtaccacaaaattttaggttaggcaaattcacaaatacggaatccatgaataacgaggatcaactgtacttaactatattttaaagctgtgacatttatctacctggcttatggaatagaattcattg

SEQ ID NO: 705127 - DNA, 537 bp, Homo sapiens
  misc_feature (261)..(261): n is a, c, g, or t
  misc_feature (472)..(472): n is a, c, g, or t
tccagccgtggcattctttgggggctgactctgtgccagccaacacagaaaacgaagtggagccggtggatgcccgcccgttgctgccgaccgaggactgaccactcgaccaggttcggggttgacaaatatcaagagggaggagatctctgaagtgaagatggatgcagaattccgacatgactcaggatatgaagttcatcatcaaaaatgggggtccttggcagaagatgtgggtccaaacaaaggtgcaatcatggnactcagggggggcggtgtggtcatagcgacagtgatcgtcatcacctgggtgatgctgaagaagaaacagtacacatccattcatcaggggggggggcaggtggacgccgttgtcaccccagaggagcgccacctgtccaagatgcagcagaagggctacgaaaatccaaacctacaagttctttgagcagatgcagaaatagacccccgncaaagcagcctctgaagtgggacagcaaaagcattgtttcactacccatcggggtccattcatag

SEQ ID NO: 705128 - DNA, 193 bp, Homo sapiens
  misc_feature (7)..(7): n is a, c, g, or t
ctcttangatcacatctgcaggtgtggtggctcatgctgtaatcccagtgactcaggagactgaggcagagaatcacctgaggccaggggtttaagaccagaccaggcaacatagcaagaccctagtctctgtaaaaaaatcaaacatttgtgacgagcgcatggtggctcatgcctgttatcccagcacctt

SEQ ID NO: 705129 - DNA, 340 bp, Homo sapiens
  misc_feature (252)..(252): n is a, c, g, or t
gtgactctaaggatccgtacgggattctaaggaggaagaagagtgtgtgtgtgtgtgtgtgtgtgtgtgtgtgtacgtgtgctacactcaggcatgtgtaatattttcctttagtttaggtcaaattctactattctaattatttcctatagacgagcttacattttttcttttgtctcctctattataagagtgcctcagcgtctctactcatcaggtttttctacggtctttcgagaaacattcttattnacttaatctttatccgtgtggacagttgcttatacataaagcgtctgctaacttctaaagtgtcattactttaacctccagacaattt

SEQ ID NO: 705130 - DNA, 126 bp, Homo sapiens
  misc_feature (76)..(76): n is a, c, g, or t
gtatcaccttcaccattttacagtataagaagcactacctccatgagaattcacgtgtggtagtggtatagggtgntatggggtatagggtggtatggtggtatagctcggtggtatagggtggta

SEQ ID NO: 705131 - DNA, 198 bp, Homo sapiens
ggcggacattgaccaggtcctgctgacagaccctgcacatcagtctccctgatgacaccctcactgattagaccctcatgagcaggcccactaagaagggcccccactgccaggcacacaatgacgaggactccactgaccaggaccttacgtgacaaggcctcactgacaaggactcatggactaagtccttactga

SEQ ID NO: 705132 - DNA, 771 bp, Homo sapiens
tggttttggtccaaaattttataaaggggtcttaaaaaagcaacttccaaactccaaaatacagctgccaaggaaacccgtgttatgctgggggaacgggttggggcttggcaggcggctcgggtcttccccacccttctggtcctggagatggggggtgggtggggcagtatctcatctgtgggtgtcccacaatggctcacgtggtcaggcgggggcttctggagggccaatcttaccagtgggtgtcccaagggcacgctttgatacttcatccttgatcgcccagcacaccctgttctgagcacacacgtgtggcgcacaggccaggttgctcaacgatagtatagtgaacacaggggtctcctccggcgtggtgagatctcatctcagggccaactccaaaaaccttctcatgggatttaaagcccttcgtgctccttcgagagtttctcccaagaacaccaacaaaccttcgacagccttgtgggccccacttcctccatgtgattagacccgcagccaccacccaatagcggggccccctccgacacagaagagacccctcctataggaaagctgtgtgatacacgcagaagaacctcgtgccgtgggacaagggtgccaccacagaaccttcatagtggggcccccctttttcaggcattaatagcctcataacagtgtgcccttcgggaaaggcccaaacccttctttcgggaacatactagcaagatccagtccccgaaatccggccgggccttttctacc

SEQ ID NO: 705133 - DNA, 899 bp, Homo sapiens
  misc_feature (899)..(899): n is a, c, g, or t
ggccgcccgcccgcccggggccgccgccgtgacgccccaatgagttcgtacttcgtgaacccgctgtactccaagtacaaggcggcggtgcggcggggggcggggggaggccatcaatcccacttactacgactgtcacttcgcgcccgaggtcggcggccgtcacgccgccgccgcagcaagccctgcagctctatggcaacagcgccgccggttcccgcacgcgcccccgaggcgcacgcgcacccgaacccgtccccgcgcctccgggactgggttgcgggggtagggaaggccggggccaggagtacttccaccccggcggggcagcccggcgttgctaccagggcgccccccttctcttcgtatcctcagctccgcggcaactcccccctgggggggtattgctgtcaccggggagccgcgaagttttacggatacgattaatttacagagacagccgatttacgaccccagaagaggccgagctgatccaatatctgactgtcaatcgtccagtggtaatatggcgaggaccaagaccattaactaggagtcgtctccttctatcggctgcccggatgagaccaaacgctcgtatagacggaagacgcagaaagatcctaaagttggcctccacatctgatgtggacaagaagctcttcaaccctaactgccaggaacggcagaatgggcttccaagaccatacctccgtccacggtcaactcggctccccacccgagccgccaccgcacaccggccactccggccgcagagtcggaccggaaacatcaaccaaggcgacagcgcagcccacgcccaagaacactgattcctgccatggaaacgtgcacgagaacctgcgagaacacagcgcgccctgctctgcgctcggccn

SEQ ID NO: 705134 - DNA, 289 bp, Homo sapiens
gggggtttttttcccccttttattttggggccccttggggccggggggcccccgggcccccaaggccccttttttttttgggggttaaaggaaaacccccccctttccccccccggggggttcggggggggtttaggtgtttaaacgttcccccccaaaagattttttttttttttcccggggggttttttttggttgggggccccgaaaccccccccttttggggtttttaaagggaaatttccccttcccccttttttttttttttttttttttcccccccccttta

SEQ ID NO: 705135 - DNA, 579 bp, Homo sapiens
ccttcaccgcgttcacccggcgccggaagaccagcctggcctccgtgccgttcccgcctctcctccgggcccatgattatcgccagtcgaaccagaaaaatggagaccaccagccccgaggagcccctgctgaatgtgccgaggataccgcctggaaccctgggattatcccctgcctcaccggagcaccaaggagagggcccagggccaccccccgtcttatggatgcccagaacccgcgggtggcccttatggggctggtgaggccctggggacccttattgatgaaagaaacccctcttttgcgttacaccccgagtctgcctctcggagccgggagctcacccttccgcgacgtgtttctgagggtctgcatcttaggggggagggctggggccaatctgccaccctgtgcctcttcctcctgtgccctcgctgcgccccaccacccccaactccgagggcccacccctggggaaaacgggaagcgctcgctccctttccccccatagtgctctctctgcctggatcccggccgaagctatgaaagggaataaagagaaaagaagtaccccggga

SEQ ID NO: 705136 - DNA, 437 bp, Homo sapiens
caagactccgtctcaaaaaaaaaaaaaaaggaaaagaaaaaagaaaatcacctaagttctagtccgggctgggatttggagaatgggagaaacctcgggcaagtacggaatcccttgggccctcagtatcccttatgaataaccaataggcgggactagatgatcttaaaggggtcacgtctggtatcctaatacccgggggtccatcactaaagcattattttcccctttccttttcatttcctctcccttctccttttctcacttagcagctctctcgtgggatccatggaatggtttaaacccaggttggcagatatctaagtgcataaaacttagacttctcaagagatatatgggtctcctagaccttaacgtggtcatcacacccacttgtactagggtgtatttccctttgcttagcaaaccctatggaa

SEQ ID NO: 705137 - DNA, 681 bp, Homo sapiens
ccatcctgccggctataacagcttctgcgcggagctatctatatctcttcagccccgccttgcagcggtgttatgcccgtgtttgaagtcttcgccgccgcgcctcatcggttgttgagaaccagcaacttcgtcttctcctgaatagcatcgtcatcctcggcgtcggtggggccgcccttcacacttcatccccatatttggtgctccccataaatccaccaccgcgagccgcgcatgagcatattatcatcgtcagtatgtaatgatctttgtggttcatccagcgggtaattttggttattaatgttttgccgtctgtaaaaccggccgctaccttttccgcgggatataccccgaaccggtgtgctcgcggcccaaggaattcccctcttatctcaaattgatagagaaatatacaccgcccgcctcactcccgccgcgcggtcgagcgcgcgacacaatcacgggtgatggcatcgccccccccccgcccctccccgccggctaactcacaccgcacttttttcgcactgaataccccgaataatacactaatattctctccaccgcctacataggagtactattcctctacccctcccactcactcactcggtgtttcctcaccccaactccacctcgctcccccacgcaattcttcccaccatatacgacaca

SEQ ID NO: 705138 - DNA, 325 bp, Homo sapiens
  misc_feature (262)..(263): n is a, c, g, or t
  misc_feature (288)..(288): n is a, c, g, or t
atccggcgagtgatggtcaatcacagctcatgcagccgcgatctccaggctcaatcaatcctcccacctcagcctcctgggtagctgtgactgcaggcatgtgccaccatgcccggctggttttgtagtttggtagagatggggttgtgctatgttgccaaagatggtctccaactcctgggctaagtgatcctcccacctcagccttccaaaatgctgggattatagacgtgaccgtgcctagcccatgttagctcttcanngtacacccttctctttgcgtgacangcccccgcggctccccaatgctccctgcccaagccct

SEQ ID NO: 705139 - DNA, 613 bp, Homo sapiens
ggatgggtacattccaaaggagcagcctgggggagtgggcaggctcagccagcccttgtgaggctcagagcagctggcccagtgctcctagctcgcctccatgtgtgaagcccgatgcgccctcagaagacgacccatggtccaagtgtcaacgcatgagccgagtgcggtgttgtcacggtctaatgtgaacatctcttcccgtggtcgcccattcctcatgactctgcatgtgcctagcttggacagagttgacggtctcatgtggcttatggtgaccgctgcattacagcattccacaccgtgtcccatgctctgctctatggactgtcctcccactgctggaccctcaccgtgacttcaggggtatggtggacgggagggagcacagtgcctccaaggcccagggagtgctattgcgtcatgaagagcattgtcaggacttcctggcaggccattcacgggctatggagcccctgcctcggtggatccacgctgaacctgcggaccaggatgatcgggcacagcatgtgcctcatgtctgtgcctccttcgtgtgcctcctaccatggtgcccgtttaacgtgtgcctcagtgtgggtatagggaacaa

SEQ ID NO: 705140 - DNA, 96 bp, Homo sapiens
aggtggttgcgtgcaacagtaaagtctgacagttaacgtggtcagggacaagttaatggccaaacaggctctacattagtgggctctggccttgtg

SEQ ID NO: 705141 - DNA, 559 bp, Homo sapiens
  misc_feature (1)..(1): n is a, c, g, or t
  misc_feature (41)..(41): n is a, c, g, or t
  misc_feature (48)..(48): n is a, c, g, or t
  misc_feature (70)..(70): n is a, c, g, or t
  misc_feature (167)..(167): n is a, c, g, or t
ngtttgcccagtaaagtttggtaaagtccaagcaagggttncttaaanaaaaagcccccccttggcattntcctggggacattcttgaaatccccagataaattctcaagggcctcccccagaataaattaaccctttgccaaaggagaaaaaaaaaaaaccattgncagcagattttctcatctgcaagcattgaaagccagaggaccaaggctggcctgggcccaggattctcaaccagagcattcatactgttccccaaccagattaagaaatagattttgagccgggctcagtggcttacgcctgtaatcccagcacttcgggaggctgagatgggtggatcacgaggtcgggagatcgagaccctcctggccaacatggtgaaaccccatttctaaaggtatagaaattagctgggtgtggtggcgcgcgcctgtggtcccggctgcacaggaggctgaggcgggagaatcacttaaacccgggagacagaggttgcagtgggccgggatcgcgccattgcactccggcctgggtgacagagcaagactatctc

SEQ ID NO: 705142 - DNA, 145 bp, Homo sapiens
attgagattgggctagtatcttgtccatgtgcagaagcaagcaggctggatgtcagaggggtgccttgggtaacctctgggactcagaagtgaaagggggctattcctagttttattgctatagccattatgattattaatgatg

SEQ ID NO: 705143 - DNA, 189 bp, Homo sapiens
  misc_feature (139)..(139): n is a, c, g, or t
cctcgccgaacaccaagaacaagcgacgtttgcttttaactgaggttttagcaacttgcccactcgtgcagagagagcgcagaggtgttaccctagtccggactggctctaaagctgttaactcccttgctgtggccgntagtcataaatgtgcgcaggtgagaacagctaaccgcaatcttggtcata

SEQ ID NO: 705144 - DNA, 465 bp, Homo sapiens
acattggtgcgaaagccgggataggggaactccctccggcagactctcctctatcctcccggtaccacgtctcccatgcaagagacttccctcgcctcaggaactcagaccagctccggagcactccggctctgtctatggatataaaatccaacacggtcacggactcttctggggagacagccttccttcaggttggtcaatgcccgggacgccgcctttggcatttgccagccacacaagccaggacctccaatgggacgcccactgaggatcctagtggtgctcttttcctgtgtctctttctttccccccagtctttccttgtgctatcatgggcaatttcccgccttcaatccctctttcttctgtctggctgtgtgtcctcagaaactcaaacctcttcaccttgcaccaatctaaaggctaaaacgtctaatttttttctgtaacacgtcctggccc

SEQ ID NO: 705145 - DNA, 553 bp, Homo sapiens
  misc_feature (13)..(13): n is a, c, g, or t
  misc_feature (85)..(85): n is a, c, g, or t
  misc_feature (167)..(167): n is a, c, g, or t
  misc_feature (240)..(240): n is a, c, g, or t
  misc_feature (250)..(250): n is a, c, g, or t
  misc_feature (256)..(256): n is a, c, g, or t
  misc_feature (260)..(260): n is a, c, g, or t
  misc_feature (274)..(274): n is a, c, g, or t
  misc_feature (301)..(301): n is a, c, g, or t
  misc_feature (345)..(345): n is a, c, g, or t
  misc_feature (354)..(354): n is a, c, g, or t
  misc_feature (367)..(367): n is a, c, g, or t
  misc_feature (370)..(370): n is a, c, g, or t
  misc_feature (385)..(385): n is a, c, g, or t
  misc_feature (403)..(403): n is a, c, g, or t
  misc_feature (439)..(439): n is a, c, g, or t
  misc_feature (449)..(449): n is a, c, g, or t
  misc_feature (470)..(470): n is a, c, g, or t
  misc_feature (480)..(480): n is a, c, g, or t
  misc_feature (483)..(483): n is a, c, g, or t
  misc_feature (493)..(493): n is a, c, g, or t
  misc_feature (541)..(541): n is a, c, g, or t
gggcggcccaggnggggagggccagcccggagcgacgggccaccaagcccagggaggggcaggagaagaaggaggcgagccccgngacagcggagggggcggggcccccccagcgggaggcggccacgaggaggaggaggaaggggccgccacaggcgcggagcacnagggagccaaaggccgcgcaggaaccgcggaggagcaggggccggaaggcagggagcgggacgggaagccccngacgggccgnagcgcncccnggctattcaagaangaaaaacagaaaggaacccaaaaattntagggtggcaatcgccggcggagccaatccaagcaagaaattgncaaccgctnccaaaagccagcnaangaacgcagggaaaanggcgtggaagaaaaacgntaagaaaaggccaaggaagtctgaggcgaaagcaanttaagtggcncttcaagcacccaaacaacanccaaacgtantgngcagcaacangttgggcgaaccaaataaggataaaaagtggggccaacggacgcgcanggacagcacaac

SEQ ID NO: 705146 - DNA, 220 bp, Homo sapiens
attgtccacggtccacatggctgtatcttgagacacgtgtgtagaccccagtgcgagtcatgtttgcccacatgggacgtctccccaggagacgatgccatacagtgtactgttacagaccagggggccccttgagtcaccctcacaggagtctttgccaccctcttttatgccggcacacaacatgttgtcagtatgcgacccgcaaggttacctgtag

SEQ ID NO: 705147 - DNA, 183 bp, Homo sapiens
  misc_feature (37)..(37): n is a, c, g, or t
  misc_feature (62)..(62): n is a, c, g, or t
  misc_feature (96)..(96): n is a, c, g, or t
gtaagcctcaaccaacaacagaaaggctatttaacgngaatacttaaccacttagcgggganctggcgcggcgggggacgctgcggttgggagtgncctcgtgctccgtagcggggccagagctctctcgggcagggggccgcggcgggcggcggccgggaccacgcggacgtcgggcggccc

SEQ ID NO: 705148 - DNA, 776 bp, Homo sapiens
ggaagaaaaaaggaaaccttgaccaggcgtggtggctcagacctgtaatcccagcgctctgggaggccgagtcgcacggatcaattgagtccagggttcgagacccgcttggccaacatggtgaaaccccgtctctacggaaaaaacaaacaattagccgggcgtggtgacgcgtgcctctggtctcagctactcggagggctgaggcccaagaagcgcttgaactcgggagacggagcttacagtgagcccggattgtgcctgtgtactccaacctgggcaacataaacagactccatcacacacctacacacaaaaggaatctcaggaaggtggaaagtataaaggtggttagcagacgctaggaagaaaagggtgggatggagaatgaagacaagtggataatgggtcccaaaatacagaaagatggaataagtgagttctagtgtttgattgtacagtatgaaaattttagttcacaagaatttcttgaatatttccagatgctttggtaagaaacttcctaattttctcattatgctggtttttcaggctcttctcttttctgctcttggaaatcatgctggttatagtgaggttcgttgacgatggagttcgctcttgtttgccaggctggagtgtcatgggtgcagtgttggttcaccggacctctggctcctgggatcaggcgaatctcctggcctccaactcccggtggtgggattcaggcctggcctggttaacaaggggttctcccggcgggcaggggctcaccc

SEQ ID NO: 705149 - DNA, 270 bp, Homo sapiens
gcagtaatttacagaaaataaccaaggagccaataatggactatttggaggtccaggactaagaagatcatgatgcacttagataaaagaatgattaggtataggggagcattatttggcagcagataaatcatggccgttcccctctgtgcggggcagaatcacagtctcacatacggtctggtacggacacatccaaagcatgagggtgtccgaaatcccttgtctattcctgtctgtctaccgtgtctcattatgaccagatctctg

SEQ ID NO: 705150 - DNA, 1270 bp, Homo sapiens
agggtaaaaaaccttggtttttgaaatgctacagaaaatagcttgaggccaggcacagttgctcacacctgtaactccagcactttggaaggctgaggcaggcagatcacttgaggtcaggcgtttgagaccaggctggtcaacatggtgaaaccctgtctctactaaagaattactaaatgaaaaaaaaaaaaaaagaaaatttgacgcgcgggaatgtgggtggacggggtggcctgaaagttcaccaagataaattggggagaggtgtggaggcaaggagagaaatccgtgtgtgaaactccgtggtgaagacagaaggtgtgtgagagtgcgagccaataaacttcgtggccccaatgtggccacatcttccgagcgcggtgggctaagcagagaaaaacaggagggcactctgtgtgtattaaaaaagacaacaaaaaaaatggctgtgggaaaattacccgtttttccccgctttagaaaattcccaaatattgtggggaagtagtgtcaaacccccatttgtggggcctgtcaccacacaggtcgtgtggctcttatgagaaaccggggggtggatattatgacccatctattatgttgtgtgtctttaaacggaacgcaccctgtgggggttttcaaaagaaccagtgtttatatttgaaaaatgtggtctctaaaagattgtcgggggaaatatgttgttcccccgtgaaaaaatttccccatgggcaggccagaactgtgtcaataaaacatcgcgggggaataacatgtacgatgagaatatataacggcgtgatgagccgtggtgtgtgaaataaccaccccatccaggggtgttttacggcactgatgacaccagaacgcgggtgacgaaaccaataaggggggcagaagagggcgattgacacaccacacaatgaggacgggggggcacccaacatagggggggagtcgaacaataattagagagtgtgagaagcaacattgtttgagagcgactggtgttgcttgagacaacacgggggtgctacaaacccaggtaggggtggtgcttcacgaaggtgacaacactcgttgtgatgagacacacattgtgtgcggactgctcagaggaatgatagtggtggggcagaaattatctaaaaaagtggtggggctagcaggcagggacgaatcagacaggtgtcagcttgttatacgagttgaaagagaagaggggcagaagaaaacttataaatatgtgggggggagggaataacag

SEQ ID NO: 705151 - DNA, 191 bp, Homo sapiens
acacattgactgataactcgagcgtagccctggcacaacgccgtcgttggcagcttggcctcacgctgcagcgttttatccaggtccgcaagctgcttccggagcttcgcggcctcttccttcttgtcgatcagacccgcgagtgcaggatcacctcggcgtcggtcagcacggtcaaggccaatgttgga

SEQ ID NO: 705152 - DNA, 584 bp, Homo sapiens
atcgcaaaaaaatttgtgctttgagtgtcggaaagcaaaaacatgagccacacagaggatgattaataattccacaatctcagagcactagactttagcaaaggatcattcttagatatttatgatgatgaatatcactgccaaattgacagtagatttgctaaactgatctgtgttgaatagcatgaggcatgccagcatgacaccttatgctccttcttatgagaaaaaatatagttctttatccaaagtggatagtcttgcgctgtctctctgtagatgcagttgaccaatttgcagagacagcttatatacctgcagggccattttcacatactgtgggtttgggagacactgcatgagtcttttgactgtgagcacttgttcacagacttcgggggtctcccactcacacttgggcacctctgggtaccaggatctgttcccagagcaagtggtactttggggaccaaccacaccatagccagaatcacattggatggtgacattgtcaggctcaacatactgatccttattcacagacaaccttgcattcactaattgtggtttgcgacacagagctt

SEQ ID NO: 705153 - DNA, 1454 bp, Homo sapiens
  misc_feature (548)..(548): n is a, c, g, or t
  misc_feature (671)..(671): n is a, c, g, or t
tgggacagggggtacagatatttattttcctcaaagcagagttggggccttaggccagcggcgtgcccctggttagcctccccttcttgttaagagatgcaaagctttactttcgtggggcacacccattctccagcgtggaggtgcaagcaagaggccacgtggtgtaaggaggcaaaattctccctttacgtgccgtgaagaggattcctccaacaagcatatctcgggagaagctcgtgacgagggaaccatttatacagggtctcccaacgtggaagccgtgaggcttgaggctcaggctccaagtgtgcaggccttcctttccccatcacgaggttctccgagacgcctttccgtggggggcgggaacgccgtgtgtggtggtgggagattggggtgtgtgtacggcctgggagattgagaaatcattctcacaggccggcccatggatcacgtccgtgtgcatatgtgtgcaagaacaaacgcgtgtccgtggggccccagaggctctttctcaaaccacacaaacctcggcgtatgtgtgnggtatcaacgcgcccttcttggggtgtctcaagcctctctcgagccgacgcttcgcgggcgctaaatggccgtgggcttgaagtcctgggggcgcttggacacatgaggcccgtgtgtgcccncatctctgtggggccattctccgagaaaattcccctcgggggtggcaccacgagggaaacggcaacggggcacaggggggcgcctcaatatacatcttacgccagagaacgaacattacccagtgggaactcacgaggagggacgcataggaccacgcggggggaaatgtgcattacacacctggcgggctcggccgacctcgcgggcgcaaccacctcccccctccaaaaatctttacactattcccctggggcacacaaccccttaccaagcaagaaacagcgtccatccccactccctcccgaggaaacagcggcggaccacgggcgtcaacaacagcgcgccgaaaacctctgggtggtgcggtcgcatgcggcaaccccgacagcgtctccgggatgccaaccgcatccccatagggacgggggacccgagaagcaactcaatgggggagacacgtgccgccaccaacgccgccactgtggcgtgtaattagtggtacccccgggcgagcgggagatacgggggggcacgacaacacccccgcagacggtcgactggggggcgacccaacagcatcacgaaactaaggagaagaaaaagacgaggaagacaaccaccgcggtagacacaacaagccgagacagaaacagagaaaaggacaccccagacacagtaacccgccaagacagcatcaggagagcaaagcacactacccactgagacgtgcgagcataagaaagcacagccgagcgacacaccaagccgtgcagtgagccaca

SEQ ID NO: 705154 - DNA, 364 bp, Homo sapiens
ccagtgatgggctagttcagcttgacggattctcagcttcccagaccctcattatatcctttgatactcctgtagaaagcccactaaacaatgcccttagaaggctgggttcagagggtatcctttagagttcactgtctcctgtgctgtcttaattctgagcttggatgaggcaggttcatgtgtggccaaccctgagtgccccacgtgccacgggcccccatctcacccacactcatgagcagcctaccatgcctgctttttgtttgtttgagacgggggctccctctgtcacccaggctggagtgcagtgctgcaatctcggctcactgcaacctctgcctcctggattcaagcaattctc

SEQ ID NO: 705155 - DNA, 1147 bp, Homo sapiens
  misc_feature (594)..(594): n is a, c, g, or t
  misc_feature (635)..(635): n is a, c, g, or t
  misc_feature (759)..(759): n is a, c, g, or t
  misc_feature (1043)..(1043): n is a, c, g, or t
  misc_feature (1053)..(1053): n is a, c, g, or t
  misc_feature (1055)..(1055): n is a, c, g, or t
cactccagcattaatatgtctgtttaaaaattactaattctcaaatggctcaagaacattagaatttaagtaccttttagagtaattattttaagcaaatagcctggacgtaagagattctcatgccagcatgctttcatttgtcagttgttgtgactgagagctaatgaatgacacctgaaatgcatatggtatttttgggagagttaaggtataatttgaagattggcagaccagtcgcgctgattactcttagagaagaagaaatggaaaaatgaaagaaggcaggaaggaaagaaaggatgcaggaaggaaagaaaggatacaggaagagagggaagcagaaggcagtcatttttctattttccccacaaattatttcaaaaaaaatctgtattttctgggatatgtcattggcaagaggaagaactggtgtttcgaaagcagtatggattctttaaatgcctctcactcttacaagatagtaggctttgagataataaacttacccgtgtcaattaacatttaaactggcatatagaaaaaaaggaggatttttctgcattgtaaaataatcagtatggtttatatgtngaatttgacatttgtgtgtaatttcatggtggcctagtgtngtggtgcttctggtaatggtaatagaagctcaactatttttttgtggatttcagtttttatcatcagaagtcctagacagtgacatttcttaatggtgggagtccagctcatgcatttctgatnatacaaaacagttggcagtaggttatctgtcatttcagttttttactgaaatttgagctaaacatttttacatgtaaatacttgtatttaccaaagatttaaatcagttgattaattaattaactcaaatactgtgaactatctttaaaacactagaaaaaagaaatgttagtatctcaattacaccaactgtgcaaatgaactttgataacatagaaataatctacattggctttgtgaaatctggggaagagctttaggattctagtagatggatactgaanactcaggccncnttaaattattaatggaaaccttgggtttttgtctttatgctatgccagagaaatgtgataattttttataataaaaattttttatgatgata

SEQ ID NO: 705156 - DNA, 115 bp, Homo sapiens
gatcctgttgagcagctggaggagtcacctcatcgatactacgagtctttctagcttcatgttactggtgtttggaaccttgatgccgaagggagagcttgtttgaattatctca

SEQ ID NO: 705157 - DNA, 188 bp, Homo sapiens
tccgattggtgggcattcaatgaaagaaaaatagtatatatgttacttgaacataccaagcaaaactcaacttttcaagttttagcatgatatatttggcaaacttttcttttcttttcttttcttttttttttttttattttttagggaagggaggtctttttgccaccctgtttggacgctgcagt

SEQ ID NO: 705158 - DNA, 406 bp, Homo sapiens
  misc_feature (348)..(348): n is a, c, g, or t
aaagcagcagaagagaagaagtctctaaaacgaacttttcagcagatacaagaggaggaagatgatgactaccctggaagctactctccccaagacccttctgcaggccctctcttgactgaggagttaatcaaagctttgcaggatctggaaaatgctgcgtcaggggatgctactgtccgacagaagatcgcttccctgcctcaggaagtgcaagacgtgtcgctgctagagaaaattacagacaaagaggcagctgaacgtctttcaaaaacagtagatgaagcatgtctgttactagcggaatataacgggcgcctggcagcggaactggaagaccggcgccantggctcggatgctggtggatacacccagaaccagaaagaggttttgtcaaaaaaaaaa

SEQ ID NO: 705159 - DNA, 410 bp, Homo sapiens
gaatgcaagtccttttagttatcaaagtcagagagccattaaaatgagcacagttatgtttttctcccttttcttcagctatgtatttatctcttgaaactgttcactattgccacaagtagctttaaattagaccaataattccactctggacactaaattccatacccttaaccttgatgtatatgcaatcaattattaaagttatttctttacataagtaaaatttctcacaaccaatttcgtatcagctcattcactgtacctctattatttttttttttttgcctttacaaatccacttgtaagtgctgctaatgaaagtgtagattccagagcaacttgaatattttgtcacaagtaaaaatccataagcttgacacacaaaataaacagtctgaaaatataaa

SEQ ID NO: 705160 - DNA, 534 bp, Homo sapiens
ttacgaatcggaagaaactgaagcaaacagactattatgaagcctcgactgcgcttcagaagagaaggatatctgaaagatagctggaggacattgagtatgtgcagtgcttttactttctcatggaaggcttgtgaatatataaagccaaaagcaaagatccaattgagagaattaatggactaatcaagaggataaagttactttggagaaaagtggactctttccggcactatatacagtgctttaataatagtataatcctcgatgatactagaacaggacaggctcaaatgtcagtagtgctggtactaaaaccaatgaaaaaactgtgatctgatggcaactcttcggtagaaggcaggcttagtcactgaaaggcacacttgctggtgagtaaaagtcccatttgaggttgccttcttgagaccatttccatcacttggccagtaaatgctcttaatcctcacaaccctagggagggctatgctactctcatcatgtggccatttcctgcgatgagccccatgaggc

SEQ ID NO: 705161 - DNA, 385 bp, Homo sapiens
ctcttgacagatgttgcgcctgtccgcgaacatactcctggactcaatcatggcttgtgggctcggcgccagcaacctgaatctcaaacctgtagagtgcctttgagtgccagagcgaggtggcttctgacgctatagagcttcgtgctgaacctgggcaaagacacggacaacctgtgcctggactctaacccttgcgttaacggccacggcgacagccaacaccattgtgtgcaacagcaaggaccgcggggcctgggggaccgagcacgaggaggctgtcttttcctttcaggctggaagagttgcacaagtgtgcatctttgaccaggccaacctgaccgcgaagctgtcacaaggataccaattcaggttcccccgcctc

SEQ ID NO: 705162 - DNA, 408 bp, Homo sapiens
caccatagagattttttgttggtcagtactagccagcttctggaccacccgtccatcctggccacaggggtctggggcgcgagatttccaaccaatatgtaacgctaaagctattgccgttcaccctggtgggtggcacaggcaaatccatctgtgcagagcctatcttcccagtctctccttacagctcatggatatcactttactgccaaaatgacaaccagcaagaaagcgggtggtgcccgtttcctccctggggaccctcagagggccaggccattctcttccttggtgtgactgcggatccagggtaagaagtgtgagactctcgtgtaaacgcctggcttgtccttcagggcacatccacggccccagctcacaattccaggcaaagtcattcggcctttg

SEQ ID NO: 705163 - DNA, 512 bp, Homo sapiens
tcaatcagccacatagccctcgtagtaacagccattctcatccaaaccccctgaagcttcaccggcgcagtctttctcatagactcccgggggcttccatcctcattccttttctccctagcaaacgcaaactccgaacgcactcacagtcgcatcataatcctctctcaaggacttcaaactctactcccactaatagctttttgatgacttctagcaagcctcgctaacctcgccttaccccccactattaacctactgggagaactctctgtgctagtaaccacgttctcctgatcaaatatcactctcctacttacaggactcaacatactagtcacagccctatactccctctacatatttaccacaacacattggggctcactcccccccccctttaacaacataaacccctctttcacccgagaaaacaccctcatgttcatacacctatcccccattctcctcctttccctcacccccgacttctttcccgggttttcctctta

SEQ ID NO: 705164 - DNA, 3518 bp, Homo sapiens
  misc_feature (2321)..(2321): n is a, c, g, or t
  misc_feature (2836)..(2836): n is a, c, g, or t
  misc_feature (2840)..(2840): n is a, c, g, or t
gccagcgcccttcttgtgcgagcgctgctccggcttctggcccctggcgggcttcttgtccgcgcgccgggagccagtaaccatgacgacggccgttgccaaggccgagagccaatagaggcgtcgccggggctgtttcaaaaacctaaagcaaacaacgaaaaacgctacatcgttgggggaggggaaagactgagaggacccggggcccctccctgaggctcagaccaggcctcgcggccccggccggcgtgagccgtacaaaatctacgtcacttggggtagaaaaacaaaaacaccgaaaagcccacgccggccgctctgaccggccgacacgctcacttgcggcccttgggcactttggggacgctgggcttggccgccttcttcaccttcttgcccccggcggccgccgtcttcttggccttgccgcctttgtccttcttggcgccagcgcccttcttgtgcgagcgctgctccggcttctggcccctggcgggcttcttgtccgcgcgccgggagccggccgcgcccggggctgccttcttcgctttgtgcgcggtgggggccggggcggtggcggccgccggggctccgcgccgctccccgccgccctccagcttcttgcggttgagcttgaaggaaccgttggcgccggtgcccttcacctgcagaagcgtgtcgttctgcaccagcgccttgatcgagtacttgaggtaggtgcgcccattctgctggtcgaaccacggaaccttcttggcctcggtgtagatcttggccagcgacgagccgttgcgctcgcccagcctacggatggtctccaccaccagctggctgtacttgcccggctggttcttcttcttgctattcttcctcttcttagatggggacaacgccgccgagccgccagccttggtcaccttcttggccattccctcggcggtcgtcactggcagggcctcctcgagctccacggacatggtagcaagaggattggtggcgggcggcgcgcggaagccggggggccgcgccgggaagaggaaggcgaggggccgagggggtgcaggggggctgggggcgcgcggcggctccaggcgggagcggccgcggccgggcctggggccgggcggcagggctggggtgggggccgggccgggccggagcgagggttggggggcccggagccggggccggactaggggaccgagttgggggtcagagaccgagtccgagccggcggctggagctggggacgtagacctaggccgagccggagcgaagagaaatcccgccgaacgcgagacaccgccgccgcagcttccactggcgcctctggaactcgctgggcgtgcgcgctgcgcgtctggcgggagggcgcttctctcggctttttatagcttcatggcggaccacgttgagaacaacaacagcctggtccggggccagcgccaacttgtgcttcttggagccccttctccggccgctggcttctcggaccgcgcctctccagcgccgccgcgcccgcagcggggcgccccggacagggcctgagctcccggcgcagtggagaggcgacttgcgtcctggaagggctcagcaaaggcgaacggagaggtgcaccctaggctgcgggagcgcgagaggaggggggcacctcgtttggaggccaatagcgcgggccccagaggaggccccacggccgggagcttggcggccggcagcccagagaacgccacgggcacccgagccttgtcccggcccggggggctccaggcctgcccgcaagaggagctttaatttgtccaaactaacacagggcgcgccctcacgtggtcggctggggcaacgtgaactgcgctaggacatcctcgggggttttccgccccatccaaaggggatggcggatgggaggcactctcagcttcaccccgggttctggttgtgcctctgggagcctaggcacaacccggggaatggaggactacggcaggacctctctagggacactgcctcgccgctccccccaccctgttgccgtgatgttcccagggcctcattttgtaatccacaagtagctgccgccggtccccccaaagccaatgggggctcaggtgggacaggtggcgggggtgaggctgtgacacccagaggaattcctgtgagaggatggggaagggattcgctcttagttcctgggtgcacccctccccctctcccgtgcacagggaaatgatggcgggaacacagcaaaggagaccatgtcctggagagggtcccgggccccaccctccccgggggggcttgtgcaaggctggcggccngatctctgctgattccagtattgggggtgcagagaaggcacaggacagtttttgttgaagccgttgcagcctccacttggggaagctgaggccaggtaagatgctcgggtaggagaggggatccctttgggggtaggtgatgtagggcacaggagtggggctggggctggggggtggcagggttgcaggcaggagacagtctccagaggcccagcatagaaaagcgatggaggggtgaggggggacaggacgctggcgaattggggttcccagagtgagagacaggaacatttacaggtggacagagtaaaaggccctgaaaagggggtgggttggtgcatttgtggccttgggcccaagcaggcttctctgggtgagggctagcagcacctcccctcttctccagctcacccctttcacacacacacacgccccccattttgtcaccctgtcaagggaataaaccccagagaggaagaaattatgtctaggaggaaacggtgagcctggatggntttntaggggggaggctggcaggggcatggagccaggaaacagccttcgccccccagagcaccaggtaccctgagaaaagtgagaagagagattgcagcccaggtccctgcagaggaggatgggctcctttcccaggaaggactggctgagtggactgtctccagggcacaggacaacgttgagggcctgaggcctccaccttcttgaagaaggaccatgtgaatttcctgacagagaacggggatgggtttctgaaagcaccacccagctgagcctgccgaaactgcacagctgtttccaggccaggctggctgcatggaggacgtgagaggaacagccagctgtgtgtgctgggcccactgatcagggtgctcaggaccaggagccttctgaggatgtgcagaggggactctggggagaggaacatggtggccacagctggagtgaccgcagtgtacagagatgggatgggagcaggaaacccaaaagagccggccctggaaccaggtggaggggaggcagcccggccatgacccagagcaggacacctgctccacttcaccttttgccatgagtaaaagctccctgaggcctcccaagaagttgatgccctgtgcttcctgtacagctgcggaaccgtgagccaattaaacctcttatctttgtaaattaaaaaaaaac

SEQ ID NO: 705165 - DNA, 3628 bp, Homo sapiens
  misc_feature (30)..(30): n is a, c, g, or t
  misc_feature (2431)..(2431): n is a, c, g, or t
  misc_feature (2946)..(2946): n is a, c, g, or t
  misc_feature (2950)..(2950): n is a, c, g, or t
cgcacccccccttagtgtccccggagtttnttgtttttttttgaaaggtttaaacgctttattgtgcccaaaaaaaggcccatggaatgaagggaagagccgcgcagccctgagcccggagcgattgtttgtcgcgcacccaaaggcaaggagggtggggagctgggaaaggatgcgcggcctccgcgtccccgcgcgcctgggcccggccaaccagcgaccccgcccggtgggcaggcgcggcctcggccatcggcgcctaggggccagtaaccatgacgacggccgttgccaaggccgagagccaatagaggcgtcgccggggctgtttcaaaaacctaaagcaaacaacgaaaaacgctacatcgttgggggaggggaaagactgagaggacccggggcccctccctgaggctcagaccaggcctcgcggccccggccgacacgctcacttgcggcccttgggcactttggggacgctgggcttggccgccttcttcaccttcttgcccccggcggccgccgtcttcttggccttgccgcctttgtccttcttggcgccagcgcccttcttgtgcgagcgctgctccggcttctggcccctggcgggcttcttgtccgcgcgccgggagccggccgcgcccggggctgccttcttcgctttgtgcgcggtgggggccggggcggtggcggccgccggggctccgcgccgctccccgccgccctccagcttcttgcggttgagcttgaaggaaccgttggcgccggtgcccttcacctgcagaagcgtgtcgttctgcaccagcgccttgatcgagtacttgaggtaggtgcgcccattctgctggtcgaaccacggaaccttcttggcctcggtgtagatcttggccagcgacgagccgttgcgctcgcccagcctacggatggtctccaccaccagctggctgtacttgcccggctggttcttcttcttgctattcttcctcttcttagatggggacaacgccgccgagccgccagccttggtcaccttcttggccattccctcggcggtcgtcactggcagggcctcctcgagctccacggacatggtagcaagaggattggtggcgggcggcgcgcggaagccggggggccgcgccgggaagaggaaggcgaggggccgagggggtgcaggggggctgggggcgcgcggcggctccaggcgggagcggccgcggccgggcctggggccgggcggcagggctggggtgggggccgggccgggccggagcgagggttggggggcccggagccggggccggactaggggaccgagttgggggtcagagaccgagtccgagccggcggctggagctggggacgtagacctaggccgagccggagcgaagagaaatcccgccgaacgcgagacaccgccgccgcagcttccactggcgcctctggaactcgctgggcgtgcgcgctgcgcgtctggcgggagggcgcttctctcggctttttatagcttcatggcggaccacgttgagaacaacaacagcctggtccggggccagcgccaacttgtgcttcttggagccccttctccggccgctggcttctcggaccgcgcctctccagcgccgccgcgcccgcagcggggcgccccggacagggcctgagctcccggcgcagtggagaggcgacttgcgtcctggaagggctcagcaaaggcgaacggagaggtgcaccctaggctgcgggagcgcgagaggaggggggcacctcgtttggaggccaatagcgcgggccccagaggaggccccacggccgggagcttggcggccggcagcccagagaacgccacgggcacccgagccttgtcccggcccggggggctccaggcctgcccgcaagaggagctttaatttgtccaaactaacacagggcgcgccctcacgtggtcggctggggcaacgtgaactgcgctaggacatcctcgggggttttccgccccatccaaaggggatggcggatgggaggcactctcagcttcaccccgggttctggttgtgcctctgggagcctaggcacaacccggggaatggaggactacggcaggacctctctagggacactgcctcgccgctccccccaccctgttgccgtgatgttcccagggcctcattttgtaatccacaagtagctgccgccggtccccccaaagccaatgggggctcaggtgggacaggtggcgggggtgaggctgtgacacccagaggaattcctgtgagaggatggggaagggattcgctcttagttcctgggtgcacccctccccctctcccgtgcacagggaaatgatggcgggaacacagcaaaggagaccatgtcctggagagggtcccgggccccaccctccccgggggggcttgtgcaaggctggcggccngatctctgctgattccagtattgggggtgcagagaaggcacaggacagtttttgttgaagccgttgcagcctccacttggggaagctgaggccaggtaagatgctcgggtaggagaggggatccctttgggggtaggtgatgtagggcacaggagtggggctggggctggggggtggcagggttgcaggcaggagacagtctccagaggcccagcatagaaaagcgatggaggggtgaggggggacaggacgctggcgaattggggttcccagagtgagagacaggaacatttacaggtggacagagtaaaaggccctgaaaagggggtgggttggtgcatttgtggccttgggcccaagcaggcttctctgggtgagggctagcagcacctcccctcttctccagctcacccctttcacacacacacacgccccccattttgtcaccctgtcaagggaataaaccccagagaggaagaaattatgtctaggaggaaacggtgagcctggatggntttntaggggggaggctggcaggggcatggagccaggaaacagccttcgccccccagagcaccaggtaccctgagaaaagtgagaagagagattgcagcccaggtccctgcagaggaggatgggctcctttcccaggaaggactggctgagtggactgtctccagggcacaggacaacgttgagggcctgaggcctccaccttcttgaagaaggaccatgtgaatttcctgacagagaacggggatgggtttctgaaagcaccacccagctgagcctgccgaaactgcacagctgtttccaggccaggctggctgcatggaggacgtgagaggaacagccagctgtgtgtgctgggcccactgatcagggtgctcaggaccaggagccttctgaggatgtgcagaggggactctggggagaggaacatggtggccacagctggagtgaccgcagtgtacagagatgggatgggagcaggaaacccaaaagagccggccctggaaccaggtggaggggaggcagcccggccatgacccagagcaggacacctgctccacttcaccttttgccatgagtaaaagctccctgaggcctcccaagaagttgatgccctgtgcttcctgtacagctgcggaaccgtgagccaattaaacctcttatctttgtaaattaaaaaaaaac

SEQ ID NO: 705166 - DNA, 216 bp, Homo sapiens
gccatccaaggcaacacaaacaactgtccaaaaggcttcgtacgggtatcctattattacctagagtttttcttcgcaggattttctaagctttaccactccagcctagccctagccccattaggaggactgccccacaggataccgctaatccctgagtcactctacaatcgtatactgatatgagttatacctagctcatgctatgacacgaca

SEQ ID NO: 705167 - DNA, 574 bp, Homo sapiens
  misc_feature (30)..(30): n is a, c, g, or t
cgcacccccccttagtgtccccggagtttnttgtttttttttgaaaggtttaaacgctttattgtgcccaaaaaaaggcccatggaatgaagggaagagccgcgcagccctgagcccggagcgattgtttgtcgcgcacccaaaggcaaggagggtggggagctgggaaaggatgcgcggcctccgcgtccccgcgcgcctgggcccggccaaccagcgaccccgcccggtgggcaggcgcggcctcggccatcggcgcctaggggccagtaaccatgacgacggccgttgccaaggccgagagccaatagaggcgtcgccggggctgtttcaaaaacctaaagcaaacaacgaaaaacgctacatcgttgggggaggggaaagactgagaggacccggggcccctccctgaggctcagaccaggcctcgcggccccggccggcgtgagccgtacaaaatctacgtcacttggggtagaaaaacaaaacccacccccatccaggaccggtgactttcaaggaaccaaacgctcacgcaggccaataggagataaattcggtagtccccacccac

SEQ ID NO: 705168 - DNA, 245 bp, Homo sapiens
gcggatctcttgaggtcagtagttcaagaccagactgggcagtagttcaagaccagcctgggcaacatggcgaaaccctgtctctactaaagaatacaaaaattagctgggcattgtgcccatgtgcctgtagtaccagctactctggaggctgaggcaggagaatggcttgaatccagcaaggcggaggttgcagtgagctgagattgtgccccatggactccagcctgtggtgcacagagtgc

SEQ ID NO: 705169 - DNA, 111 bp, Homo sapiens
cagcaggcttactgaatggcttcatttcagatttagttgatttctccaccaaacccatgtcatgtattatccatcggctgtattcccagcagtcaataaataaaaacccgt

SEQ ID NO: 705170 - DNA, 604 bp, Homo sapiens
  misc_feature (30)..(30): n is a, c, g, or t
cgcacccccccttagtgtccccggagtttnttgtttttttttgaaaggtttaaacgctttattgtgcccaaaaaaaggcccatggaatgaagggaagagccgcgcagccctgagcccggagcgattgtttgtcgcgcacccaaaggcaaggagggtggggagctgggaaaggatgcgcggcctccgcgtccccgcgcgcctgggcccggccaaccagcgaccccgcccggtgggcaggcgcggcctcggccatcggcgcctaggggccagtaaccatgacgacggccgttgccaaggccgagagccaatagaggcgtcgccggggctgtttcaaaaacctaaagcaaacaacgaaaaacgctacatcgttgggggaggggaaagactgagaggacccggggcccctccctgaggctcagaccaggcctcgcggccccggccggcgtgagccgtacaaaatctacgtcacttggggtagaaaaacaaaaccccgacagcccacgccggacggttcgccgcccccagaggatgagcgcgggacattacgtagggtgggggtggggggggcgcgccggcgcccgccgggctccccgggggcggccgc

SEQ ID NO: 705171 - DNA, 419 bp, Homo sapiens
ataagtagtataaagacaaaaggttgcattcttttgaatccttcatcagcctttcactgaatacacaatttaatctggctcagtgaaactgcatttttacataaatagggcagaggaagcaatgaggtacgcatttgtctcagatgagcatagggatgactttctgtcccacacctgtgaggataagctatcggtttccattgccagggtgaaattcaacagaacagagcaattctcctgcctcagcttcccaagtagctgggattacaggtgtctgccatcacgcctggctaagttttgtatttttagcagagatggagtttcctcatgtcgctcaggctggtctcgaattcctgacatcaagtgatcggtttgcctcatcctcccaaaatgctgggattacaggcatgagcccgctt

SEQ ID NO: 705172 - DNA, 125 bp, Homo sapiens
gtcgatctcatacacggatccccccctcgaaacccagtggttcgatgagcataagagcccttggtaggctgagttgcatcctggcgcttgcggggctccctgctcacaactatactactcttgtg

SEQ ID NO: 705173 - DNA, 3583 bp, Homo sapiens
  misc_feature (30)..(30): n is a, c, g, or t
  misc_feature (2386)..(2386): n is a, c, g, or t
  misc_feature (2901)..(2901): n is a, c, g, or t
  misc_feature (2905)..(2905): n is a, c, g, or t
cgcacccccccttagtgtccccggagtttnttgtttttttttgaaaggtttaaacgctttattgtgcccaaaaaaaggcccatggaatgaagggaagagccgcgcagccctgagcccggagcgattgtttgtcgcgcacccaaaggcaaggagggtggggagctgggaaaggatgcgcggcctccgcgtccccgcgcgcctgggcccggccaaccagcgaccccgcccggtgggcaggcgcggcctcggccatcggcgcctaggggccagtaaccatgacgacggccgttgccaaggccgagagccaatagaggcgtcgccggggctgtttcaaaaacctaaagcaaacaacgaaaaacgctacatcgttgggggaggggaaagactgagccggccgacacgctcacttgcggcccttgggcactttggggacgctgggcttggccgccttcttcaccttcttgcccccggcggccgccgtcttcttggccttgccgcctttgtccttcttggcgccagcgcccttcttgtgcgagcgctgctccggcttctggcccctggcgggcttcttgtccgcgcgccgggagccggccgcgcccggggctgccttcttcgctttgtgcgcggtgggggccggggcggtggcggccgccggggctccgcgccgctccccgccgccctccagcttcttgcggttgagcttgaaggaaccgttggcgccggtgcccttcacctgcagaagcgtgtcgttctgcaccagcgccttgatcgagtacttgaggtaggtgcgcccattctgctggtcgaaccacggaaccttcttggcctcggtgtagatcttggccagcgacgagccgttgcgctcgcccagcctacggatggtctccaccaccagctggctgtacttgcccggctggttcttcttcttgctattcttcctcttcttagatggggacaacgccgccgagccgccagccttggtcaccttcttggccattccctcggcggtcgtcactggcagggcctcctcgagctccacggacatggtagcaagaggattggtggcgggcggcgcgcggaagccggggggccgcgccgggaagaggaaggcgaggggccgagggggtgcaggggggctgggggcgcgcggcggctccaggcgggagcggccgcggccgggcctggggccgggcggcagggctggggtgggggccgggccgggccggagcgagggttggggggcccggagccggggccggactaggggaccgagttgggggtcagagaccgagtccgagccggcggctggagctggggacgtagacctaggccgagccggagcgaagagaaatcccgccgaacgcgagacaccgccgccgcagcttccactggcgcctctggaactcgctgggcgtgcgcgctgcgcgtctggcgggagggcgcttctctcggctttttatagcttcatggcggaccacgttgagaacaacaacagcctggtccggggccagcgccaacttgtgcttcttggagccccttctccggccgctggcttctcggaccgcgcctctccagcgccgccgcgcccgcagcggggcgccccggacagggcctgagctcccggcgcagtggagaggcgacttgcgtcctggaagggctcagcaaaggcgaacggagaggtgcaccctaggctgcgggagcgcgagaggaggggggcacctcgtttggaggccaatagcgcgggccccagaggaggccccacggccgggagcttggcggccggcagcccagagaacgccacgggcacccgagccttgtcccggcccggggggctccaggcctgcccgcaagaggagctttaatttgtccaaactaacacagggcgcgccctcacgtggtcggctggggcaacgtgaactgcgctaggacatcctcgggggttttccgccccatccaaaggggatggcggatgggaggcactctcagcttcaccccgggttctggttgtgcctctgggagcctaggcacaacccggggaatggaggactacggcaggacctctctagggacactgcctcgccgctccccccaccctgttgccgtgatgttcccagggcctcattttgtaatccacaagtagctgccgccggtccccccaaagccaatgggggctcaggtgggacaggtggcgggggtgaggctgtgacacccagaggaattcctgtgagaggatggggaagggattcgctcttagttcctgggtgcacccctccccctctcccgtgcacagggaaatgatggcgggaacacagcaaaggagaccatgtcctggagagggtcccgggccccaccctccccgggggggcttgtgcaaggctggcggccngatctctgctgattccagtattgggggtgcagagaaggcacaggacagtttttgttgaagccgttgcagcctccacttggggaagctgaggccaggtaagatgctcgggtaggagaggggatccctttgggggtaggtgatgtagggcacaggagtggggctggggctggggggtggcagggttgcaggcaggagacagtctccagaggcccagcatagaaaagcgatggaggggtgaggggggacaggacgctggcgaattggggttcccagagtgagagacaggaacatttacaggtggacagagtaaaaggccctgaaaagggggtgggttggtgcatttgtggccttgggcccaagcaggcttctctgggtgagggctagcagcacctcccctcttctccagctcacccctttcacacacacacacgccccccattttgtcaccctgtcaagggaataaaccccagagaggaagaaattatgtctaggaggaaacggtgagcctggatggntttntaggggggaggctggcaggggcatggagccaggaaacagccttcgccccccagagcaccaggtaccctgagaaaagtgagaagagagattgcagcccaggtccctgcagaggaggatgggctcctttcccaggaaggactggctgagtggactgtctccagggcacaggacaacgttgagggcctgaggcctccaccttcttgaagaaggaccatgtgaatttcctgacagagaacggggatgggtttctgaaagcaccacccagctgagcctgccgaaactgcacagctgtttccaggccaggctggctgcatggaggacgtgagaggaacagccagctgtgtgtgctgggcccactgatcagggtgctcaggaccaggagccttctgaggatgtgcagaggggactctggggagaggaacatggtggccacagctggagtgaccgcagtgtacagagatgggatgggagcaggaaacccaaaagagccggccctggaaccaggtggaggggaggcagcccggccatgacccagagcaggacacctgctccacttcaccttttgccatgagtaaaagctccctgaggcctcccaagaagttgatgccctgtgcttcctgtacagctgcggaaccgtgagccaattaaacctcttatctttgtaaattaaaaaaaaac

SEQ ID NO: 705174 - DNA, 3425 bp, Homo sapiens
  misc_feature (30)..(30): n is a, c, g, or t
  misc_feature (2228)..(2228): n is a, c, g, or t
  misc_feature (2743)..(2743): n is a, c, g, or t
  misc_feature (2747)..(2747): n is a, c, g, or t
cgcacccccccttagtgtccccggagtttnttgtttttttttgaaaggtttaaacgctttattgtgcccaaaaaaaggcccatggaatgaagggaagagccgcgcagccctgagcccggagcgattgtttgtcgcgcacccaaaggcaaggagggtggggagctgggaaaggatgcgcggcctccgcgtccccgcgcgcctgggcccggccaaccagcgaccccgcccggtgggcaggcgcggcctcggccatcggcgcctaggggccagtaaccatgacgacggccgttgccaaggccgagagccaatagaggcgtcgccgtcttcttggccttgccgcctttgtccttcttggcgccagcgcccttcttgtgcgagcgctgctccggcttctggcccctggcgggcttcttgtccgcgcgccgggagccggccgcgcccggggctgccttcttcgctttgtgcgcggtgggggccggggcggtggcggccgccggggctccgcgccgctccccgccgccctccagcttcttgcggttgagcttgaaggaaccgttggcgccggtgcccttcacctgcagaagcgtgtcgttctgcaccagcgccttgatcgagtacttgaggtaggtgcgcccattctgctggtcgaaccacggaaccttcttggcctcggtgtagatcttggccagcgacgagccgttgcgctcgcccagcctacggatggtctccaccaccagctggctgtacttgcccggctggttcttcttcttgctattcttcctcttcttagatggggacaacgccgccgagccgccagccttggtcaccttcttggccattccctcggcggtcgtcactggcagggcctcctcgagctccacggacatggtagcaagaggattggtggcgggcggcgcgcggaagccggggggccgcgccgggaagaggaaggcgaggggccgagggggtgcaggggggctgggggcgcgcggcggctccaggcgggagcggccgcggccgggcctggggccgggcggcagggctggggtgggggccgggccgggccggagcgagggttggggggcccggagccggggccggactaggggaccgagttgggggtcagagaccgagtccgagccggcggctggagctggggacgtagacctaggccgagccggagcgaagagaaatcccgccgaacgcgagacaccgccgccgcagcttccactggcgcctctggaactcgctgggcgtgcgcgctgcgcgtctggcgggagggcgcttctctcggctttttatagcttcatggcggaccacgttgagaacaacaacagcctggtccggggccagcgccaacttgtgcttcttggagccccttctccggccgctggcttctcggaccgcgcctctccagcgccgccgcgcccgcagcggggcgccccggacagggcctgagctcccggcgcagtggagaggcgacttgcgtcctggaagggctcagcaaaggcgaacggagaggtgcaccctaggctgcgggagcgcgagaggaggggggcacctcgtttggaggccaatagcgcgggccccagaggaggccccacggccgggagcttggcggccggcagcccagagaacgccacgggcacccgagccttgtcccggcccggggggctccaggcctgcccgcaagaggagctttaatttgtccaaactaacacagggcgcgccctcacgtggtcggctggggcaacgtgaactgcgctaggacatcctcgggggttttccgccccatccaaaggggatggcggatgggaggcactctcagcttcaccccgggttctggttgtgcctctgggagcctaggcacaacccggggaatggaggactacggcaggacctctctagggacactgcctcgccgctccccccaccctgttgccgtgatgttcccagggcctcattttgtaatccacaagtagctgccgccggtccccccaaagccaatgggggctcaggtgggacaggtggcgggggtgaggctgtgacacccagaggaattcctgtgagaggatggggaagggattcgctcttagttcctgggtgcacccctccccctctcccgtgcacagggaaatgatggcgggaacacagcaaaggagaccatgtcctggagagggtcccgggccccaccctccccgggggggcttgtgcaaggctggcggccngatctctgctgattccagtattgggggtgcagagaaggcacaggacagtttttgttgaagccgttgcagcctccacttggggaagctgaggccaggtaagatgctcgggtaggagaggggatccctttgggggtaggtgatgtagggcacaggagtggggctggggctggggggtggcagggttgcaggcaggagacagtctccagaggcccagcatagaaaagcgatggaggggtgaggggggacaggacgctggcgaattggggttcccagagtgagagacaggaacatttacaggtggacagagtaaaaggccctgaaaagggggtgggttggtgcatttgtggccttgggcccaagcaggcttctctgggtgagggctagcagcacctcccctcttctccagctcacccctttcacacacacacacgccccccattttgtcaccctgtcaagggaataaaccccagagaggaagaaattatgtctaggaggaaacggtgagcctggatggntttntaggggggaggctggcaggggcatggagccaggaaacagccttcgccccccagagcaccaggtaccctgagaaaagtgagaagagagattgcagcccaggtccctgcagaggaggatgggctcctttcccaggaaggactggctgagtggactgtctccagggcacaggacaacgttgagggcctgaggcctccaccttcttgaagaaggaccatgtgaatttcctgacagagaacggggatgggtttctgaaagcaccacccagctgagcctgccgaaactgcacagctgtttccaggccaggctggctgcatggaggacgtgagaggaacagccagctgtgtgtgctgggcccactgatcagggtgctcaggaccaggagccttctgaggatgtgcagaggggactctggggagaggaacatggtggccacagctggagtgaccgcagtgtacagagatgggatgggagcaggaaacccaaaagagccggccctggaaccaggtggaggggaggcagcccggccatgacccagagcaggacacctgctccacttcaccttttgccatgagtaaaagctccctgaggcctcccaagaagttgatgccctgtgcttcctgtacagctgcggaaccgtgagccaattaaacctcttatctttgtaaattaaaaaaaaac

SEQ ID NO: 705175 - DNA, 3390 bp, Homo sapiens
  misc_feature (2193)..(2193): n is a, c, g, or t
  misc_feature (2708)..(2708): n is a, c, g, or t
  misc_feature (2712)..(2712): n is a, c, g, or t
cggccaacatagcccctcaagcaaccaaaggtcccggcttcaaactaacacacgaaacgtaatcttgggagggaaaacgagagaccggcccctccggagctcaaccagcctccgccggccggcgtgagccgtacaaaatctacgtcacttggggtagaaaaacaaaaacaccgaaaagcccacgccggccgctctgaccggccgacacgctcacttgcggcccttgggcactttggggacgctgggcttggccgccttcttcaccttcttgcccccggcggccgccgtcttcttggccttgccgcctttgtccttcttggcgccagcgcccttcttgtgcgagcgctgctccggcttctggcccctggcgggcttcttgtccgcgcgccgggagccggccgcgcccggggctgccttcttcgctttgtgcgcggtgggggccggggcggtggcggccgccggggctccgcgccgctccccgccgccctccagcttcttgcggttgagcttgaaggaaccgttggcgccggtgcccttcacctgcagaagcgtgtcgttctgcaccagcgccttgatcgagtacttgaggtaggtgcgcccattctgctggtcgaaccacggaaccttcttggcctcggtgtagatcttggccagcgacgagccgttgcgctcgcccagcctacggatggtctccaccaccagctggctgtacttgcccggctggttcttcttcttgctattcttcctcttcttagatggggacaacgccgccgagccgccagccttggtcaccttcttggccattccctcggcggtcgtcactggcagggcctcctcgagctccacggacatggtagcaagaggattggtggcgggcggcgcgcggaagccggggggccgcgccgggaagaggaaggcgaggggccgagggggtgcaggggggctgggggcgcgcggcggctccaggcgggagcggccgcggccgggcctggggccgggcggcagggctggggtgggggccgggccgggccggagcgagggttggggggcccggagccggggccggactaggggaccgagttgggggtcagagaccgagtccgagccggcggctggagctggggacgtagacctaggccgagccggagcgaagagaaatcccgccgaacgcgagacaccgccgccgcagcttccactggcgcctctggaactcgctgggcgtgcgcgctgcgcgtctggcgggagggcgcttctctcggctttttatagcttcatggcggaccacgttgagaacaacaacagcctggtccggggccagcgccaacttgtgcttcttggagccccttctccggccgctggcttctcggaccgcgcctctccagcgccgccgcgcccgcagcggggcgccccggacagggcctgagctcccggcgcagtggagaggcgacttgcgtcctggaagggctcagcaaaggcgaacggagaggtgcaccctaggctgcgggagcgcgagaggaggggggcacctcgtttggaggccaatagcgcgggccccagaggaggccccacggccgggagcttggcggccggcagcccagagaacgccacgggcacccgagccttgtcccggcccggggggctccaggcctgcccgcaagaggagctttaatttgtccaaactaacacagggcgcgccctcacgtggtcggctggggcaacgtgaactgcgctaggacatcctcgggggttttccgccccatccaaaggggatggcggatgggaggcactctcagcttcaccccgggttctggttgtgcctctgggagcctaggcacaacccggggaatggaggactacggcaggacctctctagggacactgcctcgccgctccccccaccctgttgccgtgatgttcccagggcctcattttgtaatccacaagtagctgccgccggtccccccaaagccaatgggggctcaggtgggacaggtggcgggggtgaggctgtgacacccagaggaattcctgtgagaggatggggaagggattcgctcttagttcctgggtgcacccctccccctctcccgtgcacagggaaatgatggcgggaacacagcaaaggagaccatgtcctggagagggtcccgggccccaccctccccgggggggcttgtgcaaggctggcggccngatctctgctgattccagtattgggggtgcagagaaggcacaggacagtttttgttgaagccgttgcagcctccacttggggaagctgaggccaggtaagatgctcgggtaggagaggggatccctttgggggtaggtgatgtagggcacaggagtggggctggggctggggggtggcagggttgcaggcaggagacagtctccagaggcccagcatagaaaagcgatggaggggtgaggggggacaggacgctggcgaattggggttcccagagtgagagacaggaacatttacaggtggacagagtaaaaggccctgaaaagggggtgggttggtgcatttgtggccttgggcccaagcaggcttctctgggtgagggctagcagcacctcccctcttctccagctcacccctttcacacacacacacgccccccattttgtcaccctgtcaagggaataaaccccagagaggaagaaattatgtctaggaggaaacggtgagcctggatggntttntaggggggaggctggcaggggcatggagccaggaaacagccttcgccccccagagcaccaggtaccctgagaaaagtgagaagagagattgcagcccaggtccctgcagaggaggatgggctcctttcccaggaaggactggctgagtggactgtctccagggcacaggacaacgttgagggcctgaggcctccaccttcttgaagaaggaccatgtgaatttcctgacagagaacggggatgggtttctgaaagcaccacccagctgagcctgccgaaactgcacagctgtttccaggccaggctggctgcatggaggacgtgagaggaacagccagctgtgtgtgctgggcccactgatcagggtgctcaggaccaggagccttctgaggatgtgcagaggggactctggggagaggaacatggtggccacagctggagtgaccgcagtgtacagagatgggatgggagcaggaaacccaaaagagccggccctggaaccaggtggaggggaggcagcccggccatgacccagagcaggacacctgctccacttcaccttttgccatgagtaaaagctccctgaggcctcccaagaagttgatgccctgtgcttcctgtacagctgcggaaccgtgagccaattaaacctcttatctttgtaaattaaaaaaaaac

SEQ ID NO: 705176 - DNA, 109 bp, Homo sapiens
  misc_feature (101)..(101): n is a, c, g, or t
tatagtagatcgaattaaggtgatatgatcgggagattgcatgatgacatcgattgatccatatatagggccgggtataatacctcggtcgacgtttatgncattcgaa

SEQ ID NO: 705177 - DNA, 3391 bp, Homo sapiens
  misc_feature (30)..(30): n is a, c, g, or t
  misc_feature (2194)..(2194): n is a, c, g, or t
  misc_feature (2709)..(2709): n is a, c, g, or t
  misc_feature (2713)..(2713): n is a, c, g, or t
cgcacccccccttagtgtccccggagtttnttgtttttttttgaaaggtttaaacgctttattgtgcccaaaaaaaggcccatggaatgaagggaagagccgcgcagccctgagcccggagcgattgtttgtcgcgcacccaaaggcaaggagggtggggagctgggaaaggatgcgcggcctccgcgtccccgcgcgccggccgacacgctcacttgcggcccttgggcactttggggacgctgggcttggccgccttcttcaccttcttgcccccggcggccgccgtcttcttggccttgccgcctttgtccttcttggcgccagcgcccttcttgtgcgagcgctgctccggcttctggcccctggcgggcttcttgtccgcgcgccgggagccggccgcgcccggggctgccttcttcgctttgtgcgcggtgggggccggggcggtggcggccgccggggctccgcgccgctccccgccgccctccagcttcttgcggttgagcttgaaggaaccgttggcgccggtgcccttcacctgcagaagcgtgtcgttctgcaccagcgccttgatcgagtacttgaggtaggtgcgcccattctgctggtcgaaccacggaaccttcttggcctcggtgtagatcttggccagcgacgagccgttgcgctcgcccagcctacggatggtctccaccaccagctggctgtacttgcccggctggttcttcttcttgctattcttcctcttcttagatggggacaacgccgccgagccgccagccttggtcaccttcttggccattccctcggcggtcgtcactggcagggcctcctcgagctccacggacatggtagcaagaggattggtggcgggcggcgcgcggaagccggggggccgcgccgggaagaggaaggcgaggggccgagggggtgcaggggggctgggggcgcgcggcggctccaggcgggagcggccgcggccgggcctggggccgggcggcagggctggggtgggggccgggccgggccggagcgagggttggggggcccggagccggggccggactaggggaccgagttgggggtcagagaccgagtccgagccggcggctggagctggggacgtagacctaggccgagccggagcgaagagaaatcccgccgaacgcgagacaccgccgccgcagcttccactggcgcctctggaactcgctgggcgtgcgcgctgcgcgtctggcgggagggcgcttctctcggctttttatagcttcatggcggaccacgttgagaacaacaacagcctggtccggggccagcgccaacttgtgcttcttggagccccttctccggccgctggcttctcggaccgcgcctctccagcgccgccgcgcccgcagcggggcgccccggacagggcctgagctcccggcgcagtggagaggcgacttgcgtcctggaagggctcagcaaaggcgaacggagaggtgcaccctaggctgcgggagcgcgagaggaggggggcacctcgtttggaggccaatagcgcgggccccagaggaggccccacggccgggagcttggcggccggcagcccagagaacgccacgggcacccgagccttgtcccggcccggggggctccaggcctgcccgcaagaggagctttaatttgtccaaactaacacagggcgcgccctcacgtggtcggctggggcaacgtgaactgcgctaggacatcctcgggggttttccgccccatccaaaggggatggcggatgggaggcactctcagcttcaccccgggttctggttgtgcctctgggagcctaggcacaacccggggaatggaggactacggcaggacctctctagggacactgcctcgccgctccccccaccctgttgccgtgatgttcccagggcctcattttgtaatccacaagtagctgccgccggtccccccaaagccaatgggggctcaggtgggacaggtggcgggggtgaggctgtgacacccagaggaattcctgtgagaggatggggaagggattcgctcttagttcctgggtgcacccctccccctctcccgtgcacagggaaatgatggcgggaacacagcaaaggagaccatgtcctggagagggtcccgggccccaccctccccgggggggcttgtgcaaggctggcggccngatctctgctgattccagtattgggggtgcagagaaggcacaggacagtttttgttgaagccgttgcagcctccacttggggaagctgaggccaggtaagatgctcgggtaggagaggggatccctttgggggtaggtgatgtagggcacaggagtggggctggggctggggggtggcagggttgcaggcaggagacagtctccagaggcccagcatagaaaagcgatggaggggtgaggggggacaggacgctggcgaattggggttcccagagtgagagacaggaacatttacaggtggacagagtaaaaggccctgaaaagggggtgggttggtgcatttgtggccttgggcccaagcaggcttctctgggtgagggctagcagcacctcccctcttctccagctcacccctttcacacacacacacgccccccattttgtcaccctgtcaagggaataaaccccagagaggaagaaattatgtctaggaggaaacggtgagcctggatggntttntaggggggaggctggcaggggcatggagccaggaaacagccttcgccccccagagcaccaggtaccctgagaaaagtgagaagagagattgcagcccaggtccctgcagaggaggatgggctcctttcccaggaaggactggctgagtggactgtctccagggcacaggacaacgttgagggcctgaggcctccaccttcttgaagaaggaccatgtgaatttcctgacagagaacggggatgggtttctgaaagcaccacccagctgagcctgccgaaactgcacagctgtttccaggccaggctggctgcatggaggacgtgagaggaacagccagctgtgtgtgctgggcccactgatcagggtgctcaggaccaggagccttctgaggatgtgcagaggggactctggggagaggaacatggtggccacagctggagtgaccgcagtgtacagagatgggatgggagcaggaaacccaaaagagccggccctggaaccaggtggaggggaggcagcccggccatgacccagagcaggacacctgctccacttcaccttttgccatgagtaaaagctccctgaggcctcccaagaagttgatgccctgtgcttcctgtacagctgcggaaccgtgagccaattaaacctcttatctttgtaaattaaaaaaaaac

SEQ ID NO: 705178 - DNA, 440 bp, Homo sapiens
  misc_feature (195)..(195): n is a, c, g, or t
  misc_feature (225)..(225): n is a, c, g, or t
atgtgtctctgtgaacagctcaattccctaggaggccctgatcattttggcttagcctggcactggagtcctgtgatcgacagctcactagaattgcacagagtgccggaagaacagttcccacaaaagaatggatgctgggaaggacacagaaataagaaaagtctacatattctaattattggctgtctaacnaatacacttgcccttctttccatacacacnatttgaaaatatttatctgatataatgcaaataactactgcacagagaaagaaccctctcctcaattggttccaggcaccacattcagagaggaaggcttgaggcttccatttcctaggtatcatcaagtgatggccatgattcctgtatttctgtgctatgctttatggataaaatgatacattatagtgtaccaacacatcttatatgcaaaa

SEQ ID NO: 705179 - DNA, 449 bp, Homo sapiens
ctagtcaacatcaccaaaacacaatccaacttctgtagcaatgaacaagccccaagagtgttcaaactgaatcagtcaaggtattatcctctctccatcagtttggcttgtttaacctgcaaactgatatgcctttgggatttcccaaatggagaggaaccattcccactgtctagtacccataaaagacactcacctttccgtacatagacgtcaaatttcaaaggctgttcttcctaggcaatcaggaacatggttggggttggcagaagtgggcccaaatggggagagacgaaaatccacctctggccaaaatggtcaggtagctgcttagagggcttttgaaactctcccagctcatggcagctgagtcacaatcaatgcattcacagtcaggaaaccaaaatttgttaccaaaacaccagaagtttggtctcattgctcactgc

SEQ ID NO: 705180 - DNA, 546 bp, Homo sapiens
  misc_feature (30)..(30): n is a, c, g, or t
cgcacccccccttagtgtccccggagtttnttgtttttttttgaaaggtttaaacgctttattgtgcccaaaaaaaggcccatggaatgaagggaagagccgcgcagccctgagcccggagcgattgtttgtcgcgcacccaaaggcaaggagggtggggagctgggaaaggatgcgcggcctccgcgtccccgcgcggccagtaaccatgacgacggccgttgccaaggccgagagccaatagaggcgtcgccggggctgtttcaaaaacctaaagcaaacaacgaaaaacgctacatcgttgggggaggggaaagactgagaggacccggggcccctccctgaggctcagaccaggcctcgcggccccggccggcgtgagccgtacaaaatctacgtcacttggggtagaaaaacaaaaacaccgaaaagcccacgccggccgctctgaccggccgacacgctcacttgcggcccttgggcactttggggacgctgggcttggccgccttcttcacttcttcccttcttgcccccggcggccgc

SEQ ID NO: 705181 - DNA, 293 bp, Homo sapiens
  misc_feature (30)..(30): n is a, c, g, or t
cgcacccccccttagtgtccccggagtttnttgtttttttttgaaaggtttaaacgctttattgtgcccaaaaaaaggcccatggaatgaagggaagagccgcgcagccctgagcccggagcgattgtttgtcgcgcacccaaaggcaaggagggtggggagctgggaaaggatgcgcggcctccgcgtccccgcgcgccggccgacacgctcacttgcggcccttgggcactttggggacgctgggcttggccgccttcttcacttcttcccttcttgcccccggcggccgc

SEQ ID NO: 705182 - DNA, 115 bp, Homo sapiens
  misc_feature (73)..(73): n is a, c, g, or t
  misc_feature (106)..(106): n is a, c, g, or t
gattcctacaaggctggtggaaatcaaaaggacattaaggaatatgtcaaatggattgatgtactggattatntttgcactttttcaccacaagccaggaagaccntcacagaca

SEQ ID NO: 705183 - DNA, 412 bp, Homo sapiens
ccgtaatgcattagactgcttagggaagaaagagctaatttttaaaaatcaaggttattacatccatgtatcttcctgtgtatgcttttaaagtccttgtaacattgagttacagggctttaactcctgtgtctgaaaaatcacaaacactgatgacaatcaaagcctcatcttaaggccccgtagaagatgccaatcaaaataaactgcattcctgaggcactaggcaagaaattaaagctattcaactcctcaaggcccagggactattgcggaagaggtgggcgcgtaagattgtaagggccgattttgaaagatccagtaagttcagtttctctatgaactaatcattcaagtcaaaggcacactgatgcaaaatcagtatatggaccccggtgtctaaatgcaatca

SEQ ID NO: 705184 - DNA, 307 bp, Homo sapiens
cccgcgaaacagtatgactcacataagtctacatatcataggtgacaaattattctgctagtgcaactatggcaaagaaaaaaatcaagattatacagcgaactaagttaaactagatatgagttagagaatagacttacctcagaaaaaaacccactatattttgattatgggctttctgtctgtgaagaaccagaatcactgcagttaacccaatatgttcgactatcatggtgtattttttcaggcaggttgcctgcacaagccagttcattttctttatttgccatgtcctagctgtatcctg

SEQ ID NO: 705185 - DNA, 904 bp, Homo sapiens
gcggcagccagcggctggggcaaaccggctgctcctgctcttgctgatggcggtagcagcgcccagtcgagcccggggcagcggctggcgggccggagactggtgcgcagagggggtggggcggaacggtcgagagtggcgtaggcctgtggcactggtggggctgctgctggagccactcatttgagatcgatgacagtgccaacttccggaaatgcggggctcactgctctggagcaccagcattgatgtgtaccgttgtccctgtcacagcggctagctcatgcgaggaggagctggggccgactccgggatgtggcagccctgagtgggctgtaccgggtccggatcccaaggctgacccgggggccctggatgtggctggaagctggtgtctatgtctcctcctttgtccctgcgtgctccctggtggatgtcgcacctgtcgtgaccagctgaccctgcgacgtgtgagtgtggcggcatacgtggtgggcgtgtcggtggtgactgccaccctgggggctgccggggcactgaggtggcaggacgtggacctggagctgttcagcacctcggttgcagtgcggcgtccaccatggcctcgggcctgagacggtggctcatttgagctgccttggtgatgtaacaggcccctgaagggcaggaaccccccaggagcagaagtccttcttcgggaactactgtgtgtacattatttcccgtggtcatgtcctcatgagttcggagcgcgaggaacgtgggccagggttggcggtggatgagttggagttgtgaggagttattgcgtgtcagggcagtgtggcaggatcgtattcaaccaggggactatgggggtcctgtgtcaaatccagagagataggtcgcgattccgggagatggt

SEQ ID NO: 705186 - DNA, 840 bp, Homo sapiens
tgggacgtacgtacgggggaaacgtggtctccacgggcctcatgaagaacagctcccccctcacgctttggccccaccgttttcgccttcggggcccacacgagacgtttcgggggcgagacggcgagggtgaatagagtggaatcttttgttgacaactatgtctatttaccaacttcgcctaatgttgtttctggaacaggatacacagcttggggacatagtggggaccacagaggccattgtgctctctggtcccctcacaccgcgctttgctccgttctattctacttcaacagaagacagtttcattgagcaccttctgctgcccaggcagtatgcactaggcccaaccagcgtatagttgtgctgatgggggagtctcctacgcacagctcagtcagtgctcctcctgtgcccagtccttcaccggtgccttatggggggatctgtacggaaggtgggaccttcatgtggcggttctggggatctccaggaagcccgaccaagctgtccgccgttcccctgtgccaacccatcgtcctacgagccaccgctgcgatgatcaccatgctggctgggggcagctcccaggatatcctgccttccaactgatcttctgaagccccatcctcgctaacaatggcgacttccggaggtcaaggaccttagggctctcccacagggtctaacggttaaggggacccacataccagtgccaacgggggatgtcaagtggtgatagtcgattgtgctcccctccccacagagcgggtgggcggggggtgaatatggttggcctgcatcaggtggccataaccacgaagggccttctctgta

SEQ ID NO: 705187 - DNA, 1276 bp, Homo sapiens
  misc_feature (1276)..(1276): n is a, c, g, or t
gaggccctttgccaggagcacagcagcagctcgcctacctctgagcccaggccccctccctgccctcagacccccagtcctcccatccatcttcccatgggagtactcaatccatctcccagggccgtccattgcatccttcgattcacacgctgggaggtcccacgaattccaattgctgtaataaaggaggaagtgagtttccaggagcgtgccatggctgtcgtgcatgtaaagtgtattgtctagcatgaacaacgcctcgagaccatgcacccatgagaccaaggcatcggataccagaatgcgatggagctggcgctaaggatcccatcgtgatccaacatggagaccattagacactgacgctagccaattgacccatagccatcaccacatggacacaagacacacagaccatcagaaaggaggacccatacagaaactcgtccgaggaagaccccatcctacgactagccaaaggcaacatgatgggcaccccaacgcccacgaatcacacgcaacatggaatacatcacacatcaccaaaccaacaatcccacacgggaaccttgcaggaaagctgacgcactacccctcctgcgctggcaccaccacgggacccctacgcagccactgccacaccgctcactcaccatcaacagagagatacactcatcacagagagccaccacaccaaagaacagacatcacaacgaggcgaccaccaataggagacccaggccccacatcacaactgcgagaaacacatccccaggacccagaacaaacaacaacccacacacacagagggggacaaggcacactatggcacggcgaccaccacggagtccgcaacgcgagtggggtacgcgagggacccacaacgcacccggcacccacgcacccctggggacgccccagcagcgtagccctggcacacacagaagatccacacagccatgagcccactagacgaaagcgccgactaccccctcgacagcacaaggcaagcctacccatggacagaccacacacgaccaccagagcgaatccaccgctcaactccaccaatggccatgaccggaccaacaagcaggagagacacgttcactagcagcacaaacaacgacagtcacaaacagatagcaccatagcaacacacgaggcaaagcaacggcccacacacaagcaaccaaaacacaacacagcaaaaggacaccgacaacacgacaccacccacccacgccacaccaaagaccaaagcgccacgacn

SEQ ID NO: 705188 - DNA, 93 bp, Homo sapiens
tgaatgttctcattgagggtcatgtttctaacaaaattagttgttacccaaagcctgtttttcaactcccatttgcgtcatactttgccccca

SEQ ID NO: 705189 - DNA, 174 bp, Homo sapiens
ctattggatggtgctctcacgatggaatgacaggcgggatcaggcaggacacatggtcccaggcctccttctgtctctgctgttggctgctgcagagtgaagtggacaactgagaacccaccctgtctctaccacaggctcaatgtatccaataccccatggccatgcatggtc

SEQ ID NO: 705190 - DNA, 760 bp, Homo sapiens
ctatcatatagtaaaacccagcccgatgaccccgtaacaggggccctctcagccctcctaatgacctccggcctagccatgtgatttcagcttcgcactccatagaggctcctcatactaggcctactaagccaacagactaaccatataccagtgatggcgcgatgtaacacgagaaagcacataccaaggccacagacaccactggacaaaaaggcgttcgatacgggataagtcctattgtattgcctcagaagttttgtcttcgcaggattctcatgagcctttgagcactccagcctgagcgccgtagcacgttcaaattcaggaggggcactggcccaccaaataggcgatcaaccggctaaggtccactagagagtcccacttcatagacacatgcagtgatgactcgcatcaaggagtatcaagtcactgagctcagcatagtctaatagaaaagaagcagaaacgaaagtaatcaacgcaacagctttttaacagatgacaacgtggggtctcgtataaataaccttgactaaaggccttaagagaaaccttcagaagtcagccttcaacgattgccagagggacatctaacggggtcaacatctttgggtagacaaaggcttacaagggagttgcagcgtgattatggcttaaagtgtgcatcaatattgatacatacgacaatgagtagttcagttgacagtcaagacataatttggtttcgaaggcggcgcatgatatgcatagtact

SEQ ID NO: 705191 - DNA, 907 bp, Homo sapiens
tatagtgagtgggtacgtctgcgtacggagagtgtacgttgtggtgccagtaatagagaggtgaattatgtatgatgttaggtagagacaggcagatgatattattgaattggttgtgtaagctgacgaagaccagttcggtaagggagggaggcacagcgaatgagtgagagatatactatgcactgcgtctcgtcggacgaaagatcgggtcccgcgtgcatggtttttcttagacggccgtcagaacaagaaggaatcgatttgtcgggagaataggatagatggagttgatgtgtaggatcgaatcgaagtaatttcctgcatggaacatgatcttatgtctggtctgcataagaaggaaggaagagcagggctgactagctagtcttatctcaagcctagtaatgagtgatttattggtcggtgccctgctttatttcattaccagacatgtctgttgactgatttatgtgtgtcatccttccttaggatctattcatcaagactgcgttcgtgtcatgactgactgactgtatgtttggtcgggctgcttgataataagataggacttggtgtgttgttgaatgtgtacaggtcagtgaattgaatctagttactccctcccagtcagtgcattcctgatgaccctcccacagatatgattgaactgcgtcgtaggtacgccaccccaacagagaggtgcgccacacaactggagggggtggttttagactgatactgcaggggaggattataacgcgggggctctgcttttaccacccagcaccctctgttgcgtccttgctccccaagggggaaaaaaggcgtatggggacacccacacaacccgcagaagcgcccgacccggggggatgaaaccccacaaaaaggcgggacagggcga

SEQ ID NO: 705192 - DNA, 876 bp, Homo sapiens
  misc_feature (600)..(600): n is a, c, g, or t
tttgtataaaggggtaaaatcttacaatagaggggacccctttataatatgggagacgccgtgggacaaaaactgtgaacgggaagcacataagtaactgcccagcgaactttcatgtttgcccattggctgtaaaaaaatggggtgtgcgtgatcgcccgtttaatagtctttttgggggctttttcccacatgtgccgggagactcccctccggaaagtcggttgccggcgtaactttttgcggagttatatgcggccccggctaatttcccggaggtagcgggtcggcgccacacaaccggttcacgagataggtaatccatgggccacacgcgcgtgtggttgtaagcggacacctgggctgcccacagattcttctcttgtgggcgtggcaccccgcccccccgcccacacctgggggctagaacatacaccaggctccctttggcggtccttcgccccgggtaataaaagtatctgtgcggtgccacctaccctgtaacataaattagccacgcgggggcccttcctttattaaatacccgccttggcgtccaccagaatatggcgaggcctatgtctgacaagcgtgacaagntattcatcaggacaaaaatgcgatttatttcaggtgtaaacggagctctccgaggatagaaaattgcatttttcaaccaccttgctttggcgcgacgtcaaagattaacaacctgagatgggcagaagacattttcacaccagaggatgtttgggggcccgacgagggtgaaaaaatgcagtggggcttcacccctccctcgaagggggtggccccccgtgcggtaccccctataaacgaggggatcacaatatttggacaaacaggccacaaaca

SEQ ID NO: 705193 - DNA, 387 bp, Homo sapiens
agaatctctatatcctgggcctgacagtttcagaatgctaaggcgagcaggagttgaatccagtgtcaagaggattacagagttctcatacattgctggtgggaatgtaacatggtgccgctgttttggaaagcagtccagcagttactcaaaatgctaaacatagaattacacagtaactctgagtaacatcccacttcaaggattgaaagagaattgaaagcatatgtctacacaaaaacgtgtacatcaatgcccataggagcattattcataatagccaaaaagtggaaacaaacctaaatgcccatcgatggacaaatggataaacaaaatgtggtatatgcatatgatggaatattattcagccaaacattcaagccgtca

SEQ ID NO: 705194 - DNA, 523 bp, Homo sapiens
  misc_feature (205)..(206): n is a, c, g, or t
  misc_feature (218)..(221): n is a, c, g, or t
  misc_feature (224)..(224): n is a, c, g, or t
  misc_feature (229)..(229): n is a, c, g, or t
  misc_feature (237)..(237): n is a, c, g, or t
  misc_feature (263)..(263): n is a, c, g, or t
  misc_feature (265)..(265): n is a, c, g, or t
  misc_feature (286)..(286): n is a, c, g, or t
  misc_feature (304)..(304): n is a, c, g, or t
  misc_feature (306)..(306): n is a, c, g, or t
  misc_feature (314)..(314): n is a, c, g, or t
  misc_feature (398)..(401): n is a, c, g, or t
  misc_feature (403)..(404): n is a, c, g, or t
  misc_feature (409)..(409): n is a, c, g, or t
  misc_feature (413)..(414): n is a, c, g, or t
  misc_feature (416)..(416): n is a, c, g, or t
  misc_feature (419)..(421): n is a, c, g, or t
  misc_feature (453)..(453): n is a, c, g, or t
  misc_feature (455)..(455): n is a, c, g, or t
  misc_feature (457)..(457): n is a, c, g, or t
  misc_feature (469)..(469): n is a, c, g, or t
  misc_feature (489)..(489): n is a, c, g, or t
  misc_feature (498)..(498): n is a, c, g, or t
  misc_feature (507)..(507): n is a, c, g, or t
  misc_feature (510)..(510): n is a, c, g, or t
  misc_feature (512)..(512): n is a, c, g, or t
  misc_feature (515)..(515): n is a, c, g, or t
  misc_feature (523)..(523): n is a, c, g, or t
catgttcagttgtaagatgttaactaaatttctgtgaccaatatgctttttttttaatacccagaacattatagagttaatgcagagtcctaaggataatctgtagtcactaagtttttcttaagtcttcactttagatgctgttatttctagcacaattaagcaggcagagtctttcatatgctcaaacactggaatctttggnngctaccatatcnnnnggnttgcngacaagangccaaccattttaagaatgttttaantnaacaacttgcaaaccccaggnatggaaaaaccctaagantncccaattntcagcatttaacaaccatcacaactgtggctgaagactgttcatgccgttcttctgaaatgagatctcaaagcagtatagttcnnnncnnagggntttnngnggnnnttgggttttgcgcaatttctccaccaattttngngngtgaaccatttngttaactgtttccacttganaaagtgcgntagaaaacnggncnccntgtttcan

SEQ ID NO: 705195 - DNA, 792 bp, Homo sapiens
gtcggtctgtctgctcggcgacggtcaaatctgagctgcgttcactataaggatagagtgactcttcggtgttgccttcattccctatgttggacgagacagtaacgttgtcagactgtgtttccggagaagacggatggcgctctgggccaactcttggcgcgggagtgtctcgagacaatggagagttcctatgcatggctggtatagcacatgagggtccgacatgtcgtcagagttgcaggataatgagtgcccctagataggttaatagggtcggggtgtcaagattggagatacacatgagcggggatcacatgaaaggcacagacagggataactcacagtgattaatttcctgcaatttttgacactgcggagaccgacactttttaccctcactatacaagagctacacatattaaatagggatcatctattgatgacaatttccttttggtcttgctttacgcatactattgccaaacattttaggataatgtaagaataacgggatgtttttaaaactagagttggttttcgaggtcataggggaagtaccttctatggtgtctgtttccatggcaacgtgtcaatagcggagagtcaatctcattaggctaagtcctagagactatgtttgggggcgccccaaggtagataactatacggtgcacgtgagggacgatgggcttttgccatggtgcctttttctgtgcctacgtaggcgaaatcattgcaattgggtgaaacctcatgatgcaagtggtaccacagaaggttcgccttatg

SEQ ID NO: 705196 - DNA, 181 bp, Homo sapiens
tttggggaacatttccagcaacgagggagagggtgaagattctctacaaaaagattgaagatctgatcaagtacctgggctctaaagttggaggtcaggttacctgaggtttgcaatttgcaacacccaccctcccgcgaatcagtgttcttatttcagtgacaataaaccatagagatga

SEQ ID NO: 705197 - DNA, 251 bp, Homo sapiens
  misc_feature (30)..(30): n is a, c, g, or t
cgcacccccccttagtgtccccggagtttnttgtttttttttgaaaggtttaaacgctttattgtgcccaaaaaaaggcccatggaatgaagggaagagccgcgcagccctgagcccggagcgattgtttgtcgcgcacccaaaggcaaggagggtggggagctgggaaaggatgcgcggcctccgcgtccccgcgcgcctgggtaattgtcttttgggggaaagtgggccgctcgcgatctagaactagt

SEQ ID NO: 705198 - DNA, 191 bp, Homo sapiens
tgaatgggtgtagcctccaatggtacggcgtgtagctgacaggtatactttttaatggagtctttccttcactaggagttgaggttggtatgctgataccttcagcagttgtaggagatgaacgtggcttcagccagaacgtggtcccagctgggtgcagcattgtcgaggcatcctactacgagtcgacc

SEQ ID NO: 705199 - DNA, 950 bp, Homo sapiens
tttaacgcgtcgcggtacctaaccgtatcaaaggtatcataatcacttgtgccttaatgagggacctgtatgaatgtgctccacgaaggttcagactgtctcttacttttaaccagtgaaattgacctgcccgtgaagaggcgggcataacacagcaagacgagaatgaccctatggagctttaatcttattaagtgcaccacagtagcctaataaagccacaggatcctaaagctaccaatacctgctgttaaaaatgtcgggttggggcgacctcggagcagagacccaacctccgagcagatacatgctaagacttcaccagtcaaagcgaactagtatactcatattgatccaataacttgagcaagcggaatcaagttaccctatggataacagcgcaatccctattctagagtccatatcacacaatagggtttacgacctcgatgtatggatcaggacatcccaatggtgcaggcgctattaaaggttcgtttgttcaaccgattaaagtcctacgtgatctgagttgcagaccggagtactccaggtcggttactatctacttcaaatgcctccctgtacgaaaggacagagacataagggctacttcagaaagcgcttcgcccgtgaactgatatcatctcaacgttagtatatactcagagccaccccaaggagagggttttccccggaacacagaaccccttcgacacaccgaccgaggaaacaacgaggaaggcgggaaaaaaagacacatcaggcgagggacaaaccaaacagagcacaggacggataacaggaccctcagaaaagtacgagaaaacgaagacgcacatcaacaccgagcaaggaaacaaccgggaagggcaaaacacatcagaagaaggaaaaacacacaaagaccgaacaaaagaatggacgatcacggagagaattaaaaataa

SEQ ID NO: 705200 - DNA, 152 bp, Homo sapiens
tctgagtatccacgcaggttgtgggtgcagcggctgcgcggtcggcggcggaggcagcagtcttagaatgagtagcaagtatccacgcgaaccatctctgcctaagcgcgtctccgtcctcctccttcgctcctcttcctcattcttcgttc

SEQ ID NO: 705201 - DNA, 252 bp, Homo sapiens
  misc_feature (52)..(52): n is a, c, g, or t
  misc_feature (101)..(101): n is a, c, g, or t
  misc_feature (104)..(104): n is a, c, g, or t
  misc_feature (161)..(162): n is a, c, g, or t
  misc_feature (171)..(171): n is a, c, g, or t
accactacaatctctaggaacaacatatgacgcactctcccctgaactctanacaacatattttgtcaccaagaccctacttctaacctccctgttcttanganttcgaacagcatacccccgattccgctgcgaccaactcatacacctcctatgaaaanncttcctccngctcacggtatgattacgtcccattatatatctccaaacccataacaatctccagcggtccgtatcggttttggggggggg

SEQ ID NO: 705202 - DNA, 229 bp, Homo sapiens
tgaacaatacctatgtccagaatctgggcgagtgttaaagtatccgactttgttctcatcaaccttccctagtacaaattgaattacatcatcttacgtgaacacgtactgcacttgactgcaatctcattccttgattcgatgttcacccttccatacaaatcaccagtcagaaaaacgtcatgcaagttttttcacatacagccaagatgctggcttctcacctgtg

SEQ ID NO: 705203 - DNA, 1483 bp, Homo sapiens
  misc_feature (425)..(425): n is a, c, g, or t
  misc_feature (540)..(540): n is a, c, g, or t
  misc_feature (542)..(542): n is a, c, g, or t
  misc_feature (621)..(621): n is a, c, g, or t
  misc_feature (631)..(631): n is a, c, g, or t
  misc_feature (644)..(644): n is a, c, g, or t
  misc_feature (660)..(660): n is a, c, g, or t
  misc_feature (675)..(675): n is a, c, g, or t
  misc_feature (693)..(693): n is a, c, g, or t
  misc_feature (737)..(737): n is a, c, g, or t
  misc_feature (744)..(744): n is a, c, g, or t
  misc_feature (756)..(756): n is a, c, g, or t
  misc_feature (762)..(762): n is a, c, g, or t
  misc_feature (770)..(770): n is a, c, g, or t
  misc_feature (778)..(778): n is a, c, g, or t
  misc_feature (780)..(780): n is a, c, g, or t
  misc_feature (783)..(783): n is a, c, g, or t
  misc_feature (825)..(825): n is a, c, g, or t
  misc_feature (955)..(955): n is a, c, g, or t
  misc_feature (961)..(961): n is a, c, g, or t
  misc_feature (980)..(980): n is a, c, g, or t
  misc_feature (1049)..(1049): n is a, c, g, or t
  misc_feature (1172)..(1172): n is a, c, g, or t
  misc_feature (1175)..(1175): n is a, c, g, or t
  misc_feature (1212)..(1212): n is a, c, g, or t
  misc_feature (1225)..(1225): n is a, c, g, or t
gctcggagtctcatctgtcggcgtgagaccataggagagtgctggtattccgcgctacggcactattcagttatgctccaagcaggctagcgaaactgagtacacacagaggacatctataatcggattcacatgtgataagtgcatgactcagtcgctgtctctaaagtggacaccgcaacttgcttggcggaagagtgtgacgttgagaaagggtggtgatccaggaacagctgattttaagagtgataagccatggagagggcttcaccttgacaattattgtccagagtacagttgacgctcgtagcatagtgtggcagtgcgaaggacgacgtagtatctggtaacaggcacgtagagaaatgaacgcggaagggtcatacggtgggaacaataagaggagtgtcagtctgacgctgtgnctgtgagcgtgcagtgaaaccagaagtgaacgagagcagagatggctgtgactgctgggggcagtactgttggacagcaggtgctacgaaaccgcacttataggttgcatgaggnanggcgacaactaattgcgtaaatcatagaggcagtgtggacggtacacgtgagggaagggtgacaggtgtagagtgtcancggagctcanatgtgttgaaganggatattgcgatgtcngctgtcgggagcccncgagaagaggtgcgctcntaaggaaggatggcggagagatgggtgtaacctcccccggtcgntagtcgntgagatcacgantccacntaaagcangtgctcgnanctntttggtgaggctccccgtatcccgttagcagagaacagcctnccccgggagggcccaatatgtcgcactttgcagcgtgtcacccatctcaacggagcgaatctacaacagggggggttgggttacatcaatcctcggatataagcgagtatgcttgggtcgcggatcgcancctgcntaagttcgattatacactngtattaccaagggtttggaatttggtagagattgcgcagcccacagaatatgagaggtaggcgccaccnccctaatttatattaggtcgccgacaccttgttggagaggaaacatagtatggcccctcctataggtgggtggagatgcctcaaccagtatataaagacagcgtgtataatttactattgtgngcncgtgggacagcaggattgttgtttatcatggagaaancctctccgttgtnaccacttatgacagagggactgggttgttttgtataagccacctctcatccaatggcaagtgcttgcgttaacacgaactccatttggcttggacatttgggttccagcacaatcaacgtgggcggcggtagagaagactgcggtggctacatattataacacggagagaattttattgcacacgagtagtcatggcacaatatagtgatccgacagcagagtatagtatttaacttgcagtgcacgagcattagctc

SEQ ID NO: 705204 - DNA, 111 bp, Homo sapiens
  misc_feature (66)..(66): n is a, c, g, or t
  misc_feature (103)..(103): n is a, c, g, or t
acagcagaactggcaggtgtcactcactcagttgctggcttccacttcgggcttctttcacagggnctatcggtggtgctaatagagatatttctattctcanaaccacgg

SEQ ID NO: 705205 - DNA, 773 bp, Homo sapiens
acaattgtgacagtgcccgcaggtgctgcccccgggcctgaggagcacacggccaccattgaggtggctgccatggcagaggaccacgagcggaagtagccgacaggagggcgatggcccctgagaacggaacagggctgggctgtctcgtcagccgcggcagcagtgcagcgtggcagtaggccgccagtcctggctcggtctaggtgcggtccacgtgttctgcagaaccaaagagaggaatcgccaaaacaaatcacggagtaagagagaaggggacagaactagcgagagcaacctggaaaatcggtcttcaggtcccacgtttcctcccccttttctcttgggaaactatattttcccatctgtggccttataactacctgtttacaccatttgggccttgatcaggagccaggtgggcgcgcgggcatagggggagcctgggtgcaggcagagacagaggacagcatgagcccaggtgccggagcggcgacccctgcagggttgcttggaccgcggttgccagccaggtcacgagggcccccattgtctgcgccccagccaggttccctgggggacgtttactaacctctatgacttgggagctaaggcccatgttgtgaaccctcctggatcctatggactttgggtttccttcccaacaagttttcgtgtaggtctcacgtgtggctggcgccccgttcttcgtccgagtttgggacctttgccccggagcttggggtgccaattctggatggggtgcctgctcc

SEQ ID NO: 705206 - DNA, 231 bp, Homo sapiens
cctagtgaagtcagtatacatcgtaatgagggatagctgaagagctgtggagcgcgcgtccggcgataagggacgctggagcgtttaatttgggcgttgaggaaatcagcttgcggagaatcagcagtcgtttcccgagcgtcggtcgtgctgggagctgtggcgaaggccccggcggtaacgccgattcccgcctggaacaagcgaagggaagcggttgtcccggttccc

SEQ ID NO: 705207 - DNA, 325 bp, Homo sapiens
  misc_feature (222)..(222): n is a, c, g, or t
  misc_feature (226)..(226): n is a, c, g, or t
  misc_feature (262)..(262): n is a, c, g, or t
cctgaggtgggaggattgccttgagcccccccggaggttgaggcctgccagtgatccccatgatggtgtccacctgcacctcccagccccggatgacagagtgagacctttgtgtaaaaaaaaacaaaacaaaacaacaacaacctaagttatagatatgatgcccccggatattgtgtatttcctaaaaccaaggatattcttctgtgtaactttagtgtncttnccaaaatcagcaaatcacagtgataaaatactatgntctaatcagcagacctctttcagattttgccagttgttcacataatggcctttatagcaaaaa

SEQ ID NO: 705208 - DNA, 624 bp, Homo sapiens
ctgtcgggcggtgaaaaggcactgactgcggatgcgctggtgttgcgatgttccagctgaatccggccccgttctgcttgctcgacgaggtggatgccccgctggacgacgccaacaccgagcgctacgccaacatggtcaagcgcatgtctgacaagacccaattcgtttttatttctcacaacaagattgcgatggaaatggcgcaacagctcatcggtgtgaccatgcaggaacaaggtgtgtcccggatcgtggcggtggacatggatgccgcgctgaccatggcggaggcggcgtaaatgcaggacaacaacctggtgatgggcctgctgggcgcaggcgtggtgtttgtgctcgtgattgttgtctacaaccagtggcaaatccgcaaggcgcgccggcccgaggtatataacccggccgtcgacgagacgccccgcggcgaaggctggaccgagcgcgccgaatccgccctgggcggagagcgcgacgagacgggccgcgtcgaaccgcgtcttgagcccggtttctcggcgaagacgcacacgcccgccacgggcagcgccgaaccgaagccggcgtgatcggagcgaacttacgccgtcgggcgacgatgctgcg

SEQ ID NO: 705209 - DNA, 187 bp, Homo sapiens
tactttccacagggagagtctttgaggaaagagccaagcagagaagaccgctgcgtggagtgtgacacctacatgtgcatttctcacagccctagcgtgaccctgctgtcaggctatataccaggtaattttaacgatactgtctcctggccctcgctcgttctaccttgccttgggttcaggaact

SEQ ID NO: 705210 - DNA, 908 bp, Homo sapiens
  misc_feature (127)..(127): n is a, c, g, or t
  misc_feature (155)..(155): n is a, c, g, or t
  misc_feature (459)..(459): n is a, c, g, or t
  misc_feature (621)..(622): n is a, c, g, or t
  misc_feature (625)..(625): n is a, c, g, or t
  misc_feature (636)..(637): n is a, c, g, or t
  misc_feature (640)..(640): n is a, c, g, or t
  misc_feature (650)..(650): n is a, c, g, or t
ggcgcggcgtggagcggcagccggtctggacgcgcggccggggctgggggctgggagcgcggcgcgcaagatctccccgcgcgagagcggcccttgccaccgggcgaggcctgcgccgcgatggcangagatgggcagtaacaggggtgacggcngggaaagatcgccagcaacgtgcagaagaagctcacccgcgcgcaggagaaggttctccagaagctggggaaggcagatgagaccaatggatgagcagtttgacgcagtgcgtccagaatttcaacaagcagctgacggagggcacccggctgcagaaggatctccggacctacctggcctccgtcaaagccatgcacgaggcttccaagaagctgaatgagtgtctgcaggaggtgtatgagcccgattggcccggcagggatgaggatctccggactacctggctccgtcaaagccatgcangaggcttccaagaagctgaatgagtgtctgcaggaggtgtatgagcccgattggcccggcagggatgaggcaaacaagatcgcagagaacaacgacctgctgtggatggattaccaccagaagctggtggaccaggcgctgctgaccatggacacgtacctnnggnccagttccccnnacntcaagtcacngcattggcaagcgggggcgcaagcttggtggactacgacagttggcccggcaccactaacgagtcctttaaaacggccaaaaagaagggtgaagccaaaattgccaaggcgaggaggaggtcatcaaggcccgaaaggtgttcgaggaggatcatgtgcgtcccggaagcgacttcgcgccctgtgtacacacgggaagtttacggaacaggtcaagcattcgggcggggaaattccaggggataggtccgaactctg

SEQ ID NO: 705211 - DNA, 393 bp, Homo sapiens
tctgagatgacagtcggctgttatgcgttccacctctgattccagaggcagagatgttcagctggctgggcacacacagccactgttgtccatttcagtatgccagccgggctactacatggctgccctaatctgggcctttctctcaggggaagtaagaggcaggcagaagatacgaaagtgatctcaaggtggctcaatgacctagagctggcccccttgttccactactgttctaaactgtaggggctcctaagtggctaattcacttccaggagtacctggcagaatatgctccagtcctcacacgtaaggagcaggcaggcaggctctgtgggggagcttggagccaccatactccctgtagtagcaagagctacaacacacctcgtt

SEQ ID NO: 705212 - DNA, 802 bp, Homo sapiens
  misc_feature (127)..(127): n is a, c, g, or t
  misc_feature (155)..(155): n is a, c, g, or t
  misc_feature (353)..(353): n is a, c, g, or t
  misc_feature (515)..(516): n is a, c, g, or t
  misc_feature (519)..(519): n is a, c, g, or t
  misc_feature (530)..(531): n is a, c, g, or t
  misc_feature (534)..(534): n is a, c, g, or t
  misc_feature (544)..(544): n is a, c, g, or t
ggcgcggcgtggagcggcagccggtctggacgcgcggccggggctgggggctgggagcgcggcgcgcaagatctccccgcgcgagagcggcccttgccaccgggcgaggcctgcgccgcgatggcangagatgggcagtaacaggggtgacggcngggaaagatcgccagcaacgtgcagaagaagctcacccgcgcgcaggagaaggttctccagaagctggggaaggcagatgagaccaatggatgagcagtttgacgcagtgcgtccagaatttcaacaagcagctgacggagggcacccggctgcagaaggatctccggacctacctggcctccgtcaaagccatgcangaggcttccaagaagctgaatgagtgtctgcaggaggtgtatgagcccgattggcccggcagggatgaggcaaacaagatcgcagagaacaacgacctgctgtggatggattaccaccagaagctggtggaccaggcgctgctgaccatggacacgtacctnnggnccagttccccnnacntcaagtcacngcattggcaagcgggggcgcaagcttggtggactacgacagttggcccggcaccactaacgagtcctttaaaacggccaaaaagaagggtgaagccaaaattgccaaggcgaggaggaggtcatcaaggcccgaaaggtgttcgaggaggatcatgtgcgtcccggaagcgacttcgcgccctgtgtacacacgggaagtttacggaacaggtcaagcattcgggcggggaaattccaggggataggtccgaactctg

SEQ ID NO: 705213 - DNA, 148 bp, Homo sapiens
tggtggcctccttcacagtcatgctgcttttttgaaaggtgaatttcaacacatttagtgcctctttcattcctcagtatatattccaagaagcttgtgatgacaatctactagagatggtaattagatggaccttgtccaccctgta

SEQ ID NO: 705214 - DNA, 1161 bp, Homo sapiens
  misc_feature (712)..(712): n is a, c, g, or t
  misc_feature (874)..(875): n is a, c, g, or t
  misc_feature (878)..(878): n is a, c, g, or t
  misc_feature (889)..(890): n is a, c, g, or t
  misc_feature (893)..(893): n is a, c, g, or t
  misc_feature (903)..(903): n is a, c, g, or t
gagcagagcttgtccttgtcattgtgatccttcttttaaaaaggcaggaactgaggtgcagagtgattaagggcctggcccccaggggttgtccagctccataaggtggagctgggcaagattgtgggtttgcttgctccctgaagctggcattctttcatacgatactctttctcaagacagcggggctccctgggatctccaggtgtactgcacttgcttctccggggctggacttgagggtaagtgcagtacacctgctctgctggtgcggcgggcgcgccgagccctgtggatcggaaggctacacgccgggcctgatagcgcagccggtgccgaacgcgccttggcgaccggcgcacttgtgccgcaccagtgcgcgtccgtgaaaggcgcggcgagcgcctgcgagatatccgctccagagctgaacaagaagctcacccgcgcgcaggagaaggttctccagaagctggggaaggcagatgagaccaatggatgagcagtttgacgcagtgcgtccagaatttcaacaagcagctgacggagggcacccggctgcagaaggatctccggacctacctggcctccgtcaaagccatgcacgaggcttccaagaagctgaatgagtgtctgcaggaggtgtatgagcccgattggcccggcagggatgaggatctccggactacctggctccgtcaaagccatgcangaggcttccaagaagctgaatgagtgtctgcaggaggtgtatgagcccgattggcccggcagggatgaggcaaacaagatcgcagagaacaacgacctgctgtggatggattaccaccagaagctggtggaccaggcgctgctgaccatggacacgtacctnnggnccagttccccnnacntcaagtcacngcattggcaagcgggggcgcaagcttggtggactacgacagttggcccggcaccactaacgagtcctttaaaacggccaaaaagaagggtgaagccaaaattgccaaggcgaggaggaggtcatcaaggcccgaaaggtgttcgaggaggatcatgtgcgtcccggaagcgacttcgcgccctgtgtacacacgggaagtttacggaacaggtcaagcattcgggcggggaaattccaggggataggtccgaactctg

SEQ ID NO: 705215 - DNA, 241 bp, Homo sapiens
acttcagataattcagctaggcgactaataatacataatcctagtctcggaaggttaccacctcgtcctttataacactgggcttgcatcttagactcacatctgaccgatctggtcgtatatgagagctcactaatatgctggttaggcttgaacaggatgtaaagaaatcgcctatcttctattgcctcatagctgggttacctgatgctcgaattcctcatcattgctccttgctgtt

SEQ ID NO: 705216 - DNA, 346 bp, Homo sapiens
ctcaaaagaaggaggtggtctcgtacttggtcccgcaacattgctttgctgatgttttttcaggacggatgagttggctcccttaataaccagagaagggccaggtgcagcggttcacgcctgtaatcccagcaatttgggaggctgaggccggcggatcaccggaggtcaggagtttgagaccagcctggccaacatggtgaaaccccgtctctactaataatacaaaattagcccagcattgtggcaggtgcctgtaatcccagctactcgggaggctgaggcaggagaatcacttgaacccaggaggcggaggttgcactgagctgggatcacgccattgcac

SEQ ID NO: 705217 - DNA, 779 bp, Homo sapiens
  misc_feature (376)..(376): n is a, c, g, or t
  misc_feature (385)..(385): n is a, c, g, or t
  misc_feature (388)..(388): n is a, c, g, or t
  misc_feature (393)..(393): n is a, c, g, or t
  misc_feature (429)..(429): n is a, c, g, or t
  misc_feature (431)..(431): n is a, c, g, or t
  misc_feature (437)..(437): n is a, c, g, or t
  misc_feature (465)..(465): n is a, c, g, or t
  misc_feature (467)..(467): n is a, c, g, or t
  misc_feature (507)..(507): n is a, c, g, or t
  misc_feature (526)..(528): n is a, c, g, or t
  misc_feature (573)..(573): n is a, c, g, or t
  misc_feature (592)..(592): n is a, c, g, or t
  misc_feature (611)..(611): n is a, c, g, or t
  misc_feature (613)..(613): n is a, c, g, or t
  misc_feature (617)..(617): n is a, c, g, or t
  misc_feature (619)..(619): n is a, c, g, or t
  misc_feature (648)..(648): n is a, c, g, or t
  misc_feature (651)..(651): n is a, c, g, or t
  misc_feature (672)..(674): n is a, c, g, or t
  misc_feature (679)..(679): n is a, c, g, or t
  misc_feature (681)..(681): n is a, c, g, or t
  misc_feature (686)..(686): n is a, c, g, or t
  misc_feature (693)..(693): n is a, c, g, or t
  misc_feature (714)..(715): n is a, c, g, or t
  misc_feature (723)..(723): n is a, c, g, or t
  misc_feature (728)..(728): n is a, c, g, or t
  misc_feature (730)..(730): n is a, c, g, or t
  misc_feature (732)..(732): n is a, c, g, or t
  misc_feature (738)..(738): n is a, c, g, or t
  misc_feature (749)..(749): n is a, c, g, or t
  misc_feature (752)..(753): n is a, c, g, or t
  misc_feature (763)..(763): n is a, c, g, or t
  misc_feature (766)..(766): n is a, c, g, or t
agcgggatacacttttggccccaacggtttctggtaagaaattatgaacctccgccaggcgcggtggctcacacctgtaatcccagcactttgggaggccgaggcaggcggatcacgaggtcaggagatcgagatcatcctggctaacacggtgaaaccccgtctctactaaaaatacaaaaaaaaattagccgggcgtagtggcgggcgcctgtagtcccagctactcaggaggctgaggcaggagaatggcatgaacctgggaggcggagcttgcagcgaaccaagatctcaccaccgcactccagcctgggcgacagagggagactccgtcaaaaaaaaaaaaaaatttttgaacctctaacacttttatgangggaccaangcngaatncctctagtccctcgaatatccatttctctgggaaanangttacncccaaaccaaaaacaaaatcagtactgnangggcaagatgggataactccctagaaaacgttgagtccanctttggaggccgatgaaannntgggtctgggacacctgggcagcaggcttctttagcagtatctcncatgggggctgctgaaatncatcagaggcttatggaanangaanangaaaaccagccaggagacccccaaagaanaantctcctcagagtggggtgccnnntaaanangtcanaaaggangccacccaaagaaaaaccggnnagaccaanaaacncnanggtaantccccacctanggnnagaagcaaanccngtcatagttacca

SEQ ID NO: 705218 - DNA, 338 bp, Homo sapiens
taaaatagaaagttatcaggccgtgtggtgttcactgtatccagcttacttgggaggctgagtgcatgagaatcacttgaacccgggaggttgaggttgcagtgaactgagatcccgccactgccttccagcctgggtgacagagcgagactccatctcaaaaaaaaataaaagaagacaggagaattcgccaggcagggtgactcaggcgtgcaaccccagtctcaagtactttggggaggccacttgtgggcggatctcactgaggtcaggagtccgaaaccattctgggccaccttggtgaaacccggtctctacaactgtgttccgtcaaggtg

SEQ ID NO: 705219 - DNA, 163 bp, Homo sapiens
tttgttattccgacaactcctaagtgtgtcataaagctgataaaaaggatttgaaatcagtccagtaaatggaagtgatgctttcatgcttactgatatctccctcttcatagcgtgcagcagcatagagcaggatcttcttcaatttctgtgcccatttcaa

SEQ ID NO: 705220 - DNA, 84 bp, Homo sapiens
attaggtgccacttaaatttattttattacaccatgaatagctgattaaaagaaccaaatatttctagatgaaaaaaaaacaaa

SEQ ID NO: 705221 - DNA, 861 bp, Homo sapiens
gaaagtcttatactagcattacgcatctcacttctaggaatactagtatatcgctcacacctcatatcctgccctactatgccgtagaacggcaataatgactcatcgtctgtgtcacttagtaaggtactctcataacctctcaagacccagtcctctctgtagccaatatagtgcctatgccatacgtagtctgggccagactgcgaagcatgcggctgggccttagcccttactagtctcgatctccaacagatatggccttagactacgtagataaccgtaaacctagtccaatgctaaacctaatcgtcccaacaattatattagtaccagtgacatgactttccaagaagacagcataattggaatcaacatcaagcagccacagcctaattagttagcatcatccctcgtactattttttaaccaaatcaacaacaacctgatttagctgttcgcccaagactattggcctccgaacccctaacaaccccgcctccgtaatgactgaactaccgtgactcctatcgcctgcgaccatcggatggcaagcgaacgccagttaatccaagtgaaccactaatcacgagaaatggactctaaagcatctctatagcttaatctccgctagaaatctcctatactcataagattcacagccaggagaatgtaatcatatggactatcattcttgcgaagaccagcactttatccagcaactttgggtagtcattcaacgctaatgaggcaagacaagtgaagaaacagcctgaaacgcaggcacatactatcctattctagaccctaagtaggctccctatgcctaatctcgaacaattgtacaatcaaacaccatag

SEQ ID NO: 705222 - DNA, 444 bp, Homo sapiens
ttagaacactttttgttatcagtcaatatttttagatagttagaacctggtcgtaacagaatgaattctgttataaggaagacaaaacaattcagtctgttttttaatgcagtttaggaatagtgtatacctcctatacttaagattgtcatttatctttcccaactttaaatactcttttagtttctatagggaaggaagagttattacaggttttttttttttaattattcttcaactttagatactgccagtgggatttacaaatcgaccaggttttgaagctactgtgtgtgtgaatgcacactagcagccaggcactgaggctcgctcctataatcccagcagttttgagggtagatgggaagatcacttgatctcaggattttgagaaccatccggacaacatagggagacctcatcgctattttaaataattttaaa

SEQ ID NO: 705223 - DNA, 448 bp, Homo sapiens
acagtgaactccacctaaaatgatgtggctttgatgcatgagcagcatctggacactccagcagggcgctagagctgtggatacgccactccggtaaactcaccgagtagtacacacagagccaggaccaattcccactttgatgatataagccccagaaaggatgagctcttctaccatatctcctgtaaacacattaactgccatgatggggggaagagcaaagcgcttccgtacatcttaaacaaattcaacacagtgttcagagtacccatttgccacatccaggcatatatactcacaccaggggaataacttccaggatactgtccagctgctcaaagtcagaagagcctgtgcctgagctggcagccagatactcaagacagtcaggattctaggcagcaaactcttgcccttaaacgaggcaatagtgcttatggacagc

SEQ ID NO: 705224 - DNA, 358 bp, Homo sapiens
gcggtcaccggagggtgaccaggagctcccccaggctcctagccagactacagcgccgcctgggcgaggggtacagacagcaggccgcttactacgcacagaccccaggtcctggcggcccccagccgccgcccacgcagcagggacagcagcaggcaagtgggaattgccaccctcctccttctttctccttacaacccccggacaccgtacatcctgccttagtgggtagcgccggaaacctcttcccctgcggggtgcgcccttgacgcctgcagcgggcgccgtgtggccggaggtctccgggagtccccacgcaccgccagagaagcattcgctgtgtccagaggttaaacga

SEQ ID NO: 705225 - DNA, 821 bp, Homo sapiens
  misc_feature (67)..(69): n is a, c, g, or t
  misc_feature (101)..(101): n is a, c, g, or t
  misc_feature (179)..(179): n is a, c, g, or t
  misc_feature (192)..(192): n is a, c, g, or t
  misc_feature (198)..(200): n is a, c, g, or t
  misc_feature (205)..(205): n is a, c, g, or t
  misc_feature (234)..(234): n is a, c, g, or t
  misc_feature (240)..(240): n is a, c, g, or t
  misc_feature (252)..(252): n is a, c, g, or t
  misc_feature (254)..(254): n is a, c, g, or t
  misc_feature (259)..(259): n is a, c, g, or t
  misc_feature (326)..(326): n is a, c, g, or t
  misc_feature (330)..(330): n is a, c, g, or t
  misc_feature (347)..(347): n is a, c, g, or t
  misc_feature (352)..(352): n is a, c, g, or t
  misc_feature (356)..(356): n is a, c, g, or t
  misc_feature (358)..(358): n is a, c, g, or t
  misc_feature (364)..(365): n is a, c, g, or t
  misc_feature (377)..(377): n is a, c, g, or t
  misc_feature (379)..(379): n is a, c, g, or t
  misc_feature (389)..(389): n is a, c, g, or t
  misc_feature (422)..(422): n is a, c, g, or t
  misc_feature (439)..(439): n is a, c, g, or t
  misc_feature (444)..(445): n is a, c, g, or t
  misc_feature (451)..(451): n is a, c, g, or t
  misc_feature (462)..(462): n is a, c, g, or t
  misc_feature (546)..(546): n is a, c, g, or t
  misc_feature (616)..(617): n is a, c, g, or t
  misc_feature (627)..(628): n is a, c, g, or t
  misc_feature (636)..(637): n is a, c, g, or t
  misc_feature (651)..(653): n is a, c, g, or t
  misc_feature (659)..(660): n is a, c, g, or t
  misc_feature (684)..(684): n is a, c, g, or t
  misc_feature (699)..(700): n is a, c, g, or t
  misc_feature (710)..(710): n is a, c, g, or t
  misc_feature (716)..(716): n is a, c, g, or t
  misc_feature (735)..(735): n is a, c, g, or t
  misc_feature (757)..(757): n is a, c, g, or t
  misc_feature (809)..(809): n is a, c, g, or t
gcccctggcttttccccggcccgctcttcgtacctccctttctcagacactctctgttattgtcctnnntgtacagtatatatatgtatatatattctatnaatctttcttatatttaagcaaagacctaaaatcaaccatttgacttgcctcgacagaggcgcctttctagcgtatcngggagggggcacnctggannnaaggngggagacgcagagctagcgcacttgcggncaagtncagactcagaanangtgcnggctggcacctgcggcaggtaccaccctgaggcacgtggtggccgcctctcctgctcccgctgtgtntccnccgcccaatctggcttntcctngcantncttganncccacacgctgncnggggcctctnggggcccctcccctcgacccccagcctgggtanagccaccaggtacgacnaccanntaccanaaaccaccacncacacggcggcagaaagccagcgtccatcccccaccccccccctcctgcctgttcctggctcccaacccccgcccctccccacngcccccactctcctatcggcccacttcatttatacatagtatctcattttcacagtatgttgtcacaaanngaagagaaannctaaccannggggggggttaggnnncttttnnggtatcttgttttgttttattttnttttaattttaaatnnattttgtaanaagtanattgttccctctttccttntttttaacagctttttcagacncagtattttaatcctcttgttttgggaaaaatgaattctttgtaactggtanatttttttttgc

SEQ ID NO: 705226 - DNA, 122 bp, Homo sapiens
ggtaaaacccagcccatgacccctaacaggggccctctcagccctctaatgacctcggccctagccatgtgatttcaaattccaaatccataacggtccttaatacatagggccatacatta

SEQ ID NO: 705227 - DNA, 1251 bp, Homo sapiens
  misc_feature (1251)..(1251): n is a, c, g, or t
tagttctagatcgcgagcattccccctcaaacctaaaaaaaaaaaaaaaaaaaaaaaaaaaaaaaaaaaaaaaaaaaaaaaaaaaaaaaaaaaaaaaaggggggggcgcggctttaaatatattcttctcctggagaaggggccatagaatattagcgttgtatcaccacagggttgttgtggtaaaaagtggggtcacgtcaatatatagggcgacgcgattatattataagacgaatggaagagagggagcaagagttaatacaaaacacggtgtagagtgggaaaacaagaagagaaaagaaggagatactttctgtgtgaaaagagagagagaccctcattattcttctggtgggggggggggagacaaaatatattgtggtgaagaaacaagatagtacactcaacgaaagaaatatatatataaaggaactatactgcaaaggaaataaattatgaaacattatttaaagaagtggtatatatagcggtgggtaaccaacacaaacggaaataatattgttgataggatgagtgataaaaaaaaaattgtgggtaataaagaggggagagaaataatagatagagagaaacaatttatattaccacaaacggagacgtcaccttattattacatactccgggaaaacaagaaaacaaagagaaagaagagaaacgagagagcagcagataagacaaccaaaacaacaacgagcagaagaaaaggagaagaaggaaaggagacaaaaaagaaaaaagagagaaacggaggagaagaaagggaaaagaaagagaaaagaaggggaagagaaagaggaaagagggaaggaaaagaagaaaagagaagaaagaaggaggaaaagagaagagaaagagaaaaagaaaaggcagcagaaaagagagagaaaacaggagggaagaaagagaaagaggcgactaggagaaagcaccgagagaagagacgaagagaagaacaagggaaagcggagaagaggaacagaaagagagagagggaaaagagaaaggacagagggaagaaagaagagtaaaagaagagatgagaggagaaaacagagagataaagagaagaacagaaagaacaaagaaaaaaagggaggacggagaaggaacgacaaaaaagcccaaaagcaacaaacagcagcacgaaaagaaggcgagagaagaagagacaagagcagagaaaaaaacaacaaatgaagacaaacacgaaacagaacagaaaagagn

SEQ ID NO: 705228 - DNA, 238 bp, Homo sapiens
atcagagaccgtatgcatgcatgtgtggttgaagcagtgtgtataagaatgttatagcaccactatttgtactagctcaaaatagttgtgtggggagattcatcaaagtatagtagtaaattattataccattcacacgtggactactgtacttgtatgaaaaattgaacaaactcaatttacacaaatatggatgaacccttaaaaaccttgactggttgacaccaaaaaccaacac

SEQ ID NO: 705229 - DNA, 130 bp, Homo sapiens
gggcttacttagaggaccccgtatgtaaatgatgatatatcctacctcatagggttgttgtgaggatttaaattagatattgtacgaaaagtgcctagcatagtgcctggcacacagtagagtaggtgct

SEQ ID NO: 705230 - DNA, 1103 bp, Homo sapiens
cgccgcagccgccgccgctgggcagaggagccggagactgcgagcgggtcgaggtggcggcggaggctggagcgggagcgggtaccgggcgcgggcagagcgcggcggctgcggtagactggggttttgccatgttgacctggctggtctcgaactcctgagacgcaagtgatccgcctgcctcagcctcccaaggtgctgggattacaggcacgagccactgtgcctggcctcaactgttgcttcttataaaggtgtgttccagagaacaagccttcagacatttgctatattgacgctgagctgtcaggggcactcagcgcttactgagcgcaggctacttgctctacaccaaaacagcgctctagctgacgcacgacacagcacacagcagcgcggaccagcgactcggcaacacacacgcaagctaccactcctactcgcaacaacccatgcagatctattcgatctctttgctaactgatgatcgccatgttcatggtgaacaccattcaacaatctatccatctccggaggaaccttgaagctgttcagaatatggtatctactgtccgaatgtgctcttacacccatgtctcagcattgcttggcactgaacacacctccacacggacaaacaccagcagcggtgagacagaacgtgacacacaccgatgaccgcccggacgaaccctacttcccaggcatccaacgtggtcgcgacctcgtgtgcgtgtcatcgcggactcggcctgcgcttgccccccggctcgctcgctccccgatgtctttgcgcctcgcaactggctctcctgctgcgcccgaccacccgcgcccgctcccctgtccactaacgcccccggaatctccgcccgtctcgagtccgcacgcccccacacgaaacctctcggctgccccacctggcagccgcggctcgatccactcgcggaatgatgcgcccggttccactaacgggtcctccccccccgcccccacccgcgcccttccccacccccacgccggctcagcagcagccccctggacgagccccagcgcctcgcccccacctcgccggtgcacacccgtaacctgtctcgcactgc

SEQ ID NO: 705231 - DNA, 290 bp, Homo sapiens
cataatagatcccgtcacaagatgtggtctctggcccgatcccattttctagcaggtaacaagtttcctcgtccatccatgtgtcacaactggacttgtaccttcctgttcatccgctgttctctcattaaaatccacccccaacttaaagctgatctctgtgttcttgaaggtgctgtgtgtttttagggtgagaatgtccccattcttttcgatgattgtggtaggcttggtcatgctggccacctgcctggtagcaaaacccacaccgagtgcccggtacatgcaag

SEQ ID NO: 705232 - DNA, 168 bp, Homo sapiens
gaactctccacagggcggcagcctgggctgctgccaatctggtctctgcgtggagctacagggcagtgaggagaagtgcttagcaagaggtctggagcgaggggaagtcaggtccctcaggaacccctcctcccccatattatggaggaagagggctggagagtctgc

SEQ ID NO: 705233 - DNA, 306 bp, Homo sapiens
  misc_feature (160)..(160): n is a, c, g, or t
tttctaaacatacatagaaatcagaccgctacctctgcagaacattttactggtaaaaagaacagcccacatgagggaaaactgatttggtggaaagacaacaaaaacaaaacatgggaaatagggaaggtgataacatggggaagaggttttgcttgtntttcaccaggagaaaatcagcttcctgtttggatacccactagacatttgaagttctacaatgaacccatcagagatgcaaatgaaaatgcctccgcagagacagaaaacccgcaatcgagcatcatcgacttcgcagggtgaaca

SEQ ID NO: 705234 - DNA, 354 bp, Homo sapiens
  misc_feature (56)..(56): n is a, c, g, or t
  misc_feature (350)..(350): n is a, c, g, or t
agaagagcactaacaatcactgtggtctgggtctcaggaagtctcattcctagggnaagggggagagcatcacatcaagggaacatcccatgggaaaaagaatctgaatggcaggccttgagtcccagatctttccactagtgggacgtttcttatagcagagacacaattgcagtgctgggtgcagtaaagaaagtctacacctctaccccaacaatcaggcagcatctctgatcataaaggggcttggaaagggggtccttttcccactggtacaccacttgcacacacagctgggggctttttcccagagggaattgcagtgttaggatgcacattttaggtgggcnttcc

SEQ ID NO: 705235 - DNA, 292 bp, Homo sapiens
cggacgcgtggaaacgtacagactgaagtccctgggcttgcttttcccatgggtgaggaccagaaccagactctgagcatccttacccctggccaaccgattgttcagtttgagtaccgtccagagatctggggtcttctttgaggcttgctttgttctgatgccttcagaaaggatcacatgaagtataaaggacaggcccttggtcacaagttttggctctcatacagataggactcatccaggttcccagcgaggcactgactaagcgaggctcagagcttccatatca

SEQ ID NO: 705236 - DNA, 989 bp, Homo sapiens
ggggagtcgtgatcggttagtgctgaagcccggcatgtactggcagttggaaagggacagggctgctgtagagcacaaatgtgcctgcattagatcttaatccacatacacatagtgcgagtataggtcgtagaacccaggaacacatgggagaaggagtacaagaactgtgttgccgagtggagatgattatatggtgagatcgtatcctgattgaacggaatcgtcgttgtgagggcatggtattatggaatcatcgactgggtaaactccgtcgttgtagaatgtgatacagcatggtagttaaatgtccagtaaatggaggtaatagagtgtaagagccgaaagattcgtgtatagttgaactggaatgaatcgtggaagcttaccaacaaggatgaatatgtgagtgggagacctgtgtgggctaagggtgatagcggtaatgtgacgtaaaagtgctatatccacatgtgtagaaggtgcttgttgatggaatgggaaacggagggtgaaatagattgaatagagtcggggttactttatgggatgagagcattactatattggaagcataaagaataagagggctgtgaagtgtaaacaggtaagaggtagcatttaattgataaaccataaacgttggagggtttgttacgaggaagcacgtcatttagaatcgactcaagttttgtacggaaaagtatggtctgtggataatattaccgaagaaaaagaggatatcggagtattagccacaagtgtatttggccttgagcataagtactaagtacagatttggtgaaagatatgtatacatgcgaaacagggactatgtcagtaataaaacaggaagaatcagtgctggttggacaaggtaaacgggcatgttcattaggtattcatctccaaaatttggaatcggcatattggttacaggaggttgtaaagaccaggattgggtacttaaattgggtgaatcatattca

SEQ ID NO: 705237 - DNA, 337 bp, Homo sapiens
  misc_feature (144)..(144): n is a, c, g, or t
aattcagagagacatagacaggtagtatctatcttctcattattattctagaactcataaatggttgtattttctatagaacaaatatattaggtatagatgactgccaggcttatcaataaatgactacagcatctatcatanagcacacaagccttatgtctcatctcaaaaatgctgtgacagctttttggctgctttaaccataagaaaaatggattggtggatgattttattagcccaggcttttaaaaactttcatctaggccacgtgcggtggctcatgcctgtaatcccggcactttgggaggcctgagtggaaattaagcctttgcaa

SEQ ID NO: 705238 - DNA, 589 bp, Homo sapiens
  misc_feature (211)..(211): n is a, c, g, or t
tggccagatactattttttctccacacaggggatttcttaggagtcgcctgtacccttgagaattgtctccccagaagagatgcagccaaagtaaacaatgagggttgttttacaaaggtgatgacccttatagagtcagaaatgggagtcggcgcaggaatttcctttggagtggctggcttccaactgattggaatctttttcgccaanggccttttttgggccataacaaataaccagtatgagatagtgtaccccaatggatttgtgggcctattcctctctccctttaaggacatttagggtcccccctgtgaattagaaagttgcttgggtggagaactgccacccctacttattgatagcccaaaaaactcccccagtgggttgattcaatcaagatgtatgtagccctaaaactaccccaatagggtgattcaatcaagatttgtgctcgcagggggctgattcaatcaaaatgtatgtttgctatgttttaagtcccccttttttccccttcatgttagatggttgaacccctgtatccctttgaacccctggaagagctagtaaattgtaaatgaagta

SEQ ID NO: 705239 - DNA, 164 bp, Homo sapiens
attctactgtaaatatatgtgtgatctacacgatataccctaggaagccaacttgatatcatagattcagaccatacctttgtttccaatactggttctttttttccggagtagtacgttacaatatgggagattattccgaagcctggtcgtccaacctatat

SEQ ID NO: 705240 - DNA, 189 bp, Homo sapiens
attcgcggccgcgtcgactatattttttttttttgacacgaaaggccacatgatgatttttataaaaaatatagaacaggcaaatcatagatacagaaaacgggatattgtttatataggctgcgggaagatgaagattatagtggctcctcactggtatggaggtaataagtaaaatgaaacgttcgg

SEQ ID NO: 705241 - DNA, 121 bp, Homo sapiens
accaggaataggaaatagtctctgttgtgagatcgtccctgacatctgcctggcagactatgcaagatgaaaatgaatacttactttgcaaggtcgtcacgtaggaaacttgcttagagtg

SEQ ID NO: 705242 - DNA, 175 bp, Homo sapiens
acccccaagcagtcggtctgtgctctccctgtctctacggtcgctgacgacgacggtgcttttcttcactacacaacccttctggggtcttgactttccccacggacacgactggacgacactggacctacctcacctctatgggctctacactctttccccctctgaccccacg

SEQ ID NO: 705243 - DNA, 387 bp, Homo sapiens
gttacgagctatgtgaccgaggccttcggccatgctgtcggcgctatctgttctcgagaatgagcgtggacgcgtgcgagtgtcgcaggaacaatgagcagcgagaagagatgtcgggctaatggcccgggacgggctgtgcccatcctgcgacagaacacgttcgggttttggttttgtttcgttcacctctgtctagatgcaacttttgttcctcctctcttcagcttctgtacccatattcatgcttcgtcttccgcactcagcctgtccctgccctgtacatcgatggtgatgtcgctgacacacggaattacacactggcagtgatgccgccgtgagcgtgagaacgcgtgtccactacgagtgcgatgacattccagagcc

SEQ ID NO: 705244 - DNA, 137 bp, Homo sapiens
ctgttttaccattagacagcagagtcgagtgttagagtgcaaggatccagagcgtggagaggcttggcggagttgggggctggaggctggggcctggttacttggttgacgtgcacgagctctactctgtgggggct

SEQ ID NO: 705245 - DNA, 742 bp, Homo sapiens
ttggatagttctacaatgctgataatagcactatcgtgatttttgccattccccattgaaaacatctttttaggattctctttgaataggactcaagttggactatatgtataaaaatgccttaattggagtctaaactcgcacctccctctgtcttttccttttcttgtttcttgtccttccttccttttcttttctcctttaaaaatattttgagcttatgtgctgaagaaacgtttttcgtgtgggctttagctgacatgtgctttgcaaccagcaattaagaacaaagttactccttctggctattgggaccctttggccaggacaaattatgcttagaatctattatttcaagaaatatttgtgaaatgaacttgggcatctttaggagctaccagtgtgtctctgctctgacattgatcttcactacgctgagcctagttcctatagcagtcggaagcaagaacgaatccattcctattcatacaagagctaacgattcgcgagcagtcatactgtgggacgattgttgtgtgtgaagctataacgtgtaagcaatctccatgaaaaggcatcttgttctagcctttattcaggttggatctcttagtccatatgtatgatcctgtctgaacctgtcaacagagcatggagctagtctatttcactatagaaagatttttagaactggggtttaaagacagttttttggaacacctagtaagaatatgggacctcc

SEQ ID NO: 705246 - DNA, 607 bp, Homo sapiens
  misc_feature (578)..(578): n is a, c, g, or t
ctaaagccaactagaccgcaaggccttacctaaaataacaacaaactaactatactattctactctgacgctcaggatatggataacgttggtatattactgcccgccatcatattgtactacatcggactcccaacacttagcatacttaaataataggagaggtctacgatcccaccctttacatcaatcaattggacacctttggttctgaaccttcgagttaaaccaatacggcggattaatattcaaatcatacatcttcccccatttttcctagaaccaggcgacctgcgactccttgacgttgacattcgggttgttctcccgattggagcccccattagtatttttattacatcacaagacgtcttgcaatcatgggctgtccccacatttggcttaaaaaccgatgctattcccggacgtctaaacccaaccactttaaccgctacacgaacgggggtattataaggtaaatgatatgaaatctgtggagcaaaccaaagtttcatgcccctcgtactaggattaattacactaaaaatatttggaatagggaccgtttttaccctttngcaccccctataccccctaaagagccaaa

SEQ ID NO: 705247 - DNA, 141 bp, Homo sapiens
gttaacatgaccgaagcatgcatggtgcgatggtagccgacgtgtattcaccagctgcggtgcatggcttccctgtacaagttccggtcgacacgttgagcaccgtgctgacctccaaatatcgttaagctggcagcctgg

SEQ ID NO: 705248 - DNA, 468 bp, Homo sapiens
  misc_feature (19)..(19): n is a, c, g, or t
gggacacaaggcccacccntgagagacgctttttgcccggggcccccgtccacacctgcccggggaagcggccgcctgcccttgagacaatctccccggagaaggcaccttgagccgccgtttgtcccccgaataatgactccgtccccccagggcctctaagtaggaatctgacgggggaaggacaccggagccacagcgggacacgagggcgaccctgccttacatggaatttgggcttccaggcgggcgcagcagggaacccgggagctgcgggtgctcaggggattactgaggaaccaccggcaggtttggggagtagagaggcaagaggtctgcgcgctgttctgagcagttcggggcttcatctgttccaggaattagccattttggaaaacacccgtaaagaaaaaccactcatcgactacaggagcttccaagggaaaaatcaacctttatgagactctg

SEQ ID NO: 705249 - DNA, 1507 bp, Homo sapiens
  misc_feature (1247)..(1247): n is a, c, g, or t
ggctcccaggacgcattgtgttatttaacctaacgagaggactttggggcaggtgattaaactttatactaggtacctcaacgaccaagaacctgaatatgctgcacttttctattctttagccttttacagtgctacgcattatggctttctgcatataggttactcttatcgtgtaggactatactgcttattgaggagccccaactagacctgttgaaacgacactttcaaaaacttactctgtgtagcggactattagtactcccttacaaagacataaaaacttaacacaaaaactttacaaacaaacttgctgcaagctatctggccttcgaagcgttgcccctattagttacgaatacataccttatagcccaaagtacacccttgaggatggcagaacacatgattgttctatacacgcaggaccaactaactgctcctgaactcctttccttgatacaatgcctgcaattcctataatctccattatctccgatgtccatcccacagccagggatatgggacattacccgtgtattttacctaaaggctccacaggctttgagacacactccagtggttcaaccattaattcacatgtgtagatcacgcaccgacaaacaaacgacacacccttcacagcacaagacattgcgcacgacaatgtgacgcgaacgacctacaccacagtcgccatccactataaaacactgtgagtgtgataccgcatgcaaaaaacatacaagggacgaacagcaccatgagaacacctctatgtggggagctacattactaccgcagacaagcagacaagccccgacgggctacttactcaacacgatgttctataacccctaactaatattcacagccttacacccaacactatttcagatccgctagataatacttctttggacagcagcactatcttgcaggcagaaacagtaggagctcactatgatgacaattgggtgcaacacaagatcaacacaaaaccacccgtgggtggacgcaaaaaccacacgagccataatcgctgcacctgacgacacaccaccgagacagcaccaccattcgacactgggtgccagagcgcaaaaccacacctgacgcaaggagcgaccccaccacacaacccagaactgcgaggcgaaacacagcgagaccaacaaagaatgcagacagacaaagttgccaaacacacagatcaccgacacacaaccactcgcagggaaganaacacctaacagaccgaacacgaggaagaggcacccacacacagagggagcgcaacataacacccaacacaatcaaaacggagaggaccgactgggaggacatcagaacgactcatactaatccgcactacccagccgaacgaggagcatgcacacagacatagccggaacagaccgaaacgcacacacacgagagatacactgtcggagagaccgaatctgaccagaaccaaccgtctcgccaacaaaaaacagccccg

SEQ ID NO: 705250 - DNA, 486 bp, Homo sapiens
acgaatagggccaaatcaactcataactctcaggactccatgagaaagaaaggcggcccaaaaggggtcactggtgtcaggcctctgagcccaagccaagccattgcatcccctgtgacttgcacgtataagcccagatggcctgaagtaactgaagaatcacaaaagaagtgaatatgccctgccccaccttaactgatgacattccaccacaaaagaagtgtaaatggtcggtccttgccttaagtgatgacactaccttgtgaaagtccttttcctagctcatcctggctcaaaaagcacccccactgagcaccttgtgacccccccactcctgcccgccagagaacaaaccccctttgtaattttcctttacctacccaaatcctataaaacggccccacccttattctcccttcgctgactctcttttcggactcagcaccactgcacgcaggtgaaataaacagccatgttgctcacaaa

SEQ ID NO: 705251 - DNA, 142 bp, Homo sapiens
agggactactgagctctccactctgttacccgactgggccattcaacgcctccgggccattcaacgcctccggccattcaacgcctccggccattcaacgcctccgggccattcaaagcctccgggccattcaacgcctccg

SEQ ID NO: 705252 - DNA, 329 bp, Homo sapiens
tgttttttggtaaaatggtgattgtaaataaaattagttccctgatcccctgccccctgtcccctgccttttttcccaattcccttccttatgcgggacttttaaagcttaaaaaaaatccgattgaatataaaggcctaatttcattctttgtgaaagggttgcttcctcctgattccctaattgggcggggttggtgttttgcactggaattcaacattcccttttccttttgtactgggttgggcttgctgtttttcccggacccccttaaagactgtttttttagcaaaaaatttcagtaaagggttttttgtaatcttttttta

SEQ ID NO: 705253 - DNA, 309 bp, Homo sapiens
cccctatgcgcccgcaggacacgtgtccctggtctttaccctggctggtcgtgtttcggacgttgagctttcctgctatatactgcagcgtcaggacttagactatcctggcccgtcacgcctccctgacatggcctcctgtttggagccttcaggctcatgcttacatcctctagctgatcattaatctttgtgaccatttcatgctcactgctttcttgcctaggagctaatggctgaggacaggtctctgggaaccagcgcaccaacctcgcacgttgatttttttccagcctacggctcaatatc

SEQ ID NO: 705254 - DNA, 213 bp, Homo sapiens
tattttgatagggatctttttttctgaggggtaggtatcaataatgagcttaacatattcagcgagactgtagggtatacagatatgctgtcatccaggctttgttgttccctttatagaacacaggcagagtagatttcgcataattttttttttaagagacaagatctctctccgttgcccagattggagtgcagtgagccgaggtggagc

SEQ ID NO: 705255 - DNA, 633 bp, Homo sapiens
  misc_feature (178)..(178): n is a, c, g, or t
  misc_feature (183)..(183): n is a, c, g, or t
  misc_feature (188)..(188): n is a, c, g, or t
  misc_feature (191)..(191): n is a, c, g, or t
  misc_feature (212)..(212): n is a, c, g, or t
  misc_feature (226)..(226): n is a, c, g, or t
  misc_feature (228)..(228): n is a, c, g, or t
  misc_feature (230)..(231): n is a, c, g, or t
  misc_feature (237)..(237): n is a, c, g, or t
  misc_feature (239)..(241): n is a, c, g, or t
  misc_feature (249)..(250): n is a, c, g, or t
  misc_feature (288)..(288): n is a, c, g, or t
  misc_feature (294)..(295): n is a, c, g, or t
  misc_feature (299)..(300): n is a, c, g, or t
  misc_feature (308)..(318): n is a, c, g, or t
  misc_feature (332)..(332): n is a, c, g, or t
  misc_feature (360)..(360): n is a, c, g, or t
  misc_feature (364)..(364): n is a, c, g, or t
  misc_feature (369)..(369): n is a, c, g, or t
  misc_feature (387)..(388): n is a, c, g, or t
  misc_feature (391)..(391): n is a, c, g, or t
  misc_feature (393)..(393): n is a, c, g, or t
  misc_feature (403)..(403): n is a, c, g, or t
  misc_feature (412)..(412): n is a, c, g, or t
  misc_feature (430)..(430): n is a, c, g, or t
  misc_feature (435)..(435): n is a, c, g, or t
  misc_feature (506)..(506): n is a, c, g, or t
  misc_feature (607)..(607): n is a, c, g, or t
acatataaccatcaagataccttgattataatttataggactagaatgacagattcaggtggtttattaattacatttaaaaagttttctgaaaaaacttttgcaataaaaaaaaataaattgcccatcaataagtttgatatcttttaaaatgatttttggttatctgcacatgaancaaanaaagngtnttccacaaaattctttaggcncagtctggtaaganancnnccacanannncagaaagnnttgtcatttatctcttgtgagtccaatttctgaaagcngaatgnnggcnnccctttcnnnnnnnnnnnggggtttactgttntctctttttgcttcatggcagttctgcngggnggggngggttgtttgttgcacannatnantctgtagtanatactgttngtgctctgttttcttctnctggntttttggtccgtcgcatggccttagcattcatttctgggaactgctggcaggcaaacagggcaggaccagnggctaacccgggctttagatcagctgatgttggtttgcccatctggtcagaacacggggggcaagtccaatacatcatctattagctgaaaagctattccnacattttttccgtactggtaggcgat

SEQ ID NO: 705256 - DNA, 140 bp, Homo sapiens
tgccttcatacgggaaagcctaaaggaagaccccattgaaaaatttgagaatcttgttgaacgctaaacccatttgcaaagaccatgcgcgggaacaccatttttcgccaggccaggaatcacaagctcgggttggttaa

SEQ ID NO: 705257 - DNA, 369 bp, Homo sapiens
tccacagttttgccttaaaggcccttcccaagtctccctttccctgtttggtttttcccttaaaaaaaaaaaaatacttgtagaattgggtggggggaatgagcatgaactgtccttccatttgggatatgttacattagagtgagaaaaagaataaggagccttttttatggaagaaatgggagaaaaaagacagggtttttttcagcagagtttagtagtttttttgtaaggcaaaataatttaaaaagactaacctgccccccccctccttatattgttgtgagattgcccctattttgtgtttttttgtttgcagggggccgggccttgttttaacccggaataaaggtgattgattgtattgca

SEQ ID NO: 705258 - DNA, 854 bp, Homo sapiens
ggccaatcctatgagaactcagcatcccagctcatctggaacagatcctggaagtgatttctgcagctcaggattcgtctgtaagctacatggcaaatatagtgttatcttggttgccaggtttgctctaatataatgctctgcgcaaaggaggaggatttgcacttcctcatatcagaggccagcatattaaagccagttaatgcagaatctagctgtgcgtggattaaagccgtatatctcactgccaaaccaaaggtgcgcgggcgcgctgggaagggaagcataacctgggacaatggatagctggtacaagaccggcctctgctcctttagcgatctgctagaaactgtctatacgaccttgtcaaatagtccatctcgactcgcgtggtggactccacctctagagagtatagcctgcatccttcatccctaagtccaccccagcgatatgcttctcccaatctccccgtacctccgtatcccgttctcttgctgcaattctaaaaggctgtgactatgttccagccatggatcctgttgggacgagaccatacaattagcttggagcaaccctggccttaagatagaggggctctgggagaccttgacagaccagtcctgttttgcacgggcaagcccccacttgaaggaagaagtctaacgagtgacacgtacgtcgtgactggaaccttagatgtgcctgcttcctccttcgttcttgcggacgacaaccatttggggtgacacttgagcgcgttctccgcaacctcgccgattcataggccccggctcctagcatgaaccaggtaggatccacctgtaatctccgcccggtaggacccgacggt

SEQ ID NO: 705259 - DNA, 760 bp, Homo sapiens
taaagaggaaaccccggtaatgatgtcggggttgagggataggaggaaaaggggggataggtgtttaaacatgagggtgtttcctcgtgtaaatgagggttaatgtggtaaatggtgggtggggtgatgtggacccccattggttgttggtgggtcaacattactgtcagcagggatgtaataagggtctggtgactaagttattgtggagttcctgtaaagtaaggaagaggttgtattatttggatccaggaaacctgtggtgttacttaccacagagagtttctccccagctaggttaaacaagtggggggcgtcagagccgcgaaggttctaacgggcgaaggttcctgccctacaacagctccctcacacaaaagctctatctaaggggggaaagtccagaagtttggaatctcctctttgaagaaaggagcggtatttcatgcatcgccggcaccgtggtgcagtgtcgccgctccgcgacagcttcgagcagattttcgcctaagggccagaacataactcaaatggcgcgcgactctgtcaacgccccctggggggccccgtattcatttgaaacatctgcgcacctggcccccttgtgtagcaccactctcctacaacgggggggttctgcgggatcgcaaacattggcgctgtgtccacatacccgagggcgctattgcgcgcgctcgctctccgacacacgtctcgcaactcgcgcgccactctcaccgctccggtccgcgcccctcag

SEQ ID NO: 705260 - DNA, 167 bp, Homo sapiens
tatgccgaagagtagaggagttgttacctgggctatgtagtagcctcatttaccatcgttagtattactgaccacatatgctgtcactgggaaagaagccgtttcagctgcctgaacgcagttgggatgtctttgaggacagacattgcccggaaactcagtctatt

SEQ ID NO: 705261 - DNA, 787 bp, Homo sapiens
agcgggggggcgctcgcagtggccgcagcagcgcgccgtggccctgtgcggccccagccgagcgcagcgcgggagtcgccccgacctttctctgcgcagtacggccgcctgggaccgcagcatggcgcggcatcgctggccaagctggcgaaggaccgggaggcggctgaggggctgtggcttcccacgagagggccatcaagtacctcaacaggactacgaggcgctgcggaaacgagtgcctggaggcccggggacgctcttccaggacccgtccttcccggcatccccgtcggccctgaggcttcaaggagtttggggccctaactccagcaaaaacctggggcatcgagtgggaagcgccccacggaggatctggcgctgaccccgcagtttatcattggaggagccagccggacagacattctgccagggaggccctaggtgactggctgggtggctgggcaagccattggccttccctcacctttgaattgacggaaactccttgggtcgagtcgtccccccctaaaccaggagcttcccgggaaaaacttatgcagggatctttcacttccagttactggcaaatacggcgagtggggtggaaggtgggtggtggatgacaggctggcgccacccaaggccgggggaagcctgctctttggtgcattccagccggacgggagcgaagtctgggagccgccctggttggcgaaggcatcgaccaagaatcacggatgctatgaagcacataccgggggtgccaccattgaggttagaagag

SEQ ID NO: 705262 - DNA, 255 bp, Homo sapiens
  misc_feature (34)..(34): n is a, c, g, or t
  misc_feature (49)..(49): n is a, c, g, or t
  misc_feature (80)..(80): n is a, c, g, or t
  misc_feature (97)..(97): n is a, c, g, or t
ttgtttggcttttatttttattgggggtggtaangaggaggcgggtttnaacaggagggacggggagcttccttctaaanctttccacataatgaanttaattatcatttcttctcttcaaacatggatgggtccttcctaagaagtgccaacatcttcttgggatggagctcccaaaggagggggcaggctgccatttttgcgggggggggtaccttcactggggagacatccagggactggaaaattcgaggg

SEQ ID NO: 705263 - DNA, 443 bp, Homo sapiens
  misc_feature (202)..(202): n is a, c, g, or t
  misc_feature (234)..(234): n is a, c, g, or t
  misc_feature (300)..(300): n is a, c, g, or t
  misc_feature (335)..(335): n is a, c, g, or t
  misc_feature (341)..(341): n is a, c, g, or t
  misc_feature (372)..(372): n is a, c, g, or t
  misc_feature (392)..(392): n is a, c, g, or t
  misc_feature (416)..(416): n is a, c, g, or t
  misc_feature (422)..(422): n is a, c, g, or t
gtgatacatctctgcactttcagtattttccaactcatccttaaattccttctcacaacagtgtcaagagcctggacgccagccagggattgaggtcctacgggtgtttggggacctccccaagcccacgagtatcaatgggcagtatcaattgtctgtgacagtgattaagggagcaaaacacttgggaacccacaaggantcccagaaggtgaagttaaggagctcccagantcataaggttatttaggaacaggcaaactgggcacccccaaagaacttttacggggagactttggnaacctattcaacaagtttgggatggagggggtttnaaaggnttttcaaccaacccaaccaacccccaaggcnttcaaacttgagggggaacnttttttaacctttcacagacagtntggganggttgggtgggggggccgggg

SEQ ID NO: 705264 - DNA, 616 bp, Homo sapiens
cccccttgggtgggggccccgggactggacctgtagtgccacctcctggggtgtgcggagaggcgctccggtcagccagagaagctggtagtcctgggcaggcttgtgtgtacatgtgtgcatgtgtgtgatgcatgtgtgcatgtgttcatgtatgtgatgcctgtatccatgcgtgatgcatgtgtgcgcatgtgtacatctgtgttcatgtgtgtgatgcatgtgcacgtgatgcatgtccatgtgtctgttcatgtatgtgatgtgtgatgcatgtgtattcatgtgtacatcagtgttcatgcgtgtgatgcatgtgtacatgtgtgatgcgtgtccatgtgtctgtgttcgtgtatgtgatgcatgtgtgcccacacgtgtgatgcatgtgtccatgtgtacatctgtgttcatgtgcgatgcatgtgtgtccatgtgtacatctgtgtgatgcatgtgtgtgcaaccgtgttcatgtatgtgatgcatgtacccatgtgtggatctgtttcatgaatgtgatgcatgtgtgtccacgtgtgcacccgtgttcgtgtgtgatgcgtgtgtgtgcacacacatctctgtgtgtattcctagcactcatagc

SEQ ID NO: 705265 - DNA, 130 bp, Homo sapiens
acggaggctgactagaggacccgaccaaggcgcagagagtgaaattgcagagaatatattaggtgattaaaatatttgtatagaatttgatacaggaatgagaaagtatagtaggagataaatttgaaag

SEQ ID NO: 705266 - DNA, 729 bp, Homo sapiens
aaaaacattccagtaacgaaagacatggtccgtgtgaagagattccagaataacactgcatgtggaagaagttgttccgagtgtaattggagccctcctttggcttggcagggatcatgtataccatattggaacatacattccatgtccgagagggagatgaacagagaacgttcttcagtttccctgctgtggttgctccattcaaatgttctgtccttccactgagccagaaccaagagtttatgccatttgtcaaggaattatccgaagctctgaccaggaacggcgtgtctcataaagtcgatgactcctctgggtctattggaaggcgctatgcaagaactgatgagattggcgtggctttcggcatcactatggactttgatacagtgaacaagacgccccacactgcaactctgagggaccgagactccatgagacagataagggcagaggtctctgagctgcccaatgtggtccgcgatctgccaacggcaacattacctgggctgatgtggaggccaggtacccactctttgaagggcaagagactggcaagaaggagacagtagaggaatgagaacagctggcagcttatgaccatcgtgctaataaataactcatcatgtccactacacagagcattgtgactgcatccagggacggtttttcctcagtggctgcttggttttactcccacaattaaagttgaaggaattctgaaca

SEQ ID NO: 705267 - DNA, 147 bp, Homo sapiens
tccccagcctttaccccaaagccctctttccccccaaaaaagcccttttggtttgccgagccccccttttttcccagggggtttgaccttgcccaatttgtttcccagggccagcccatttattttaattaccagggcccccctcca

SEQ ID NO: 705268 - DNA, 1236 bp, Homo sapiens
  misc_feature (324)..(324): n is a, c, g, or t
gatggccgtgagtgtctcagatgaaggttctccgttcccagagatgggtccctcggtttcctgtctcgggagcgcaccagagaagcatcgtgggagggtgaacgagcttctcctacatgggtgacccagtgcacagtccggtggcctagtcgtcgaccagacactatcctgggtgcataggcaagggcttggacatagacgtcacatctgtgacgccgtgaacggctcgaacatggccggagatcctacaggtgacacaagaaggagagtggtggaaggcatgctagatcagttgtaaagacagtcaggccatgagaaggctcngattgagggcgattgcttgtggacataacgatgaggaacagcgcactcgttcgacagggcacttgcgcgagaactcctctcacacggaggtgctccttattgcatagtaggctactagtgcaacgcttgcattggacattcgcacacgaaaggacgcttgtacatgactgaacgtagataggagacaattccagtctccccgaaagaagggggccttttcgatcccaaatgtcatgtggcacacgtaaacagtggtcaccggactgacgcggactgggccaaagaaaaggcagttgtggacgactcgagagctctcgaggaccaagtagttgactggtagtcttagcgtgacccgaaagagtcaagtcgcggtggttaccagtttcgtatcggcaaactaggtcgcaaaggtaaatggctgaccctttgacatttacattccttccgttgaagtaggcaccagagcaaaacgtacaatgggcgcccaactccatatgacaatcgcggaatggactccccaaggagattggaaccaggaagacaggggaaccatgaatggaagtcccggactcaaattgctttggggaggcttggagggcgccccccagcggcacgcaaggcagccatctcgacaggccaaaggcaagcgcagcgttaacacccgtcgcatggtaaacagccaaacagggagagctaacctggggacgccaacggggcaccatcgaccagcacgttggaaatcaggaagacgggatcacgagctcacgggcggggagataggagccccacacaacgaggggaccactagagcggcgctaagcaagacacggaaggacggattcaaaccacgaaggagacgggctcacgagcacgacacaacccacaaggatcataggccattggaacccccgg

SEQ ID NO: 705269 - DNA, 135 bp, Homo sapiens
  misc_feature (57)..(57): n is a, c, g, or t
atgctatagattctctaagtcagctggatggcttataaaaatcagctatactcggcntgggtgcacgtgtgactcacgcctgtaatcccatcactttgggaggccgaggcaggtgaattgcttcagcccaggagt

SEQ ID NO: 705270 - DNA, 877 bp, Homo sapiens
ataggctagtacgaggctggggttaatcggacgaggctagcggaaggtcctctatcccatggcctcagtgtcatctcagcagggtcttgtgccagcctcaggaggccctggtgctgtccttccctcatgagaagctacggcttatgtccacagaccaggaggagctgtcacgctggtaccacagctctagagttgggctatcagtagccagaaaaagtagaggaatcttatagcattccagaactcaggatacctcagggataggtccgacagccgaagagtacagaggaagtcttcagatacgtgaacaaaagcagaacccttacatgatttgacaataggtcactttctgtttgcctggaccaggctactccagatcatctgaccagctcttaaaaatgacgggcaggcacatgtggctcatgcctgtaatcccagcagttggggaagcagaggtggcaggatcattccagcccaggagttcatggacagctctgggcatgcacaatagtcgctcaggaagaggtcgtgcgtggcctgcgtgtgtgggggagagcagtcaggaagtgttccagtgttcagagactttgtgtccaactccagcagactcgacctcccgagccttcacctggttcgtgaagcctccataatccttgtgccgggtggcttatcgttgcagacaggtcgagggaagtggtccagtagccttcaggtgcacgaagcgtccggctgggggttccagacccagaggagttcacaactgagaagaaattgttacacgtcagtgggggtcccaaccgttattgttcccccagtttcctaccctcctggccagaaaatttccccaaaaaatttcacacgaaattcattgcgtccc

SEQ ID NO: 705271 - DNA, 102 bp, Homo sapiens
taccagaatatgatctgtgcagtgtgtgacttgacattatgtaatatgaagggatggctacgtgttccttttccccagttgatatgtatttaagctgtttca

SEQ ID NO: 705272 - DNA, 1267 bp, Homo sapiens
tatcttgttggatctctgcagggcttgtgttctaatagtacatcatcttagttcgataggatgtagaccaaagactagtcgttcacatccatcagtaggaatgagctatgcaatctatggcttttaagctgtgcctatcacgtcctcttcctgtcgacccatttatgaacgagctgggcaggaagcgtatgcaacgttcaacgtctccgtcgtgtcaaatatccacagtataaggcccaggaacttctagaataacccagatgcgctttaattgtactttacatatgttttgatcacggtaacttctagaataacccagatgctctttcattaattctttgtaactaccctcttgcactcaacagcctgcgctgggtgaaaaacatagtctcttttaatttctgctaccctttccctacgttagattaacggtgaaagacgcccaggcgaacacgacgaccttttaaactatcttttgctattcaaccaacaaaactttgttggaataatagtctctctattcacatacatgggcgagagtatctgcacgaaataagagtcttttcgccttgagcctcctcgcgaaggcaggctgtccgcagcgctgtgacggccagagtatctcagctgggcccaatgatgaccctttgttcaacacagcggtcttagccagttattactccagtactgtattttacacggacctgtaaatggttggtacatttgaaacaacgacggtaatcagaccccaattgcttgacaaggagcgacacgacagaaccgaacactcgactttgacacgcactcggctctacttagcggtatctacgcaacccctccttcttcttttgacccagcttggggggttttgcctcacttcttctcctagggaacttctatacgcgttacctttaggagggaacccgagagctctctaggccaacttcccctcttcggggtctacacaggaactcctgggggggaacaacacaacagtaccgcacgtaacaaccatagaacgaggagacgtgtcaacacaaccccacacaatgacaccaagcacggacacaacatagcaaccaccaaatgacacacagataaccaactagcaggtcgcacccgaaccactagtacaacagaaacacccacagaaacagacatctccactgacaaaggaagcgagaatgcagaacaccagtgatcagcaatcaacagaacttgatcacatagcaaacagctaaatagtcaagcctaaggaacatgatcc

SEQ ID NO: 705273 - DNA, 183 bp, Homo sapiens
ccccttttggggcttttaaaaacccgtttttttttttccccttttcccggtttttttcccaatatttttttttcacccctctttaagggtggatttggaaaattttttttttttttttttaaaaggggtgccacaccttttttttttttggaaaccccaaaaaattttttttcccctttggga

SEQ ID NO: 705274 - DNA, 384 bp, Homo sapiens
  misc_feature (1)..(1): n is a, c, g, or t
nagtcacgagtaggcgcatcgactgagcctgagaggatgaggagtcctcagaacacggtgtctcaggttgctctatggggcaggatgtagggcaagagggtgatgaaccgatgtatctcatggcatggcccaatcaccctgtcaatgttcatcatgcagcgtctatctgttctaaggagtatttcatcagtatcagcagcccatgttttagaggtgaggtagtggtctctgtcagcgcatatagcgtttcggaggcagtagcggtgactccgtccattgtgtacgagtgctctacggtgtgcttttccatgtccatttacacgaacagtcagtctctcaggtcccagggacagtggtgctacagaagttcagggtgctacttcg

SEQ ID NO: 705275 - DNA, 156 bp, Homo sapiens
  misc_feature (16)..(16): n is a, c, g, or t
  misc_feature (69)..(69): n is a, c, g, or t
ctagaggatctgtgcntccacttggttgccgaagtgctgtggagtacaggcatgagcactgtacccagncaaatgataagctttctcacaaatcaacagcacttttggaaactattcttgtctcaaggctattggggtgctggaaacattttcctg

SEQ ID NO: 705276 - DNA, 111 bp, Homo sapiens
ctagaggatcgcgtaatttctgcttgcaccctcggcgattcatgggtggggtcttcaagtgtcagcttacatagcctggggcaggagagaagatggagtgtctcagacact

SEQ ID NO: 705277 - DNA, 346 bp, Homo sapiens
ctgtttccctaatctttcctttccctcctaatctcgtacatcaagacatcctcaatcaggtgcagtggctcatgcctgtaatcacagcactttgggaagccgaggtgggaggatcacttacgccccaggagtttgagaccagcctgagcaacatagtaagaccctgtctcaaaaaaaaaattagtcaggccttagtgctacttgagtgacacacgcctatagtcccagctacttagggagctgaagaaggaggattgattgagtctgggagattgaggctgccatgtgctataatcttgccactgcactccagcctgggtgacagagtgagaccttgtctctaaaa

SEQ ID NO: 705278 - DNA, 427 bp, Homo sapiens
tggctgggacattccagatcatggttcctggagagttaggggtctagttgaggagcccacgcttctgggttcatcgtcttggattctcaccggatcgcttcgctggctggacggagcgcggtgagctctctggagtttgtttgagcgggccttggtcgccatccataagggctctgccctcataacctaatcacctctcacaggccccatctcctaataccatcacatcaagggttacatttcaacataggaatttgggggagacacacacaaacattccgtccataagaggcatgaatcccaacttttgaaagagggtcactagatggaagtatgctgattggtgggacagagcagaagcagccacaggggaggaggctgcagcagaggtggcaactggtttgccgaagcttgatcacggggatcc

SEQ ID NO: 705279 - DNA, 281 bp, Homo sapiens
agtatgaagaatgatgcttttggtgcctgggcgccaggaccgattgctttagaactttgctgacgctccagctgcaattgtgttccatgtgatcacagatactgaaaacgcagcttcagaaccagtgtgaagtgatgtacaaataagtgcctgccctatatctagtgagcaggttgtggcaatcaggaagggattgatattttgatcccatcctgaggcatggagtgtttttttgtcgaagcagttaaatgtgtcattaaaaaacttatttaatcttcgta

SEQ ID NO: 705280 - DNA, 591 bp, Homo sapiens
  misc_feature (327)..(327): n is a, c, g, or t
  misc_feature (331)..(331): n is a, c, g, or t
ggtcaggcactgaagcctggtcaggcactgaagcctggtcaggcactgaagcccggtcaggcactgaagcctggtcaggcactgaagcctggtcaggcactgaagcctggtcaggcactgaagcctggtcaggcactgaagcctggtcaggcactgaagcctggtcaggcactgaagcctggtcaggcactgaagcctggtcaggcactgaagcctggtcaggcactgaagcctggtcaggcactgaagcctggtcaggcactgaagcctggtcaggcactgaagcctgggtgacagagcaagactctgtctcaaaaaacaaaaaanaaancaacattcttttatccagcactgtggttagaccttagattgaatttaccccttttgagttcccaaaggccgacaaaaacaagtgtgagaatctccagaggattggccacgaaaacatttgtgcaaaagggaccttaaggggaaattgattgtggatcatccgtgtaaaagggtaaaagaattttaaaaaccttaacacttcatttcccctttaaggctcttttttggtgggttggttttggtatttcagaatggagtctt

SEQ ID NO: 705281 - DNA, 221 bp, Homo sapiens
  misc_feature (213)..(213): n is a, c, g, or t
cacaaggttcacagacagcccccattacttcagtgaagcccaaatttcatcctcatctgttagtcatactcccgttcaccgttctcaactactcatacatgccctgctcttctttacactgccggtttacactgtttctccaagacatcacagctgatatctcctggtgctatccccaaactgccactctaaactcttgaagtaaataaatcncccccccc

SEQ ID NO: 705282 - DNA, 505 bp, Homo sapiens
  misc_feature (327)..(327): n is a, c, g, or t
  misc_feature (331)..(331): n is a, c, g, or t
ggtcaggcactgaagcctggtcaggcactgaagcctggtcaggcactgaagcccggtcaggcactgaagcctggtcaggcactgaagcctggtcaggcactgaagcctggtcaggcactgaagcctggtcaggcactgaagcctggtcaggcactgaagcctggtcaggcactgaagcctggtcaggcactgaagcctggtcaggcactgaagcctggtcaggcactgaagcctggtcaggcactgaagcctggtcaggcactgaagcctggtcaggcactgaagcctgggtgacagagcaagactctgtctcaaaaaacaaaaaanaaancaacaaaatacaaaaattgtcggatgtggttgtgcatgcctggaatctcagctagttgggaggctgaggcatgagaatcgcttgaaccccagaggcagaggttgcaatgagtggagattgtgccattgcactccagcctgggtgacagagcaagactccatctcaaaaaaaggc

SEQ ID NO: 705283 - DNA, 399 bp, Homo sapiens
  misc_feature (327)..(327): n is a, c, g, or t
  misc_feature (331)..(331): n is a, c, g, or t
ggtcaggcactgaagcctggtcaggcactgaagcctggtcaggcactgaagcccggtcaggcactgaagcctggtcaggcactgaagcctggtcaggcactgaagcctggtcaggcactgaagcctggtcaggcactgaagcctggtcaggcactgaagcctggtcaggcactgaagcctggtcaggcactgaagcctggtcaggcactgaagcctggtcaggcactgaagcctggtcaggcactgaagcctggtcaggcactgaagcctggtcaggcactgaagcctgggtgacagagcaagactctgtctcaaaaaacaaaaaanaaancaaccaaaatattagccaggcgtggtggctggcatctgtgatctcagccactcaggaggctgaggtga

SEQ ID NO: 705284 - DNA, 427 bp, Homo sapiens
  misc_feature (327)..(327): n is a, c, g, or t
  misc_feature (331)..(331): n is a, c, g, or t
ggtcaggcactgaagcctggtcaggcactgaagcctggtcaggcactgaagcccggtcaggcactgaagcctggtcaggcactgaagcctggtcaggcactgaagcctggtcaggcactgaagcctggtcaggcactgaagcctggtcaggcactgaagcctggtcaggcactgaagcctggtcaggcactgaagcctggtcaggcactgaagcctggtcaggcactgaagcctggtcaggcactgaagcctggtcaggcactgaagcctggtcaggcactgaagcctgggtgacagagcaagactctgtctcaaaaaacaaaaaanaaancaacggttatgtcaggtacagtggctcacacctgtaatcccagcactttgggaggccaagatgggaggatcacttgaggcttcaggggtaccgagc

SEQ ID NO: 705285 - DNA, 392 bp, Homo sapiens
  misc_feature (327)..(327): n is a, c, g, or t
  misc_feature (331)..(331): n is a, c, g, or t
ggtcaggcactgaagcctggtcaggcactgaagcctggtcaggcactgaagcccggtcaggcactgaagcctggtcaggcactgaagcctggtcaggcactgaagcctggtcaggcactgaagcctggtcaggcactgaagcctggtcaggcactgaagcctggtcaggcactgaagcctggtcaggcactgaagcctggtcaggcactgaagcctggtcaggcactgaagcctggtcaggcactgaagcctggtcaggcactgaagcctggtcaggcactgaagcctgggtgacagagcaagactctgtctcaaaaaacaaaaaanaaancaacaacaacaacaacaacaacaacaagggatgtaccagagcactactttcaaagattgat

SEQ ID NO: 705286 - DNA, 924 bp, Homo sapiens
  misc_feature (226)..(226): n is a, c, g, or t
  misc_feature (288)..(288): n is a, c, g, or t
cttcttcgaaatccacacttatccccaccttggccatcatcatccgagtgaggccagaccagccagaacgcctgaacgcaggcgctagtacattccctaattcgtacaacccctaggtaggctccctttgcccactacgtcatctgcacataaatttacatctctacgaatcgaccctagggcctcacgtagaactaattcttactacatcatcgtcttcaactgncacaatgaacatatctagaacttgctcgtgaggccaagcatacgttagatagtgaactagcntgtacggcaatagccttttatagtatacacgaaataaccctgcgtgttagcgggaccgtcgcagctttagttgaccttcctcgtgaatagaccacatgttgggataggtcccacccaatcgtcatggggtcaagtagttaaccttgacccgtcgggattactccttagaagactaggggcggcatgatggggtataagtaccgtcgcatcgaacaacttcgatttcttcgaaacgctcccacgtgaactataaaaactatcaataagcacatatcggcgcttttcacatttgttaggataaatcaccctgagttgatggcgattgaactttattataaccagaaggtcttgccaattcggggcgcattaacggactagaatcggagagcctaagatagtccgcttcaatgtgctattagctccttcgagatttcagggccaacgattagccccgtgcggttgaggtaaggcaggtcgattcgtcgagtaaccaaaacgccccgcgtgtagaaggcgttccatcgcgggctggcgaggttccattttccttcaaataaatttccggtcccaccgggggcttaacgagtccttcgatttacttgatttcttggccttaggctgagacttccaaaattt

SEQ ID NO: 705287 - DNA, 131 bp, Homo sapiens
tgtattgtgtgacctattgaatactcaatgctatgcttccaatgcgttgtgagctctcccatattgtctgacctgcaggctgctggaattcactagtgattgaatgtgggagcatgctgagactccttctc

SEQ ID NO: 705288 - DNA, 527 bp, Homo sapiens
ggtcaggcactgaagcctggtcaggcactgaagcctggtcaggcactgaagcccggtcaggcactgaagcctggtcaggcactgaagcctggtcaggcactgaagcctggtcaggcactgaagcctggtcaggcactgaagcctggtcaggcactgaagcctggtcaggcactgaagcctggtcaggcactgaagcctggtcaggcactgaagcctggtcaggcactgaagcctggtcaggcactgaagcctggtcaggcactgaagcctggtcaggcagatttgcaaagcactctgggctaaagatatgtggtaatcaattgcatgtgtctccactcacgccgttataaacagctggcaggtccctaaataatataatagcctctgtatgtcatgggcttcggaaggtacgagtcgtcgagcgggcatgatctccttctttacagtgacacacagctggcgagtgtcgccaacctgagaggagtccccgaggcttcgctgcctgaccggggactcctcagactcac

SEQ ID NO: 705289 - DNA, 1003 bp, Homo sapiens
cctggtttctgaccggcgcgcacctgtgggctgagccgggtgcgcgcgggggtcgggtctggaactgcccttgaatcgacgggatttctctggctgtcgtttgctgctgcatttatcctgaatacatccagctcgcagtgcatcctgcaagaaacggtccctgtgctcgctgtgtactgcctgacacctctgtgcccaacgcagtgactcgatggtggtttctatgtgccctggtgtggctgcaagtctgccctccgaggggaggctggacaagcgtgtgcccccaggtcgagcggcctctcgctgcctggcagttgcctggcaggcccccacctctgccagtgcttcggaaaccctgcctggccaggttcgcccgcggtgacaaaaatgaaagcaaattccccaacagaggtagccggaactttcctcgacgaaggctccctcctgcgcctgtgtctggagaaaaccccagagcgctgcgagttagcaacgcagagattcgatgtgcggctctggaatgcgcaacggaatggtggctgctgggtggagcaaaggaaggccacttggggtgacccagcctggtcccggggttgaaaccgctagaagaaagggcggccatcggacattccttaataacaatgcaaagctccctcggccccgaggaccggtgagaaagtagtattccaaaggctgggcgcgggacgcaccagggagtgaggtaaggcagagaatcaaaactggggcgaaacgaaggcaggcgtatgggaagaaaggcatgccagaagaggaattaggccgagtcgaaaggcggtaccgggcccgggcgggaggccagtacaggagaaaacgcatgcgagcgaacaaggcgacacagagggcccatatgggggcagagacacagggagccacgagaagtaggccgatggggagaacgccccgcagagcacaaggaacacccgagggccgtccacataaccgagcgcccagcggcgaacaaaagagg

SEQ ID NO: 705290 - DNA, 356 bp, Homo sapiens
ggtcaggcactgaagcctggtcaggcactgaagcctggtcaggcactgaagcccggtcaggcactgaagcctggtcaggcactgaagcctggtcaggcactgaagcctggtcaggcactgaagcctggtcaggcactgaagcctggtcaggcactgaagcctggtcaggcactgaagcctggtcaggcactgaagcctggtcaggcactgaagcctggtcaggcactgaagcctggtcaggcactgaagcctggtcaggcactgaagcctggtcaggcactgaagcctgaattttgaggttcaagtaagttattttctctctctctctctctctcctcttcctctcctccttctca

SEQ ID NO: 705291 - DNA, 356 bp, Homo sapiens
ggtcaggcactgaagcctggtcaggcactgaagcctggtcaggcactgaagcccggtcaggcactgaagcctggtcaggcactgaagcctggtcaggcactgaagcctggtcaggcactgaagcctggtcaggcactgaagcctggtcaggcactgaagcctggtcaggcactgaagcctggtcaggcactgaagcctggtcaggcactgaagcctggtcaggcactgaagcctggtcaggcactgaagcctggtcaggcactgaagcctggtcaggctcttggctaggtcggtaagcgtgttagccgtggtcgttcagcttcccttgctcgatcttcacactccgaggcttcagt

SEQ ID NO: 705292 - DNA, 519 bp, Homo sapiens
  misc_feature (300)..(300): n is a, c, g, or t
ccatgtagcaagcgggtctccaattccggggctcaggcaatctggcttgcctgggcctcccaaagggcggggataagaggcatgagccacaaggacgggccttatatgctatattcttttacaagtcagaattttactagtgttttgggcaaacgtccttcaatagcatgtgaaaatgatattaattggctatccataatttttcctaataaggtaagtgcttcaggaagtcctttcaaaatgaagtatttttccatagtggaagtggtatctggtcctatcaaaataaggagggttggnaattttcacagcaagtaagaaaaaggccataggatactggaggacgagtccagagttccaggtttggcccctcaattggttcacaaaccagcggtgtgatctggaaaaagtgactatgtctctgaagctccatttctttacggaaaataggggggtctacaatctatgattctagtcaataactgccatttcactacacatagatggcatctcctttaa

SEQ ID NO: 705293 - DNA, 248 bp, Homo sapiens
actgtactcgtccatccggagacagttcagccccatccccttcctaaaaaaacaagtatcagtggaactttcatacatggaagtggatgtttcgaacagcccttttatcagctcccactggagattacattggcaagcagcaagaagaccctgtgtaatgaaatgaaccccctaactggcttacggtgtagctcgagatttccaatttccatgcatgggctataacaggcctggctacctgctgaggg

SEQ ID NO: 705294 - DNA, 187 bp, Homo sapiens
  misc_feature (34)..(34): n is a, c, g, or t
  misc_feature (100)..(100): n is a, c, g, or t
  misc_feature (119)..(119): n is a, c, g, or t
ataccataccagcgctccaccaaaacacagtcangctgctccatagccccagctgatcccccggacacaaactgagttgaacaggtagagacaccatggnctcctcccagctggcaagnagccacccccgaaaccacctccatagctggcagaggagctctgcaggggggggctgctggctcggggg

SEQ ID NO: 705295 - DNA, 688 bp, Homo sapiens
ccagttcctgggtgcacacccatgaggtccccttctcgccgtccgtcctgcatactgtcgatgggtagcccggggccgtttgtgagtcgcccggacctgagaggctgctgcactgggcctcagccagccctccggatgctggtgctgccatcccccttgccctcagccttctggcgatttgtcctccgttgagagccattggagggcccgtcccctgtcggacgttgccgctccccagaagctggaccttcctcctccatcgtgatctccccaggcttcatctcctccatgggccaaccactatcctgcttattagacactcagggtgtcccctacagcagtagctaggtggacgagggagtcacagagggagccagtgggccatgtggggctccatggcccaccaaaaagtgctacagactgcccctgtgtgctcaaggggtcttcgatgtacatgtcctaccttcagcagacacagatatcacgcgcactcggagtgtaaagcccgttcgagtgtgacatctgtggtgaaggcgattcaagcgctgccagccacttggcacggacaccattccgattcacctggcgggtggtgggcggacccacggcttgcccgcgtctgccctcgcacgttccggggatgcgggtgatctggccatcacagtcgggtgccctctggtgcactccc

SEQ ID NO: 705296 - DNA, 1433 bp, Homo sapiens
gcggagtgcaggcataatttctgtgttgatatatctcttttgtctaatcgtagtttgtcccactaatctatcctgatcaagtgccgttctcagaaattgcgggtgtcttcaaggttcttttttatcctcctaccccacatatgtgggcgtgtccatcatacactaggggtgcacacatagggggcattcattcaaaaggggtctcattgcgggggtcataataaggaaatttttatatttgacacgcggaccacgcggggattgtgacccccttggtgctccgcccaatgttggggtttgttccataccggggggagaacaccttaaaaaccctttgggggatatctccaaccccaattgggacaccttgtttaaagcccgttctggaaagggtattgatatgtcaccaagtgtcctggttccaaaccaggggaattgtatgggattgttcaaagcccagtttctgtgtgaagatgatagccttcttttcccccacacagttgagtttgatcgcttctcctataggagggcccctttggggtaagaaaaggtatcatccacgccattcactttgttaggtaagaaagtgtataaaccccgtgtttccccacaaggccccacggttcttgccaaaatgtttctaaaatggtgtttgtgccacggtggtttaagaaaaatggtgttgttgccacaaaatgaacacatgtcccgagtttaatcccccggagtcccacatatatatttctcccctccaactgagagaaaacattttaatgagattcttcttttaaaagtttttcgtaaaaagacacatgtgaattttgtctaatataggagcggagctccccacgggagtttttacctaatataattatgaaattatagaatgagagccacgcgtaaggcttttctctttttttctccacaaatgtgaaaatttcacgccacacaaatataatacacacgggattcttgccccaccccacgagagtttttgaaattaacactccactgtgtgagaaaaatttatgccacgtaatgtgcttataatgaaaaaatttggttcacgggaatataaatgaggcacgttaaagaataataaaccacacttttaatgcacatgctgtgaacttaagttctaatggagatttatattgccacacaaattggcttagtcacccacatgcacgtgtctggtatttttaaaaaatgtggttcaaaataaaacactaagtgagttataaataacactaaataagagaatgagggtggtaattacagttaattcctaaataaataagggaataaatgctgtttaattgtcacagagaaaaagtaaaaatcgtttttttcaaataatggcccttttattttgggaccaggcttttattctccctgattattatttctatttaataactcttttctctcca

SEQ ID NO: 705297 - DNA, 184 bp, Homo sapiens
  misc_feature (45)..(45): n is a, c, g, or t
  misc_feature (110)..(110): n is a, c, g, or t
tgggcaggagcgaggtcttgttccgcttcaacgagggtggtctcncaacacgtgcgcgcagcctgtacatcagggacttgctttagttttttgagccgcggacatgcccncgcattgcttcccgcagagtgcagagacaggaagctggagatttccttttaagtcacaccccttcagacttcta

SEQ ID NO: 705298 - DNA, 85 bp, Homo sapiens
gcggccgcctactactactactactgctcgaattcaagcttctaacgatgtacggggacatgtgtaaggagtctgatcatttagg

SEQ ID NO: 705299 - DNA, 697 bp, Homo sapiens
gccaggttgtgaggaacgcagcgcgccgcgaggaccgggccgtgagcctgcagccgccccgggccgtgacctgcgacctagaccccgactcccttggctcagcccgcgcgccccaggcccggtccggggggcgcgacgggaggatgagcggtgggcggcggaaggaggtagccgcctcatccgcagctggccaacgggggccctcaaagtctccgtctggagtaaggtgctgcgagagctgatgcggcctgggaggataaggatgaattttaagatgtgatctactggttccgacagatcattgctgttggtcctgttgtgtcatttggcggaggtttatggacaatttagcagatgggttctttgggaagtaggcaggatgtcttgtcctgaatccatatgcaaggagttcttgttaacctctaactttggagcaaatataactctgacaaggaagttgatgacgcgcaccggaagtattgcgtggccagggtaggtgcagcattctacagacacgggagagggttctaagtagagacgtgcttatgagcccttgctctgatgtggcactttcggatcaatcattttccgacctggcacacctcgatgtctcgacttgaatgcgctagtactgggcttgcgacattgttgctccgctaatacccagtctcaattggaagcccgtcgttgcatcaca

SEQ ID NO: 705300 - DNA, 204 bp, Homo sapiens
  misc_feature (66)..(66): n is a, c, g, or t
ctcgtgccttggaggatggagacagagattggagtgatgcatcttcaagcctaggaacactaaggnttgctggtaatcaccagaagctggaagaggcaagaaagtgtcctttcctagagccttcagagagagcgcagcctgccaacaccttgattatatgcttcaagcttctagaattgtgagagaataaatttctgttgttat

SEQ ID NO: 705301 - DNA, 907 bp, Homo sapiens
  misc_feature (286)..(286): n is a, c, g, or t
  misc_feature (683)..(683): n is a, c, g, or t
ggttggtgagtgggctcctaccgaccgaggtgtaggcagtcgcggggagctttgcggtgttgccatttgtaactccgagatcctaaaattgctctgtcctgttctctgtctcttctagtgttgggggccgtcccgctcctaaggcaggacagatggtgtgaccgcagataagtaatgacgaagaaatggtcgctgggatgtcgatcagaactctaaggctctcgaactccgttactgcataacacgtggcgaagtactgctctctgagggttacatatgcatgacntctgtaatgcactgatcagcacaagggccacagagccgagacattggttcctatctctcgtctacacaatcttgctccagctttgagcgaagatcttgcaaacatgagagtgactcatgcttagttgttggcttaaatactggtgtcgtccatcatctcaccaggtgtggctaatcaaagtatctgacatcgttgggctaccaagacatgcgtgtaaaaataccttatcaggagtgatgctccactggctgatcatctgagtcctaggtgtactctgaacgatgctagtttaggatagcattgctcagaaccagactgggtggagatacacgtaataccctgtttgcattgctacaagaatgtttcacctgtcaatagcctttaaagccttgcgganaatttttcgcttttaaatatgcatgtgccttggttcgtcaaatcccatcaagccacaccatcttttaattgcaacaagacaacctttgttgccacagtggcaggcgagcctggaaagtggcttgtaccaaaggctcagcgaggcgggggggagggggcccccatgtttggtcgtcctgccccgtcctcaagagccccagcgaaatgtcgggtgcaacgcctgtt

SEQ ID NO: 705302 - DNA, 1044 bp, Homo sapiens
ttgccggtggtccaggtcactatgtagtggagggggcagatagcctcgcgcgaattctggaaggttcttagtctcgacttgaggaactaagtcagaacaccgagagactcctagctcgtcgcgcttcaggtgcactggcggattgaacggagctggcgtcgccatgtttggctgacttggatggcgagcgaggctggtgcaaacaagtgtgcacagtcaagatggtgatatggataagtttgtattttgacttagcctgattatgagagtatcaagcatgtcctggttatgatgctgggaacaatcccatttcctgagggaatgggatagatctgtctacttgtcttattcctgatttcacatgtggagatgccagtatggcaacatcctaggatttgtcacgaatgggaagtcaagtgccatcttcatgaatttcaggtcttaaatctggagacggaagccaacaatccttttggagccatgaatattgtgccgaactccatctgttgctcaggatggaaattgcagtggaattaattcagagagtctggctcaacagactcctgtaggtaatgcttgtgtatcctcagttgactcatttcagtcagttcgacacggaagatgttggaccattggctacaatttggttcatcatatgctgtctctcaggcccagatgagacaagccatctgaaatgtcctttccggtcaaagtgggttctggaactgtataagactcttcgaggacgattgagccgggaaaccctctcctgtgggcgacctagttggacttacattagttttcatggggacaacacgacaggggggcgcagagaatccgcagggcccacaacgatacacggttggacagagggcccaagggcgaaaagacgcgcggagataagtgtaatgaaagaccgggcatgagagacacctcgggaacaggacagcgaaagcgacataagtcgtgcagcaccgcgtactacactagacaggcaagagcgctgtgtcgctcccccccctctgcatcagaggagaaggaggc

SEQ ID NO: 705303 - DNA, 870 bp, Homo sapiens
  misc_feature (39)..(39): n is a, c, g, or t
  misc_feature (42)..(42): n is a, c, g, or t
  misc_feature (44)..(44): n is a, c, g, or t
  misc_feature (49)..(49): n is a, c, g, or t
  misc_feature (73)..(73): n is a, c, g, or t
  misc_feature (82)..(82): n is a, c, g, or t
  misc_feature (86)..(86): n is a, c, g, or t
  misc_feature (113)..(113): n is a, c, g, or t
  misc_feature (118)..(118): n is a, c, g, or t
  misc_feature (144)..(144): n is a, c, g, or t
  misc_feature (159)..(159): n is a, c, g, or t
  misc_feature (161)..(161): n is a, c, g, or t
  misc_feature (167)..(167): n is a, c, g, or t
  misc_feature (177)..(177): n is a, c, g, or t
  misc_feature (183)..(183): n is a, c, g, or t
  misc_feature (187)..(187): n is a, c, g, or t
  misc_feature (196)..(196): n is a, c, g, or t
  misc_feature (224)..(224): n is a, c, g, or t
  misc_feature (231)..(231): n is a, c, g, or t
  misc_feature (262)..(262): n is a, c, g, or t
  misc_feature (271)..(271): n is a, c, g, or t
  misc_feature (276)..(276): n is a, c, g, or t
  misc_feature (341)..(342): n is a, c, g, or t
  misc_feature (416)..(416): n is a, c, g, or t
  misc_feature (431)..(431): n is a, c, g, or t
  misc_feature (438)..(438): n is a, c, g, or t
  misc_feature (678)..(678): n is a, c, g, or t
  misc_feature (760)..(760): n is a, c, g, or t
  misc_feature (868)..(868): n is a, c, g, or t
ctcacctggacccggggactcttcaacgaggggcgctantgngnccgantgggcgagttcccgcgtccctgcncgttccgtngctnagttccacgatacgctcccctgctgcnccgcntgttcgcgggtgggtgggcgcttccntcggctccccgtganantttgcngacgctcccnggcgcngggnatgggcgcngccgccgttggttcccgagctggattcngcgagcngtgcccctgaggccctcggctgctggggtcngtagaagcngcgcnatgaatgatcggagcagttggaggcggacaatgaaggacgatgagaccttcgagatctccattcnnttcgatgaggcaccccacctagacccacagatcttttacagtttgagctccttttggagaaacttcgaggagcntccggaggctgcgtnctccgcnctggctctgatgaacagcgttaagacccagctgcacatggctctggagaggaactctctggctgcagaagcgcatcgaggacctggaggaagagagggacttcctgcggtgccagctggacaaattcatctcttctgctcggatggaggcagaggaccactgccggatgaagcctgggcccaggcggatggagggggacagccgtggtggggctgggggcgaggcctcggaccctgagtnagcagcctcctccctcagcggagtccccgaagaaggcagcccagttagaggaggcggcagaagcagaagggaggtgctagtnggaggcgctttggggaagcccaaggcccgggagaggcagcgagtttaaggacgccgacggggtcctctgccggtacaagaagatcctgggcacttccagaagctcaanac

SEQ ID NO: 705304 - DNA, 188 bp, Homo sapiens
gtcctgaaaaatgatacctgtgtgtcttatgccactcatatactctggaatgctgtaaatcttcgccattgtttactgggttgtttcttattattgagtctaagagtctttacaggtctagaaataagtcctttgtctgtatatgtactgcatgtatatttggagggcgtggcgtgcctagtcctcta

SEQ ID NO: 705305 - DNA, 271 bp, Homo sapiens
gcccccttttcccccctttgccccaggcctcctgaatcagttttttccattggtccttaaatccccatttcaaaaaagtgggggttccccaagttcaatgcttatgaattttaaaacatggtggcttaaaaacggctcatcccaaatggctgtggggtcaagtacatccccaattgtggccctttggacaaatggggggccctgcactcataagggcttccaatgtgctgccccccttttaaaactccccaaaaaattttacttcctgtca

SEQ ID NO: 705306 - DNA, 347 bp, Homo sapiens
ctccagttcatcgctgttctccgtagttgtccgtagccttgatgtcttactaaacacacatgacacacagacacagacacacagacacacacacacacacagacacacacacacaacatatctatattacagacgagggtttgggttttagttttttttttttaaagggtgaggactcaaaaaatcaaggggctagtaaaaacagtgttatgttgggaagcagggtaccccaaaagatttaccctgatatgtcacggcactcccaaaagcacacaagcatatagagatatttgtatccccacacacgcatatacacaaacgcaataaagtgcaggcaggtcccgagc

SEQ ID NO: 705307 - DNA, 143 bp, Homo sapiens
ctccgactacggccgcgggggtctcactttcctaccactgccttcactgcggcctgtgacgacacgacccgcttgggaccccctgtgttgagctagcctagatctctaggcgactgtagggagctcggaccccaaaccatgac

SEQ ID NO: 705308 - DNA, 191 bp, Homo sapiens
  misc_feature (14)..(14): n is a, c, g, or t
  misc_feature (52)..(52): n is a, c, g, or t
  misc_feature (108)..(108): n is a, c, g, or t
atagagagggaganaatggtcagagaagagggccactctgccagatgaggantgaggggaagggcaggaagaggaaccaagtcgtcagagccgggagagccaggaggnctgatgggcctagcagacacagctgaccccaagtgaggggaagtggcctggggtcttagttcagccctgagtggccctggcag

SEQ ID NO: 705309 - DNA, 224 bp, Homo sapiens
  misc_feature (54)..(54): n is a, c, g, or t
  misc_feature (84)..(84): n is a, c, g, or t
gaatcgccgccaggttcattctatctgtacatctcactcaaggaagaaaccccnaaactcctgccataaacccttctgaactcnctgcaccaccccaagcccgacactgtcgggcttttttcattgtgcgagtaatgcgctcgtagccttacacccatgcagtgtggagctgcccatgatcaacatcccaggccagttggccatccgcactatcagcggccgct

SEQ ID NO: 705310 - DNA, 344 bp, Homo sapiens
acgcgcgcggacgagactgcggcaaaggggtaccgggcgcgacactgcgaagcaaggacaggttcaggatctacagtccagaacacgcaacttacagcaaagcccctaacccaggagctggagtggccagaatttgcaaccagcaatctgatcagcagggcgcagggcaccagcatacgtcacattgtgttggacatttaacattcaaaatcaccaatcatttacaatgagaataatcatccacttatatttccataactctctgcaataaagcactttaagttgggaatcaaggatgttggcagacacatgccacttacgtgcggaacaggtgctgaattcca

SEQ ID NO: 705311 - DNA, 310 bp, Homo sapiens
  misc_feature (166)..(166): n is a, c, g, or t
taccccaacgcgctgaatagcctcccaacgcgctgattagcttccccaaagtgctgggattccaaacacttccttttattattgcttcgtctcccagcgagagctgaggccctggggaggcaggcgagtcttccttcttgagaaatctatgccctgtgtccagatntctggggagggacctttggctctcgaccagtgtcctgcacccaggcttcccagaagctcctcgtatctcagttggtgctgaaattgcatgtggggtatgaacgtctgagaattgagattggggcaaccttgctatgagcagagc

SEQ ID NO: 705312 - DNA, 402 bp, Homo sapiens
catcaaataaagaacatttaatcaaaaaaaaaaaaaaaaaaaaaaaaaaaaaaaaaaaaaaaaaaaaaaaaaaaaaaaaaaaaaaaaaaaaaaaaaaaaaaaaaaaaaaaaaaaaaaaaaaaaaaaaaaaaaaaaaaaaaaaaaaaaaaaaaaaaaagggggggccccttttaaaattcccctggggggccccaattttccccccccccctttttttttaaaaaaggggcccttttgggggggctttttaaaacctggcccttggcccttttttaaaaactttgtattgggaaaaattttttcttgggaatttttggaaagaaccctttttttggggggggaaaaatttgggaaaatttccccccgaaattttaaacctttgggggaaattaaaatttttta

SEQ ID NO: 705313 - DNA, 262 bp, Homo sapiens
gtccgagtaaatcaataaatattattgactgggcattgtggcgtcagacctgtggtcccagcactttaggaggctgaggcagtcagatcaccgtgaggtcaggagtttgagaccagcctaggcaccatagtcaaaccctgtctctacaaaaaaaaaaacaattcaaaataaaaatacaaataagccaggcattgtggtgcatgcaaatagtaccagatactaaggaggcagaaggtgccaggccccttgaacgctgaagggt

SEQ ID NO: 705314 - DNA, 403 bp, Homo sapiens
tgagacagggtctccctctgtcacccaggctggagtgtagtcgtgcgatgcaggctcactgcaatctccgccaccctggctccagcaatcctctacctcagcctctcaagtagctgagactataggcatgcaccaccacaccaggctaatttttatattattattatttgtagagatggaatttcgccctgttgcccaggctggtttcgaactaacctcaagtgatctgcctgcctcggcctcccaaggtgctgagattacagggataatccaccatgccggggaagtaaataagtatcttatggtaatagagggctgggattgggttaggtgggggatcatggagcaagattcttagaaaatttgggagaatttattaatcaaaaacacaaatgggggagct

SEQ ID NO: 705315 - DNA, 492 bp, Homo sapiens
gggtcagtgctataaccgggagctggtgttcactgggagacgttgtctattgggcagcaatgtcatggcgggggtagtggtcacactgacggagaagatcccgctgcacactcatcatactccgctaaggttaaactagactcactaggagtcgacgcgtatgacattctctaccagtccagggtgtgttatcatgaaccagtacatcattaactattgcgttggcaatgttgtcagcacagtgaaaagacccaaggcgggtctgtaggcggaggtgagaggggaacaaaatatccaacgtgccaggataagaattagaactgtatgaaattgataaaccagaacatccaagtttcataagataattaggagtactaaatatcctgagtatcttaaatctccaacattacaatgtgctttagtacacataaagtgtctggaaggatacacgagaaatcggtaaccatggctaatatatggggaagaatctta

SEQ ID NO: 705316 - DNA, 1687 bp, Homo sapiens
  misc_feature (153)..(153): n is a, c, g, or t
acttgatcgtgactctccacaaagatcgatcactcatttgaattcaagcacaagcaccacacaggccgttaattcatgaggcattcatcacccctactattatttgataccataactcgatcagatcgatacctagtttagatctgttttacncctaaatcatttgtatccatgccgaacacacccataaactaacctctgctcgcgtcgcctcatagtatatacacataccctaggaacatccgtatcctccttactacgatatcactggtctaatcctcatatctgctctcattctaatccaatgtcgaaacctacttatctacgtatatagcaacactcataacgcatcctattaatacactataatacatacacacgtgtacaacatcgtccttatacatattatgaatccactacaccaactagccgccatccaggaatctaatatgctatacactgttaataatccatatactctacgtccaataaccacacactctatatacgctcacccacctctgcccacctaaataccataccaacacgcgacactgcacagcccaaaaacacaagccacacaacacatacagccctatgcacaacacagacaacagagcccaacaacttaaccaatttccccatcaatcttcatagccacacacccataaccgcctacgcgccccatcccctatcatacacacactctcacccttccatctccgcaccaaccataacacacttctctaaccacacttacaaaccaaaacccaactcccacaataagaccgcccctccaacccttacacacaccccacatcactacactacccttaacccataccaaccttcccttcccaccactcgcccccccacaccgcaccacacctcaactccacacccacccctccaccttgcacgcccccaacacccacaccccttctaccacttacctgcaaccttcacggccttacaaccaccacaactacgccttccccacctaaccctacaaaccacacttaccacctccctactcttaccccgcgaaccctcaccacccatactactcgaacacttcccccccttacacccagtccccccatcgccttcccaaacgacaccccccacactaccgccatcgcgcgcctccaaactcaacttcaccctacgccccgtacaatctaacactcctccaaccacacctcaactcgcacgcgcccaccatcacacaccactcaaactaaaccaccccattccacacaccacttccacatctcccttcacaccaccccccacccttcgcacccaatcaatcatcctcacattaagacccttaaacccccctttatcacctttggctctacttctcatcccccctcaattccaacgcccaccttccaaccctctttctctaacccaaccagcataccccacatctgctccctcacccacacacaaccacggccactcctacaaccatccctctccattcccaccacactcctccaccaacatccacgcccacacttaacaccctcccgctcaatcacacacacccccatctcctcatctccgcacgcccctctcacaaccctttcacacgccgcgccccaccctatctcacaaccccccccccgccaacatccaaccacaatacacaacctgcccacacacactgtcactccgc

SEQ ID NO: 705317 - DNA, 156 bp, Homo sapiens
ttaagaatggggttgtgatacagacgttgatagggtgaatttccagaagttgggacaagcatcttcaagttggcagaatgtgctttggagtcaaaaaaaaagtttaatcgtatcacttactagcaagtcatttcaccttgctgggactcagtttcc

SEQ ID NO: 705318 - DNA, 183 bp, Homo sapiens
ggttttgaaggatgagtgaatataagatggatgtggaggctgcattagtccattttcgtgctgctgataaagacatacctgagactgggaagaaaaagagggttaatggacttgcagttccacatgggctgggggaggcctcacaatcatggtggaaggcaaggaagagcaagtcacatctta

SEQ ID NO: 705319 - DNA, 259 bp, Homo sapiens
  misc_feature (1)..(1): n is a, c, g, or t
  misc_feature (27)..(27): n is a, c, g, or t
ncccattgtttctaaaagcagagaganctattttagtagtcaacagaaggtttagttgtgaattccgattttgtggacaccagatgtgtgcggtgttttgttttctttctttcgttttaatttttttttttttaagacaacaactaaaaagaaaaaaaaaatcccaaggattctgtgcactggaactgtagtggtagggtctcagcattgtaaagagattgttcttgtacaggccttttggctgtttctcttgtatgta

SEQ ID NO: 705320 - DNA, 121 bp, Homo sapiens
aatgcatgatgtcccagacgaacagtacactttgagcgaatttcatgtgagtcttggaactatgcctgcaaactctacgtcattcttagatatattttgatggtacgttgttgcactgctg

SEQ ID NO: 705321 - DNA, 148 bp, Homo sapiens
  misc_feature (125)..(125): n is a, c, g, or t
ctcggtctaaccttgttttggtccaatcatgttgtcaatgatgccacacactggggagagggagatcaatggaaaaccagccaatgctcctcccaatatgaggatgtttgccaatgttccagtgnagctcccagtggaatgtggtctg

SEQ ID NO: 705322 - DNA, 346 bp, Homo sapiens
ccgattacctaaaaatccctgttccccctaaaaatcttgacattagccgggagtagtggcgcgcgctgtagtctcagctcctcgggaggctggggtgggaagatcgcttgagcccaggagttcgaggatgcagtgagctatgatcgcaccactgcactctagcctgggcgacagactgagactgtgtctcaaataaataaataaaggaatgaagtgctgatacatgctataccatggatgaatcttgaaaacattatgctgagggaaagaggctgcctcttgtatgatttaatttacataaactgtctaaattaggcaaatccactgagacggaaagcatattggt

SEQ ID NO: 705323 - DNA, 801 bp, Homo sapiens
gctgactcctctctccgccatggcgtgtgcgtcgcccacgtgatatcggtgtacgtccgacaaagggggagtcatctggcaaaagatgtcactttgcctgctgctattcaaaggctcctattctgaccgagatatagtgaatcatttgttgcacaccaacttgcgcaaaaacaaccgaggacagtcctatgctgtcatgtgaattagcaggtcatcagactagtgctgagtcttgggtgtactggtcgagagctgtgtgctcagagataccccagatgttcgaaggtggtgaggactctaccgacatctggcacacgggtgctttttggaacacgatgatgttcgtgagagtgcccgaagtgtattagcacacaagacatagagacctgtgcgtccgatccggctcatcggtatagttgagactacaacgccgaaacaaacgagatacggtcgcattctcgatgtcctcgctccttgtgctatcgcctcaggctcgctgtaccctagcaactcggtccatgctcgtacaaggggtcgattcctacttgactgaccgttcactgaactgttccttatgagtcagttgatagaactctccagtgtgaacggtctacaatgatagacgcaacagacgcctgaatggagctcctatatagaaaagcgttaagacgcctggaactgatatcaacaacgacggtcgtatgccatctcagtgaactgagagctggcaacaggcaaaatgagagaccgtccccgtatcccaggcgcaggggcccgtggatcattctattaatgaggata

SEQ ID NO: 705324 - DNA, 334 bp, Homo sapiens
  misc_feature (47)..(47): n is a, c, g, or t
  misc_feature (66)..(66): n is a, c, g, or t
  misc_feature (143)..(143): n is a, c, g, or t
  misc_feature (185)..(185): n is a, c, g, or t
  misc_feature (255)..(255): n is a, c, g, or t
  misc_feature (306)..(306): n is a, c, g, or t
agtttgaatcatgcaaagatgctgccacttaaaaacctctttcctanaaacttaaacccctccgancgtggttttcctgtgaatctcagctgggcacgatggcgcctgtcatcccagcactttgggagactgaggcaggtggntcacgaggtcaggagttcaagaccagcctggccaagatggtnaatcctgtctctactaaaaatacaaaaaatagccgggacgttggaggacctgtatcccagctcttggagntgaggagggaatcgcttgactcagggggagaggttgcagtgagtcgagatnacgcactgactccaggctggagacagag

SEQ ID NO: 705325 - DNA, 540 bp, Homo sapiens
  misc_feature (200)..(200): n is a, c, g, or t
  misc_feature (252)..(252): n is a, c, g, or t
  misc_feature (275)..(275): n is a, c, g, or t
  misc_feature (292)..(292): n is a, c, g, or t
  misc_feature (338)..(338): n is a, c, g, or t
  misc_feature (411)..(411): n is a, c, g, or t
  misc_feature (426)..(426): n is a, c, g, or t
  misc_feature (475)..(475): n is a, c, g, or t
  misc_feature (493)..(493): n is a, c, g, or t
  misc_feature (502)..(502): n is a, c, g, or t
  misc_feature (530)..(530): n is a, c, g, or t
tacgcctttctacttctcaatctgatttctatgaggtttttttaaacgagcaatccttggctgcttccttttcttaactctttcagtactgagagcagcccctccacactgaaaacacccagcactgtgacggagtccagcctggttctgggtaccgtgggccctgctcctgcccacttagcgaggcatgggctccttgnctcacctggccccggcaatcccactgaatttctactctggggtgggtggggnacacacttcggtttttttaatgncaattccgttttcatgnccgaatctaagaagccacaacttgctttggcagcttcagggcaggnagccatgattcaatttctcgccttgaaaaaggacaatctgtcctgaaggtgggtctgaccgtcttgcctcttntccccaggaacaagngtgaccttgggttgtggggtcaacggccagtcccggggccctcctgttnttctcgggtttccggaantggagagcntgctggcccggctttggccagacaggtnttccccaaaa

SEQ ID NO: 705326 - DNA, 410 bp, Homo sapiens
cataggtctttcattgcgcacgcaatgcacgcggaatgtgccctccaggagaaattcccgtagatggtcgaggtcgggcccttccagttgatgaggagtgactgaatctcctgtatccggaccgcgtgctcatgcctcctcttcatgtcgttgatgtaccaggccacacaaggtcatggtgtcaatggcatcctccaccacctcaaaagccatcctcttcttcatcaaaatgtatgggcactttcctggagcagcaggtggtacttgaggatgcgctggaacttgcttcagcaggttaggaagcccaagggcagcaagcgctagtagcagctcctgccggtcccgaaaagaaatttggccttgctgcatgtccccgcatgcaattccacaggtgggggccgggtaccgag

SEQ ID NO: 705327 - DNA, 212 bp, Homo sapiens
  misc_feature (141)..(142): n is a, c, g, or t
tgtgtgtgttcttgctgagctatgcggattatatcatgtgccgatgagctggccatgttgaacagatgctggtgcacctgacctctgcatctgccctgtgcagcagctgcctccctgcccaccatgtgatgtgatgtgacnnctctgcgcccatcttgcaatgtgaacccatgctgggtgaatcctctagaatgtctgaccttgcatgtgca

SEQ ID NO: 705328 - DNA, 709 bp, Homo sapiens
gacttgcgctgagctgccttctgctcgatttcgctgctgcctcgaactaagtgaaacttcgtgatccatgtctgagaatacccgatatggtctgagacttcgtatactttcgtcccgtcgaatggctgtcgagagatctgactactggcgatcagaacaaaattccaagatgtgcttccaaatgtacacctagttgtactcatggacgacgtcatttgccggcgaaatttcgtacatgactgtgataggtgtccgccaattatttgactaaggccatttccagtcaagacacttgatcctctcgagttagaagccctcggagattaaggcctgtgtgtataacgcgttcggatacatgaatgtcggacagaagggttgagactccaccggttgctaataatgagcatgttagcttgtcacgcattaacagcactcaacaaggaaacgaccctgagcaacgaaaaaggccggcgtcaaatgggcttgtcccactcatgatcctatcgaagtccttgggtcctgtgaaaagcgttcatatgagacccacgaacgcttgcactcgtggagttagaaatcaggcaatataggcgagtcgaaaggaaaaaataaatgaaaagacagtacagaccgaggacacgaaatagacgacactagttaacaacaagaacgcgaggaacccaatagacgcgcggccagaggcgtacgcaat

SEQ ID NO: 705329 - DNA, 347 bp, Homo sapiens
tgcgcagtggctcatgcctgttatcccagaactttggcaggctgaggcaggtggatcacctgaggtcaggagttcaagaccagcctggccaacatgatgaaaccccatctctactaaaaatacaaagattagccatgtgtggtggcaggtgcctgtaatcccagctactcgggaggctgtggcaggagaatggcttgaacacaggaggcggaggttgcagtgagctgacatcacagtactgcactccagcctgggggacacagcaggacttctcttctttgagcaggcttatgcttgcggccccatttagtgttcaattgcccaattcccccctggcggccgttacg

SEQ ID NO: 705330 - DNA, 155 bp, Homo sapiens
aagggggcgtggacaaccacacgttgatacctggtccgtgccaaaggtgtcctgaacccataaaatccagagaaaagaaaatcgttttaaagggcggaggctggggggtaagttactatgcaagcagtagtgagcaagaacagagaggagcgggg

SEQ ID NO: 705331 - DNA, 925 bp, Homo sapiens
gagatgcgatctagaaatggcgattgtcgaaccggaaagccacccctactcctaatcccccgtactagtgagaaggagaagagggaatctagatcaggaggttgctgaagcccagaacactatattgagtcgatccgcctacaggaacaagatgggcgacgtctgtttcttctcaaacttgatcaatgctatcagcttggcagatgccaatccgtgcgggctggattctccatagttttagtacgtggttggaacgacttttgggcgtcgtgtacaacctatatccatgttgtctaagtaattgaaatagcctcggttagtgacggacctcacatttgattagggatggtatagagcctatgtgggaagatgagaaaaacaaagggggaggacgatggctaatatacattgtagacactacgggcagagtaagtacagtgacctgaatgcgcttgaggctagagacattatctgatgctcttgattggaggaatctctggatgactagagtgatgatggtatgtggtgctgttgtaaagtgttagagctaaaggtgattaggatagcaagatggactactgaatgtgaaacgctgagatagctgttgcacatatgagggagggtataccaggaaggtgtacgaacttcctcctgaggatagtgatgggtatcagatcacaaggagacgtcaggtactcagagcgcatccaacagtgaacactacgtggtgttaagaagacgccttgggatatctcaccagacagtggtcaagacaccggactgggggcggaccgaagcccttcacagcggagggcgggaaacgggaacgactccggtacgaatcacaacacctcgctggcggaatggcgctctaacgacgaaacacaccccgatgcaccccacacaggtcgggccccaagacaca

SEQ ID NO: 705332 - DNA, 816 bp, Homo sapiens
gagtatgtaagttcctgtgctaataagtccacttataaggtaagactgcacacacatatacctgccatgctactgatcactcatcaagtactgccactaatcagtccataactactcttgattcaactgcccgtcggtgggtcagatggactagatcgtacatgatttgtataatgtacatgaggggcgcgtatctttggctcaatagaatagcagccatacatagcattcgactcttctacaagctctcacgcatggtactatacatcattattaactactcacacgccctatccttgtgataatcctactacgccgaaaatgcaatacctgtagaatataatcaaggaatgactcccgggcatgacgcatacgggcacaccggagctgaaatcgctcataggcataatcatatgctatcaaggcacaaccatatgcgcactacggtagttgataagtctatgactcactccacataaccctcgatcatacgcttatcaacagagaagcagtctgtgtcattgatacgtgcacgcacttacattcctcatgtagtactatactgtccataccacacagagtctcaactaggagcgcgatctgagcgctttatgatactctatcaagtactctgcctactaactgctactagttagacgtagcgggtgctttctagaagctgtgcataaactcatctgagcatcacacgataaccctgatgggagcgtgatgtgaggtactaccgggtactcctgatcagatatacttctgcagtcgagacctcagtactacatgagcctatttcctacatgttac

SEQ ID NO: 705333 - DNA, 485 bp, Homo sapiens
  misc_feature (456)..(456): n is a, c, g, or t
  misc_feature (480)..(480): n is a, c, g, or t
ttgtagttgtgtgtggttctcgagtggctgcgcatgtgaacacgtgtgatttctcagtgtactgtactgtgatttgtttttattgcttgttttgtttcccctcagtgtctgtaacccttagcaggctctgacctagtcaggctagaagaagcataaggatcttttattgctttgtgctgggtgagggctggccctaaacatctgcctaatcctttcaacgggcccagggaaaagccagactggcattcatgtccacagcatcgcttaatatcgttggttgtcatccagacacctcaacttgtgctggcagagggaaataagttccttcttcacggatgcatcatggatgggatatttgaaacctgcaggggtggcaggaacttaacacctgtttccatccatcgtggggatgtttaaaggatttggggttaacatggcccaagccggttaaggccnttggggtggggggccatggagganttttc

SEQ ID NO: 705334 - DNA, 612 bp, Homo sapiens
cctagctctatcccagccgctcagtctccactgcgctgtccagcctctggtaccatacctatggcctggctcccccctggccttggagcccggggcccctttcacttcctcagcctcagcaatgttcccttttgagcgtcatggagctggctcgccttaggtctttcgttattccaggctaggtagggctgtgaggaatgcattaagagggtttgccagtttctgagaacctggaggagcatagctagattcagatcctgtctgcctggctgggtccttggcaggttccctgtcctcctgcgtgtaagcttatggggtggtgatgcacaatgactggtaattcactcctagatcgcagcgtgtggctgcttggccaggacagtgatgccgacagggagagcttccgcttggtgaccagagacatgtcccacatggacatataagcccctctctgtcgtactgcgattttttagacttttacttttgaggtccctaggatggaacagttacgtgggagataaggacgtagaacagtttgacacgcgttcgtatacttgggagatttcgttaagcctgccaaccctttcacctgggattgttccggttgggtcg

SEQ ID NO: 705335 - DNA, 353 bp, Homo sapiens
attaaaaaccaaaaattggccaggcatcctcgtgctgcctgtagccccagctgcttgggaggctgaggctggaggatcacttgagccctcaaaaggtggaggctacagtgagctgagattgtgcccctgtactccagcctgggcaacattttttgtagagacagagtctctacaaagaaaagaaaagaaaagaaaaaaattagctgggcatggtggcaaatgcctatagtcccagctgcctgggaggctgaggtaaaaggagtgcttgagcccaggagttggaggccccattgagctatgactgtgcccctgcactccagcctaggcaacagagcaagaccctgttttaaaga

SEQ ID NO: 705336 - DNA, 227 bp, Homo sapiens
  misc_feature (174)..(174): n is a, c, g, or t
  misc_feature (212)..(212): n is a, c, g, or t
  misc_feature (217)..(217): n is a, c, g, or t
  misc_feature (226)..(226): n is a, c, g, or t
agactttgccggccacgacaacgcagtgcaacctgtgcagggtttacaccttccgccagctgctcttcaccgccgccgcaacgagatccttgtgttggaggtccccgcctctgagatgcagcagggactgtgttggttggcatcacgccttgtcatgccagcaccttgacacangctttgcagaggcgccacgttgtcaattgccctccatngactngggggacang

SEQ ID NO: 705337 - DNA, 137 bp, Homo sapiens
aatttcctgtaaaaaatttaaaaactttttcatgaaaatggagttatcagttatctgtttgttacggcatcatctgtttgtaatcattatttcactttgtaaataaaaacccccctttaaacatggccaaaaaaaaa

SEQ ID NO: 705338 - DNA, 356 bp, Homo sapiens
ggcgccgccgccgcctctccttagaggccgccatgacgaccgcgtgcacactcgcagatgcgccagaactaccaccagaactcaaagggcgcgcataaaccgcgcagagcaaactgtgagctctacagcttctacggttacctgtgcataggttactactttgaccgcgaagaaggggctttgaagaactttggcacaaactcttttcaccaatctcaagaggagagaggaacaagctgagaaaccggtgaagctgtggaaccaacgaggtggcccaatatttcttcaagagatcaagaaaccagactgtgaagactcggagagcgggctgaatgcgatggagtgtgcattcttgg

SEQ ID NO: 705339 - DNA, 980 bp, Homo sapiens
cgctcttagcccaacggggcgccttctatccctcctttgtggcttccgcgcggccgacggtggtggttccttcccccttccgcatggccggctgtcattattttgccggttttagcgccacacgcaggaccaagatattgcaacagtggtgggcccgggttttttaaccccgagggcgcacactttctcgggcgcgcccaccactagccccgccctgtccccaaagaggcgccctttctatatcgggggggatacatccctctttgtttttgtccgcccacgaacagtgtgttgttttttccccccgaaatttttttttgggccgcttgttactcaaacctctgcaccgctcggtgccgcctgtccccccccccactttatatgggggggcgacctcgtcgcccccaactcacgggcgtgttgctcgctccgctcgttattaattccctctcgattaaggtcgccacactccttggtgaacaacacactccccctgggtttatgctgtgcactacacggggtgagtcatacatccccctccgggggtcgtcccatcatagtttgtaatatataggagaccccagccgcggccccctattgatgtctctaggcgcccgcttttttatttcgcacttttttgtggggtgtttttgtttttccaccctctcctaccaccgccctccgggtacattctgaggtcttctccttcctactccttttcgtccggccggcggtttttcgcggcgctcaccattgttttggtaggcgccccggcgtgctccccggcggttctaccgtccaattttttgggcgtcgaacatttctcctccactattttgtgttttaccccccccaaatatttctcctttaaaaaccaaaacaacctttgtggtttgaaacacccccccctaaattgtgccttttttaaaatggggttggtaaaatttttttattttctcaatttttgaaggggggtttta

SEQ ID NO: 705340 - DNA, 814 bp, Homo sapiens
tctttttctttccttcccaagaaactgaggaatgttaatatgaaaacatacatcggatatgtgaaaagcacaacaaaattcttagtgtacacagtaaaaaagtaactatataaatgtagatggcatttaggaccacagcttggtggatttgtgtaacgctatgggaataacttgattggtataacgctatttagagtgaggctggaggtggcagcttcacagaactggagaaccaggccaagtcccctccccaacctatttaggtcattcaggacagctaagtcagtatattgagagcaatactagcatacgttcttaatttgttatcagcattgaccatgtggttccgaaggaggcatgctttattatcacaatagttttgattggtaaacccaagaaattactcctgtgtttatctaacttcataatagcaattattgcccgaagctatagtggcatatttacaaaagttcttattactgcgcggactgataacatttcccaacactacttgttgttgaccccaaaatgattgatacccaattctacataaaatatgaagacctatcttttttgtgttaccttcagatgtttccttaaataactcagtttttaagcagaagtttcagggcattaatatatgcggggatgaggtttcaactggacctaatttgcggtcaactggcctcccgggtaggggcttaattttgaacttacttgatgcttttaacaactcaagcgctgttttaccgcccctgggatcggaatctaaatggacagggcggctcccacacaggtataaaaagcctttaag

SEQ ID NO: 705341 - DNA, 1058 bp, Homo sapiens
aatcgtttgcggtagtagtttgacttgtgggtgtttcttatagctgtgtggtgtgccgcgtcgctgacgacgccatgttgggggcgcctgctgtgtgtggtgcgcctttgttgtgcggatatttcccgagcacccgtggggccacccagatgccctggcacctgggaccaccatgttgcgccgggccctgggagaaggtgttgtgggtgagccgcccgaagggcccacagtgcgcgcacccgaggagttgggcctttggaaagtgtgaaccgtgtaggaaccgtttccctctccggagagtacctggaagtgaggggctctccgcgaaatccaggactgtgagaccaatctggttatgaagatggttgtctgatccagatgaccctgagtaacccttcggaactaggtggacttatgagtgaagaagcatatgagaatgaccggaatctattgaggagtgaaaatggaactcctgaattaactagtatggaattaccccagcccgccagagttgtctttaaaattaagtggtggattagaagacctttgaaatagaaaccttttagtattacccgatggggagaaaaaaaactacctgttaacccctgcgtaagtgagaagagaaatcgccccttaactttctaatagatttattagatgaaataataaataatgccgtctttgttccaccaataatccttatgatatttttagacttaggcttttagtgttccagaatattccatgaaattatcccatggtaaaaactagttataaaaattaccataattccaagatacaccattgttattcttaacgcccttatataatattgtgaacattgccaagtatcccataacctggatttgggatgaaatacttaatgatctttcccattggaaataactggaagtgaagaggttttgttgcttgtaccagtgtccagatgaggaaccacccactatcttaattttgcgataccctgccatttgctggtgctatttttataccgtgaagccacagctttgcacccaaataattaaatactttttcgttta

SEQ ID NO: 705342 - DNA, 312 bp, Homo sapiens
gctgagagctagccagacagcactcgacgcatttctcttgggccaacaaccgggacacgtctgccgcgttcggcctgctgcgggggctgtggctggctacaatgttgcggatctgcgcgtcggtagcagcgaaaaatacttctcctctggcaagcgtgttttgacggccggaacatcagtttttcgggccattcagccgccttttgtcgagaacccttcgattggcggaagcggaggcacgttccaggcgaccgagcaggcgaccattgggctggagagttgcaccggaacctatgcctccatgaccatcag

SEQ ID NO: 705343 - DNA, 451 bp, Homo sapiens
tgtactttgggcggcgctgtgttgggacggcgtgtaattggtaggagggaggctgccgctagagtattcttggtctgtgctttgagacggcgctgctttgggacggcgttgaactactggccacttcctttcgtggaaattttctagctttactccctcccggtgaaacactgccaaaactgatggtttccgtcttcaccgtttagggactccaaattgagggtttttgttcccaaggtttctgaaattggggatagctggactcttggtcctcttgtcgctcacgggaagcaagcggctgtctcttcctgttccaggacagcttttgcgacctcctcccctccttcctctttaggcccctccgtcaaggcagagccctctttccctttaatgcctgtgaatgcgggctgtgctgcagcatccccgctgtatcccgccgtcccaaaggggt

SEQ ID NO: 705344 - DNA, 214 bp, Homo sapiens
tcttaagaaagcctaacttaatttggtcccaatttctccacactgtgcccgttcaaacaaaaacggtcccacaccttcacaaccacccctcaaaaaacctttttcaaaattaaaccctcacataaccttaagaagaacatcctccgctttccgtctccctctttgaaacttatcaccacattgtcattaggctacccacctccaattcccaatc

SEQ ID NO: 705345 - DNA, 222 bp, Homo sapiens
tttccaaagcggattgccggccctagcaacacccccatagccagctagggagggacccacctagggcttagctctgttacggcacagaacgcgcttcaaagagctgcgttctgcaaagggaaactgtgctcggggaacaaacctcagcccccatgcggcttggctcagaatcgcagcgcttgcctagttctgatctagcactcagcatctccgctttggaaa

SEQ ID NO: 705346 - DNA, 119 bp, Homo sapiens
ccagggcgtagaatggctaggttggagaatcccagcctgggtcctccctgcctggtgctccactaaccatctggctatgtcttagctttggtcaagtaaaagcaaaggaagctggagtt

SEQ ID NO: 705347 - DNA, 469 bp, Homo sapiens
  misc_feature (262)..(262): n is a, c, g, or t
gggggggcgctgtggctcatgcctgtaatcccagcactttgtgaggccagggcgggcggatcacgaggtcaggagatcgagaccatcctggctaacacagtgaaaccccgtctctactaaaaatacaaaaaattagccaggcgtggtggcgggcgcctgtagtcccagctactcgggaggctgaggcaggagaatggtgtgaatctggcaggcggagcctgcagtgagcagagagggagactctgtctcaaaaaaaaaaaanaaaaaaaaacatgcatgccggctgggtcgagccaactgtcgactgactcaagcttattcatgcagtgcggacgtaaagctaactcactcgatcaatcctacctagagtgagatgacatacaactgactcgccgttgacaaacaacggactgacaggacatggctgtacctacccttcagcctgcttgacatacatctttctgcgctg

SEQ ID NO: 705348 - DNA, 990 bp, Homo sapiens
  misc_feature (577)..(577): n is a, c, g, or t
ggaggtcgtgcgttggctgtgatgatctgtgatcgtgccgctaattctagcctgggcagcagagcgagaccctgtctcaaacaaaaataagagaaaaaaaaaaaaagaacccctggaattttttggggggtcagggggcttgcggggtcgtacggcccaggcgtggcgccgacacgtgggcctgtatgtcttggccacccgtgctgtggggagcaacttttgggtgctactaagacgatccttcttctctgccttgtggctccgccccacatgtgcggacatttcaatgggaggtgtgagccaatcttgtgccctacttcacttttaagtttacagtgtctgccccagtgtgtgtgttctctcctgtgtgtttgtggacaacgtgcccgccgtggtgtgtctattcagagagagagtcttgtgatagtctccccgaggatctggtgtgtttagccgttccacaaattcccagatgcttgcatgcaccacaatttctgcgacgggagggggagtagtggagaacccgtggtgcgagaattaatctgttagccgcctcttcgaggtgccacctgcggtntcttctataccaattttgtatctaccatcatatatatataaacgctggcgggcgggccacagagggtgggccccgtgggggcgtgagcgcatccccccgagtcatcctccggggaggggccgcggaggtggggcaggaaggcatcgccgcttgagtggcctgggcgagagtttggtgcacaggaccggctgtgtggggcgcacgttgtgtggtaaagaggccgcttgttccttttgggcagcggggcggggcgcatcacaacaacaagttcctgtggttcccaggaggcaatgcttttggtggcggcccccaaattgtgtaaggcccctcccctttgtttggcgccctcaaaggtggggccaccttgttttcagccccttatgggagaagggagacccttggtgccctcactc

SEQ ID NO: 705349 - DNA, 323 bp, Homo sapiens
tagtttattctattaactgactgatttgattaatacaattgacaatccagtcatttgcctttacatactgtaaagattgtctgcaaaaagaaaacacatgtaatttcttccaggtacatcttttttaagagtgtctcattggtttaccttcacttgtaccacactctacccctaccacctttttaatttccccaaaggtaatcagaaataccttttgaggaagaattttttgtctgtctgcttgtttactagcactttgccagtctttgtactttttcatattaaatcttaaccacccggtaatagaataactacttctttcc

SEQ ID NO: 705350 - DNA, 117 bp, Homo sapiens
agattacgatgtcaggatctcttcacagaggtcatgattcctgtggcttcgttgtccctctcctctgggagatgggtctgtttctctgatatacgactagtctttggattactcagt

SEQ ID NO: 705351 - DNA, 606 bp, Homo sapiens
  misc_feature (383)..(383): n is a, c, g, or t
aaagataagaaatagtacatctgtatagggcactaacttgcaagtggtgtgggtgagtcagtgagtcagcagggagggaatgtgaaggactaggctattactgtacactactgtagacttacaaacactgtatacttaggctattctgaatttatataaaatatttttcttttttcaataatgaattaaccttcgtttactataacctttttactttataaattaaaaaaaattttaacatttgactcttatgtaacaactgttagcttaaaacacaaacacactgtacggtactgtataaaatattttctttccttatatccttattattaatgaggttttttatgatttaaatattgtaacattttttacttttcaaactntttgttaaaacaaagacacaaacattcacattagcctagggcctatacaggatcagaatcatcacaacgtcactaggctataagggaattttcagttttattatggtatggaactaccatcatatattcccctcggtgatcaaaacattatgcagggcctgactatttataaaggagcctttgaaaagggcatgtaaatggtaatttctggtttcaacatcaa

SEQ ID NO: 705352 - DNA, 352 bp, Homo sapiens
  misc_feature (126)..(126): n is a, c, g, or t
caaccacgtaagatgtaacttactcctccttgccttccaccatgattgtaaggcctccccagccacatggaattgtaagtccaatgagcctctttattttgtaaattgcccagtctcaggtatgtntttatcagcagtgtgaaaacaaactgatacagtaaattggtaccagtagagtggggcactgctgaaaagatacccaaaaatgtggaagcaactttggaactgggtaacaggcagaggttggaacagtttggagggctcagaagaagatagggaaaatgtagggaaagtttgggaactccctagatacttgttaaaatgggttttgacccaaaatgcttgatggtgg

SEQ ID NO: 705353 - DNA, 435 bp, Homo sapiens
tggcagtgtacgcttcctgctgataaggtggcattcaggtctgtgtgccattgccccggcagagtctctgcgttaccaacctcctaggagggcttgctgtgcggagggcctgctatggtgtgctgcggttcctcgtggcgcgtggggccaacggctgcgaggttgtggtgtctgggaccctccgaggacagagggctaaatccatgaagttagtggatggactgatgatccacagcggagaccctgttacactacctacgttgacactgctgtgcgcaacgtgttgctcagacagggtgtgctgggcactcaaggtgcagatcatgctgccctgggacccaaataggtaaaattgggcctaagaagcccctgactgaacacgtgagcattgtggaacccaaagatgagatactggccacaaaccacatataagaa

SEQ ID NO: 705354 - DNA, 277 bp, Homo sapiens
  misc_feature (3)..(4): n is a, c, g, or t
agnnacccctatagtataaatttcaaactccctggcaaggaatgtaaatgcttactcagcttggtatttatagtcatgcgccgcatggcaacttttcaaagacagaccgcgtattcgacagtggtcccgtaagattataataccatattcttactgtatgttttctatgtctagatacacaaataccattgtgttacaactgcctacagtattcagtacagtaacatgctgtacaggtttaccatatagcctgggtacgtgttgggcgataacatca

SEQ ID NO: 705355 - DNA, 2172 bp, Homo sapiens
ggcacgaggccattttcaaacagtccctcctgggagaacacagacaggcagaggattacaacacaaggcagcaagcactgggagacgaaagttttggcatctgttccctggctgtgccaagatgggcgattggagcttcctgggaaatttcctggaggaagtacacaagcactcgaccgtggtaggcaaggtctggctcactgtcctcttcatattccgtatgctcgtgctgggcacagctgctgagtcttcctggggggatgagcaggctgatttccggtgtgatacgattcagcctggctgccagaatgtctgctacgaccaggctttccccatctcccacattcgctactgggtgctgcagatcatcttcgtctccacgccctctctggtgtacatgggccacgccatgcacactgtgcgcatgcaggagaagcgcaagctacgggaggccgagagggccaaagaggtccggggctctggctcttacgagtacccggtggcagagaaggcagaactgtcctgctgggaggaagggaatggaaggattgccctccagggcactctgctcaacacctatgtgtgcagcatcctgatccgcaccaccatggaggtgggcttcattgtgggccagtacttcatctacggaatcttcctgaccaccctgcatgtctgccgcaggagtccctgtccccacccggtcaactgttacgtatcccggcccacagagaagaatgtcttcattgtctttatgctggctgtggctgcactgtccctcctccttagcctggctgaactctaccacctgggctggaagaagatcagacagcgatttgtcaaaccgcggcagcacatggctaagtgccagctttctggcccctctgtgggcatagtccagagctgcacaccaccccccgactttaatcagtgcctggagaatggccctgggggaaaattcttcaatcccttcagcaataatatggcctcccaacaaaacacagacaacctggtcaccgagcaagtacgaggtcaggagcagactcctggggaaggtttcatccaggttcgttatggccagaagcctgaggtgcccaatggagtctcaccaggtcaccgccttccccatggctatcatagtgacaagcgacgtcttagtaaggccagcagcaaggcaaggtcagatgacctatcagtgtgaccctcctttatgggaggatcaggaccaggtgggaacaaaggaggctcagagaggaaagacgtgtcccttctgaactgatgctttctcactgtcatcactgcttggctcctttgagccccgggtctcaatgacgttgctcattaattctagaaactataaccagggctctgggatagtaagagaggtgacaacccacccagactgcagttccctccccaccctctacccagtatacgaagcctttcagattactcatgaaacagggtagagggaaagaagggaagcatggcaaaagctggcctggaagggatagccagagggatagaatgactctctctctacataccagcagcataccaaatgcgttctctaagttcctacctccttgacctgatcaccctccctcctccaaggaagagctcaaagttcccagccaatagacagcatgaatcaaggaacttgcattatatgtgctcttgaatctgttgtctccatggaccattcctcggagtagtggtgagatggccttgggttgcccttggcttctcctccctctactcagccttaaaaagggcttcttggaactttaccagcagcctcagctttacaaatgccttggtatgtacctctggcaaatgccctggtatgtacctctggcaaatgccccaccttggtgatgttgcaacctttccttctgctagggtgtacacctagcctgtgcaggtgtcagccctgctagggagtcactgtacacacaaactctactggaattcctgccaacatctgtcaccctgcagctcctttacagttcaatccaatgatagaaaccatcccttccctttctcccttggctgttcacccagccattccctgaaggccttaccaacaggaatatccaagaagctgttgtcctctctcgaaccctgaccagatcatcagccactgaggccagtggaatttccccaggccttgtt

SEQ ID NO: 705356 - DNA, 742 bp, Homo sapiens
  misc_feature (681)..(681): n is a, c, g, or t
  misc_feature (687)..(687): n is a, c, g, or t
  misc_feature (712)..(712): n is a, c, g, or t
  misc_feature (737)..(737): n is a, c, g, or t
gggagttgatatcttcccatccacccgccgcttctttcctccatctagcgatttttattttttaagtgtctcttcctttttctttcttttcttcttttttattttttatatatattttttggcattgctttgcagatgttgggatgagagtcggagccgaataccaagctcggatccctgaatttgatccaggtgctacaaagtacacagataaagacaatggagggatgcttgtatggtctccatatcacagtatcccagatgccaaattggatgaatacattgcaattgcaaaggaaaagcatggctacaatgtggaacaggcacttggcatgttgttctggcataaacataacattgagaagtcccttgctgatctccctaatttcactccctttccggatgagtggacagtggaagataaagtcctatttgaacaagcctttagttttcatggaaagagctttcacaggattcagcaaatgcttccagataagacaattgcaagccttgtaaaatattactattcttggaaaaaaactcgctctaggacaagtttgatggatcgccaggctcgtaaactagctaatagacataatcagggtgacagtgatgatgatgtagaagaaacacatccaatggatgggaatgatagtgattatgatcccaaaaaagaagccnaaaaanaaggtaatactggacaacctgttcnaactagccagaatggacttgggaanaaaga

SEQ ID NO: 705357 - DNA, 149 bp, Homo sapiens
agtagtacccactcaccagaatagtgtacattagtacccgagaagtggtattacatccctcacactcctcctgccctcccaacttgggggagtctccactgtttattattcacactactgtatgtccgtgtgagcctactgtataacta

SEQ ID NO: 705358 - DNA, 441 bp, Homo sapiens
cggcacgagggcggcaggcacacctcgctcgccagccagctctgggaagttagaccacaggacagtggctgcagctgccaaggagacattttctccccgaccagccaggttccagcgtcctctgccaacccagcttgcgggctccctgtctacttttctccaaacaggctccccggcggtcacgagatttcagcctgtgcagggattgggcgagagttccgcatatggaggcgcccttgctggagcctctcggagtggagcgcgtttccttctccccaccctgcctgagacccttctcagttaaggctttggacagactttgaaagggacccacctttttttttcctccttacagtttgtcaatttttgcccagtgcccataatattgcgtttgtgtcagacattggatttctatgttagatattaaagagcttacttgta

SEQ ID NO: 705359 - DNA, 482 bp, Homo sapiens
cggcacgagggcggcaggcacacctcgctcgccagccagctctgggaagttagaccacaggacagtggctgcagctgccaaggagacattttctccccgaccagccaggttccagcgtcctctgccaacccagcttgcgggctccctgtctacttttctccaaacaggctccccggcggtcacgagatttcagcctgtgcagggattgggcgagagttccgcatatggaggcgcccttgctggagcctctcggagtggagcgcgtttccttctccccaccctgcctgagacccttctcagttaaggctttggacagactttgaaagggacccacctttttttttcctccttacagtttgtcaatttttgcccagtgcccataatattgcgtttgtgtcagacattggatttctatgttagatattaaagagcttacttgtattttcttggagagaaacaatgtttaattattaggataaaaa

SEQ ID NO: 705360 - DNA, 309 bp, Homo sapiens
  misc_feature (137)..(137): n is a, c, g, or t
aaaatttttttttatttttaaaaattggcccatttaagggggtggggctttcttactaaaacccaaataaatttaatcatttcaaaggccttctatttggtttaaaagttgattcccaggagggccatatttcagcnactgtatttcctttttcttgtaatgtaaacagcccaaaaaccatgggctatcatttttgtatcaagttttttgcacaggatgtgacccctgtcagacccctgttcttttctttctttttgtgattgaaaagcctaaaccccaatttaaagtaaatttttgttttttttagta

SEQ ID NO: 705361 - DNA, 1053 bp, Homo sapiens
  misc_feature (992)..(992): n is a, c, g, or t
  misc_feature (998)..(998): n is a, c, g, or t
  misc_feature (1023)..(1023): n is a, c, g, or t
  misc_feature (1048)..(1048): n is a, c, g, or t
agcggggtgcggccgaggggcgcccgggactgcgcggggcgggcggcggcggagggaggaggggagagaggcggggccggggcgggttgttgtgaggcgactgcgctactgccggagcggggcggttatggcggctccatattaacagcctcctcctcctccgccgccgccgccgtctcctcctcctcctcctttccctcccgcccgcgctctaagccatctccgccttcaccctgacgcctgcctcttcccctcacctttccccctcccctgttctaccatgcccggcatgatggagaaagggcccgagttactggggaagaaccgatcggccaacggcagcgccaagagcccggcaggcggcggcggcagcggcgcctcgtccaccaacggcgggctgcactactcagagcccgagagcggctgcagcagcgacgacgagcacgatgttgggatgagagtcggagccgaataccaagctcggatccctgaatttgatccaggtgctacaaagtacacagataaagacaatggagggatgcttgtatggtctccatatcacagtatcccagatgccaaattggatgaatacattgcaattgcaaaggaaaagcatggctacaatgtggaacaggcacttggcatgttgttctggcataaacataacattgagaagtcccttgctgatctccctaatttcactccctttccggatgagtggacagtggaagataaagtcctatttgaacaagcctttagttttcatggaaagagctttcacaggattcagcaaatgcttccagataagacaattgcaagccttgtaaaatattactattcttggaaaaaaactcgctctaggacaagtttgatggatcgccaggctcgtaaactagctaatagacataatcagggtgacagtgatgatgatgtagaagaaacacatccaatggatgggaatgatagtgattatgatcccaaaaaagaagccnaaaaanaaggtaatactggacaacctgttcnaactagccagaatggacttgggaanaaaga

SEQ ID NO: 705362 - DNA, 422 bp, Homo sapiens
tggggtatatgggggtttctatttaacttcccaaaaaaaacgcgttttttggagaaaaaaaaaaaaaaaaaaaaaaaaaaaaaaaaaaaaaaaaaaaaaaaaaaacaaaacaaaaaaaaaaaaaagaaaaaaaaaaaacaaaaaagagaggggggcgggcaaaggagaaacctcaccgacgggagccccacgaaccggcaccagtgttatgtgggaaggcaccgcccaccacagaggggggggcgacactaactaaatagagggagaggagcggaagacggggagacaagaacaaacaaaggcgcgggcggagagagaggaaaaccaagaagagccagggggggagaaaagaaggaggaggagacgaggaccaaacagcgagggggggaggggaacaaaaaagggagaaaaacaccctacaa

SEQ ID NO: 705363 - DNA, 174 bp, Homo sapiens
gcaggactgtgtatctacctttgtcttttcatgatattcctgtcagagttcatttccactcagaaatgttaacgtatatgtcagattatgtgcagggtgctatcatggaaagtgttgggaggccgaaggctaagtgctatatcagtaataattgctcctcgttcagcgctctga

SEQ ID NO: 705364 - DNA, 921 bp, Homo sapiens
  misc_feature (860)..(860): n is a, c, g, or t
  misc_feature (866)..(866): n is a, c, g, or t
  misc_feature (891)..(891): n is a, c, g, or t
  misc_feature (916)..(916): n is a, c, g, or t
agcggggtgcggccgaggggcgcccgggactgcgccgccgccgtctcctcctcctcctcctttccctcccgcccgcgctctaagccatctccgccttcaccctgacgcctgcctcttcccctcacctttccccctcccctgttctaccatgcccggcatgatggagaaagggcccgagttactggggaagaaccgatcggccaacggcagcgccaagagcccggcaggcggcggcggcagcggcgcctcgtccaccaacggcgggctgcactactcagagcccgagagcggctgcagcagcgacgacgagcacgatgttgggatgagagtcggagccgaataccaagctcggatccctgaatttgatccaggtgctacaaagtacacagataaagacaatggagggatgcttgtatggtctccatatcacagtatcccagatgccaaattggatgaatacattgcaattgcaaaggaaaagcatggctacaatgtggaacaggcacttggcatgttgttctggcataaacataacattgagaagtcccttgctgatctccctaatttcactccctttccggatgagtggacagtggaagataaagtcctatttgaacaagcctttagttttcatggaaagagctttcacaggattcagcaaatgcttccagataagacaattgcaagccttgtaaaatattactattcttggaaaaaaactcgctctaggacaagtttgatggatcgccaggctcgtaaactagctaatagacataatcagggtgacagtgatgatgatgtagaagaaacacatccaatggatgggaatgatagtgattatgatcccaaaaaagaagccnaaaaanaaggtaatactggacaacctgttcnaactagccagaatggacttgggaanaaaga

SEQ ID NO: 705365 - DNA, 133 bp, Homo sapiens
ggggccccccccaaccttttcctcaccccctcccccccccaggcccgactccagccagggcctccctcccccccagggcgcccctcatttcatttcctttaaggggaaaatatatatctatctatttgaggga

SEQ ID NO: 705366 - DNA, 883 bp, Homo sapiens
taatattttgggtgataaggaatagtgtaaggagtatggttttcattggtttggaggttagttggattagtcattgtgggggggtgattagtcggtgtgttgatgaaatattgggatggtggggtgatcaataagatgggggaaataagaatggatcagtactggcggcgggtatggcctaagagattggtgggggtgcaattagaatagaaagcagaaccagattttacgttccatatttggtgttcctccacgggtttggttcatacattcttctatcatattattaatgggagcttgggagtagacggcgatgggtaatgtgtggcgtcacggtttgtgtgctgttataattctatttttaatgtatgggtgtagatgagagtagacaatatgttgtacaggagatgttatgtgggggggtacatctatgggtgggcgccaatcacggagatgtaatatatacgttagggggcgcataggagaagtaagtgttacaaagggtaaattgtaacgttaagttctaagagccagataattgtcgtgtgtgacagattgcagcacctgatgtagtgtgctagggcccaaccctgattttgcttcgacaagtgcgcgcaacagacctagtattggcaactcatggcccaataatgggcgctaccaaagggacaagtggggatgttagaagggtacatggagaaagtaagcctactacagtgaaccaggcggaaagaaatataatccccttccaagggcaatagaacggaggaagcaacagaagaggggagccgaaaaacccaggtatcccaaaaaactgacatggggaacggccgaaaaaatatatcaggggaggaacgagcccaaaggccaaaaacgggcagac

SEQ ID NO: 705367 - DNA, 1081 bp, Homo sapiens
agcggggtgcggccgaggggcgcccgggactgcgcggggcgggcggcggcggagggaggaggggagagaggcggggccggggcgggttgttgtgaggcgactgcgctactgccggagcggggcggttatggcggctccatattaacagcctcctcctcctccgccgccgccgccgtctcctcctcctcctcctttccctcccgcccgcgctctaagccatctccgccttcaccctgacgcctgcctcttcccctcacctttccccctcccctgttctaccatgcccggcatgatggagaaagggcccgagttactggggaagaaccgatcggccaacggcagcgccaagagcccggcaggcggcggcggcagcggcgcctcgtccaccaacggcgggctgcactactcagagcccgagagcggctgcagcagcgacgacgagcacgatgttgggatgagagtcggagccgaataccaagctcggatccctgaatttgatccaggtgctacaaagtacacagataaagacaatggagggatgcttgtatggtctccatatcacagtatcccagatgccaaattggatgaatacattgcaattgcaaaggaaaagcatggctacaatgtggaacaggcacttggcatgttgttctggcataaacataacattgagaagtcccttgctgatctccctaatttcactccctttccggatgagtggacagtggaagataaagtcctatttgaacaagcctttagttttcatggaaagagctttcacaggattcagcaaatggtatggtaattttaatcttactgtggttcatatgtgaatgatatcttaagctactattaaacacttcctaattattaaatacaaaaacattcttcaatttaattttaaaaactatttgtaagtaggtatatttatatacaatcctgttttctgcaaccactcttacatgacagttatgtgctattgcattatagtaaattagcctttattttgacttaaataacatgtaataatatacatgtaataagagttatttcgtatgtttattgttccaggaaaaaaaaa

SEQ ID NO: 705368 - DNA, 1151 bp, Homo sapiens
  misc_feature (1090)..(1090): n is a, c, g, or t
  misc_feature (1096)..(1096): n is a, c, g, or t
  misc_feature (1121)..(1121): n is a, c, g, or t
  misc_feature (1146)..(1146): n is a, c, g, or t
agcggggtgcggccgaggggcgcccgggactgcgcggggcgggcggcggcggagggaggaggggagagaggcggggccggggcgggttgttgtgaggcgactgcgctactgccggagcggggcggttatggcggctccatattaacagcctcctcctcctccgccgccgccgccgtctcctcctcctcctcctttccctcccgcccgcgctctaagccatctccgccttcaccctgacgcctgcctcttcccctcacctttccccctcccctgttctaccatgcccggcatgatggagaaagggcccgagttactggggaagaaccgatcggccaacggcagcgccaagagcccggcaggcggcggcggcagcggcgcctcgtccaccaacggcgggctgcactactcagagcccgagagcggctgcagcagcgacgacgagcacgatgttgggatgagagtcggagccgaataccaagctcggatccctgaatttgatccaggagtagagacaaggtcttgctatgtttcccaggctggtctcaaactccggggctcaagccatccgccctccttggctcccaaagtgctgcgattataggtgctacaaagtacacagataaagacaatggagggatgcttgtatggtctccatatcacagtatcccagatgccaaattggatgaatacattgcaattgcaaaggaaaagcatggctacaatgtggaacaggcacttggcatgttgttctggcataaacataacattgagaagtcccttgctgatctccctaatttcactccctttccggatgagtggacagtggaagataaagtcctatttgaacaagcctttagttttcatggaaagagctttcacaggattcagcaaatgcttccagataagacaattgcaagccttgtaaaatattactattcttggaaaaaaactcgctctaggacaagtttgatggatcgccaggctcgtaaactagctaatagacataatcagggtgacagtgatgatgatgtagaagaaacacatccaatggatgggaatgatagtgattatgatcccaaaaaagaagccnaaaaanaaggtaatactggacaacctgttcnaactagccagaatggacttgggaanaaaga

SEQ ID NO: 705369 - DNA, 715 bp, Homo sapiens
ggtgaaaccccgtctttactaaaggtataacaaaattatccaggcatggtgatgtgtgcctgtagtcccacctgcttgggaggctgaggcgggagagttgcttgaacccaggatggcggaggttgcagtgagccgggatcgccgccactgacactccagacctgggtgaccagagcgagacgtccatctcaaaaaaaaagaaaatgaaaagaggatcatctgctgggggccgctgtggttcaacactgtaatcccagcacttttggggagaccgaggttggagcaacgactcatgcctggaagtgtcaagagaacattctgaagacgtatgccctggccccatcaattgggtatgcaaaccccgacgctgtacttacctaaaatagattatctgaacaacttaaggcgtgggggtacgatgggttgaaacattatgcactgtgaatcccatgcttacattcgtgggcaaggccatgaaggcacaggaagatatacgcttctgaaacccccgagcggcagtgttgggtacgggattggccactgttagagacccggaaggtatctacgaccccagatttgcagcttcgcagaggcctgcggaggagccacagaagctgggacaatccgatcttcagaaaaaacaggaacaacagagaaacaaaagtgcgtcgggcgcacccagggggcgcaagtggtggaaactccagaaccctag

SEQ ID NO: 705370 - DNA, 550 bp, Homo sapiens
tcatgtgtactataaaagaaactcattagttgcttaattacgacagtaaaatagcagcaagtaccaatgacatagtgcatcactcctatctaagacaagttacttcatttacatcagagttagaaatgttaagactggattacttgaatacttaaatatagctcgaatcactggttagatatggacgtatttgcccaactgtacatcagggaggagtgctttcattagtttcagaaaatgcagaccctcagacagccagcatgaccacaacactgagcaataagagaaatgaagcatttactttccaagcatttgccacaagaaggtaatggagtcttaacatatgtggtagtctcttccctccataagttaagggttgtgctttgttgaggcatttcagagaaattatttggcatgccactagtgatacttagggtcatgggtgtaggggatgattcagtagagctagtgaggcttgtgtatgtgaccataccatcttggagatgaatagtagagttgcagctgctgcttcatgtgaatgatagctctg

SEQ ID NO: 705371 - DNA, 818 bp, Homo sapiens
agcggggtgcggccgaggggcgcccgggactgcgcggggcgggcggcggcggagggaggaggggagagaggcggggccggggcgggttgttgtgaggcgactgcgctactgccggagcggggcggttatggcggctccatattaacagcctcctcctcctccgccgccgccgccgtctcctcctcctcctcctttccctcccgcccgcgctctaagccatctccgccttcaccctgacgcctgcctcttcccctcacctttccccctcccctgttctaccatgcccggcatgatggagaaagggcccgagttactggggaagaaccgatcggccaacggcagcgccaagagcccggcaggcggcggcggcagcggcgcctcgtccaccaacggcgggctgcactactcagagcccgagagcggctgcagcagcgacgacgagcacgatgttgggatgagagtcggagccgaataccaagctcggatccctgaatttgatccaggctccccggcggtcacgagatttcagcctgtgcagggattgggcgagagttccgcatatggaggcgcccttgctggagcctctcggagtggagcgcgtttccttctccccaccctgcctgagacccttctcagttaaggctttggacagactttgaaagggacccacctttttttttcctccttacagtttgtcaatttttgcccagtgcccataatattgcgtttgtgtcagacattggatttctatgttagatattaaagagcttacttgtattttcttggagagaaacaatgtttaattattaggataaaaa

SEQ ID NO: 705372 - DNA, 777 bp, Homo sapiens
agcggggtgcggccgaggggcgcccgggactgcgcggggcgggcggcggcggagggaggaggggagagaggcggggccggggcgggttgttgtgaggcgactgcgctactgccggagcggggcggttatggcggctccatattaacagcctcctcctcctccgccgccgccgccgtctcctcctcctcctcctttccctcccgcccgcgctctaagccatctccgccttcaccctgacgcctgcctcttcccctcacctttccccctcccctgttctaccatgcccggcatgatggagaaagggcccgagttactggggaagaaccgatcggccaacggcagcgccaagagcccggcaggcggcggcggcagcggcgcctcgtccaccaacggcgggctgcactactcagagcccgagagcggctgcagcagcgacgacgagcacgatgttgggatgagagtcggagccgaataccaagctcggatccctgaatttgatccaggctccccggcggtcacgagatttcagcctgtgcagggattgggcgagagttccgcatatggaggcgcccttgctggagcctctcggagtggagcgcgtttccttctccccaccctgcctgagacccttctcagttaaggctttggacagactttgaaagggacccacctttttttttcctccttacagtttgtcaatttttgcccagtgcccataatattgcgtttgtgtcagacattggatttctatgttagatattaaagagcttacttgta

SEQ ID NO: 705373 - DNA, 860 bp, Homo sapiens
tctgtatcacaaaaaaaaaaaaaaagaatagattcggggtgctcttactacttatggaagggtgagggataagtaagttggcttgaatgtagtaattacttcattatgtgtgtatatatatgtttatatcaaactatgtggtgtaccttaaatatatatataattttaaaaaatatgggaactctttcatcaccacagagatctccctcatggctaccaaaaagaaatagagtaatttaaatttggagattaaactgggaaaagggatattttataaagcaactagtggaccctggtattattttaaaaaacaaagaaagggggggtagatggcttaataaatctctggtatcactagctaatctggcttatggaatcttactaaacttccatagaatactattcctttcctcttataaggttgggggagttcataattgggacacaaaataaatgtaaatctatacataataatagtaacagctaaataattaagggaaggcctcctatgtgccagaacccggttctattacctcatggcatcttcacctcaaaccctgtgaggcaggcatggttatcctctccatttacaattgagaacaacctgtgtatttcactaatatatccttggtcaaggtcagtatgggtccttaaaaatactatgtaagtggaaatactggggtaatccggggaaagattactactacgtgacaccagaaagctcatcctttcaaatcccatagagattcagtggtggaacattcttttggaacaagatactgaagagcaatccagtgccagttaatatgggatccctaatacaggtccgatagacaccgggagcaattagcgaaagaatg

SEQ ID NO: 705374 - DNA, 265 bp, Homo sapiens
cttgctgtctgcagccccctctcggcaggcattggctcagcccgctgagtgtggtgggtcgtgggccagtccccgaggagctgggcccctgtaccaggcacacatggtccggaccacacccagcggtcccccgcacagccacccgtggggtgctgcccttatgcccggtgccgggcgaccaactccatgtattggctgttagtcttgtgattgttttgtatcaagaaatgattcaaaatagcatattaacaaccccaaccgaaaa

SEQ ID NO: 705375 - DNA, 371 bp, Homo sapiens
gggcctgtaaagaatcgtgtttgtacaggaccacgaagctcccatttggtagtggaaaaaccctcaaatatttcctatcaacagatgtgtgtgctagagaagaggaagttgtggaaaatatcccagtgatcctacaaaacattctctgtgttcctagctagggttttttttttttttttttttttaaatctttgtggcctctgagaagtagacttcttcaatttctggaatttgggtggccaaaaactcataaaggagagactcactcagataattccagtgactttaaaaagcaagctgagcattctcattcataaatgacactgatttacactgtggaaaatgtggtaagtacgtggggtacctggaag

SEQ ID NO: 705376 - DNA, 87 bp, Homo sapiens
ggttttacttatttgtaccatgtgaaactgaacaacactgtgcgcaggactgcgccgagcggccgcttcccttctgtcgtcttctcg

SEQ ID NO: 705377 - DNA, 1481 bp, Homo sapiens
actagttctagatcgcgagcggccttcctttctccaggaccaataaaatttctaagagagctaaaaaaaaaaaaaaaaaaaaaaaaaaaaaaaaaacaaaaaaaacaaaaaaaaaaacaaaaaaaaaacaaaaaaaaacaaaaacaaaatacaacaaaaaaaaaaaaaaagagaagagagaggagcacgccgaagcagggtggtgtcatatctagcgagagacttctaaaagacggccactacgagatcgcgacacacaacgggtgagtgtgtcgattgataagaagaggcggctctctctctttcttgatgatgcagggacagaatagataagccagtggaaaactacaccaccagcagcgcggttgatgtgactagcaaagcacaatgagtgatggcagcatagaaatctcatcatagatgaatggcgtatacatactttatctaatgaagaggcggagcaactaattcaaaaataaatgagttggtggagaaaaaaataacatagaatgaaattacaaaaaatcactttactatttctttatactctctcataccagcatcataatcacactatataatcaacatacccaatcaacactactagattcctcactcatctatacatcagatcgactcctacatttcaaaccacctagagacaaaacataatcactcatcaatagataatataaactgatcacaaatacatattggttatgtaacaaaaaaaaaagaagtatagataatatctacatatactgataatatcacaacacattaaatcattatctatacaaaaaatcatatatatccatataatagaaggaaaaacacgacaatcataaacacacaaaatcaaacaaacactacaaaaccacaaacaacaacatacacaccgaaaataacacaacataacatatcaactaaacaaataaaacaacaaattaataagcataaaatactatatacgaaaacagtccaatgaataatatacgctaacaactatcaaatagctcaaaaactcaaaacttcatctaacaagacaaataacaaatagataccaacaaaacttacataacatcaagaagttaaagttattacgatacactaaactataaagagaataatatcataaactacgtaaagaatacaactacatatacactcaccacacccaatatgtactacatcactactatcagtacgtcctaaaaatcaaaccaaacaacttatagcatactatgccatatacacaataaccacaacatcctctcaacacacaccaacaccacttcatctaccctactaagcgtaacgtacaatcttacgaccgataagatccaagactgaacccaacatatgccaaacaataagtcaccgagctacgaggatctacgcatgatacaacactaagcaaagactaacaatatcaagacatacatagcctatcatcaatcacatacatactcaccagcaat

SEQ ID NO: 705378 - DNA, 150 bp, Homo sapiens
cccacacctgttggtgatgggttggttggttggttggttggttggttggctggttggttagctgcagtttggggactgcttgtttttattataagattaatgggtcttacagcagaggtcagacaggtatgggcatctttaaataatttc

SEQ ID NO: 705379 - DNA, 1285 bp, Homo sapiens
  misc_feature (183)..(183): n is a, c, g, or t
  misc_feature (478)..(478): n is a, c, g, or t
  misc_feature (540)..(540): n is a, c, g, or t
  misc_feature (924)..(924): n is a, c, g, or t
gcgggaggtgcaggtcctggtgctctgcatggtcgagggctcatgctccatggcgtcctgtgcatggacgggccatcgaggtctaaacaggtactgctgggtcgggacggggtggtggtcgtgatcgctgtgaagagcattcacatgattgttctggtcagattgaactaagcgaggatagancaaggttgtgaacgtacccttgggcatttagcgtaccgcagaggtcggtactgtacagcaacacaaagcactctgcgccggaggaccgctcgtaaccatcgttccgtggctcccgcagaccgtacctcttactgggcgagacccagtagcgacggtactcgcttgctccacgaagatacaccaatgggatggccatggctggatgctggatgcgttactcaaatggtggtctctgacagtggtatccccaaccgtcccttagcggagcagaggaaacacacacagacgcgatcgngtgcgtgtaccgtgttcttgtcaccctgcaaggcggtccgttcgtacggtcttcgtagatgnaccctgaaacaaaggaaaaagggttttgtggacgctatctgcctgggggggggcctgcccgtgtgggcgtacatgcgggaagcggggtagagcggccgtgggggggaatagttaaaaccaataagagggcccaagagttcggaactggagagcccctaaatcccccatagggggggatgggcccaggccaaaagagaagaggccacaattatgtcacaggaacagacgcagcgggacagaggcaaatacgctgacataaaacacaaggggggccaccagggcaaaattccaccaagacggcgaggcacttttcgccattggaacatggcgccggtgcacaacagggtggcaaacagatcggcaagagggtctcccaagcatatngcaccacggcaacaacgggtttagcgggcaagggcaagcaggggaaaacacagagacatatcttgggctaagcaggagaacgcagtgttagaagccgacagacaaacggagcacaggggaggtatacacctaccgaaacatgggaaatcgccgccaaggcggtggggcaggcattacccacttgggtcggactttacatatgggaagggacgaccacgccaggaattacacacaacaaagggacaacctagagttacgcgatagacttatgtcaacacgcgtataccaaagttggacgcacgactttatcagggagacgacctgcggcagcgccgccgttattacccactttacacaccaa

SEQ ID NO: 705380 - DNA, 462 bp, Homo sapiens
gccatcaccgcgcggccgcgcagcggacaccggtgcgtacccggcctgcggcgcccggcacggtgagtccccggccgaagcccaggagcgcctctgacccgctgcgccggcggctgccgccccgccccgccccagcggatcttgcgcatccgacgtggccgctcgggggcgaccgggaacccgaggccatgtcccatgaaaagagtgggtgtctcggggacaagtatcctccccccaaacccgaggatatcccgggggggcccagactacacgatgcacacacatatgatcaagacatcccataccatgagggcactataacccaacagagccccataagcgagaacacaaccaaacaccaacaaaacagaaaacacaaaacgaacacagaagtcgaacagacaaaaacacaacaaacacacacaaacacagccagacaataatagacaatacaaacgcaca

SEQ ID NO: 705381 - DNA, 296 bp, Homo sapiens
  misc_feature (90)..(90): n is a, c, g, or t
  misc_feature (99)..(99): n is a, c, g, or t
tggggctgggagtagttgtctttcctggccctaacgttgagcccctggaggcactaaagtgcttagtgtacttggagtattggggtttgnccccaaacnccttccagctcctgtaacaaactggcctggactgttttctttcggctccccatgtgtcctggttcccgtttttccccctagactgtaaacctttcgagggcagggacccccccctgtactgttttgtgtttttcccagctcctcccccaatgctgaatatacagcaggggctcaataaatgatttttagtgccttta

SEQ ID NO: 705382 - DNA, 382 bp, Homo sapiens
gcggccgctactactactactaaattcgcggccgtcgactagagggtcagcaaacttttttgtgtaaggggccagagaataaatattttcagggctgggcacggtggttcatgcctgtaatcccagcactttgggaggctgaggcaggtggatcacttgaggtcaggaattcgagacctgcctagccaacgtggtgaaatctcatctccactaaaaatacaaaaattggccaggcctggtggcgggcgcctgtaatcccagctactcgggaggctgaggcagtagaattgcttgagcccaggaggtggtgggtgcagtgagccgagatcacaccactgcactccagccttggtgacagagcgagactttgtctccaaaaaaa

SEQ ID NO: 705383 - DNA, 229 bp, Homo sapiens
  misc_feature (27)..(28): n is a, c, g, or t
  misc_feature (45)..(45): n is a, c, g, or t
  misc_feature (161)..(161): n is a, c, g, or t
ttataaaataaaaaaaaattaaatatnnaaattaaaatatatatnaataaatataaaataaatatcctatacttactgctatatgaaaagcaatttacctgcaaccagtaaggacaactttgatatgtgcagttgaagtttcacatctagcaaactccttncagctgaaatcaagggaagaaatggtagaaaacctcctgctgataccaagaccaaggaacagcacacc

SEQ ID NO: 705384 - DNA, 1289 bp, Homo sapiens
ggaggatggcggacgccggtgttcgccgcgtggttcccatcgacctgctatcccctcgtgctcggcttcctgcgcgatagaccaatctcgtcatagtgctggccaataaggttcgtcacagcgacaggagctacacagcaggatgccaatgcctcttccctcttagacatctatagacttctggctcaacaggtctgccactgttcccagagcgaaacgattacagtgctaatctggatccatgtggtctaagaaatgctaagaacaaggccatcatccagtgtgacagctgagtgcacacgcagctgcaggccggcagcgcacggacagcttccacacggggccctcccagccaacacgtacacgtgcttgctgtctccctgcgcaatgctcacgtctggctcgtcgccgtccctgtgcgcaactgcctgcctcgccctcatacggccactccacacaccaaaccttaggccaactgctaagcctggacaaacaagttacccacacctatcaactgtcactccacctcaaatgcaaccgccacaggtaccccacacacacccaacacacccacgcccactatgctcaccatacaaatgcaggcacctttaacaccgccccccacatacaccccaacacacaggccacgtacccaaaacagaccatttccatacccattacactgaccaccggccacaaaaataatccctcccatcaccttcaccttgcacctatccatcgaccctacataaagtactctccaagcacgcgccaattccaataccccaaccatatcactccaactcctaacaaactccccaaaacatgaaattaacacaacacacttgctagaaccaacttaaacacaggccatttccaagcacttcaaacatcccactctttcacctcactactcacaaaacctccgcccaccacacctaccccactatcacaatggtagctcaccaaatatcacattataacgacacccccaaacatcaaccacacacactccacttcaacaaagacaacacaaattcatgataaccccctccacacattcacaccctcctacacgaacgactctaacacggcccactcaacaccacacctccacccaccaaaacacctcttaactccccatccccaaccccacaattccactcatctctctcaatacacccctcaaatctcaccactccacaccatataccacccatcaccaactaaatacaacattataccccatagcaccacaaatcacatccaacaataaacctactcattat

SEQ ID NO: 705385 - DNA, 631 bp, Homo sapiens
gattcgagcaattgatttttttttaaagaaatccatgccaagagagaacgatagacagggagggagcgagagagaaagacatggtaaccatgttctagcagccaaacataggagaataacttggcacaacttgatggttttttttgtttctttgcaaagggacaatctatatgctaccactaaaaggtatcttcctccaaaagataccatttgattttcgaaaacataacacacggttagtcctctacttcatggctggaggaggtatacggggtaacggatgaaaaaaatgtagaggaatttgagaaaggggttccctttatcgaggaagaccacagggtgctggagggcagcacatgtactgggcaccaggcagccagagccccaggatgaagaagcacaccacctagatggccatgctgcagagaagcttcagaggcgaatgaacgttccccaggtagtgaaaggtgcttatctagatcgtctctcgagatagctgctggcttgttgcaggcgctatatgcaaatccagaatatgagccagtttcggaaggaaacggaaatggttcttcacttttataaatccatcaccagggccctcatggccttattttattaataaccgaagccg

SEQ ID NO: 705386 - DNA, 396 bp, Homo sapiens
  misc_feature (383)..(383): n is a, c, g, or t
cgcgttccgaagcgcacgatcacaggcgccatgccggcgccgagcagggtcatgatcaggccgaagatcttgctcagcccggcgatctggtccttggtgaaaccctggtcgatatagaacacgtggccatgacgcccatcaccgtgtcggacatgcgataggtggcaatcagcccgagcagcagcagcgcctgccaacggtagtgcaggataaagtcgttgaccggcgtgagcacgggcgcgaggccccggcggcccatggctgagaggcacagggtagtgaggatatatagaggatggcgcgcaggaacgcgcggtcttccatcagcagttcccacaaactcacgccctggaacagcacgctggcgaagtggtgttgtacangcgtccgtagcgg

SEQ ID NO: 705387 - DNA, 647 bp, Homo sapiens
tggaagaacaaaaataaaactgtaaatagaaattccacaagaaaacaattgcagggaaaaggggctctggtgtttctttatatgcattgtaaattaacttaaccatgtacatatattaattaaaaagttcttttaagttccacaagaaaactatgccagggaaatgggttctagtgtttcttaatatgcttttgtgaattatttgaatttaaccatgtatgtatattaatttgaaattttttaaatgtcaaaagttatctggatagcagaattatgactatattattttctatatagcaaactcagataaatccttttaaaattattgtaattactatctgaaattaaactgctatttagaatataaacattggccaggtacatatgtctcaaattcatttttttgagaatctgccttagtttcatttctatgtcatggaaagagccattgggggaaaaaggttgacagaaatgtactttttctcctctgtagctctttatttgcagttttatgctctaagacttttcccttttatctgatctctggcagcttgtttatcccaaccaattatgcttcatgctatgagagaaaataccatggtgtctatgtgatagcaatataactgtttaaaaatcacatatttcct

SEQ ID NO: 705388 - DNA, 1150 bp, Homo sapiens
  misc_feature (613)..(613): n is a, c, g, or t
  misc_feature (655)..(656): n is a, c, g, or t
  misc_feature (678)..(678): n is a, c, g, or t
  misc_feature (684)..(684): n is a, c, g, or t
  misc_feature (695)..(695): n is a, c, g, or t
  misc_feature (697)..(697): n is a, c, g, or t
  misc_feature (699)..(699): n is a, c, g, or t
  misc_feature (711)..(712): n is a, c, g, or t
  misc_feature (715)..(716): n is a, c, g, or t
  misc_feature (721)..(721): n is a, c, g, or t
  misc_feature (724)..(724): n is a, c, g, or t
gatcacataactggatcgggtgctcctgatgacatcccaaccttaccaagggcttcggcatgattgggcccaaggacttcttcccacttctggacttgtgccatatatgcccagagacacactgcacctgatcatcgccacgcgctgcagagatgcagacgtgatgtcagcctctaccgccccgactgaaaatgctggcattttggagcaaagccggattccacacctgcatacctacttcccttcttatcctgtccagagccacccctagctgtcccccatgagatgaagaaagagctcctgagcagcctgactgagtgcctgacggtggaccccactcagtgccagacgtctggaggcagctgtaccctaagcacctgtcacagtccagccgttctgctggagcacttgactcacgctcctgggagcagattcccaagaaggtacagaagtctttgcaagaaaccattcagtccctcaagcttaccaaccaggagctgctgaggaagggtagcagtaacaaccaggatgtcgtcacctgtgacatggcctgcaagggcctgttgcagcaggttcagggtcctcggctgccctggacgcggctcctcctgtngctgctggtcttcgctgataggcttcctgtgccatgacctcnnggtcacacagatccttccaggnctcccnttactggccgntngnttcgaatcatcnnggnnttctntancctgctaagcccaagccataccgcctggttgatacgcccccaacaagtggcattccctaaacattcaccgtaaaccgaagggcttccctttcggccaaactggggggccaataaaccgactgggcactttaggtggaccattttgggagcgggcggggaaactggaatccgaacccttggggccccctggcatactgagggctcccaacctggctcaccgtggtgcggcccagcttgcagctggcctgggctcacaccaatgccacagtcagacttcctttctgcccactgtgcctctcaccttgcgtggattaggtgacagtctcaccagtctctctcagaaggatacagatccagcataccccgattccgtgaatcacgctactccgctatctcgagcagagctgcccctgcaataccaccaga

SEQ ID NO: 705389 - DNA, 88 bp, Homo sapiens
  misc_feature (34)..(34): n is a, c, g, or t
ttttggctaatcaatggagggggagatgagtaanacaaaaaaaaatgaaatcttactaattcattattgaataaagaccacttttatc

SEQ ID NO: 705390 - DNA, 200 bp, Homo sapiens
  misc_feature (190)..(190): n is a, c, g, or t
ctggctacttgagatccaacgaccgaagacttgacatatctcataggtgcctgtccttgtcttggcactgtctgagcatggcagaagtgctcaagtcagcacttcacattcatctcattactcttgaggttcccaggacttgagcacctcggcgttggtagggttctggcccaggtgccctcatcacatncccaacactg

SEQ ID NO: 705391 - DNA, 598 bp, Homo sapiens
  misc_feature (10)..(10): n is a, c, g, or t
  misc_feature (13)..(13): n is a, c, g, or t
  misc_feature (57)..(57): n is a, c, g, or t
  misc_feature (73)..(73): n is a, c, g, or t
  misc_feature (106)..(106): n is a, c, g, or t
  misc_feature (111)..(111): n is a, c, g, or t
  misc_feature (120)..(120): n is a, c, g, or t
  misc_feature (128)..(128): n is a, c, g, or t
  misc_feature (136)..(136): n is a, c, g, or t
  misc_feature (175)..(175): n is a, c, g, or t
  misc_feature (212)..(212): n is a, c, g, or t
  misc_feature (457)..(457): n is a, c, g, or t
  misc_feature (459)..(459): n is a, c, g, or t
  misc_feature (483)..(483): n is a, c, g, or t
  misc_feature (496)..(496): n is a, c, g, or t
  misc_feature (500)..(500): n is a, c, g, or t
  misc_feature (545)..(545): n is a, c, g, or t
aggggggaanagnattcttccaagatgtttaggagatttggagtattggtttagganattcggggggttaganaatttcggtttaacttagaacagtaggtagccntggantaacagtgntgtagaanataattangaattcttttttcagtagttttttccccagtaaaacgcnttcagtcagtgttggcactgtatttaatttgacattntgaacagtggtattccagagtatgtgcagtaaactcacctgcctacagaagagtgacccaaatcctgtgattaagaaagaaaagaggggccaggtgtggtggctcatgcctgtaatcccagcactttgggaggccaaagcgggcggatcacgaggtctggagttagagaccatcctggccaacatggtgaaaccccgtttttttactaaaaatacagaaaatgagcccgggcatggtggcatgtncntgtattcccagttattcaggaggntaaggcaggagantcanttggacccgggaggcggaggttgcagtgagcccagatcgtgccantgcactccaacctggtgacagagcgacagagtgacagagcgagactctgtctc

SEQ ID NO: 705392 - DNA, 1220 bp, Homo sapiens
  misc_feature (910)..(910): n is a, c, g, or t
gaaagcttgagtcggggggcggccgtgcgaattgaggggagggaactgaagaggaagatggcgcggagcgggagtgcggcctggagcgacccggaggactaatggcgggaacgggaccagctgtactacgagtgctactcgggacgtttctggtccacgaggagatgatcgcggacctgcgtcctgcacctgagtgccatacctgcctgggtatccttcgagaactgggcagctgctgcggagtgcaagacgggtagctgggacgttgttggcgctgggcaaccggcatttctgagcattcttctagtgcccaggcctggggccctgagcgcgtgtacgcggtacgaaggccagcgccattctgtgacaaaccatgtgcccgggcgagggtggtgcgggttcaaactgtggctgtgatgtgacccgggtgcacggtccttggccgcggaccaggtggagactgtatgagcttgccgggaacaggttggattgcccatcagtggagcgagtggatcggggctagcaggaactaccttgagacggaaaggtccatagcttgaggcttccgtccctccaatgcagactgaaacacggaggtgggcctggagcggaaggggcgggactaacatacctttgccgggaccttccggcacgaagtctaccttcgataggccacaccaattcaaggcgaccaaagaattgcctggggacatttggcgggcccgtggggacttccattggaggcccaagggatggaacaggcaagcaaacttattgggtggtgggaacaattgagaagacttggccctgggaaaggggacttgatcacccaactcggcgggcctggtcctccattgggggcccaacatccgggaagaatacgtgttggtggcaagggggaaatatgtanccagagcagagaacgggaaccgattgctatggtagcccgtgaccggacagtagcaggactaattgcgcctgcagaggccttagaagacattcattccacgtcggaccggtggcatgtggcgaagacaatgtggaagccatgtgacagcgggacagaggaagtatgttgtacatgtggtacagcgcaattcacagggcttgacagcagttggcaaaaaagtaggagatcaggagagggccgacaaattgcaatttggggcgtttagggcgcaacacatagtgtattaccagagtggtgaaacgatatccac

SEQ ID NO: 705393 - DNA, 272 bp, Homo sapiens
ggtatcacttcagaggggaaccggcagactaatgtgttaagcaagccagaatggtacttggctcaagtaccttattgtggaatttggaacccattacttgaattcctggatgagaggatccagccatttataggcacagagttagcgctctttggtaaccgcaggccttgattttctctcggggccctaatgatgctggtctctagagaggtagccactcatatcccttgctctgctatatgatgacactctcttctgtcatagggtggatg

SEQ ID NO: 705394 - DNA, 829 bp, Homo sapiens
tgtagggcccgtacctactgcagtgggttcagggaaatgggattgacttggccttcaggcttcctttggtcataatttaaaatatgggagtagaaaacaacaaaagaatggaatgacctcttaaaacaatgaaagagcatttatcgtttgtcccttgaatgtagaatttgttttggatttcataattctgctggtaattgtgacacgttaacaatgggtgcattatgtatatatatcataatttagaaataccattttataattttactattccaggttgaccatattgcatttaaattgtgggattcggtggagtatcatgttcaaacctgggagtggtcacgtatgagtccctcaggaaacacaacacaatttccgggtttaaaaagcatcgtgattctaagctcctggaaacctatggctactctaaatttcccattattttaacacattttcaccactttcttcactttcagcaattggccaatacttctaaccttggaggagggggtttgtacgaacattaccttttaggtaagatgtcccccaagatttaggtcttaacctttaaaccttttctcttaaaacaccagttggttggggcgtcaccttttaacccaggtctagagtacgtggtaataatctggcaacgtatctgggagatatcacgtgcaacgctaacaggtctaatttaacatgaaaactccacttgggttgggacataactccgtttttcgggcacaccggcaaacagaacaaaacattgttcgcgcccggccgagatgttcacacactcttggggggcgccgtgacaaactcgcccctttca

SEQ ID NO: 705395 - DNA, 745 bp, Homo sapiens
  misc_feature (1)..(1): n is a, c, g, or t
  misc_feature (140)..(140): n is a, c, g, or t
  misc_feature (162)..(162): n is a, c, g, or t
  misc_feature (173)..(173): n is a, c, g, or t
  misc_feature (179)..(179): n is a, c, g, or t
  misc_feature (187)..(187): n is a, c, g, or t
  misc_feature (189)..(189): n is a, c, g, or t
  misc_feature (200)..(200): n is a, c, g, or t
  misc_feature (271)..(271): n is a, c, g, or t
  misc_feature (295)..(295): n is a, c, g, or t
  misc_feature (348)..(348): n is a, c, g, or t
  misc_feature (379)..(379): n is a, c, g, or t
  misc_feature (396)..(396): n is a, c, g, or t
  misc_feature (409)..(409): n is a, c, g, or t
  misc_feature (423)..(423): n is a, c, g, or t
  misc_feature (431)..(432): n is a, c, g, or t
  misc_feature (443)..(443): n is a, c, g, or t
  misc_feature (476)..(477): n is a, c, g, or t
  misc_feature (482)..(482): n is a, c, g, or t
  misc_feature (493)..(493): n is a, c, g, or t
  misc_feature (718)..(718): n is a, c, g, or t
ngcgaaacccaataaccccaccggttacttaccagtaatgggggtactatttgaagcatcgaaatctattggagatgacaatttagagagctggacaaaaatcatataatttcaagtataacaaacttaaatggcatatncaatggtaagaacattaaaagnatctgccccantatatnaacttagngntgccctttttntcttcttcatttttaaatttcaaaagaggccacattccgatgacacttggccaagaaatgtaggaaattcnaaagtccttattaaaacgtctccngccagaaggaaaggagacttgattcaattaggccttttgcatctttggaagcngggaggggaggaaataaagacacctttccgncctgtgcaataacgacngtgtccgtttggnggcaatattcttgnattgggannagtctctctgnggggcaaaacaaccgcggaaacgggcctgacannttggnaaaattatccncagggtggcacaaaagagcattatctccaaggccagtaaggtagtaactcctggaagcaataggcggaaagcagaggtttctctccttcatgccaaggtcatggtcactccaaaggtgagggatgaaacagtaaatatataatacagaaatatccctattctctttaaatgaggaaaacaaagaaaagtaagtatccaaagagaacaattttactttaaaaaatncaaatatctcaaaaatatatgttaaga

SEQ ID NO: 705396 - DNA, 513 bp, Homo sapiens
tgggacatgcagcgccagtaaggctacattaggcttatgccactattgtataggttctcccagcagttgacgagcatcccttgaaatcattgcccttagatgcgataaggcctgggcttgcaagcactaacgctcggcccatatctaactggtactactatctcagacgtccggctagtcgctgcacggttgctatacagtgacgcctagtctacgcatgaccaatctcatattcttacgcacgatgtgcacataagacatgcgtaacatatcctggcttcccatgatggtaattgcacgccactgcttgtgaagcctcaagtgacacatcctacggcggtctgacccttagctactagatacttgctgtcaaatgactagaaccagacgacctgctactcatggctgcaaataatcgcggaggagtaactgtccgaaacctccatttctttgataaggacagcacggtcactgcacgactttataaaccttgcccgcaatatgagttcacca

SEQ ID NO: 705397 - DNA, 190 bp, Homo sapiens
  misc_feature (169)..(169): n is a, c, g, or t
gatacctgggaccattaacaagctgcaccgtttgtcattctgtagtgccaagttagatcaccccagttattcctctcacatccgattccaccgcaccagtggaacaggttctttctcctcagtaccagaaacatcccacacacgtcgcacagatctggtcacaggctgnctgttactaccaatgtcttct

SEQ ID NO: 705398 - DNA, 1115 bp, Homo sapiens
tcgaagtggtcattacttcaaatcacgtggcaactttttaacccgttgcgtagctttgtcgttcctttgcctgcctaaactggtgtacaatttccgaccagtattatgcgtcagagatctgatgcccatgtttctcagctccgtgcctaatccagggcaaacaaatagtttatacatcaatattgagaagacttggcattttattaacattgtgcatacttggaccatactttccttaattaagtaacgcactaatatgtttttggaataacgtgctgggtttaaaaacccactgctaaaggcaataagctgttgattatagctagcctcctgattatctgtactgtggatttaagtatgctactttctctcagcactccttataatcactggcccctcaatttatctacgtgctcacccagggattcagagcaagaagtcatgtgctagtactacgaaactgtatgccactaaaatatcagagcttgttgggcatgaacatcccaacttcttgttccactaatatggctctggtttggaaagatactgcaaactcagaaagaatgatttgcagaagagaatgcacaactatggtgtaactgtaaactctgggcagcctctgaatgaaatgctactttcgtatgtagaaactactaatagactgccttagagcacttactgaggtactacaactagtaatttaatgataccatttaatatggcctccgtaaatgtcttcagtgttctatcagggtagttgggatctcaaaagactttggttcagatccaaacaaatagcacattctgtgtctttagctcacgtagttttctaagatcacaagaaactgccacacatgcaaaaaattgtctactactcggttggacaaaccaaatcagttctcaataggaaatgaccaggatgcttataaaaagttataaatatcgagtagctctaataacaaaccacatgaccaagagggaagtgagcttgtgcttagtatggacattggattcgccagtctctcgtaatcactagacttatgtgcaaactggtgctagaaattctataaactctcttgctgtttctaatataaccgccctgtgtttattttgtt

SEQ ID NO: 705399 - DNA, 418 bp, Homo sapiens
atattatagtagatgcactgtttatctgtgggggctgggatattgccttaactttgcgattgagtgactgtgttgaaacagtactgaaagcgttggtactcagacaaatagctgaaaactagtgaatgctaggttgttatcaagtttttatttgacattacggttacaaaggtatatttattttctaaatatatcggacttttttgtttgttaactctttattagctgctaagtaacattaacgtgtattacatgatgtgttccgttaacccgatttatggaagacagtacagaacagccctctgtagtcagtaaagtttcaccttctaaagaatatatattgaattagtttcatgacctctgtgaaaattctgacccattacttgccaatttataaaagcctatattattacaaggc

SEQ ID NO: 705400 - DNA, 198 bp, Homo sapiens
tgatccgaggatcccggaggtcgctgggtcagaggcagaagcttctggtagcttcctaagtattttttttttggaccctcacgactgtaatatctatgaggttctctgtgccctgaatttataatccccaaacctcaattaactactctcctcatgtatccctacaaatggttcccctactgtagtcactttccacag

SEQ ID NO: 705401 - DNA, 219 bp, Homo sapiens
  misc_feature (16)..(16): n is a, c, g, or t
  misc_feature (25)..(25): n is a, c, g, or t
  misc_feature (51)..(51): n is a, c, g, or t
  misc_feature (57)..(57): n is a, c, g, or t
  misc_feature (66)..(66): n is a, c, g, or t
  misc_feature (195)..(195): n is a, c, g, or t
atgattttgaagctcnacaaaattnaaaagagcacttgggcaattaattcntaatgnaatttgccnaagcatgtcatgattgaggaaaacaaagcacagctggctaaatcaacactctaatcagtatagtgaggaagcagcaggtgatctgccttacttcactttatcctctggttttagggccagacgccagangccatgtgtcaattttacccttcc

SEQ ID NO: 705402 - DNA, 864 bp, Homo sapiens
agcggagtcagtcacctcacgcgcgcctccaggagcaaggatggagaggctggtgatcatgtgatgcccttctgtcatctgatctagcctacagacctggtttgggtcattggcagcagtggtgctgtgcatcagcacaagtgcaagtggtgacccaaggactgaaagagagcacctgtacactacctgcttccttaaaattgctctctgcataaatgcccaggaagccctcattgtgacattggtcgagaaataaggaaagcatgtcaagcccagaaatacactggtcaccttcagcgatgaaccatggggtggtgatccagcctgcctataaggaccagataaacattacccagtctgggactccaaaattcaaggcatcagcttctggaatatcaccctggtagtgatgaacgggtgcttacatggtgctctacttcaaatacctattggaatttggggaatgatcgtccaggacatcgggcctgcctacaccgtcgtatgtacagggccatagtatcccttcaggtacaaattctctgaagagcacctaatatatcacttgctctgcgactgcccgtccagcccccatggtcgttctggaaggtccctcggccagggattgaggactagtgcagtgactctgtctcacccatatgtggaccacatctggtacccagctattcctccatatcaagaaccctacgtaatcaggtggggcaaggacgctaatctgccatggtgcctgcagcttggggactgtgaacgacctttaagcaaaccggtcacaagaggctagtaggatgcagattcccgctaagtggctaaagcattgttttccctggtaattacttcgtcgtccta

SEQ ID NO: 705403 - DNA, 362 bp, Homo sapiens
tgtgaaggagacccactaatgggggagaagctagtccaataaaaatgtttggtttccccctaattgacatttaacgcttctcatgaacaaaggactgtgccttacatatctgtggtatatagcatacatgtctgatactaacacatttgctgcataactttgaagcataggtaattccacgcttgggataggttgagtttgaggcctgtgacccaaatctaatgggcttttgcaaattcttagcagcagctaaggagggaggtgggcacccattatggagctccatactgtgtgcccccctccacattgtggtgcttcaccctgcacttcttgcttttcctctccaccatatgttccaccaa

SEQ ID NO: 705404 - DNA, 349 bp, Homo sapiens
tagtaatactagtacaaccaggagggagtctctgatgatctgattaaaccttacttagacaggtactagagcctgggtcttgagtgtgtccgtggcaagatttacttttcctcctcctggactggagcttctttttctttttcccatgttcctttaccctagctgcagtgggtatccaccagtgttctccaaccatgggtttcaagtccttcccccaaagactaagcctttttttctgtattggggataaagggatctgggtaggtttcacagtgggtgctgttttcctcagccagctagccagcaccatggtgggcgctttctctgggatttttccctgatcttccca

SEQ ID NO: 705405 - DNA, 234 bp, Homo sapiens
tgaccagggtaccctggtcgtgaccagggtatcttggccccagcagatcctcgccacgatgggcgagctgaagttgttcgggatgaaggcggccaacgacgagatcatcaaggtcgcagtcaagcgcacccacgagccgcagcagatcgtcggcgacctgctccaggccgagatcagcgagaagcaggcccgctcgatccgctaccagatgacgatcgccaagctgccctgggg

SEQ ID NO: 705406 - DNA, 1287 bp, Homo sapiens
  misc_feature (518)..(518): n is a, c, g, or t
agcgggcattctgagtaccatggcgggagcggtggctaacgccagggctgtgagtggcgctgcgggtctctgggggtgctcgtcgcgtgacgtggaccgacggacgggcatgtgtgggcgagcacatccgccttctgtagtcttgcgcaggttggagagtcgggagaagcagcagcacggtggtgtccggtacaacagactgcgcacacaacctagtcaagaatcccaactgtggagattgaactgtgtgttccaacacaggcagacgtactctgaccctttcgagtcgtagatattgcttgcgcgtgcaaaaatacgtctaggctgcgctatacgcgtatttgttcacacatctatacgagtttcaacgggatagttactcctcgactggtcaaactagatgctatatgaagagttacctagttaagtccgcgaatctcttaggactgggacttggtcaatccacccgaagaattggcgtagaatcggttacgccttctatggtggcattcaacggnctccaaaatagactgacaagctataccaagagtccatcatgcgagttgtaccctgtagggactagacgagatagcgagacagtacactctagaacattcacgggccaagaaaggcatgttttctcctgggatggatcaaaggtcgttcatccaaacgctggtttttgcttcagtcctttggccgcgtattcaaaacttcccaccaggggaaattctctggtggctgcgatgagaaccccatacaccaacaatgtgagttgacagtgcctgaacatgacaccccgagtaggaagaatcaattgctgtgggatgatctttgataggttttaaggacaaaggttcgtagaaacgaaaactagggattgatagagatacatgggaggagtaagtcgtagcgagtcaactgattgatatttggaagaagggtccggatctttattgccataaacaccacatacaccccttgaaaatacttaagggagacattgtggaattcccattgaaaccaaggaaattttaacttgcgtccttatactatatgtggggaatcagggttcgcggtgtctttaacctgtggaagaaaacgggaatcttttgtttacattccataagttgcgatgggaggccatagaatgatttaggtaagggttaaccaggtttaatttgacttcagattttgaaaacagttagaaattggaggggtggttcgagaatggtggtaaggaaaggcgcaaagttgtttaccgcattggggggtacacaaatgtag

SEQ ID NO: 705407 - DNA, 184 bp, Homo sapiens
atatagctggtaccagtgttactcacaaacaggcaggcgcagtggctcacgcattatcccagcactttgggaggccgaggtgggtgcatcacgaggtcaggagtttgagatctgcctggccaacatggtgaaaccccatctctactaaaaatacaaaacattagctgtttgtggaggtagcact

SEQ ID NO: 705408 - DNA, 286 bp, Homo sapiens
tgtaccagttcgacggagactctccacttgcgcgcgacggctgtatgggcccgatcgctgccatgcgcccatccattttcaggtcgtctagggtgactatcgtgcagagtgagtgtgttacacactccttagtcggattcgcgatttccatggacaccgtcctgcgtgtctatatcaaccaaaagcttaactggggtctgatgagcgtcggcgtcgggcgccttatcccggcgttcggtgtcatcccggtcagccagttctgtttaccacaagtggccctactatg

SEQ ID NO: 705409 - DNA, 512 bp, Homo sapiens
attgaggttaagggccactctttttttgttttatcatggacgcattattttgtattggccagggccagtagggatataatttgataaagttgccattggaatattattcacagaagatgtaagaaatttccgcatggtctaaatctttggggactttatttggaaattatttgccccgggggtttagaaaaaagtttttgaattttaaacctgctggattcatgcagcccgctttgcggggtatcagagatccaagattggaataaaaattttgttaattggaagccaaaagttatttttatattaaaacccgtctaattgttccccccaattggtcccggtttcatctaggcaaagattcagtaagggccttggccacaaattgaattttcttagctggggggggtttttttaaaatttgaaccccaggggggttagaagaccatcaaaaaacatggatgtttcgggaaatttgccccgtccttaaaaaaaaccacccgttttcccgggga

SEQ ID NO: 705410 - DNA, 207 bp, Homo sapiens
tcatggaaacaaagtgtctttcgagttgtttaaaggaaatatcgtggaattctcaaatgcctctttaaaaagggattttaaggccaaggtgggtggatcacttgaggtccggcattcaagaccagcctgaccagcacggtgaaaccctgtctctactaaaatacaaaaattagctggatgtggtggcccactcccgtcatcccagct

SEQ ID NO: 705411 - DNA, 193 bp, Homo sapiens
tgctgctgcggtgctctgaggtccccgcgctgcggcttagtgaacggcacggtgaggctatagcccttgagcgggtacaggggcaggtgcacccctggcaacgtcagcagtgggctgcgatggccggcggcaatcaccagatgctccactgtgcagcacttcagtcccgttcacattaatgcctgctagcgcg

SEQ ID NO: 705412 - DNA, 275 bp, Homo sapiens
aaaggcgttctttgcgcgaaccttgcgcacacttgaacatgtgtgacaccttgctgtcgtctccacctcatgatgctcccgagatgcactccactccccattcgagcgcgaccagagtacctactatgtgagcacagagtggctgctgtgagaccctccagacacccgagacaatccaccacagggggtacccaccgctagacacgacagcttgcttcacagctctttctgctcaagcattcattgttgggcatgatgcaccagagcgaacctct

SEQ ID NO: 705413 - DNA, 2114 bp, Homo sapiens
attataaatctagagactccaggattttaacgttctgctggactgagctggttgcctcatgttattatgcaggcaactcactttatcccaatttcttgatacttttccttctggaggtcctatttctctaacatcttccagaaaagtcttaaagctgccttaaccttttttccagtccacctcttaaattttttcctcctcttcctctatactaacatgagtgtggatccagcttgtccccaaagcttgccttgctttgaagcatccgactgtaaagaatcttcacctatgcctgtgatttgtgggcctgaagaaaactatccatccttgcaaatgtcttctgctgagatgcctcacacggagactgtctctcctcttccctcctccatggatctgcttattcaggacagccctgattcttccaccagtcccaaaggcaaacaacccacttctgcagagaatagtgtcgcaaaaaaggaagacaaggtcccagtcaagaaacagaagaccagaactgtgttctcttccacccagctgtgtgtactcaatgatagatttcagagacagaaatacctcagcctccagcagatgcaagaactctccaacatcctgaacctcagctacaaacaggtgaagacctggttccagaaccagagaatgaaatctaagaggtggcagaaaaacaactggccgaagaatagcaatggtgtgacgcagaaggcctcagcacctacctaccccagcctctactcttcctaccaccagggatgcctggtgaacccgactgggaaccttccaatgtggagcaaccagacctggaacaattcaacctggagcaaccagacccagaacatccagtcctggagcaaccactcctggaacactcagacctggtgcacccaatcctggaacaatcaggcctggaacagtcccttctataactgtggagaggaatctctgcagtcctgcatgcagttccagccaaattctcctgccagtgacttggaggctgctttggaagctgctggggaaggccttaatgtaatacagcagaccactaggtattttagtactccacaaaccatggatttattcctaaactactccatgaacatgcaacctgaagacgtgtgaagatgagtgaaactgatattactcaatttcagtctggacactggctgaatccttcctctcccctcctcccatccctcataggatttttcttgtttggaaaccacgtgttctggtttccatgatgcctatccagtcaatctcatggagggtggagtatggttggagcctaatcagcgaggtttctttttttttttttcctattggatcttcctggagaaaatacttttttttttttttttgagacggagtcttgctctgtcgcccaggctggagtgcagtggcgcggtcttggctcactgcaagctccgcctcccgggttcacgccattctcctgcctcagcctcccgagcagctgggactacaggcgcccgccacctcgcccggctaatattttgtatttttagtagagacagggtttcactgtgttagccaggatggtctcgatctcctgaccttgtgatccgcccgcctcggcctccctaacagctgggattacaggcgtgagccaccgcgccctgcctagaaaagacattttaataaccttggctgctaaggacaacattgatagaagccgtctctggctatagataagtagatctaatactagtttggatatctttagggtttagaatctaacctcaagaataagaaatacaagtacgaattggtgatgaagatgtattcgtattgtttgggattgggaggctttgcttatttttttaaaactattgaggtaaagggttaagctgtaacatacttaattgatttcttaccgtttttggctctgttttgctatatcccctaatttgttggttgtgctaatctttgtagaaagaggtcttgtatttgctgcatcgtaatgacatgagtactactttagttggtttaagttcaaatgaatgaaacaaatatttttcctttagttgattttaccctgatttcaccgagtgtttcgatgagtaaatatacagcttaaacat

SEQ ID NO: 705414 - DNA, 202 bp, Homo sapiens
  misc_feature (41)..(41): n is a, c, g, or t
ccaagggttgagacaagctgtatctataggctgtaatgtgngaagtactacgacccgagttcctcgtccagatcgagagcacaagcaagcacacacgcgcacaggcgcatggctgcaacagcagcacgcagagcaggagcacacgcagccagaagagcagaagagggaagcaggcgcaggcgcacgtacaggatagcgcgct

SEQ ID NO: 705415 - DNA, 488 bp, Homo sapiens
ttgtgacggtgtatactacttgaccaggagcaaatgactgaaaaagatcagaaaaacagggagagagatgattatgtcttcccctcatttgcaatagctagcatgacatgggagaaacggacatcctgggcttgggagacattgatcttcagaaagaagagaagctatctctttaaaaaggtccttaagtggttagattccaaagtgtctaaggagaagttgtagttgcttcaattttactttagaaattctctgtaactgatggtctgaagcaagatttcttttaagaaggtgccttgttctactataacctttaggttttatgctctgaaacagaacccccaaacaactctgaacaataaggatttgaaaatttattcaaaacagtatgatatgaagggatgtggtggctgcatctcccaaccagagggtagaaggcaggtgtactagacaggtccagggacccaagaggtaggggtcagaaggga

SEQ ID NO: 705416 - DNA, 771 bp, Homo sapiens
agcgcccgcgagtgacatggactctccgtccctacctgagtgacgtgcgggccacattgcaggctgccctctgcctggagaacttctcctcccaggttgtggaactgacacaagaagccggaagtgggagtcaggagtagcgaagagctcctgttacaacgctgtgaccatcagcaggaatgatgaaggaacaaggttacggattgagggctccatcagagctctgtccgggtcagcagagcatgtgataacaggctgatgagatcgagaagattaagtgccacaagttcatgcgcttcagtgatgatgcgagcagagaacttctttatccttcgaaggaagcctgtggcggggtatgatatcagctttctgatcaccaacttccacacagagcagatgtacaaacacagagttggtggactatgtgatcctaggttcatggacggagatggacaaggagatcagtgagatgaagctgtcatgtcaatgcccgtgcccgcattgtggctgaagagtaccttaagaactatgggataaccaatctggactggatctcgatgggccttcacccacatcagactgacccatgatgtccaacgaaggcgtactggagtcactccccgagcaagcgcggcggacggcagggagttggggtaggagagtggcgcattttgatggcagggagagtgaggtggatgtgactatgatagacatggtgcaaagagaagcaagtatgttggtgcgtgtacccaaggccaaaacgtgcctgtg

SEQ ID NO: 705417 - DNA, 659 bp, Homo sapiens
  misc_feature (56)..(56): n is a, c, g, or t
  misc_feature (67)..(67): n is a, c, g, or t
  misc_feature (572)..(572): n is a, c, g, or t
cccaagagaataccaagacaagcaggctgttccctggaaaaaatctaatgcaaggngggctagtttnagcaaattcactgcctcctcccatgcacgtggtagagagtaccagtatcaacatggccctgttttctgctaaaaccagattttgaggaatcagagacccccaacactactcactcagtagctagcagccccttcctttcaactgggagtgttattagaatgaaaagtaattagttagaagggcatacatctcagtggcatgagcattgtggaatatcctttcctaggcacatttgtccactaagggaacagcctcagaaactggtacagcaatgggtgagatgagatcctggagagagaacacagccatcccctatagaaaggcacagcttttgggcttctctggcctgaatgccttctggggtatttccatatgcaacagcccagagtcatagccttgggcaaccacacataggaggtttccttcttcacttcagacacatacatcactttcacaccacttggggatgggaattacctacaagagttgaaggttcaaggggccntccccagggttttctttctttattcagtttcctcctgaccagtttgccaaccattggccagctatggggcttattcttcatttgttt

SEQ ID NO: 705418 - DNA, 120 bp, Homo sapiens
acgatcgtcgtacctcgtatgcaagtgtcatttcatccaccctttgtccaatagtgcactgactagtttgtactgctcgctagcatcggacacaagtctatccagcccttctctggctct

SEQ ID NO: 705419 - DNA, 143 bp, Homo sapiens
ttccctgcctggactctatatgtattgtcactttgggagcttatgattccacatgaagtggataaccagctcatagttcttgtggtactgaaacacaagtattcagccaggcgcagtggctgacacctgcaatccccggtcga

SEQ ID NO: 705420 - DNA, 894 bp, Homo sapiens
  misc_feature (474)..(474): n is a, c, g, or t
  misc_feature (518)..(518): n is a, c, g, or t
  misc_feature (568)..(568): n is a, c, g, or t
cttacaccaaagaacaacgattactcgaccctaaagcaactgggcagaaaaacacccacctctgcgcatccccagttcctacaacaccctttctctccgcccctgctccacccaacgcttcccccttgctcccccactgtccctatggcttaggcctgctcaccagccttcaccccagcggcctctggcctacacgagcgactgccctggccccagggcagctacactccaccagccactccttccaagcttctgcctccacaacctggctgctgcttccctccctgggcactggcaccttgcagcctcactctctacacgggcaactactctgggccccactccctggcgctcagccccccttctctaccccctcttaccctgtctgcctagctcacccctctccttaacacccctcgctccctggcaacacactcgtgcactctggccaactgcgctgccacacacgccagncctaccacgccgcctcaagctctccttgcccactcctccagcgnctcctgcgcttccccactgcagccacgctgctcagccgcttcagacaacnccctcagcaacgctgcccagcccggctcaggcctgccccacatgcactcccagctggcagcatcgccccagccagagcgcagcagctcccctgtgggccttgccaccctggctttggctcagatgtgctaccgcaacccctgccctccatgcccgccaaagcttatcagcgctagactgaactcggcaactaccgacagcgagcagggcccgcgccgacctcacctacgcccggacctgtgcctgcgcccctgcgcccggaccctgccttccctctcccgctcggcctcatggcgccttcaccttcgcgcgcactctgcgctgacg

SEQ ID NO: 705421 - DNA, 762 bp, Homo sapiens
  misc_feature (3)..(3): n is a, c, g, or t
  misc_feature (15)..(15): n is a, c, g, or t
  misc_feature (18)..(18): n is a, c, g, or t
  misc_feature (24)..(24): n is a, c, g, or t
  misc_feature (39)..(39): n is a, c, g, or t
  misc_feature (46)..(46): n is a, c, g, or t
  misc_feature (57)..(57): n is a, c, g, or t
  misc_feature (60)..(60): n is a, c, g, or t
  misc_feature (62)..(62): n is a, c, g, or t
  misc_feature (77)..(77): n is a, c, g, or t
  misc_feature (79)..(79): n is a, c, g, or t
  misc_feature (109)..(109): n is a, c, g, or t
  misc_feature (156)..(156): n is a, c, g, or t
  misc_feature (216)..(216): n is a, c, g, or t
  misc_feature (236)..(237): n is a, c, g, or t
  misc_feature (243)..(243): n is a, c, g, or t
  misc_feature (245)..(245): n is a, c, g, or t
  misc_feature (262)..(262): n is a, c, g, or t
  misc_feature (269)..(269): n is a, c, g, or t
  misc_feature (279)..(279): n is a, c, g, or t
  misc_feature (310)..(310): n is a, c, g, or t
  misc_feature (358)..(358): n is a, c, g, or t
  misc_feature (378)..(378): n is a, c, g, or t
  misc_feature (393)..(393): n is a, c, g, or t
  misc_feature (406)..(406): n is a, c, g, or t
  misc_feature (437)..(437): n is a, c, g, or t
  misc_feature (483)..(483): n is a, c, g, or t
  misc_feature (536)..(536): n is a, c, g, or t
  misc_feature (662)..(662): n is a, c, g, or t
  misc_feature (677)..(677): n is a, c, g, or t
  misc_feature (730)..(730): n is a, c, g, or t
gtncaccaaatttanttnaaaaancaaaaaacgcttccnacaaaanagcattacatnccncncaccgccccgaacanangccagggacatgtggaccattgttaccttncccccccgccccaccccccaaatgttacagtgaccacaaagcaaggngttcacaaaaattacatggggggaattttttaaaccaccaacaaaaacgaaaaaaaaaanccacccaccccgccgccgtnncaaaantncaatgttagtttttgcncgccccncccccccccnaccccgtttgtaaggaaccaaaacattacanccggggaacagcaaagatttcaccacaccccaaatgcagaacacccangaagcagaggaatgttggcnttttaaacagaagcngaaaaaaaaaaanaagcaggacccccccagtcccccaccagtcntagaaaaaccttccagaataccgcctcacaccgttccgcagccaanaccgtgcattccgtatccggccccgggtccccgtaatggtaatgatccgatcntcggatccctctaaaggctcatcaattttgatcgaagctcccgactcatgacggatttgtttaatccgctgaccacctttgccaataatagatccagccaaatctttgggaatagttacttgtgtngtaataataggtccnccaagatcaccatatgagccacgaccccctgcataggaataatcatatccggngccaccctgtggttcataagccatctgccatt

SEQ ID NO: 705422 - DNA, 1033 bp, Homo sapiens
  misc_feature (131)..(131): n is a, c, g, or t
  misc_feature (134)..(134): n is a, c, g, or t
ggggacagattttctgggacacggtttggacagtcccaaaatggaacatcaatggaatgtggttcttgtacttctgttaatttcattgaatattcagtgtcaaatggatgcatgccccatggcatcgactnatngtgatttagtcaaggtatcgttcgattagtacgagtagtacaattgaagaatctgcatgatggagcagagaagcgaaagaagaagtgtcgcaagtaaacatagtgttgcaattagcgacattagcacattgctactcatgtctagtggacaaattccccaaagttatcaacaagtgaataggtagcaagatcatattggtgctggaatcaatcgtggttatgatcaaacgatgggaaaggtcactcacaataaattcgaattagtgatgcaggagtagtgctgagttagcaatttcgaaactggatcatatatgttaacttctttggcaatgggagatgcattacgaaaattgcgcgaaaaactggttgattgaagaacgttatgggcagagggtaactggaaggctcccgaaggaacaaaaattgatattgggagacagttacaactcttggtgtcaaaaacttaatttgagaagctatccgaaattttctacaccacgattgaaacttctaaagggtttctagccagccttttattccggtctatgcgaatacatttatggcttgattactcactccataagctatcgttccaacagggtgggattcccggtttcaaatggcttgtttcatagggtgggacgaagaggaaggttaaggggcttccacgaggtggagagacacgcctatggattgggtggcttcacacaaggaaaaaacactctcctggtaggcagtttgcacattcaaaggggtcggccccattattatttcggttaggaaatattgtcggatcgcagggggaaaataggaggtaggtactaaaaggacttaataggtaacacttttacattgggttgaaggtggttaaaatcccgcataaacagttagtaatattg

SEQ ID NO: 705423 - DNA, 1092 bp, Homo sapiens
gtcatggactgcccctttcccagccctgggctggaccatcgttgtacaagaacttcctgtccaggttcaggaacgtgaggtgatcaaactgtgccggcccgactggactccgcgggctcgagcactgtggacttcgagatctctactatctcctccctcagcgtccgccaactggtctgtgtagtttgcctccctgcttctggagaggagggtcatcgttcattgcagacaagctcagcatcctgtccaagtgctgtcacgcgatggtggcgctgatctaccccttcgccaaggcagcaacacctacatcccggatgctgccatccgccatggtcgacatcgtgtgctcgccgacgcccttcctcatcgggctgcttctccagctcgctggcactggtcagggagctgacgctggaagaggtccttgtggttgacctcgtacaacagacggtacctcagacagatggacgactgaggactccatacctgccccggaaagcttcaggtggccctggaacacattctggaacagaggaaccgagctggctagtagagcaggacgcagggcccctagacggcaaggcacgggccagagtccaggccccttgaacgaggaggagtctgaagcctaggagcgcaactaacgaggagcatgggggacacctacgtcatagagcagacagtggggcgagcgtgaaggagaaaccctggaagaggagaggcctcccgcaaagctggctcctcaaagagccatcggcaactacaggagagtcacacggaaactcaaaaggtacagaggagacaccaagaagggagactgccccagaagaagacaaaggcaggaaaagggcaacgcacaacatccggaaaaaacccagaggggacaccagagggagacaaaagccgagagaggaacacccaaaaggaaatccccagagaaacaaccgacccaagaagaatcccataggaccagtgaaaaagccggggcgccaaagaggcacacagagacaacaccgagcatcaagctcacaagacaacgcgatgcagcctaccacagagaggcagagaaaagacgaaccaatgcatgacaag

SEQ ID NO: 705424 - DNA, 982 bp, Homo sapiens
acagcctcaaggatcatcagcgaatgcctcctgcaccatcaagcggcttagcacccctggccaaggtcatccagtgacaactgtggtatcgtggaaggactcatgaccagcagtccagtgccatcgactgccacccagaagactgtggatggcccctccgggtaaactgtggcgtgataggccgcggggctctccagaactatcatcccatgcctctactggacgcatgccgaaggcatgtgtggcaggaggtcatccctgtagcatgaagcgggcaagctcactggcatgggcgcttgccgtgtcccactactgctcaacgtgtcacgtggtggaccgtgatcgctgccgtctagagaaaaccgtgccaagatatgatgacatcaagaaggtggtgaagcacggcgtcggcagggccccctcaagggcatcctgggctacactgagcaccaggtggtctccgtctgagttcaacagcgagacccactcctccacctttgacgctggggctggccattgccctcaacgagcaccttgtcaagctcatttcctggtatgacaacgaactcgggtacagccacacaggtggtggacctcatggcccacatggcctccaaggcgtacgagccctggaccaccagccccagcaagagcaccagaggaagagagagaccctcacatgcctggagagtccctgacacgacgtcagtcaccgagcaacacggaatctccgcctcctcacagtcgccatgtagacgcctgaacgagggccagggcctagggagccggccctgccatgtcccagcacaacgctacccgtgcgactccacccatgacacaccgcaccactggcacccagacagcgcgcccgcccacagagaccccacacacggggccccacaacgacagcacgacccggccggcgccacggggcgcccacatcggcacgccaaacgcaccggccagcgaccggccgcacgca

SEQ ID NO: 705425 - DNA, 304 bp, Homo sapiens
  misc_feature (68)..(68): n is a, c, g, or t
  misc_feature (85)..(85): n is a, c, g, or t
  misc_feature (99)..(99): n is a, c, g, or t
  misc_feature (122)..(122): n is a, c, g, or t
  misc_feature (258)..(258): n is a, c, g, or t
  misc_feature (289)..(289): n is a, c, g, or t
ctcccctttctttagccctcactccccccattccccaagcagcccactgatatgctttccgtgatganagtttgcattttctagntttaaataaacagnatcacatagtatctactctttgntgtctagcttaactctgcataattattttaagattcacccatgtcattgcatgtatcaaaagtccatttttttgctgagtactattccattgtacagctgtactacaatttgttattccagtcatctgttgatggncatttggtttgtttccattttggggctattncaaataaagctgtta

SEQ ID NO: 705426 - DNA, 482 bp, Homo sapiens
tcatcaaacaagctcattcagtgggcagtagcagtttgcaagtccttagagaggattatgatgcgactgtgagtgcgttcgtagtttgagtttgctaggcagaatagtaatgaggatgtaagtccgtgggcgattatgagaatgactgcgccggtgaagtttcagggggtttggatgggaatggctgttactcacgcagggctatgtggctgcattgaagcagtatgcaatgagcgcatttcaggtctgtttgtcgtcaggctttgcatggcagcttgtcataattcatgcctccatcaagggatagtacaaggcaaggggtcggctcatgtgtatagtcaaggggggttgcagcaatgcaggtgtgcaggcggtaatcatacccatagcccgcctacagttttacagagtactggcggcacagtactcttggacccagcaggattggggggctccgccatgggctttagggagtcatacgt

SEQ ID NO: 705427 - DNA, 1229 bp, Homo sapiens
gcggaaggcggcggcggcgtgcacctgcgatcagcggactggggcaggttataggtagatgcggactgctggtgtgagcaagatgctggccacggggcccgccaatgcagccgtgcaggcccatgacactggagctgccatgacgggtccaaatgctcggtggccatgtggcccattcagcacatcgagcagagccaggaggacggcggaatcagacggcagcaaggacgctgagcaagcgtttggtgccggcgcatcgggtgccgagactgtgaccccccgttcgtacttacacagcgccgacgagaatcataatgatatctactgatgcaggcatgggggatctggactcacgagatatctatgacggagacaatcgtcacgcaagacacgggcagaagcgggccaagctgaggcgagtgcataagaatctgcattcctcagggcatcagtgaagctggatcacccccgacatccacgtggacattatcccatgatgatccatctatgaggtgtgaccctggagaggtggcagacagaagcaacaccccatgaacaccggcaagaaactcccaggctcaatcaaggtgtgggcttccatttgaggaagccccaggcttggggccaaaaagcctgaaataaactctgattgggccataagctttcagcttgtgagcgggatcaggaaccacaagaatgggtatgagatgtaggaattgcgtgtggaccaaagacgggtgcgaagggagggggtggaggaaagggctaatgcgcacgaaggatcacggagcaccacaactacgcaagccaccacatggacagacgaacacagacaggggagtataccagccggggaaatggcgcgtaaccagtgggaccgagcacagggacccggaaacgaatccaaaggtaaggcccttggagggcaccatagacgcgtgaaagaaaggggaaagcaggaagctgtatacaaggagagagggaaagcgagaaacccagagccacaaaggaagagaggccacatggagacaaagaggacagtcggtagccatcacgaatgcctgataacccgtaaaaggcgatatcagcgagagggaaacagaagccacagagagaaaaacgaaggaggaaccacagcggcaacgcaagcacagccgaataccacaaagagcaaaaggactgaagaggagacgagaagcccacgagagcggggaaccaagagaacagac

SEQ ID NO: 705428 - DNA, 369 bp, Homo sapiens
ccgattctgggcgtgacagcagtctgctgtgcaggcagactttgtgactgtaaaggcctgacgggaggcagaggctgtgcctggcagtgtggccaacattatgcaggagctgggcctggagagtgttgggccgaaccatgagctgggcctggtgaggtcgacttgagaaagttcagggtcctggacagaaggctgggacgcaggatctgggtctaaagaggccattgtaacgatggagctgtgcctgtggaggctgttgtggggcagtaggctcatctgcggagactgtcgttacgtagggtatgggcctgaataggccattgtgagtcatgagcttggtctgtagaggctgactggagaaagttctgt

SEQ ID NO: 705429 - DNA, 925 bp, Homo sapiens
tcttgagggggttgcccgcccgtggtctgtcgccaaacgcttgtttttggagttctgcgtccgccccacgttggcgggggcgcctcgacatttgtgtgtttgatgccgctgcgttttttacggggccccgctcggcattacatgtttggccgccggggccttgcttttatggacaatggttctagaggtggggtttcatcatgcccccgtagtgtggctgcggtccgcgtgatgcggctggctgccacgccctgtatttaggttcatgcagtcctgctctatgcatttccaaatagaattatggtcctacgagcaccatgctgtcttataacattctagacgcaggcttacaaatttgtcattttcttaaactccagcgatgctgcgtcatcctgggtaaagtgtcaatgcttttaacacccccactctttttttcccgggtaatcatccacacgagggaaattatcctatcttatttcttccgtcggaccgagcctgtttgatatttccagtcttttcccatacctcttctcaccagcaaactctcactgattagttttcattagaatccaaccttgatatttcgtcccgtgatttcaactgctggagaatattctcttcagtcaaggtaaaatttcttaccatatctatggctttgataaaactatctggcaattaatcgttataaaaacgtgcaccccacttccttctgatgtccgcaaaccacgtcgtgattaattcttggtaccagcatggattaagctctgaccacaaatccccctccacttatctctcctcctcgcagctattctttctgctccaccaccctcctcgccctttcacgctttcattagcaacacaaacaacaaagctacatattacgaaacaaaaacaatagacaaaaaacaaaacaaacatgacacaa

SEQ ID NO: 705430 - DNA, 689 bp, Homo sapiens
  misc_feature (405)..(405): n is a, c, g, or t
  misc_feature (477)..(477): n is a, c, g, or t
  misc_feature (539)..(539): n is a, c, g, or t
  misc_feature (689)..(689): n is a, c, g, or t
gcttttggtattttcatcatgaagtctttgcccatccctatatcctgaatggtattgcctaggattttttctagggttttatggttttgagttttacatgtaagtctttaattcatcttgagttggtttttgtataaggtgtaagaaaggggtccagtttcagttttctgcatatggctagccagttttcccagcaccgtttatttcaccatttcacctttcaccattgcttgttttggtcaggtttgttgaagatcagatgactgtagatttttggtgttatttctaaggcctctgttctgttccattggtctttatgtctgttttggtaccagtatcatgctgttttttttattggagccttgtagtgtagtttgaagtcaggtagcataacgcctgcagctntgttctttatgcttaggattgtcttggctatgcggggtcttctttgattctacataaaatttgaattagttntttctaattctgtggtgtcaatgcttaattgatgggaattgcattgaatccataaactactnttggcagtattgccattttcatgatattgattcttactatacatgaagatggaatgtttttccatttgttgggtctatttcttgagcaatggtttgtagtctccttgggtcctttcacatacttgtagctgattcctgtatttttctgcn

SEQ ID NO: 705431 - DNA, 931 bp, Homo sapiens
  misc_feature (137)..(138): n is a, c, g, or t
  misc_feature (142)..(142): n is a, c, g, or t
cacaagcacgcaaacccccagggctattatgatatgaacagttggtacgaacattgcaggctggttacggggctcgcaaataccggggagtatcagtcgaatcccacgctgttgcgactttattactcaagagcgtnncagngcaaagtgacgtcaagaaagttcctaaaggtgttcccctgcagtttgacataaacagtgtcggaaaacagacagggatgacgttgaatgagcggtttgggatcctgaaggaacaaagagccactctcacatacaacaaagggggaagccgctttgtcaccgtgggataggtcccatgtcaaaggaacttttgagtgatgactctgagaagttgaattgcttgaagagttcatcacggaaattcaagaaactttacttcaaaatattcacaaggctaaataactcttatttttatttttgaaggtttttttttttaaaaaaaaaaacgtataaaataatgccctgaaagaataatagggattatacctgtctgttcttaaagatttcatggttggctcagacagaacaatcatctgtttgacttctttggttcctcatgcagcagaaggaagacagaaagatagaaattgattatttttatgatagcggtattcaggatctcatcacctttgcccgtgttttagactttgtcatggtaaatcctggtcttcataaacatgagtaggtcccttggtgctgtcacttgccctttaatagtgttggatgtatcaaggcccgtgccctttttttattggagacacagaacaatgtttttgaattccagcttgggggttgaagacttaggggggacatccaaaactgctttccttttttagacggtgtacagtcccctggaattacccagctttagtgctgagctttcaacagtgacatgtggcctaggtataag

SEQ ID NO: 705432 - DNA, 125 bp, Homo sapiens
ctatcggttagggcgcccttttttacctggcccagcccagaatcagtcatttctaccagaagccccggttcactattagttgaataatagtatattagaatctaaggtctagggtaggtatatgg

SEQ ID NO: 705433 - DNA, 1075 bp, Homo sapiens
acctcctaccccacgaccgtaattcaagaaaatttgctataaaatatttacaggtctgaagagttcttacctttatcagtgacatcatgagttggtggcagtgtttacagagcctgaaaataattcagacaggggctttgggtgtatgacttctaggcattatagcatatgtgtgttttatatagtatataatgtaggctttatatgaggtcatacatgtaaatatttaggaaattttagctgtcattacttgtaattaatcataagatcacattattgttccaaagcaaatatggccttcagtaaagttgttaattgttgctttgttgttgtttttgtttttttcttttctctagacagggatgacgttgaatgagcggtttgggatcctgaaggaacaaagagccactctcacatacaacaaagggggaagccgctttgtcaccgtgggataggtcccatgtcaaaggaacttttgagtgatgactctgagaagttgaattgcttgaagagttcatcacggaaattcaagaaactttacttcaaaatattcacaaggctaaataactcttatttttatttttgaaggtttttttttttaaaaaaaaaaacgtataaaataatgccctgaaagaataatagggattatacctgtctgttcttaaagatttcatggttggctcagacagaacaatcatctgtttgacttctttggttcctcatgcagcagaaggaagacagaaagatagaaattgattatttttatgatagcggtattcaggatctcatcacctttgcccgtgttttagactttgtcatggtaaatcctggtcttcataaacatgagtaggtcccttggtgctgtcacttgccctttaatagtgttggatgtatcaaggcccgtgccctttttttattggagacacagaacaatgtttttgaattccagcttgggggttgaagacttaggggggacatccaaaactgctttccttttttagacggtgtacagtcccctggaattacccagctttagtgctgagctttcaacagtgacatgtggcctaggtataag

SEQ ID NO: 705434 - DNA, 591 bp, Homo sapiens
atttgctcctcatattctctccatcttcttcgatgatggccatttagtggcaaacaatgccggttacggggcgcaggcctcctaaggagagtagaggtgcattgaattaaaagtgtcagtcatgtcaactcgttgcaagtgcgacatactcgtatggttgtgctgctgcatttcatagttgcttagtagagaatgcggtagtagttaggataatataaatagttaaattaagaatggttatgttagggttgtacggtagaactgctattattcatcctatgtgggtaattgaggagtatgctaagattttgcgtagctgggtttggtttaatccacctcaactgcccgctatgatggataagattgagagagtgaggagaaggcttacgtctagtgagggagagatttggtatatgattgagatgggggctagtttttgtcatgtgaggagaagcaggccggatgtcagaggggtgccttgggtaacctctgggactcagaagtgaaagggggctattcctagttttattgctatagccattatgattattaatgatgagtattgattggtagtataggttatggttcatt

SEQ ID NO: 705435 - DNA, 255 bp, Homo sapiens
gtcgactgatttttttttaaagtgattaaatgattttgttggagcacatatatgcttaatggcgttggcaaattagtacaattaatcaggagtgtaaatgagttattgatttagcgcttcaaaaggaaaacattccattccggcgttctagcgaggtagctatgaatcatgatgaaatgaccaccttgtttactttaccttctcatactagttcataatcaattgaggcattatataatcatttactcaccctta

SEQ ID NO: 705436 - DNA, 215 bp, Homo sapiens
gcaggtgggcgtagccacactaacggaaatcgtgccccgatcagtcgctcggagcctagcagcctcaggcggaggcacacacgtcagccagagcgccctacggtgggcacacagccaccgcgcacgcacagatccccagtacgccaccgtgatgaaggctcaaactagacggacagggtcagctacacgagaatcaggagccacgtcgctttacc

SEQ ID NO: 705437 - DNA, 549 bp, Homo sapiens
ggaaaacatatgagcaaaggtctctgtgtcataaataagttggaggaaaggggctgtgccttgatgtgcatgtacacaaacatctcggtgcattaaagagcagtatggccaccagcatgtctcacctccagccccaagggggttttctcctatctcagtaaatagaacgtacagtcgggtcttacaccgagacattccattcccaaggatgagcaggagacagatgccttcctcttatctcaactgcaaagaggccttcctctttcagtaatcctcctcatcacagaccctttaagggtgtggggctgggggacagtcaggtctttcccttcccatgaggccatatctcaggctatcagatggggagaaacctgggacaatatctggctttcctgggcagaggtccctgcagccttccgcagtatatgtgtccctgggtactcgcgagtagagaagggcaatgacttttaccaagcatactgcgttcaaacactttttttaacaaagcaaatcctgcacaggcctaaatccattaaaccttgagtcaat

SEQ ID NO: 705438 - DNA, 459 bp, Homo sapiens
cagaggatcccagtgaggcgcgtctggtcacgggactataagaacgtgcagcctgctcacttagttctgctctgaacttgttttttctttctttctactaatttggggttctgttgttctgtctatctagttccttgaggtacatcattaggttgtttatttgaaatctttccacttttgtgatgcaggcatttatggctataaacttccctcttagcatggcttttgctgtatcccataggtttgggtatgttgtgtttgttatgttgtgtttcagtttccatttgtttcaagaaattttggatacccttcttaatttcttcattgacccaatcatggttaaggaacatgctgtttaattttcatatgtttgtacagtttccaaagttcctctggttatggctttctagtcttagtctaccatggtctgagaagatacttgacatgatgtcagtattt

SEQ ID NO: 705439 - DNA, 1057 bp, Homo sapiens
ggcgagaggcgggagccggagaggtgaaggcaggacccgggctccactgccagcctctccgagctcttgtgacgcggacctcagtgccaggatggctcggtggcgagcggcgtgcgccgcgcagtgccggcagagggagtgcggacatgcctgagagggctggctctgagggagtgcccctgtggcgactgggacggcctggggctgtgctgtggccgacgtagcactggctggaggagttggctctggccgtcgtggtcctgtctttggcccttgggtatgtcggggcgctgggtgcatagggcagttgaggtaccagtagcagcaggcgggagcatggtcacggcatggcaactccagcggcaatccttagatgtatgccaccctgacggacctacctacgaaggcacccgcacgataggcccccggaaccctcattcttggaggacaccatacacggaaccccctcgacgttcttacctttcgtggcattgaaaaggaacgcacggcaaggaccccgtacaagcgccatttcccttcgcaggcggggtaacattggattgattggaggacgccaagacacgggagcaaccacacaacaaccggggggaacacttgccttaaaggcctacaggggccagcaaacgatatgttacaaggcacaagtgggggtgcaacgaggaaggatggggagaataccccccataaatgagagcattacgaggaaagatattcccaaggagacaaaggacagccatccatacccgtcaacggaagggcgacacaaaagaacaagatctacaagagaaaatgggggggcacgataataaaggggacatccaaagcccaacgtgatgacagcttcgagcgataccacaacgaagggcccaatttgagggaggagatctacaggaccaacgcggaaagtgggacgaaaccatggagacgaccttgcgacgaacgctgagacgatgctagacaacgaacctccaagagaaaataagacaggacaacagtataattggacgcagtaacccgatttcgagagtggacccac

SEQ ID NO: 705440 - DNA, 223 bp, Homo sapiens
cgacgtataggctttgggagtgagcagctagacaccaatgacgagagtcctgtagcaatatcactaagttacatcttacctatatttctcagccgttaacctaggatgtgaacctcactggtattaccgttcattaaactggcaaccacaggaacacgcctggcacagattcaaactgtaggcacaaaccggcagagactgaatagagtcctcatgggcccaa

SEQ ID NO: 705441 - DNA, 92 bp, Homo sapiens
  misc_feature (12)..(12): n is a, c, g, or t
  misc_feature (18)..(18): n is a, c, g, or t
  misc_feature (59)..(59): n is a, c, g, or t
  misc_feature (65)..(65): n is a, c, g, or t
aatgctgacttngccgcncccgtctgtgttttgctgaatgtcctggacttcaggaacanacccangagaagacaccgtggcagaaactttga

SEQ ID NO: 705442 - DNA, 178 bp, Homo sapiens
gtagtgaagggagacagaaaatgggagatggcggcaattcactttcttggttttttcatcttttctgttttgttatggggggatagccgcccgttttttcgtttctcgaagaaaacaacatttgagggggtgacttaaaaaaaaaaggggtgcaccccggttctttatattttttaaa

SEQ ID NO: 705443 - DNA, 1675 bp, Homo sapiens
gccaccgtagccagggttccggccgtggccagcctccgccgtccagggtccctccgctgtcgtggcccggagaatcgcacgagtgctgctcgagcaaggaactgcggcccaccgtgtgcactcgcgtaaccaatgtcgggcacgaagaagccgatggcatgagcaagacggacagcagctagaggcgccgaaggagcagcgcgtgtcacggggagaagaaggagaggcaagagtgcgcccgggacatggcacagggccagggacgaggaaggaccgaacggacgaggcataggtcgggcttggcatgcgcatgggaaggggacgggaacgcagtggtggacttggaagtggatggaagacgaagaggcagacctagagactggcttcgagcgcctaggggcaccagagggacccacttatcgctccgaaccgattggccaccagacgtagaggtagccctattatgatcaggtaaaggaagtggactagtattttaaacaggcggccacacggattagcttcgcaagaagtggaaggggatccgaactagcaatctacgttagtggtggtgacaatggcccgaaatattctctccatggcgggggacgaccaacacattattggaagtatacaagggaagcggggggcattgtcgggtcgcccgttgggtggcggctaccttccaacagaagggtaggttccgacgttgcgccatggacagaagggagaccttccatccttcgagggaccccctttcaacgtggagggcgtgggctagagatcgttccaattcacacgtggggtacacatgggttcccatggctggacctttggtgagagaaaatgacctgggagggtgaacatgggaaaactggcgccgtttacagccaccaaaaggtggttgcaaacatacccttttttctattggcgaaagccccataaagccacaaattaacgccatagtccttcaccaattataacacgttgagaggaccggttccatggggagaggattcctttgcaccaggaacggaggccccaaaggcggcatggcatttgggcccctttttcatcccctggcgcgttggaacgatttccaccatcggcactttgtggtggccatcggcggttgggggaacataaacagaaagggttctaaacttaacagaacaatgttggcggccggcggaaaaaaccatgggagtcgctccccgtgggagccaatagcatcgaaaggcgcattgaataccaccatatggaatcaggccttggcgctctcctgacagcgacggttaccttattatttcacccgttgaggagaacggggggtggcagccctttatccacacacgccaatagttttgggagccaaaataggccttttcacaacgtccacggggccgcaacgcggagtccttttgcaaccggttggtacccaattctttctttggcccagtgatcacaccatataggatttggccctagctcgacattgggtccccctatttacagggggaacacataggcgggcgcccttcagcagccgcaacgtgggaccacttttgggacagatccctcaggcgcccaccagaagtacgaaacacagaccaaacacaacacctgtagcagcggcaaccatctcgcggagcagacgagacagagacgacaagcgatg

SEQ ID NO: 705444 - DNA, 515 bp, Homo sapiens
  misc_feature (376)..(376): n is a, c, g, or t
  misc_feature (408)..(408): n is a, c, g, or t
  misc_feature (446)..(446): n is a, c, g, or t
  misc_feature (456)..(456): n is a, c, g, or t
  misc_feature (461)..(461): n is a, c, g, or t
  misc_feature (481)..(481): n is a, c, g, or t
agaatattggatctagggacaattttgtgtctcttctaaacccactaattctaaatttagtatgaagttctttcatatacttaggctattatacaaattgaaaaggaacatttcctttttttttttttttttgagacaagagtctcgctctgttgctcaggctggagtacagtggtgtgatctctgctcactgcaacctcggcctctgaggttcaagcaattctcctgcctcagcctcccaagtagctgggattacaggtgtgcaccaccatgcctggctaatttttgtatttttagtagtgatgaggtttcaccatgttggtcaggctggtctcaaatttcctgggcctcaagtggatccgcccgcctcagcttncccaaagtggctggggattagagggttgagtnaccacggcccagccgaaaagggaacatttttctttggnaaaatattantcagnagtttttaggactaaggggnttatggctcaggcaaggaaattttttttcatccc

SEQ ID NO: 705445 - DNA, 344 bp, Homo sapiens
  misc_feature (69)..(69): n is a, c, g, or t
  misc_feature (74)..(74): n is a, c, g, or t
  misc_feature (77)..(77): n is a, c, g, or t
  misc_feature (237)..(237): n is a, c, g, or t
  misc_feature (267)..(267): n is a, c, g, or t
aactggaccacacttaattcctgactctcattttaattataaaggcaggccattattataacttacttngcttncantctaatgtgtgcttgggccctataggaaagacagccttgggatgctttcccagaagagatcaaaatcaccgatttaaaatataaaggggccaggttatggggctccacctgcaatccccagcactttggggaggtcgaggtaaagagataacttgtagantgggagtctgagaacaaaccctggcaaaanagggatgagctccctaagaccccctccctgccccctactacaccaacacttaaaccttctgattaacacccggctcc

SEQ ID NO: 705446 - DNA, 173 bp, Homo sapiens
ccagaagatatgattacctgcctgaccagaggacatcaacaaggaaaaacgcactccagcaccttgagcctgagccttgtgaggcgtctgagctgcagcaaagagattgaggagctcagaagagcccacagagaatgtgaacctccatgggcagttacagtgtgaatggacca

SEQ ID NO: 705447 - DNA, 434 bp, Homo sapiens
cacctgttattaccagtgtggagtgagtaactcgatcactttactccagcctccacttcccgggttcaagggattctcccacctcagccttccgagtagctgggatcacaagcatgcaccaccacacctggctaattttttttgtagagacacggtttcactatggtctggtcttgaactccttacctcaagtgatccacccgctgcagcctcccaaagtgctgggattacaggcgtgagccactgcgcccaccctgaaccttactttttttgctcagtttctggtaattcagagaatgcctcctgagttgtcctacacccacctcatattccatgggagggctgtacagggcttttttaacgaggcctctaaggacaggcatttgtatcctttccagcctttcactattacaatgttgtagtgaataacttta

SEQ ID NO: 705448 - DNA, 729 bp, Homo sapiens
  misc_feature (640)..(640): n is a, c, g, or t
acgtaggtgtgaatggggggcgccgggtatataggctgactgcgacaaactcaatacttgacgattactttcgatcgcaacgaggcgatgaatcatcatgtccgatagactgtatgcctaggagcttgtatcacatcatatccttctgcacttgctgttgacaggttatacagcacaggctgctctgactccgacaaatgcttatgttcacgaagaggaacctatatcgccgggaacctcaagacatattcactatgccgagccgctctgtacttttgggggaagaaatacacactcaatttatgcctggattacagatgcctctctgatgcttaacatgagaaacggtgaatggttcatatcaacttgttgacatttaatgtataagtggtgtctggcagacagtctcttttgatcctgcgtagatgatcctgcaagcgtacatatctgcggaggaaatgcctttttagtgtgagcaacctctctgatgctcatagtgacttggaaagtatgtgctgtacacactgacattagtggtgctgggaggactcagataactctgacttttcaaagtgtagttggaaataagaaccgttgccaaagtcgacactctggacatttcaggaaagcctggtccaanctaggtgctaagcacggcctacttccgtcagcagatgccctcagctggaaggtcatgttattcagattgctgggccaagcatctagcaa

SEQ ID NO: 705449 - DNA, 1178 bp, Homo sapiens
ggacgcgtgggtcgacccacgcgtccggcaagtcaacagagttggaaaagatttctaaactggagcaggaaaaagaacattggctaattgtgcttccaacatccaagtgtacttatccctgctccacgctttagaacattggactgtgcgaacgcacgaattacgcccaatctcacagctacacgacaacgacacatccagcgcaattcgcagactaagcgtagaagaatacagggtagtgcccagctggcttggcgcctggcccagcgaccacactgcctgctgatgctccacactaactgctggcccaggcatgaacagcccacagctaacgcgctgtgcttgcgagcccacttcagcagcacccaagctctaactcgcagaacttctaccccacggcacactctgcaccgctgagcgtttccaccgactgctggcacctctcgcctgcacgaacctgcaacacaccaacaacatccaacacacccctgagccacccgccatcaccccgcgaaccccccagcgctcacaccaaatccgcccagcactgcgctcacaccagccctcacacccaccccagcaagacaactcccccacacctcccccgaaagcttgacccgcaccaccacccgacccacacacccaccgaacctgggcccccccagagccccgcaccccacagccaccctaccccgcggccaccccaccccgacccccgccccgccacccctgaccaccccaccaccccacaccccacccaacacccactcacccccacccacccccctccacacgacagacccctacaccaaacccacccacgcacgcgcaacaccaacacgacgcggacttaacacactacaccactcccagcaccagaccacaggccaccacagcactgaacgacacaccacagcacacacgcaacagccccgcaaaccacacgacaccaatacacccgcacgcaccacttggactctaccattctcaacgcatactcacccaccacactggaccaccctccctaccccacccgtcccctcactcacccccactccccctcctccgcacgctacccctgcgcatagccgcaccctacctcactgccacaatcacccacccccctcattcctgtcacccatctaccaccttcgcgccccatcacatcacttgctaca

SEQ ID NO: 705450 - DNA, 519 bp, Homo sapiens
gctgtggaaatttttaataaaataaggacatttgaaatggggtttaataaaaacaagctggctcttggaatttagtagatttaccaataaacttcctatcctgtggctttaggcagtttagtccacagaccaataaggaggtttgttttgggaaaggaactgttattgtcattgtttcgaagctgaacttaaaactaggttcctcccaaagttcattcggcctatgcccaggaatgaacaaggacagcttggaagttaagagcaaggtggagtcagttaggtcaaatcgtttttcactgtctcagttgtaattttgcaatggaagtttcataactttaaatcatgactatcacagtttttataaataatctaggtaaacaattaataaaataactaggtaaatgtaatgggataaatacttatagaccaactggacataatttagaatataaagtcatattaaattaaataatagataatttattatttgggtattttccaataaatatatcttgtagg

SEQ ID NO: 705451 - DNA, 1244 bp, Homo sapiens
acatcatcaacaccaaactgctgaagcactattacttgctgaccgtacaacaatggctagattacggtaacttaattatcggattctatgaaggcgaagattactgcatatgtgatcactacttgccttgcaccatacatgacttccaaattgacctgacagctgttacagagggacttgaagctcagtgagaaaaggatgactggtcgatagccaaagccatgaggctgaagatctccaaaagaagggtgtctgtggccgcacggcagtgacagaagatcacacaactgggcacccatgtacccatcccgactgcactccagaccagcactcagaccgcctggacaaagcaggaggcagattaccatagacgcatgctttccagacagggcgtctatggctgcaatcacagacactggctggtccctacttcagttctcccattcttaaatgtattgtattgaccacagcaaaacggtccggcggaatggctgcgcatcgcaccctgaaacactacccagaaacactacaagaggcacggcacgcaggaaccgcaagactccaatcagaacgatacagacaagatttagccaaaccccaagctcgtggcagacaaccacatgcagacacaaaccacaccacatcctcacacagcacaggcaaaacagaaacagcaacgacacacggcaaccacaagaggacaacagacgacacaaagtaacaaccgccacagcaaacacacaaaacaacacactgcccagcacaaaaacacaacacacaaacaaaaacagaaaccgggaacgaagcaacccacaccaagacgagggacacaacagacacacaccaagccgaacgcgcgcaagcaacaccaacaagagaaggcgcgacaacaaccaaccaaagcaacgccgaacccaaccacgacccccaagaagaacaaagcacgacacacaaggcacgcccaaacaccccgcccccccacaggccacacaagacccaatggcacgcaacgcgaggcacaggaaagaacgaaccaccactggcccccctacataaagaagaacgaacgaacaccggagcgggcccgattacagcttacatgccagacgcgcacacgacagacgacagccctagactacccgaccacccaccacacttcgacacagggacgaaaccacccacagaaccaacgcacgccagcgcacaaaagacaacaccagcacagagagcaagcagccaacgac

SEQ ID NO: 705452 - DNA, 371 bp, Homo sapiens
  misc_feature (263)..(264): n is a, c, g, or t
gctcgaccacgcccatcagcttcttggcctgtacggccctggccagcgcggtcgggcagacggccgggcactgggtgaagccgaaaaacaccatcggcatcatgcgcggtaactggacagcgttttgacgttgcccgcggtgtccttcagcttgaaggtccgcccgaggatctcgtcgctcaggtccttgccgtatttgtacgacaagcggttggagctgtcgcagccggtcagcgcgccgaggccgagcaggcaaggccggnncaacgacctggcggcgagtcagcaattcattcatgttctgtagtccttcgtatggagcgatgtcgcggcctggcgttgccggataaatgcacattgacgcacatgtc

SEQ ID NO: 705453 - DNA, 610 bp, Homo sapiens
ccgatgaaaagaaacgaaaagaaaaattgtgtagtgacaagttggctgtgaagattaggcccaccacacaccccaccctaacccgtttaatgggatgcaattctgtttgcctccaagtcctctaggcctgggttctattggtggagtctgtgtgttgtcctgtggcccctcaaatgcactaaagagaggtcccaggcagaaactagctgttaaaagtttggattgtgggattgaatgtagtaaccggtgctttatattactactctctggctaattccacagggttctttttgaaagatacagcaagtgttttgcttggttgtttgaaactgtactttgagaacccatttacagtacagtgcctaccagagccctgctggttctccatgcctagttgtttttgacataacacacacctggactgaccccaccacttatcagtggcctctttgtaagtttaattagcaacagacaaaatttatttctagtacaacaaacacctttctctgctgactgctttggccctgtactttcaataataggttttacagttgattttggaacttcacactagctacagagagctagatagagaaattggcgggtgttc

SEQ ID NO: 705454 - DNA, 316 bp, Homo sapiens
ggccttgaagacagagcaaagggcccacccaggtcccccgactgcctgtttccatgaggtactggtcccttccttttgttaacgtgatgtgccactatattttacaggtatctcttggaaggcatctttaataaacgctcttttttaagtggggtgtgcaaagcgtcctgccctcccccctcgggggcctgtggtggctccccctttgcttttcggggtccagggcattttgtttcggaaaatgattttctgtggttttttttgaatccaaatctgtcctctgtagtattttttaaataaatcagtgtttccatta

SEQ ID NO: 705455 - DNA, 217 bp, Homo sapiens
tgtatcagaaaagtgaaacaatcctattataccacttcgtccagctgtacatggcactatgtagtcataatatcaacaatcatactgaactaacaaattaaggatatatcactttgggcagccatggatccgtttgcactgagaaggcagagggtgaaagacagctaggaacttcctacctattctcagtgtcaagcgaagagacatcacatgacac

SEQ ID NO: 705456 - DNA, 157 bp, Homo sapiens
gtatagttaggcatcacccaatgaggctgctgccactccagcagggaaataatgcagttcctgtgttataaagaaccagagaaggctctcttttctcccttgtcattagccggttcttttcctatacacgcaaaagatttataactatatgccgatt

SEQ ID NO: 705457 - DNA, 923 bp, Homo sapiens
ccggatctcatgccacgcgccccacgacgacgcccgacgtggattcccgattgccttttggttccaagtccaatatggcaactctaagggatcagctgagttataagtctgtctagaaggaagaacaggacgcccccagaaataaggattacaggtggtatggggtgtggctgcgtgttggcattggcactgtgccattcagtatcttaaatgaacggacttggcacgatgaactgtgcgtcttgtcgagtgtcactcgagatgacacaattgaagggcgagacgatgagtggagtctccagactagtggcgagcctgtttcctgtagaacgagccgaacagacttgtctcgtaggcaaacgactgataagtgtacatcgtgctataactcgcaacgactggtacattatctagcaggctagtgggacagcgtcagtcaaggagcggagataatgcccgtctgtaattgtggtcgcagacgtaggacgtgaactatgcttgaaatgtcatgcatgtacctagatgtgtgtaagaatagcatgcgccgatactgcgaaagttgcgtctagtgggttatcgagaactctcagtggcatagtctgtgcacgctagcagtggcgtctgcgaagggatgaagatggttatccggcgaaaagacccgatgttgatgtgcgacagactgcgtcgccaatacctggtcattcagttccgggattcgcgtttagcctgactgggggcgaatagggcatgggacgtgtcagcccatgtaatgctcgtccatgggctgggtcacttggaaggaactagtggagaattccagatgtggccctctatggcagttgcgaatgaagtgtctgcatggtgtcttctgctgaagaactctgcacccagattaagcggaactgataaagataagggaacag

SEQ ID NO: 705458 - DNA, 486 bp, Homo sapiens
  misc_feature (466)..(466): n is a, c, g, or t
gatgtcttccatccaaagtaagaataatactctcggaaggtccttttggtgtcatgtcacttgctgtatgtggcagccttacagtgccacacttgggtactgaaaaatcaataaaacgaaagttcatcatcccatggcccgtagactgtgtgggcttgcttccttgtcatctttgaatcttcttactcattagaatgatgagttgaacttgagtccaaattcagtgaaatacattgtctgagtctgacgcacactctttgcatgtgttgtgttgggtgtgcatacagtgaagcacaattgtgtggggttgtggagagggcgtccacactctctgcagctcagaaagcagatatttcacaagtagtgaccaacccacgacgttgaagccattcaccaacaataaattgccactctgagatggactgtttatgaaggtcaccattttaagtacctacttgtatatagncaaggagaagtaataaaatt

SEQ ID NO: 705459 - DNA, 989 bp, Homo sapiens
gccggaagacgctgctgaaggccctaaagaaacttcaggcagaaccggaactccccttgcaggtccagccgcgggcctctgggccctcccgttcagccgaggggcccgaggcgctgttgagttgtctgggtgtgcctctaccaaagcgcctctcagaggggctgtccctgcggccagaggacttgtttgagggcgcctcgcggacaagggacaaaacgcaggccgcttggtgcgcggggggcctctgctggggaacgggcgcggaatattgaacttgaagggccccgcttgcgtaaacgcacccagggcgcggaaaagaatgctttgtctccggccccacgggagacgcctccacatggaaaaagggtgttgtgcccacgcttggaacagccccaataccaagggtccctgtttgccacagggacggggcactcacaactacacgaggggcgtagcaaacagactgaggagggagtattcgccccgccgggtcacacattaatgttggcgtcctcccatcatcacacagcggcggtgacgtgagaacaacacacaacaactagggttggtgtgacacccatccccatcatattttgttagcgtgagagcagccacactttgttgtgtgtcgcccacaggtgagtgcaatacacgagcgccacacatattattttctaccctgctcgtgaggaaacagcgtggtaacaatccgctgcaacgaaccagtcattttgggcggaccactatttatggcgaggccacgtgttggcgtgcgccccctcacaaagaatgttggcaccgcagctctgaacgcggcaagaagccaacacacacacactcggtgctgtggtgggctatagactctaggacagaggaagcacacacccacagccttgtgtctcttatagagcgggcacctctacacacaccattgttggcgccgcaccacatctaattctccagagaggacagatatctctttacaacag

SEQ ID NO: 705460 - DNA, 455 bp, Homo sapiens
  misc_feature (146)..(149): n is a, c, g, or t
  misc_feature (232)..(232): n is a, c, g, or t
  misc_feature (308)..(308): n is a, c, g, or t
  misc_feature (439)..(439): n is a, c, g, or t
tggatgggctggcattgaaacccagagctggtactcttatgatagtgtctagacaatatctgtgaccacacctctgattgtacctcaagaagaaagatttttaaagtgaaattactagagcataagatataaacatttaaaaggtnnnngatacatcttacaaaagtgctttgcaataacactgattgatcatgctcatttgcatttccatgagcactgtgtaattgatcanggactctaaaagttagataagccactgataaatggagatgcccctctaagtccctgggcagtaaaacctgaccagnatagcctccaataacctgcatagtgttgaggagagcttggatttaagagattaagagggtcaaactcttttctgtccattttaaaatgcaagttttatttaagaggaactatctaatatgctgaagacagnatcaggtatctgtaaa

SEQ ID NO: 705461 - DNA, 337 bp, Homo sapiens
cctcacaacgcgcccggccgggcctctctctactccatcttgttgcagttgtctgagaagccagaatgagttttcatgaactggcagacctatgaaagagattgaagaggaagagaagaaatgggagctggcagccctcgtcagctgagcgcgagccgcgtgggcgcggagtcatttgcattccggtctgcgggggctcgggagatgctggtgacaggcccggtctcccggtggctcgcccccatctgcgggcgtcgggaaggatcccttccatctctcagccgcagaggaggccctggcagcgccccggctgtagccatgcaaccccgaggagtcc

SEQ ID NO: 705462 - DNA, 136 bp, Homo sapiens
cgtgatactagatcggaggggttcgggacctcctctcatctggggtcatctcctcctgggtctggtccggaggtgtctggagaccctcctctcatctggggtcatctcctccttggtctggtcccagaggggttgg

SEQ ID NO: 705463 - DNA, 1122 bp, Homo sapiens
gccgcaacctgaacagccatgcccgggcaaagaactcaggacggtgaattggctctcatatgctcctggtgttgctggatgctctcggtggactgccgcgagtggagggcgcctcatgtcttcgtggctcgaggcgagtcctgcgcagagtttcccgtggacaccttctaggagttgctactccagaagagtccagtatttccgagagttgcggcaaacgctacgaggacacgtgctatgccaggctggcgggccagaccatgaggcttgggaaggatttcgaacacccggagccttcgttctccggcccctggcgagttccgggagtacttctactgcacagaagtgcgagcttggagcatccaggtcggaccaccttgtcgaccttggcgttgatcatcatccgatgcgcccagggccatttccccgtaggagggcattccccctcgagggcccttccaccactggcctctttacatacacaggtgggccattccttgatttccccggaggacgattggttcgcacacaaggaatccgcgcaccagttcaagatagggggctcacggattgggaggaaccgagcattggtaacgcaacgggaaatcgccaggacaggttggacatgtagccaggcgatctacaaggaggccatgttcggaagagagtcaccggattagtggtgcccacacgacgggaaaagtacaaccaccatatagaggcggtcgaccggatcagtcccaccgggctcatgtactcacttattcgacgctatatacgcccattttggaagcgttgcacaactcatattggggatgttacaatggacacccacgtcgacacaccaccaggaagacacccggtgattatcatccaggtgttacccacaaaaagcgaactctgcagaggaggggcttaaaaccgcaccccccgaataaagatgacccagtttgcgacccctgtttggtgttccgacaccacacacgtgcaagacaacgaatatttcacccgatctgagcttcacccgaggaatattgccacgcgacgagggagactacaaatgacagggacgatgtcgaacagaccacctcacaccaataaagggtgaaaccattatgaggg

SEQ ID NO: 705464 - DNA, 219 bp, Homo sapiens
caggatgactttgtcacggagaaaacggcagtagatctctgccagcaaactatcttcctgacacttctcgcatcctctcagagatctctgctctgtgaatgtgcagattggattttggacaaaacaacaggctctgcttgcttggtggtggaaaatgagcatctttatcttggtttccacgagcagacgctgaagccatgatgactttgtgctggatca

SEQ ID NO: 705465 - DNA, 174 bp, Homo sapiens
cacttaggtttacgtctacaaagtgctactaataaagtaaggcaaataaattactgcaaatgtttatgcactgatttctaggattgagtataatttaaggaaatagttttagatcataggatttgaaggtaagtcaaataggccattaacaaagcagaattataacgcgttgag

SEQ ID NO: 705466 - DNA, 681 bp, Homo sapiens
gaattattgggtagaaaccatcatgatagtgcttatacacaactgtaaactgtataaactattttgtgattgacgcaacaaacttcaagtttttgtaagtactctcctgaaattttctttctcttctatactttatgcacttactaaaactactgatgtaataaaagagcagggttaaaaatattgtatctgtattcattgtgaatcctgtagcttttctggttaacaaaaaatcgctttctaaaatactcttaatcccattgttttggttaacatcttacccatttgttgtatttcaaatgccattaatcattttagtacaacacctatgtttataaaaattttgaaaacattacatattgtatttaaaactaattagtgaagagtaagaaaaaaactagccaactgaattgtaggtgatgcattagttaaatttcaaaactcataataaaggaactttcagagattggttgaaacccagtggtatccctgtaaattagctcctgtgactggaaaagaccccaaaaaggcagtagaggagattagtgttcacttgctgtggttgtggagtgctgctacttaattataggtaggtgcccactgaaattcttatttgtccaataatctgaagtagttcctatatttatctgtactaaattgctataattgggtctgcaaagg

SEQ ID NO: 705467 - DNA, 923 bp, Homo sapiens
  misc_feature (196)..(196): n is a, c, g, or t
attttcggtcatcgtagtagtagtagtagtagtagtagtagcagcagtagtattagtagcagtagtagtagtacgtagtagtacgtagcacgctagcagtatgcagcacgcatgtatgcatgtagtacgtcagcacgtatgcatgcacgcacgtatctcgcgatcgcctcgccgccatcgacgtatctctctactnctccctcctcctcctcttttctctcctctatattctctcttctctccctcctactcactactcctactcttcttctcctctcccctcttctctctccctctcctccctccttcttctcctttttcccctctctcttctcccttctccccttccctcgccctccccttcctctctccctccttcccctctctcttctccctctccacctccctcctcctcctctccccttcttctccttccctatctctctctcctcttttttctccccttctctttttcccttctctccttttctcctctccccttctcccccctttccccctcctccccctccgccttttcttctcttcctctccctcctccctctcctttctccctccctcccttctcccctccctcctcttcctcctctctccctaccccttcttctctcccctccctccctcctttctcctccttcctctctccacttcacttccctcccttccctccctctcccctccctccatctctaccctccttctccttctcttctcctcttccttcgcccctttctcttccctcctctcctatccctctacttcctcttctgctctcctctcctctacttctctcctctatcctctctctcttctctactctcatctctttcctttccttctcctcttcttcttcctccctcttctctcctctacgttctccctctactctccctctgctttctccg

SEQ ID NO: 705468 - DNA, 708 bp, Homo sapiens
  misc_feature (11)..(11): n is a, c, g, or t
  misc_feature (25)..(25): n is a, c, g, or t
  misc_feature (39)..(40): n is a, c, g, or t
  misc_feature (88)..(89): n is a, c, g, or t
  misc_feature (96)..(96): n is a, c, g, or t
  misc_feature (99)..(99): n is a, c, g, or t
  misc_feature (123)..(123): n is a, c, g, or t
  misc_feature (125)..(125): n is a, c, g, or t
  misc_feature (129)..(129): n is a, c, g, or t
  misc_feature (140)..(140): n is a, c, g, or t
  misc_feature (146)..(146): n is a, c, g, or t
  misc_feature (173)..(174): n is a, c, g, or t
  misc_feature (184)..(184): n is a, c, g, or t
  misc_feature (273)..(273): n is a, c, g, or t
  misc_feature (308)..(308): n is a, c, g, or t
  misc_feature (311)..(311): n is a, c, g, or t
  misc_feature (313)..(313): n is a, c, g, or t
  misc_feature (346)..(346): n is a, c, g, or t
  misc_feature (356)..(356): n is a, c, g, or t
  misc_feature (361)..(361): n is a, c, g, or t
  misc_feature (366)..(366): n is a, c, g, or t
  misc_feature (370)..(370): n is a, c, g, or t
  misc_feature (401)..(401): n is a, c, g, or t
  misc_feature (423)..(423): n is a, c, g, or t
  misc_feature (507)..(507): n is a, c, g, or t
  misc_feature (513)..(513): n is a, c, g, or t
  misc_feature (600)..(600): n is a, c, g, or t
  misc_feature (634)..(634): n is a, c, g, or t
  misc_feature (679)..(679): n is a, c, g, or t
gaagcgggctngcaccgacgaggtnctgccggaggaagnngctccgaggcggaagatgaggacgacgaggactacgtgccctatgtgnngttacgnagngccggcagctactgctccagaagntnctgnagcgaagacgnaagganagctgcggaggaagaacagcaggacannggtagtgaancccggggagatgaggacgacatcccgctaggaccctacagtaccaacgtacagacctcctggattcagcaccagcaccttaaagagaangctgaagcgcgcaaagagtctgccaaggaagaagnagntnaaggaaaaagagaagatcctggagagtgttgcngagggccgancattnatgtnagtnaaggagatggctaagggcattacgtatgatnaccccatcaaaaccagctggantccaccccgttatgttctgagcatgtctgaagagcgacatgagcacgatgcggaagaaataccacatcctggtggagggagacngtatcncaccacccatcaagagcttcaaggaaatgaagtttcctgcagccatcctgagaggcctgaagaagaaaggcattcaccacccaacanccattcagatccagggcatccccaccattctatntggccgtgacatgataggcatcgctttcacgggttcaggcaaganactggtgttcacgttgcccgtcatcatgt

SEQ ID NO: 705469 - DNA, 181 bp, Homo sapiens
  misc_feature (167)..(167): n is a, c, g, or t
cccgggattagtgtctaaaatatagaagagactaaaactcaaaacaaacaagccaattcgaaaggaggcaaatttctccatagaagatatacaaatggccagccaggcgtggtggctcaggcctgtaatcccagcactttgggaggccaaggcaggcagattgcccnaggtcaggaagaga

SEQ ID NO: 705470 - DNA, 387 bp, Homo sapiens
  misc_feature (5)..(5): n is a, c, g, or t
  misc_feature (23)..(23): n is a, c, g, or t
  misc_feature (35)..(35): n is a, c, g, or t
  misc_feature (39)..(39): n is a, c, g, or t
  misc_feature (232)..(232): n is a, c, g, or t
  misc_feature (322)..(322): n is a, c, g, or t
  misc_feature (352)..(352): n is a, c, g, or t
  misc_feature (371)..(371): n is a, c, g, or t
ctagnctaaatataaagtgccgnactgttaaacgncagnccaatttttttaaggcaggaatatgaggaacacctaagtatttctctttcataggcagttcctataaagggattaaacacttatttctgtgttatggttcttattcatatatttttataggcacctttttttgggaacctatatttgtgcttgaaggtgtttttgatatttgggaaacagtataagccatttngagtcatgattggggggcaagtgggattcaagctaaaatactaagaccagcattcttagtggcgcttataaattagctctcaccgggttnccaactgcttttaacaatggtagtgctccngggccatccttccaagctnctctaagggcaatttt

SEQ ID NO: 705471 - DNA, 225 bp, Homo sapiens
  misc_feature (100)..(100): n is a, c, g, or t
  misc_feature (131)..(131): n is a, c, g, or t
accccgtctctcctagaaatgcagaagtgggccggccgtggtgcgcctatagtcagctactcgggaggctgaggcaggagaatcgcttgaactcgggagnctgaggcacgagaatcgcttgaactgggagnctgaggcacgagaatcgcttgaactgggatgcagaggctgcagtgagccatgttggtgctggtgcactccagcctgagcaagaccttgtctcag

SEQ ID NO: 705472 - DNA, 122 bp, Homo sapiens
tgacgcagctcttccaatgatcatcatgacttagttgtgtaataaagcaagaggcttacacaaagaagagcagcaatctccagaacacggttctgtcttgcatgtaagactgtaccaactca

SEQ ID NO: 705473 - DNA, 128 bp, Homo sapiens
agattggcacaaagcagcagctgtattgtccgcagttctagtttaccttaacgatgttttccttggttaaaagggaattaatcagtcttcaagtttgaggtatttagaaacaatggtaagggagagca

SEQ ID NO: 705474 - DNA, 917 bp, Homo sapiens
  misc_feature (590)..(590): n is a, c, g, or t
atggacatgcaggcgctggtgggtctacaaggatgctacttcccctatcatagaagagcttatcacctttcatgatcatgccctcatattcattgccttatctgcttcctagtcctgttgtgcccttattcctaactgtcaacaagaaaattaagctaatactaatcgatctcagatcgctcgaggacaagtagaaagccgtctgatagtatcctgcccgtctagtcatccctagtcctacatcggccctcccatccttacgcttcctttacataaaatgaggatgtcaccgatactctcccttagcatcaagtcacttgccagcaatggtattgactctacgagtacacgcggaatacgggggacgaatcttcaatctcctatcatactttcccccagtatcctagaaacctgggaactggggactccttgaggttgacaataccgagtaggacctcccgaaattagagctgccatcggatattactcacatcagagatgacgtcttggactctatgagctgtccccatcttcagggttataaacatcagatgcgattcccggtggtctaaactatgcactttcctcgnttacacgatcggggtatcctgacggtcaactggtctgactatctgtgtggcgtcctgacagttacgtggctagcagtgctagaatgagtcgctagaatcttggagctaggggccgtatgatctttaatatctttacccttttgagaagataggagtgaatagcagaaatttgggcggcacgctccaaccggtacgcacctgggcgcgcgattaaaaggcaccggtccaaaccgcggaatcgggctcaaccaagcggggaacgcgaaacacagtggcgcgttcaggcaccacgacgacaataaaaccgggcacacttcgacaacatcg

SEQ ID NO: 705475 - DNA, 423 bp, Homo sapiens
tcagtacggggagatcaccgtctacagactcatgttactaatataagacaagattaactcatgacaaaagtaacgcagaaataaattcacataaatacagaaatggatgccattaaacaacttcagcgcatctcatctttaaaattcttagatccttttcactgcaggctatagttacctgctccagctcaccaatggattattgttcaactttaactacagtacattataaaccctcttatatccttaaagaaaattttaagtgaaaattacaattacttaccaaaaggtttagggttttccaaatttcaaatatatgcttccccctcccccctttccagtcaaacatttcaaataaactaaaaataaccacatctcacctgcaacattcaataatagcaatcacttgagtattgtataaag

SEQ ID NO: 705476 - DNA, 115 bp, Homo sapiens
gcaagatggcgggtgaaagttgaggaggcagatacttaagaggaggacccgaaggccaaggaggtttatttctgtgtgcaagggtaaaaagggaaccctaagctctaaagcccca

SEQ ID NO: 705477 - DNA, 652 bp, Homo sapiens
caccgaagctggagtgcagtggtgcaacgatagctcactgggatctcaaactcctgggctcaagcaatcctccaccccagcctcccgagcagtcacaaccacagatgcacaccaccatgcttggctaacccttctttttggtagagacagggtctcgctatgttgccgaggctggtcctgaactcccgggctcaaccgatccttccaccctggcccccttaaagtgccaggattgaaggcatgagccaccacttatggcccataaggaagatttttaaaaattaattcgtgccttacatttatctggagccaccttagactatgacaaacaaatgcagctggtcaaggtggctcacacatgtaatcccaacaattaaggagcccaaagcagaaggaccgcttaagcccaagagctcaagaccagcctgggcaacatagcgagacttcatctcttaaaaaagagaaactaattatgtaagcatggtgacatgcacgtgcggttcagccactcaggatgctgagatggcatgataaccccgggccaaagggttgagctgcatttacccagaatggccacttggattcactctgggcaacaaacagaaactgtttggaaagagaacaattactggtaagggtcctttgccggctt

SEQ ID NO: 705478 - DNA, 381 bp, Homo sapiens
cgttctgtttctgggtgtgtacctcaaagaattgaaagcagggaatcaaggagatctttgtacaccagtgttcatagcagcactctccgaaatagccaaaaggcagaagcaacctaagtgtctgtccattgatagttgaatggataaaaggaaggaaattctgacataggctctaatgtggaggaaccttcaggacattatgctaagggaaataagccagtcacaaaaggaaaaatactgtatgattccttccattcatgtgagatatttagagtagtcgaattcatgaagacagaaagtagcaaagtggttgccaagctttggggagaggggatcaaagtcagttactgtttaaagcgtaaagagtttccctttatcctg

SEQ ID NO: 705479 - DNA, 414 bp, Homo sapiens
gttcggcgctaggggtttaaagggcggtgtatgtggcgttcgtttctttgaggtgtaggtgattaaggcagctgaaaagtagattgccttctagacactgaaggcggatcggctttgtccatttgcgtggaaaccagaatgattttgacatacaggagagctgcagttgtgaaagcacgatcatcatagaggatgatgtaattaaaaaatggtcagtgtgcaaagaggagaactgcttgcatttctgtatttcgtgtctcgtagttgtcggaaaccagaattaggtcgggttcggtagtttctgtaattggcttttggatcggagaatagggagacaatctagaagatagcttaggttggagatggcagaggtgtggttgatttgaggtggagagagaggttcgtgttagtgtt

SEQ ID NO: 705480 - DNA, 884 bp, Homo sapiens
gctgttccgagatgtgcgcgcccagtggcgcccatccgaaggtggaccccaccgcgtggtctgttttgaggactttgcgacccagaatgacaactaagggtgggcgtatatccgtgcagcaacccacatatggtgaagggaccacgggaggaccgcaccccccgggtggtcccgatcgtggaagaaagaaccaacggttagaggtgacgcagcggtgtccacaaacccatagggaccgtttccagtatttaaccctcaagaaatttgatgctccacaacgtggaaaccccgtgttaaaatggctcaccggtatgtacaacaccgccgccctccactaaaggtgtactgttagcatttagtcccatatggacccattctgaggccaaacaaccgtgtgacttttgccttgattccctggaaggtcccgcccccctgataaattgtaaggtaatctttttttctctagagtagaggtataattgtgtgatatttccagaaataccagatataatgagttccaaaagtcacccgcttataggagaatcatgttctctttgatcactggataactgagtgtagtgaagtcttgcctcatattttcctcgagtagcactatgaccaaagttttctaaggtacccacgatgaggaccaagataaagattgtgtggtgttttggagtttggagagagaatattttaatttttataaaagccgttacccccattataaaggattcataatattgtactttttggttaaaagcaagagtgcagaattggttagattttgtgtttatttttgatggaaagactttgtttgtttttgtttttaagtttgccactccaatttttaggaataaatccccccctgttttccagcccca

SEQ ID NO: 705481 - DNA, 1129 bp, Homo sapiens
  misc_feature (456)..(456): n is a, c, g, or t
  misc_feature (489)..(489): n is a, c, g, or t
ctctgtgtggaggataattacatcctaccctgtgtttgtcaccagtatactttcaaaagcagtgtgcctgctgagagtccggattttacccccgctccggacgtggtgctatattaaaggaaatataagtgaaaagccttcaaggtcagaggttccccctcgacattgttcacaggtttatagagaactaatgtgagactatttttttcgcgcccccaaacccacagagagccttgttcccccggccctcctggacacatagcccctatccgtgattccttggccttggcattctttagctccaggaaaggtagaagagaatcttgtgcccatgggtctccctgcggtcaaacccttcgtggtttcaggacaataatgtgattggttatctggttaagggatgggggaccagataatatgaacgaagccaagtgaccgtataccggccaagcatgngacagcatttccccctgggcttgctccttggcnttttgacgctataagacacgaggcacggccaacacatgtggccaatttgctccccaatttttgaaaagcttctggggcctccttgcaaggcttttggatctctggtccagagtgaactcttgcttcccgttattccaggccagctccagacgccagaaagttaaggggccaggagtcaataacagttgtggcccaggaagattagcccagggtgaacaagagactcggtgcgggccagggagaatagcctgggggtccctcacctggcttagggagaataaccgaagcctactgtggtactgaagaactttctgggttctttcctttctgctaaccccgggagggtcctaagaaggaaggtgacattcttctctgtttgtcttaagattgccactgggggatttcttgacattgaggccccatctcttcccagcccagcccactgccttcttttgtaatattaagtgccttgagctggaatggggaagggggacacagggtcagtctgtcgggtggggcgccagaaatccaatccagcccaaggatatagttaggattaattacttaatagagaaatcctaactatatcacaccaagggatacaactataaatgtaataaaatttatgttctagaagtta

SEQ ID NO: 705482 - DNA, 474 bp, Homo sapiens
  misc_feature (27)..(28): n is a, c, g, or t
  misc_feature (39)..(40): n is a, c, g, or t
  misc_feature (52)..(52): n is a, c, g, or t
  misc_feature (56)..(57): n is a, c, g, or t
  misc_feature (74)..(74): n is a, c, g, or t
  misc_feature (79)..(79): n is a, c, g, or t
  misc_feature (86)..(86): n is a, c, g, or t
  misc_feature (92)..(92): n is a, c, g, or t
  misc_feature (101)..(101): n is a, c, g, or t
  misc_feature (107)..(107): n is a, c, g, or t
  misc_feature (117)..(117): n is a, c, g, or t
  misc_feature (121)..(121): n is a, c, g, or t
  misc_feature (126)..(126): n is a, c, g, or t
  misc_feature (129)..(129): n is a, c, g, or t
  misc_feature (134)..(135): n is a, c, g, or t
  misc_feature (137)..(137): n is a, c, g, or t
  misc_feature (139)..(139): n is a, c, g, or t
  misc_feature (146)..(146): n is a, c, g, or t
  misc_feature (149)..(150): n is a, c, g, or t
  misc_feature (153)..(153): n is a, c, g, or t
  misc_feature (168)..(168): n is a, c, g, or t
  misc_feature (247)..(247): n is a, c, g, or t
  misc_feature (259)..(260): n is a, c, g, or t
  misc_feature (264)..(264): n is a, c, g, or t
  misc_feature (345)..(345): n is a, c, g, or t
  misc_feature (347)..(347): n is a, c, g, or t
  misc_feature (349)..(349): n is a, c, g, or t
  misc_feature (361)..(361): n is a, c, g, or t
  misc_feature (370)..(370): n is a, c, g, or t
  misc_feature (379)..(379): n is a, c, g, or t
  misc_feature (381)..(382): n is a, c, g, or t
  misc_feature (414)..(414): n is a, c, g, or t
  misc_feature (470)..(470): n is a, c, g, or t
ctgatttgacagacttgctgtgattannatgaaagtagnnatattttggagntgannaggatgattcttttatntgaantattgancatttntttcctgtnagtatncagtgggatngggnagcgnagnttggnncngnggcctgnggnnagntgctgcttcccagcnaattagaagtaggagtgaaaacatccacaccaggtggtcgtaagaagactcctgctgtctgactggagggtgcgggggnaagggggggggnnaganggggtgatggggagaggaaagaataaggttttatgacacactaatacttctgcatttattagttgataatcagatcaacanantnaatggtaatgantgcttagtnaaactagtncnnatactgatatttgctcctttctgagggagagngcctgcgcttggaactgtccaaggtgctgatgtgaactaacggaaacacttcattngttc

SEQ ID NO: 705483 - DNA, 185 bp, Homo sapiens
agggccacagccaaggggaagcttttaaaggacagaagtccatgtaagcagcttttaaacaaggtttgtaagtccctagatgatcacagtagccgtcgagggctatctggtgtagaagactgtggtaagttagcatttgcagctagtgtgaagtttagcagtcttcagtacgtgctttccatacg

SEQ ID NO: 705484 - DNA, 117 bp, Homo sapiens
ccctcaggatcccccgtcgctgcgccaccgtgagcgttggcggcggcgtcgatgcgttctaccgtcccggccaggtggcgcacgccgacggcggcgagctgcgcggaaatgtccggg

SEQ ID NO: 705485 - DNA, 117 bp, Homo sapiens
taaaacccttatcaattgatggggacctaccgaaattggcaaaccacatttacaaaatgccatttttaagcggggggttttaaaccaaaagggggtttggatttaaagtgaaatttt

SEQ ID NO: 705486 - DNA, 340 bp, Homo sapiens
atgatcatatagagatagactttatttaatcattcccctactacgagacatatagagtgttacgacgtcctcttccatttggaaacactccaagctactgtactcgggaaccggcaacccatcaatagaagactcaatatgaagtgcttgcataaaactctctgataaagagctatatgaaagcagtagcctaagctgtctacaatataatatgaacagttcatattgccagtctctaagagaataacctaccagccatctcgtaagtcaatacataatgtcgtcgatagttatcgcgagatctcctacagagaggccagaggcatgattgtctatcctg

SEQ ID NO: 705487 - DNA, 228 bp, Homo sapiens
tctagaccatgcttataaattagcgacggcacagccacggaagtatcagatcaagccatgtctgtgatctacaccacagctcacggaacgtcggatcttaacccactgaccaggccagggatcgaatctgcatcctcctggataccggttgggtttgttacactgagccactaagaaaactctccagaactttttaattattgaaaattgcgtcggctacattttccg

SEQ ID NO: 705488 - DNA, 253 bp, Homo sapiens
acccgccctctagcacacacactggggcctaattgagggtggagggtggtaggagggagaggaccaggaaaaatgactaataggtaccaggcttaatacctgggtgatgaaatgatctgtacaatagactcccatgacacacatttacttatgtaacaatcctgcacatgtacccctgaacttaaaagttgaaaaaaaaaattcagtcttgcctttggtttttagcatttttactatgatatgactagagtgg

SEQ ID NO: 705489 - DNA, 1098 bp, Homo sapiens
tcgccgtggccaggcagggttctgccaggctctatcgccaagggagcaggggtccacctggggcctagtgacgcctgcagatagccctctcttagccccaacggcgcgcgggcttcagacgctccccggctccctcgctctgcagggtcttcccgggtaccggcaggccgcggcgggagcatgcttccggctcttaaccttgcaggtcgctgttgtgccgctgggccgcccggggcaggcaggacgcaaaggaggaggccgcccgccaatgcccgggcctgcgggcttccccgcctcggtttcccgtccgccagcccccggggaacgggccttgctcgcagccccttgtgcaagcaggaaccaggcgcgcggcgagcagcgcgcgaaggaggcaggaaggcagccgccccccttgtggcaaagcctcccacgaacccggagggcctccggcagggcacccgagtgcggcggatcccatcgacccagaaacgtgtcacctgcgggcaaagcgcggcacacccacgagagccgcccgcggggccccctcggagccccccatttcgcacgcacaggctggggacatcgggagcatccgggagcatccccagaggcctcccgaagagcacggcacgaagctctagatcagcatgaaagccctttgcgcccgagaaccccaaaagaccccgaatccgcacaccgcgaacaagccaccccgaaccacaaagcgtctgcccagggcaccaccccaatatgagaccgacaccacggagggcacccaatcagaaacccgcccacaatgttgacaagccaccccggggagacccccggagacggcgtgcgtcgaacaagaccgctgtgcaagaggggccacattcaggagcgccatcacaaagagtaaaggggagtggtgcaccagcataggggccaaccaggagactttaccacagagggtgcccccacattacagcaacgtggtttctcgaccccaaacggcaaatgggaacataaaatctcccgttggaccgacggacaaaacactcttgtgggcaccacttcccccgagtagttatatattctatccacagcagatgacgaccg

SEQ ID NO: 705490 - DNA, 231 bp, Homo sapiens
gacgatgcgttttcgcaggatttttctgagccgttttacactccagcctagcccctaccccccaattaggagggcgactggcccccaacaggcattaccccgctaagtcccctagaagtccactctcctaaacacatcgtgattactcgcatcaggagtatcaatcacctgagctcagcatagtctaatagaaaacaagcgaaaacggcatctgcctcggggggctcctca

SEQ ID NO: 705491 - DNA, 226 bp, Homo sapiens
gaaagtgggtcagagccgggccggggagcgcgcagcgggggctgcagattctgtccaccgagggtccagacgcccccggaacagcaggcctggcacttcgtcctgaggtgcagcccgcgcgagacgcagatgcccggggcgggctctagcaggctccactaactggggctactgactctgatgggcagcacagcgactcgggactcgcgaccccggagtactccac

SEQ ID NO: 705492 - DNA, 502 bp, Homo sapiens
ctcgcgaactgtgttatccgagggacccgcaactcagctacagtacagatcatgacctatgaatgcttcatcacgggacctggttttgctgctccttggtcctggcgtgttagcagccgaagcttcttttcgttccttggcgaggcttctgatggggctcgggacgtgtggagagcctactctgacatgagagaagccaattacatcggctcagacaaatacttccatgctcgggggaactatgatgctgccaaaaggggacctgggggtgcctgggctgcagaagtgatcagcgatgccagagagaatatccagagattctttggccatggtgcggaggactcgctggctgatcaggctgccaatgaatggggcaggagtggcaaagaccccaatcacttccgacctgctggcctgcctgagaaatactgagcttcctcttcactctgctctcaggagatctggctgtgaggccctcagggcagggataacacgttcgcga

SEQ ID NO: 705493 - DNA, 358 bp, Homo sapiens
atcctgcacagggaagggcacagtgcagtcgatgtcccaaaggccactcctaagcacagcaatgaccaaggaaggccctgcggggatgcagggacagcagcagccaacggcgggaggtcatcgggatgggagccatgagcaaggggagtaggagaggtgagctcaggtcatgtagggccctgtgggcaacagcagggactttgtcgttcagcctgtgaggcaagagctcctatgggtagggaagatgtgatgtgacctatttcatttcatttcattaaatgaaataaatgactcgctctgtcgcccaggctggagtgcagtgacgtgatcttggctcgctgcaaccttcacctcccgg

SEQ ID NO: 705494 - DNA, 203 bp, Homo sapiens
gttcccccagaattcagagcggacttaaagcggtcagtgtaattcattattaaaattaggttaaggggcacttcacttatttatggaggcggtttggcttaccttcatgaagatccaggggtccaaaaagggaaggaattacctttaataacaaggcagatacccaattcctaaagtaggtccaaataacggcaaaaaaaggg

SEQ ID NO: 705495 - DNA, 681 bp, Homo sapiens
  misc_feature (65)..(67): n is a, c, g, or t
  misc_feature (72)..(73): n is a, c, g, or t
  misc_feature (79)..(79): n is a, c, g, or t
  misc_feature (454)..(454): n is a, c, g, or t
  misc_feature (477)..(477): n is a, c, g, or t
  misc_feature (494)..(494): n is a, c, g, or t
  misc_feature (580)..(580): n is a, c, g, or t
cggacttcttggtgtgttgggactataggcacgcccacctatttattgtagagataataaatctnnnataannctatgntgcccaggctggtctcaaactcctgagctcaagcaatctacctgcctcccaaagtgctgggattgtaggtgtgagccaccatgcctggccagggatggtttcaataagggtgcaaccctaatccgatagggctggtaccctcatgagaaaaggaagaggtaccagagcattctctttgctatgtgcaactctaaaagacagcccgtaccaggcagcaatctgtcgggcaccttaatcttggacttccagccaataaatgcctattgcttcagttccccagtctaaggtagtctgttgtgacagcccgagcccactgatggtgagaaagactttattccctgtgtggtggaagttgcagcacactaagaaacaggnactagcaaaagagctttcctgcnccttcagttttttttgnttttgtgtttttttttgagacagtgtctcactctgtcacccaggctgcagtgcagtggcatgatctcagctcactgcaacctccanctcccaggttcaagtgattctcctgtctcaacacaccaagaacaacacaccaagaaggtcggaccttctggtgtgttggccagtggccgaagcgtttctgc

SEQ ID NO: 705496 - DNA, 190 bp, Homo sapiens
ttcaggagagagaactgacatctcgtgctcagccttggctgtcgtgccggtcaggaattgaacgtgagattccgagacggctaccacgcgataccgggtgaagtcgtcttggtgaggattggcgtggcgccggcccctgtccgcggcagaacctgtggtcctgtgggaactgggcgctagcgcaccctgg

SEQ ID NO: 705497 - DNA, 208 bp, Homo sapiens
tagggtacctccctgtggcccacgccaaactatagaaaaaacccaagcctgggagtgtactggggaggggaggtagtataggggaaacccctgtgctctaggctctggcctgggcagtgcagacagagagggctcatgtggaaggagtaggccagtaactccacctgcagaggacatggcactaggctagggatacgttgaggggagg

SEQ ID NO: 705498 - DNA, 218 bp, Homo sapiens
gcagtatgatcgtacttcataatatgtagccaatcactaactaagttatttctgtaagccaggaacattcctgactaacaactttgttatcacctcctcttgtgatcacctcctcctccgatttatgctcttttctttttttttttcttttctctcccttcggtctcggtctctctttttctctttctcactttctttctttctcattctagggtggt

SEQ ID NO: 705499 - DNA, 820 bp, Homo sapiens
agtcttctcgtgaatccacggccggtcatgagaagaaccgaggactgtgacgcaggcatgcgagtgctcgtgtgatgacgatggaggcctgggaagggtcgacgggcatacgatttgaggctgccaacgctaataggatacctcgacctatagcatacttatcgtcgatttgcactgcctggcacacggggcatcagggcacgcataggagttccatcactacgcgagcaagcacggacgttgcgcacgtggaatgcaattggttgaaagcaggccctgtcccgcttgtcactctacggagaaacttcgccaagcgctctggaatccgcggatagctcacatccgctcacataggcgtgaaacaagtggacatagcccttccaattgatgaggaatcaaccatctggacactggccccaaccacggcacccgcaacacacttataacacacgggtgaaaactatgaagcaccgtgtgctacgggacagtccgacctatgaagatcagcggctcagcattcatgcggacaaaacggcagccccttatgcaccccatatgaccctcaacggactaccccaaactgatgggaccacgtaacctcacagctcaacgtcgtcggaggcacacaaacacactggggggcatcgccggaccatacgcaccgcttccccccaattggaacgacacccgattggagtcgcactgacattcatatgagcaaccaatcccagaactttcccaggccaagtggtccccggttgagagctccctcgcacaccaacagctcgtagtctgcacccattatgccaaacgtaagcat

SEQ ID NO: 705500 - DNA, 512 bp, Homo sapiens
aaatcaagcaatctcctgccttactacccactagatgggattacaggcactcgtcaacaagccaggctgatttatgtactttaagtagagatggggttacaacatgatgaacaggctggtcttgaaatcctgacctcaggtgatccacccaacctggcctcccaaagtgctgagactacaggcgtgagccaacacacccagtcaaatgtagtgtatcaatgtgagtagtcctatatatttatttatcttaaaaatgaagtctggttctaatcacccaggctgaaatgcaccggtgtaatctcggatcactgcaaactccgcctccttggttacaactaatagtcctgcctcagactcccaagtagctcgggcataaagatgcatgcccagctaatattggacataaataaaaaacagaagagttttcgccacattggccaggctggttacaaactcctagactcagtagatccgcccgcctcagtctcccaaagtgtcaggattacaggctt

SEQ ID NO: 705501 - DNA, 326 bp, Homo sapiens
tttactcggggaaaacctcacctctcttcagatgcagactggattctggtccccactcccttttaggtcttgggctagtgctgggagaggccgtggaggtgttgaagtccgtccttgcttggtctcttgccttctctcatccctttcttctctcgtggagaatgcttgcaaaattatcctaagaaagcttattcaggatattaactttttctaatgtcttaagagcacttcttactgcaaatgggcgaactgctctgcctgagggtcacgagaggaagcaccccaacaggcctccatcatcccaaggcagctcaatccggactctt

SEQ ID NO: 705502 - DNA, 539 bp, Homo sapiens
agtaagtatgcctgtcatcaaagtgaaaacatcaatattgaaagtaaattccaatgaaattgttatgtttctccaacatctacctacatacatgtattgagaatgaaggaagactaaaatcagatttgaagatcttgtttagatggttctgaaaacagatttgaatataagagatcaaagtttaccaacttcataagttaccacttcataagtcacaggcattcacaggcaaggttccaggacatgctatgctcctgggagcgcagtactggcattgtaaatcagaccacgaggtcaatgtcatggcgtttcccatatgagggtccccaaaccagaatctttacaaagcagccatgtaattctggggcccttgagggtggacgcaacctccgagccgccagtccctggcgcagggcaagcgctgcggtgtcagtcccggccccagtcccggtcccattcacaagtcagcggcggctgcgagcggcccccgcggcatctgctcctcggcccgcgacgctcccctcagctggcggcggccg

SEQ ID NO: 705503 - DNA, 140 bp, Homo sapiens
gagctcgccacccaacaaccgtcgcgaagcgctgcgtgcctatgcccgggcctgcgtcgactgcattcactcggcggctcgcgggtttgatactggcgcggtaacgctggcgatgattgaaggcagcgctctgggcggag

SEQ ID NO: 705504 - DNA, 403 bp, Homo sapiens
cctgtcactgtcacttttctccctcctcattccctgtggtactgatggcagtgaacctgagaggcacctggagaagtgagtgcaggcttggtgttttgattaggggaggggtcagtcaagaagatgagctgaggtgtgaccatgctcctaaccctgccttcctggacactccaggaacctttggactaaggtgggaccaagcctaggcctctcccttctcctaccctctcacgtcccattagggagcccttgagggatggggttagcactcacctctgaggtggaggagggaagagggacctgggctgcggaagaacctccctgtaaatcaggtgcagtactgggaccatctgttctgtgaccccacccacctctaagaaataaaaatcaggtttgactctga

SEQ ID NO: 705505 - DNA, 472 bp, Homo sapiens
  misc_feature (115)..(115): n is a, c, g, or t
  misc_feature (291)..(291): n is a, c, g, or t
  misc_feature (355)..(355): n is a, c, g, or t
cagccgcctttgtccctaggccccgcccaaacccacaaggaaacaattcagcccctcccgcccaaggaccctggccccccacccaataaattttggttttggcccaaaaggtgcntagggatcccccattcccccccctgggaaataagggggtccccatgtgtttttccagtttttttggaattgggggcccccccccaaaaaccaagcccccggttccccccatcattgggtttcctttgggctttggggaaatttttaaattttgggagcccccccatccccaagggnggggatttgtggcagggattccactcaaaccctttttggaatttgggcctaatggccctccccngggattttggggttcccacccccccatggggattttggggggccccttttgggttcccccccccattaaaggaccccttttttttttccccaaaaagcacaaaattttggggggcca

SEQ ID NO: 705506 - DNA, 705 bp, Homo sapiens
  misc_feature (229)..(229): n is a, c, g, or t
  misc_feature (399)..(400): n is a, c, g, or t
  misc_feature (413)..(413): n is a, c, g, or t
  misc_feature (432)..(432): n is a, c, g, or t
  misc_feature (435)..(436): n is a, c, g, or t
  misc_feature (439)..(439): n is a, c, g, or t
  misc_feature (442)..(442): n is a, c, g, or t
  misc_feature (450)..(450): n is a, c, g, or t
  misc_feature (453)..(453): n is a, c, g, or t
  misc_feature (584)..(584): n is a, c, g, or t
  misc_feature (592)..(592): n is a, c, g, or t
  misc_feature (624)..(624): n is a, c, g, or t
  misc_feature (702)..(702): n is a, c, g, or t
ctaggggcttgactgcgtgggtctgtagcgctttcactgtaagaaagcaagatgcattttagaaactttaactacagttttagctccctgattgcctgtgtggcaaacagtgatatcttcagcgaaagtgaaaccagggccaaatttgagtccctctttaggacgtatgacaaggacatcacctttcagtattttaagagcttcaaacgagtcagaataaacttcagcnaccccttctccgcagcagatgccaggctccagctgcataagactgagtttctgggaaaggaaatgaagttatattttgctcagaccttacacataggaagctcacacctggctccgccaaatccagacaagcagtttctgatctcccctcccgcctctccgcccatgggnnggcaacaaatggnacgctgcgccaccccgtcncannccncgntcccctgnaangcgcaaccccaagctggggccaggggaaaagtatgaattgcacgcagcgactgacaccactcccagcgtggtggtccatgtatgtgagagtgatcaagagaaggtaggtaagaagaggaaatggtaagtangaggtganctaagccaaaaattatccagtaccagaggccngagtacacgccgatccacctcagctgaactggcacgcgacgaggacgcattccaatcatactcacgggaggaatctcntac

SEQ ID NO: 705507 - DNA, 162 bp, Homo sapiens
cagtatctagctccaaggtccgggttatgctccaaggacagcgataacagacatatatttgaactcatcgtggtctgaggttaaagtgtctccactaaccctgctaggtctcttgccggatcagtagctgtaaaagaacttgactgtgtgttggcatctgga

SEQ ID NO: 705508 - DNA, 785 bp, Homo sapiens
agcggctctttccgtctcaggtcgccgctgcgaagggagccgtcgtccatgtctgcgtcatctgcaatggatggtcgtgcggaaggtgctccagtttcctgatcaggatggaagtaacgcagacctacagcactgagcccaataacttgaaggcccggaattccttccggtacaacggactgattcaccgcaagactgtgggcgtggagccgggagccgacggccaaggtgtcctggtggtcattaacgcggagatcctggccagcggaagcgctgccaacgtcctattgttgcggaccatacatgcaacatagaattgctcgagccaggctcaagaaggattagagcacattgatcccgtaagaacaaagtaccggcccgaactgcgcatgtgagccagtccgcgagggctcagcggcgcatcgcgtgcgcagaccatgaaggcctgtgattggtgaagaaggaaagctggagccgagcccaacgatgagctcctgaaacccgctgactcccatagcaatataagtcaggcatggcttttcgtcatcccggtaatcagaacacattaagagctttgcagagcaggaggacgtgggaattaaggggcgcagagaaactgttccaggggagggggacgcacgagaaatccaggcgttattgcttcgccttttacatcgagaacgggaaaatgtttccagacttgggagctttagatacctgtggcctatagaagtgtgtacccagcgtctgaagaattgtaaacccgtttcaaagttaccaaacat

SEQ ID NO: 705509 - DNA, 402 bp, Homo sapiens
  misc_feature (11)..(11): n is a, c, g, or t
tatattcaggncagcatggtggctcacatctgcaattccagcactctgggaaggccgagttgggcagatcacatgaggccaggagttcaagaccagcctgaccaacatggtgaaaccccgtctctactaaaaatacaaaaattagccaggcatggtggcacgggcctgtaatcccagctacttgggaggctgaggtaggaggattgcttgagccaaggagtttgaggctacagtgagctgtgatcgggctactgtactccagcctgggtgactgagaccctggctcttaaaaaaaaaaaaaagggcttatgtatgtatttggtggattttggactaaggtacaagggttattcaatggggaagtgatagtgtcgtgttttagagctagaagaactagcttct

SEQ ID NO: 705510 - DNA, 138 bp, Homo sapiens
ggtgtcagtcggatgtggaaccagcacctgggctacgtgctcacctggccatccaacctgggcactgggctgcgttgaggcgtgcattgttacaactggcgcaccgtgagcaagcaacccaagttcgaggtagatcct

SEQ ID NO: 705511 - DNA, 455 bp, Homo sapiens
ggtcggacgggttccttgtctataaatatcatagcttctaggtacagcagatgtgacacaaactggtataccttgctaacatagcagattctaatcaaaatatgcagtctcttttaccagcaccacccacacagaatatgcctatgggtcctggagggatgaatcagagcggccctcccccacctccacgctctcacaacatgccttcagatggaatggtaggtgggggtcctcctgcaccgcacatgcagaaccagatgaacggccagatgcctgggcctaaccatatgcctatgcagggacctggacccaatcaactcaatatgacaaacagttccatgaatatgccttcaagtagccatggatccatgggaggttacaaccattctgtgccatcatcacagagcatgccagtacagaatcagatgacaatgagtcagagacaaagggaaaca

SEQ ID NO: 705512 - DNA, 1616 bp, Homo sapiens
  misc_feature (738)..(738): n is a, c, g, or t
  misc_feature (831)..(831): n is a, c, g, or t
  misc_feature (1616)..(1616): n is a, c, g, or t
gagcccaagcttaccacctgcacccgtgagagctgtgtcaccatgtgggtcccgggttgtcttcctcaccctgtccgtgacgtggattggcgctgcgcccctcatcctgtctcggattgtgggaggcttgggatgtgcgagaagcaattcccaaaccctggcaggttgcttgtggcctctcgtggcatgggcagtctgcggccggtgtcctgggtgcacccccagttgggtcctcaaagttgcccactgtgcatcaggaacaaaagcgtgatcttgctggggtcgggacagccgtgtttcatcctgaagacacaggccaggtattttcaggtcagccacagtttcccaaaccgctctacgatatgagcctcctgaagaatcgattcctcaggccacggtgattgattccagccagaactcatgctgtccgctgtgtaagagcctgcgagtcacggatgccgtgaagggtcatggacctgcccacccaggagccagcacttgggaccaacttgtaacgctacagggtgggcagcattgaaccagaggagtcttgaacccaaagaaacttcaggtggtgtgacctcatgttattccactggcgtgtgtcggcacgtcaccctcagaaggtgccaagttcatcgggtgttgtgacctcgaccgtgggcaccagcttggcgtggcttggggccttgttgcatgctgtccagggtccatgtggggcgcatgcctccccgagcnccgaccgtgtgtctcggtgcgcccttggtccgcgcaccttggtggtgtgctcctccctctccttcgctccgtctcctctgcgtctcgtgtcgnacactagaagaaaaaagacgagagcaggggcgagagcaggagaagaaagcgagaaagggccacgaaggaaggagaagaggagaaagcagacacggaccaagaggagaggaacgagagacagatagggaagcagggaagaacagggaccgagaaggaatgaagagaggagacgacggaggagaaacgggggggacgcggaggagagagagggcaagaccgacagcaaacaagagacgaggagaggacggagaggacagcagaagcgaagagagggagaacgaaacggaacaagagaagagaagagggagaagagaaacgacgagaacagcagcagaagcacagaggaagacagagaacagcagaatacccgggcaacgagagggagcaccggagaggcagaacgagaagagagagaaaagaaagaagaagaggaggagaggacatagaagacgagacaaggcaagaacaaggagagagggaaaggcgagaagagcagagagagagaaaggcgacggagcagaagggagagaagcagagggcgagaccggagaaaacgaagatcagaacggacgaagagaagaaacgagggaagacagagggaacacagacgagagcgcggggaggagcaggagaagcaagtcacgaaggcacgcggggagaagagtaaggaacaagggaacagagaggcacgaacagacgacggacacagcagcaagcaggaggcacggaggaaggaagaggagaggaagaggagcgaagaaaagcaagcgcaagagatagagaan

SEQ ID NO: 705513 - DNA, 1038 bp, Homo sapiens
ctggaagctgcgtgaggacgggagctcgagagagctaacaggactagacctggctggacatctggaccgctggatccggagtgtggctgaccccgtgctgacccggaccctaaatccgtccccgccccagaggtgcggaggcgcgctgctctgattccccccaccgctggctgtgctgcctgcctgtttacgtctgcagatctccagggtgagccccaccagcctagtcaacatggcctcggaagacattgccaatgctggcagagacacttgccaagactcagtgtggccgggggacagctgagtttcaaaggcaagagcctcaaactcaacactgcacacgatcgctaaagatgtgattaccagacattgccgcactttgacagcttggcaggctctgcgtctggaaggcaacacagtgggcgtggaagcagccagggtcaatcgacaaggccttagcaccaacaagctccggcacgtcgacagcgctgccactggcacgtgacatgtccacccggcacggcctgcggacacccgaggatcccaccagacccctgactcatcacctagcgccgcaacgacctcatccacacgcctgcggcgccaccacacatgcgtgcgcagcctgggaccttaacgccgacacacagccatacgaggccccgactggtcgttgcaacggacttccgcacgaccacagatcacagacgccttcacgcccctgccctcaccaccccatggccacggaacgctccaagccctccacacagactgtgcgccactggcgccccctcgagtccgagcagcgccacagaacccacctgccatgcaacgcaccccacgacccgcgcaccgtgccaaccccggggaaaaccccacagcagtgccccaccgggcccaggccccaccggggcccgtgaaaccgggcacccacggagggcagggcaggcaaagcccggatcaggccccactcgcaccgagacgccccgcgccctcgcgccacgcacggcccccaccgggcccactccggccacccat

SEQ ID NO: 705514 - DNA, 111 bp, Homo sapiens
gaggatcctgtgcggatgaagtgtctgtaggtacgttttatattatataaggacagaccaaaaatccaggttggtggaagtcgcgttctttacatctgggagcggggctgt

SEQ ID NO: 705515 - DNA, 2488 bp, Homo sapiens
ttcaagccggcgcgccgcggggtgagcggcgccgggcctgaggtcgcccagacgccgtcggggcggagcggggtcgcgaggctgcatcccggccggcggttccggagcctcgcggctggggaggcgcggcccgggacgctcgagcttagggagatctgccttctggagactgcgccgtcctcccgggagagccagaaagaggacatggctgctgggcagcgggaagcgaggccccaggtgtcactgacgtttgaggatgtggctgtgctgtttacccgagatgagtggagaaagctggccccttctcagagaaacttgtaccgggatgtgatgctggagaactataggaacctggtctcactggggctcccatttaccaaaccaaaagtgatctccctgttgcagcaaggagaagatccctgggaggtggagaaagacggttctggcgtctcctctctaggatcgaagagcagtcataaaaccacaaagtcaacgcaaacacaagactcttcatttcagggactgatactgaaaagatccaacaggaatgtaccttgggatttgaaattagaaaagccttacatatatgaaggcagattagagaaaaagcaggataaaaagggaagttttcagatagtttcagccacccacaaaaaaatccccactatagaaagaagccataaaaatactgaattgagccaaaacttcagcccaaagtcagtgcttattaggcaacagatacttcccagagaaaaaacaccaccaaaatgtgaaatacaaggaaacagcctcaaacagaattcacaattacttaatcaaccaaaaattacagcagataaacgctataaatgtagtctgtgtgaaaaaaccttcattaacacttcatcccttcgtaaacatgagaaaaaccatagtggagagaaactatttaagtgtaaagaatgttcaaaagcctttagccaaagttcagctcttattcaacatcaaataacgcatactggagagaaaccctacatatgtaaagaatgtgggaaagcctttactctcagtacatccctttataaacatctaagaacccatactgtggagaaatcctacagatgtaaagaatgtggtaaatccttcagccgaaggtcaggcctttttatacatcaaaaaattcatgctgaagaaaacccttgtaagtataatccgggtaggaaggcatctagttgcagcacatccctttctggatgtcaaagaattcattctagaaagaagtcctacttatgtaatgaatgtggcaacacctttaagtctagctcatcccttcgttatcatcagagaattcacactggagagaagccttttaaatgtagtgaatgtgggagagccttcagccagagtgcctctcttattcaacatgaaagaattcacaccggagaaaagccctatagatgcaatgaatgtgggaaaggctttacttctatttcacgacttaatagacaccgaatcattcatactggagagaagttttataattgtaatgaatgtggtaaagccttaagctcccactcaacacttattattcacgagcgaattcatactggagaaaaaccatgtaaatgtaaagtatgtggaaaagccttcagacagagttcagctctcattcaacatcagagaatgcatactggagaaagaccctataaatgtaacgagtgtgggaaaacattcaggtgtaactcatcacttagtaatcaccagagaattcatactggagagaaaccatatcgatgtgaggaatgtgggatatcttttggccaaagttcagctcttattcagcatcgaaggattcatacaggagaaaaaccctttaaatgtaatacatgtggaaaaacttttagacaaagctcatcacgtattgcacatcagagaattcatactggagagaaaccctatgaatgtaatacatgtgggaaacttttcaaccataggtcatcccttactaatcattataaaattcatatcgaagaggacccctagaaagtagatttgtatgtgtgaaagccttaaaccaaagctcatcgaagaatacatccttgagagagatgtaataaatgtaatggatgtgaaaaaaactgtaataatttagccctcattaggtatttaattccatggataaacctcagctatataatagatatgaggaaagtgtttgtgcctgtcagacacttaaaaaaataacctgagatgaagaatttacaattgaagacattgactttagccatttgtgaaatgggtttgctttttcccttttcctacagacgtatatgctagatgtcacgtgatcatcagaaacagatatccgagtgggtggggaggtgtgctttagatttctcattagaagaccaccaaactggtaatatttttatagcattttaatagcttgatcaaattgtacctttttagagaaaaggaccaaaataaaagaaaaatgaattatgaacta

SEQ ID NO: 705516 - DNA, 2507 bp, Homo sapiens
  misc_feature (552)..(552): n is a, c, g, or t
  misc_feature (554)..(554): n is a, c, g, or t
  misc_feature (561)..(561): n is a, c, g, or t
  misc_feature (563)..(563): n is a, c, g, or t
  misc_feature (616)..(616): n is a, c, g, or t
  misc_feature (620)..(620): n is a, c, g, or t
  misc_feature (638)..(638): n is a, c, g, or t
  misc_feature (643)..(643): n is a, c, g, or t
agcggccgccttgctcctctaggtcccaggcgctctgcggagctttcgctgcccggtgagcggcgccgggcttgaggtcgcccagacgtcggaggagccgggtcacgaggctggagcttcctgcttgcagagtgcggcggggaggcgcggcccgggaacgcgggatcctggggagatctgccttctggagactgcgccgtcctcccgggagagccagaaagaggacatggctgctgggcagcgggaagcgaggccccaggtgtcactgacgtttgaggatgtggctgtgctgtttacccgagatgagtggagaaagctggccccttctcagagaaacttgtaccgggatgtgatgctggagaactataggaacctggtctcactggggctcccatttaccaaaccaaaagtgatctccctgttgcagcaaggagaagatccctgggaggtggagaaagacggttctggcgtctcctctctaggatgtaagagcacacctaaaatgacaaagtcaactcaaactcaggattcatttcaggagcagataagganangattganangggatgaaccctggaacttcatatcagaaagatcctgcatatatgaagagaanttanagaaacagcaggacaaanatganaatttacaaataatttcagttgcccatacaaaaatccccactatagaaagaagccataaaaatactgaattgagccaaaacttcagcccaaagtcagtgcttattaggcaacagatacttcccagagaaaaaacaccaccaaaatgtgaaatacaaggaaacagcctcaaacagaattcacaattacttaatcaaccaaaaattacagcagataaacgctataaatgtagtctgtgtgaaaaaaccttcattaacacttcatcccttcgtaaacatgagaaaaaccatagtggagagaaactatttaagtgtaaagaatgttcaaaagcctttagccaaagttcagctcttattcaacatcaaataacgcatactggagagaaaccctacatatgtaaagaatgtgggaaagcctttactctcagtacatccctttataaacatctaagaacccatactgtggagaaatcctacagatgtaaagaatgtggtaaatccttcagccgaaggtcaggcctttttatacatcaaaaaattcatgctgaagaaaacccttgtaagtataatccgggtaggaaggcatctagttgcagcacatccctttctggatgtcaaagaattcattctagaaagaagtcctacttatgtaatgaatgtggcaacacctttaagtctagctcatcccttcgttatcatcagagaattcacactggagagaagccttttaaatgtagtgaatgtgggagagccttcagccagagtgcctctcttattcaacatgaaagaattcacaccggagaaaagccctatagatgcaatgaatgtgggaaaggctttacttctatttcacgacttaatagacaccgaatcattcatactggagagaagttttataattgtaatgaatgtggtaaagccttaagctcccactcaacacttattattcacgagcgaattcatactggagaaaaaccatgtaaatgtaaagtatgtggaaaagccttcagacagagttcagctctcattcaacatcagagaatgcatactggagaaagaccctataaatgtaacgagtgtgggaaaacattcaggtgtaactcatcacttagtaatcaccagagaattcatactggagagaaaccatatcgatgtgaggaatgtgggatatcttttggccaaagttcagctcttattcagcatcgaaggattcatacaggagaaaaaccctttaaatgtaatacatgtggaaaaacttttagacaaagctcatcacgtattgcacatcagagaattcatactggagagaaaccctatgaatgtaatacatgtgggaaacttttcaaccataggtcatcccttactaatcattataaaattcatatcgaagaggacccctagaaagtagatttgtatgtgtgaaagccttaaaccaaagctcatcgaagaatacatccttgagagagatgtaataaatgtaatggatgtgaaaaaaactgtaataatttagccctcattaggtatttaattccatggataaacctcagctatataatagatatgaggaaagtgtttgtgcctgtcagacacttaaaaaaataacctgagatgaagaatttacaattgaagacattgactttagccatttgtgaaatgggtttgctttttcccttttcctacagacgtatatgctagatgtcacgtgatcatcagaaacagatatccgagtgggtggggaggtgtgctttagatttctcattagaagaccaccaaactggtaatatttttatagcattttaatagcttgatcaaattgtacctttttagagaaaaggaccaaaataaaagaaaaatgaattatgaacta

SEQ ID NO: 705517 - DNA, 1042 bp, Homo sapiens
ccatcagttggtagagaatactgatgagactatcgcgttgacaacgaggcccgctatgatatctgcttgcgcactctgaagctgatcataccaatctacggggatctgaaccacctggtgtcagccaccatgagtggttgtcaccacctgcctccgatttccctggccagctcactgctgacctccgcaagtgtggcagtcaacatggtccccttcccagcgtgtccatctccttatatggcctggctttgcccctctcacgcacgaccgttggaagctcagtcagtatgcgagactctcacgagtgccgggaactcacccagtgaggtctatcgatgcccaagatacatgatgggcgtgcctgtgacccccgtcctaccgggcgatacctcaccgtggtctgctgatctatcccgtggctcgcgcatggtccatgaacggcagggtctgatgacgcagatgcttaacgtgctgatacatgaacaagccagctactttgtggaagtggagtcgcccaacaatggtcaacgaccacgccgtctgtgacactcaccaccttcagtggcctcaagatggcatgtctaccttctttggcattacgcacagccatcgaggagctcttcaggcgctctcggagcagttcactgcatgtccgccggaaggctttcctctcactggtacacaggcgaaggctggacgaaagggagttcaccgaggctgagagcaacgatgaacggacctcgtccggagtatccggggtccggatgccgcgcaaaagcaggagttccggaggcggcgcacagaggctagagagagcccccagcaccgaaggggatcggtccggagccgaggaaccagaagcccctccctgcccggaaatgggatgcgcccgacatgtgcagggatctgggggccgacagccggcgaaatggcgccaaatggtggggcccaaagaggccgcaaacggcgacggcccgtaggcacgattaaaggcccacgacacgggacggatgcaccacataggcgcggtggtacagagacg

SEQ ID NO: 705518 - DNA, 356 bp, Homo sapiens
cggcacgagctgagcgccagtacatgtagggagctgttcgccagagacagtgctgtgttctgcgcctcttctacatcggctacattcatgaggacacggttgtgtcaaaggcacaggtatttgaggctgtgcaaaggttcctcctgtgtctgcaggacacacgggcgagcgccccccacatgggggcttcggctccatctatctggttgcgatctggcacggacacaagacacatacccttcgtgagacatatgggcagtgccatcagtctggtcaaggtctttctgtgggattcagagcttatgagtaggtatgggcaccgtgtgctggaactttgggtcttctggggagagccc

SEQ ID NO: 705519 - DNA, 2607 bp, Homo sapiens
agaactcagcggcgtgggcgagccctggccctggtgggctcagcgggtcgctgctgccactgcggtccagcgtcccctccgtaagccccaagcctgtggggcctgggcctgccgggcggcccagcgctgctctggtccgcgggctcctggctcctcccgaatccctgtgagggcgcgcggggtccttctcagcgggagtcggggttttagagctgcggattccagggctggaaagcagaaggggttcttcctggctccctttttcttgggagatctgccttctggagactgcgccgtcctcccgggagagccagaaagaggacatggctgctgggcagcgggaagcgaggccccaggtgtcactgacgtttgaggatgtggctgtgctgtttacccgagatgagtggagaaagctggccccttctcagagaaacttgtaccgggatgtgatgctggagaactataggaacctggtctcactggggctcccatttaccaaaccaaaagtgatctccctgttgcagcaaggagaagatccctgggaggtggagaaagacggttctggcgtctcctctctaggatcgaagagcagtcataaaaccacaaagtcaacgcaaacacaagactcttcatttcagggactgatactgaaaagatccaacaggaatgtaccttgggatttgaaattagaaaagccttacatatatgaaggcagattagagaaaaagcaggataaaaagggaagttttcagatagtttcagccacccacaaaaaaatccccactatagaaagaagccataaaaatactgaattgagccaaaacttcagcccaaagtcagtgcttattaggcaacagatacttcccagagaaaaaacaccaccaaaatgtgaaatacaaggaaacagcctcaaacagaattcacaattacttaatcaaccaaaaattacagcagataaacgctataaatgtagtctgtgtgaaaaaaccttcattaacacttcatcccttcgtaaacatgagaaaaaccatagtggagagaaactatttaagtgtaaagaatgttcaaaagcctttagccaaagttcagctcttattcaacatcaaataacgcatactggagagaaaccctacatatgtaaagaatgtgggaaagcctttactctcagtacatccctttataaacatctaagaacccatactgtggagaaatcctacagatgtaaagaatgtggtaaatccttcagccgaaggtcaggcctttttatacatcaaaaaattcatgctgaagaaaacccttgtaagtataatccgggtaggaaggcatctagttgcagcacatccctttctggatgtcaaagaattcattctagaaagaagtcctacttatgtaatgaatgtggcaacacctttaagtctagctcatcccttcgttatcatcagagaattcacactggagagaagccttttaaatgtagtgaatgtgggagagccttcagccagagtgcctctcttattcaacatgaaagaattcacaccggagaaaagccctatagatgcaatgaatgtgggaaaggctttacttctatttcacgacttaatagacaccgaatcattcatactggagagaagttttataattgtaatgaatgtggtaaagccttaagctcccactcaacacttattattcacgagcgaattcatactggagaaaaaccatgtaaatgtaaagtatgtggaaaagccttcagacagagttcagctctcattcaacatcagagaatgcatactggagaaagaccctataaatgtaacgagtgtgggaaaacattcaggtgtaactcatcacttagtaatcaccagagaattcatactggagagaaaccatatcgatgtgaggaatgtgggatatcttttggccaaagttcagctcttattcagcatcgaaggattcatacaggagaaaaaccctttaaatgtaatacatgtggaaaaacttttagacaaagctcatcacgtattgcacatcagagaattcatactggagagaaaccctatgaatgtaatacatgtgggaaacttttcaaccataggtcatcccttactaatcattataaaattcatatcgaagaggacccctagaaagtagatttgtatgtgtgaaagccttaaaccaaagctcatcgaagaatacatccttgagagagatgtaataaatgtaatggatgtgaaaaaaactgtaataatttagccctcattaggtatttaattccatggataaacctcagctatataatagatatgaggaaagtgtttgtgcctgtcagacacttaaaaaaataacctgagatgaagaatttacaattgaagacattgactttagccatttgtgaaatgggtttgctttttcccttttcctacagacgtatatgctagatgtcacgtgatcatcagaaacagatatccgagtgggtggggaggtgtgctttagatttctcattagaagaccaccaaactggtaatatttttatagcattttaatagcttgatcaaattgtacctttttagagaaaaggaccaaaataaaagaaaaatgaattatgaacta

SEQ ID NO: 705520 - DNA, 640 bp, Homo sapiens
  misc_feature (62)..(62): n is a, c, g, or t
aataaagctcttgggcaaggggacgtctcagctgatgcccgtggaggtcccagccccccctncggttctcggaggtccggagcccctgatgcagtgcacagcctggctgaatgctatttccaccagcccgaggctatcgaagagttccccgtgccggctcttcaccatcccgttttccagcaagagtcgttcaccagacaggtgttatggaagctgctgaaggttgtgaaattcggagaagtgattttttccacgcaattagcagccctggcaggcaaccccaaaaccgcgcgagcagtgggaggagcaattaaaggcaatcctgtccccatcctcattccgtgccccagagtggtttgcaacaacggagccgtgggcaactactccggaggactggccgttaaagaatggcttttggcccattaaggcccccggttggggaaaccaggcttgggagggagctcaggtttggcaggggcctggctcaaaggagcgggagctacctcgggctccccccctgctggccgaaactgagtatgtgcagtaggatggatgttttagcgacccccccgtgtaaccctgcatcggatgcggggggtggaggcccccctgtattaaaggaagtggcagtgtcctggga

SEQ ID NO: 705521 - DNA, 2822 bp, Homo sapiens
ttcaagccggcgcgccgcggggtgagcggcgccgggcctgaggtcgcccagacgccgtcggggcggagcggggtcgcgaggctgcatcccggccggcggttccggagcctcgcggctggggaggcgcggcccgggacgctcgagcttagggagatctgccttctggagactgcgccgtcctcccgggagagccagaaagaggacatggctgctgggcagcgggaagcgaggccccaggtgtcactgacgtttgaggatgtggctgtgctgtttacccgagatgagtggagaaagctggccccttctcagagaaacttgtaccgggatgtgatgctggagaactataggaacctggtctcactggggctcccatttaccaaaccaaaagtgatctccctgttgcagcaaggagaagatccctgggaggtggagaaagacggttctggcgtctcctctctaggatcgaagagcagtcataaaaccacaaagtcaacgcaaacacaagactcttcatttcagggactgatactgaaaagatccaacaggaatgtaccttgggatttgaaattagaaaagccttacatatatgaaggcagattagagaaaaagcaggataaaaagggaagttttcagatagtttcagccacccacaaaaaaatccccactatagaaagaagccataaaaatactgaattgagccaaaacttcagcccaaagtcagtgcttattaggcaacagatacttcccagagaaaaaacaccaccaaaatgtgaaatacaaggaaacagcctcaaacagaattcacaattacttaatcaaccaaaaattacagcagataaacgctataaatgtagtctgtgtgaaaaaaccttcattaacacttcatcccttcgtaaacatgagaaaaaccatagtggagagaaactatttaagtgtaaagaatgttcaaaagcctttagccaaagttcagctcttattcaacatcaaataacgcatactggagagaaaccctacatatgtaaagaatgtgggaaagcctttactctcagtacatccctttataaacatctaagaacccatactgtggagaaatcctacagatgtaaagaatgtggtaaatccttcagccgaaggtcaggcctttttatacatcaaaaaattcatgctgaagaaaacccttgtaagtataatccgggtaggaaggcatctagttgcagcacatccctttctggatgtcaaagaattcattctagaaagaagtcctacttatgtaatgaatgtggcaacacctttaagtctagctcatcccttcgttatcatcagagaattcacactggagagaagccttttaaatgtagtgaatgtgggagagccttcagccagagtgcctctcttattcaacatgaaagaattcacaccggagaaaagccctatagatgcaatgaatgtgggaaaggctttacttctatttcacgacttaatagacaccgaatcattcatactggagagaagttttataattgtaatgaatgtggtaaagccttaagctcccactcaacacttattattcacgagcgaattcatactggagaaaaaccatgtaaatgtaaagtatgtggaaaagccttcagacagagttcagctctcattcaacatcagagaatgcatactggagaaagaccctataaatgtaacgagtgtgggaaaacattcaggtgtaactcatcacttagtaatcaccagagaattcatactggagagaaaccatatcgatgtgaggaatgtgggatatcttttggccaaagttcagctcttattcagcatcgaaggattcatacaggagaaaaaccctttaaatgtaatacatgtggaaaaacttttagacaaagctcatcacgtattgcacatcagagaattcatactggagagaaaccctatgaatgtaatacatgtgggaaacttttcaaccataggtcatcccttactaatcattataaaattcatatcgaagaggacccctagaaagtagatttgtatgtgtgaaagccttaaaccaaagctcatcgaagaatacatccttgagagagatgtaataaatgtaatggatgtgaaaaaaactgtaataatttagccctcattaggtatttaattccatggataaacctcagctatataatagatatgaggaaagtgtttgtgcctgtcagacacttaaaaaaataacctgagatgaagaatttacaattgaagacattgactttagccatttgtgaaatgggtttgctttttcccttttcctacagacgtatatgctagatgtcacgtgatcatcagaaacagatatccgagtgggtggggaggtgtgctttagatttctcattagaagaccaccaaactggtaatatttttatagcattttaatagcttgatcaaattgtacctttttagagaaaaggaccaaaataaaagaaaaatgaattatgaactacctctcagtctctggggttgtccttttcctaccctgatgtcaaacttatgcatggatttcattaaaaagaacagaaacacaacacgacgaaacagaaaaaccacgtgtgtgggcgcgcatgggcctcggaaaagagttttaaacccacatcgatggggggcgccgggccccaatggtagacggaaaccgggtgaaagaggaggtcacacagagaacaccgggcgaaaaaaaggcaggagaatccaccagaaaaaccgcgggggccccgggcctgcgagaacaccaagaggagtcaggaggcacgaggggcataaaaggcgccaaggggcagaca

SEQ ID NO: 705522 - DNA, 1090 bp, Homo sapiens
gagccgaacctggggttgctcaggaacgtgggccaggcaatgtggaagtcgttgacattgcctgggccacaagagtgggacatagtttttctcccctcagcccactcctggtagcacctgtcgccagcctggtacaaagccaggcctttttcttctgtgagcatctcatcactgtccagcagcaggtggaaaaagggggacaacaaccagacctattacttctcccccatttcctccaaatttcgctgtgccaaatgtttacaatcttataaactatgacatctattgaaatttccttaatcaagagcttcttcgtgtaaacgtcgctttctttagctatagacacaagacacaaccgtaactatctcttaatggcatccagccttgcctgagctcacctttctcctgacagaacgggctacgcgagtgaaatatctcatgtaaacatccaccaagtccctttaccctaactctgacagctgccattaaacccaactcactaacacagggacatgattgcaccctagtcctctgctgggccacgaaacttccagacgcattaccaaaaactacgctgcaagtactactcacttctcaccacgtgcgcgctagacgtcagttgcgctgctctcgtccctcgctcccatacattcccataatatgcacgtgcccccccgaacggaaacacaggctacactgggcaccgtacactccaccatcacgccagaagcacaccatagactccacacctcacagcacctgtacaatccctggtcaccagcacagcgggccaaccaccgtccacgcacaagcacgacatatgacgcacatacagacgtaaggcaaccgggacagacaggacaacggcggacaacaccagtaacacacacaaccggcgactaacacgtacaacggcagcccagcaacacaaccgccaacagacccgcaaagcacccaacaccacgccacgacggccgcaccaacaaaagccgcgaaacgcggcgacaccccccaacaaccaaacacgacacgccaacccacgtcatcaccccgcgcactcacacacagaactaaacaacaaccgcaacac

SEQ ID NO: 705523 - DNA, 621 bp, Homo sapiens
  misc_feature (398)..(398): n is a, c, g, or t
  misc_feature (414)..(414): n is a, c, g, or t
tgtggtggctcacgcctgtaatcccagcactttgagacgccgaggtgggcagatcacaaggtcaggagatcaagaccatcctggctaaagtggtgaaaccccatctccactaaaaatacaaaaaaattagctgggcgtggtggcgggcacctatagtcccagctactcgagaggctgaggcaggagaattgcttgaacccgggaggcagacgttgcagtgagccaagatcgcaccattgcactccagcctgggcgagacagtgagactccgtctcaaaaaaaaaaaatacatctaccaacacatgaatggagaaaacgcactgctatatctatacgacagaatattaactacaggtgcagacagcaacatggataagtcttaaaaacatgccgaacanaggaagcgagacacanggatacgaactgtctgattctatttatacaaaacacacggaaagactaatctgattcacagtgatagtgcgcagatagggaaggagaggatgcctgggaagggcgcgagggacctttctgggtcatggtgtcctgatattggatgcagtggtcacatgtgtgcatacatttgccaaactattcagtacacttgtaagggtgtttttt

SEQ ID NO: 705524 - DNA, 390 bp, Homo sapiens
  misc_feature (32)..(32): n is a, c, g, or t
  misc_feature (51)..(51): n is a, c, g, or t
  misc_feature (141)..(141): n is a, c, g, or t
  misc_feature (151)..(151): n is a, c, g, or t
gtaatatacgtgcacacatgatgtatattaancacatggaaagattaaagnctaagacttttttcactgtaggaactgtacctgttggatgtgttttgggtacagaacaaaatataaatgttataaaccttgacgtaaggnaataacaganaaaagggtagggaataaggagaaagcatatcatcttatctctagcaagggattaactgatattatctaaacaagtatatagtttcttaaaatgattatataaactttttaatgttcctgtatttaaaattcctttatatttttgtttatattttatagtagacagtgtcttttataaagaagcaatgcctttagttttttttaatgttggattaaaataatctttaagccttttatttc

SEQ ID NO: 705525 - DNA, 306 bp, Homo sapiens
tccactagtgtaggttaattattattattattttttaagaccaagtccactctgtcacccaaggagtgcagtagtagaatctcggctcactgcaacctccacctcccaggttcaagcgattctctggcctcagcctcctgagtagctgggatgacaggtgcatgccaccacgcctggctagtttttgtatttttggtagagacggggcttcaccgtgttggtcaggctggtttcgaactcctgacctcaggtgacccaccggccttggcctctcaaactgctgggattacaggcatgagccaccta

SEQ ID NO: 705526 - DNA, 199 bp, Homo sapiens
gaagagctaaggaagaggaacataatcctgaagatccggaaaaagtttaattatgaaaaacaaaaagcaacattagaagagtctgggtggccaggcacagtggctcacgcctgtaatcccaacactttgggaggtcaaagcaggtggatcgcttgaggtcaggagttggagaccagcctgaccaacacagcaaaaaccc

SEQ ID NO: 705527 - DNA, 869 bp, Homo sapiens
cagtagtgcttaaaaatactacataaagcattattttaaaggttatactggaaagtgcaattttaaaatgagcaaaacctctgtatttctgctggcattaagggttgatggtgttaccatgtatcatcatggcggtactatttttttaaaagaaattaaacactggatctctccttaagccaacattgaaaagacttgccgcacttctgagtccaaacactggaaagctctcctttgccaccgttagccggggctcattctccatgtgccttagccttaaacatgcccccactcccacatctctcaccctgtcccctcctccccagattcccaatcccaccgcaatgttgggcaagcctaggactgataagtagctctgatcagaggagctggtggcttttatacttcttcctgggtttcagtggggttgtaggttcgttgtatgaagtaataatggaaggttcgggtgggggacagtatggtccttgctacgggtgctatttcacagtagcagagtaagcaaaggtttaaatcgagtggcataagaaatcttggcatagctatttaattgcccaaggtcaaatttaagggccatttctaaggctttatccatttcggacgtatgagtcactagggccacagaagggtctgttatccgtagacaaagagccccagagacctcttaacagcacgcacgttatggattctagttggcctatacactgtttctggcaaaactggtcatggtccataaagcgtgttggaacaattagtgtcatagaacgggcgctctattccattggtgtgacttgaaaggtgaaccgggataggggtgttgacatacaggaagaagagaataaacgttagag

SEQ ID NO: 705528 - DNA, 1014 bp, Homo sapiens
gtgctgccccaacattgtaccggacactggattcctggacccccttcatgtctcaaaccgacgatgagcgtctggtctctgcttatgatggtgggtataccgagctcctttccctgatccacctctgctgcctgccccacattgtaccgtacaatgtggattcctggatcccccttacctccttatcctttctttaccttcaaggtcgacggcaggactcctgtactggtatccagcgaggacagccaggaaacctcagtgttcatcctctgcaggttatgcgcggagtcgacaaggagagccctctatgggtatgcgtgaacaaagggcatgtctcacttaccgtagcatgtttaactcccagagacatgggcgtgtctgctcgatcttcattcacagatcatctcctgagaagggagagcccctttggaggtcaggggatggtgacgtgactttccaatctgcccatcatcgcggctggatgggtagggaagaggggaggcgtaatgactatgtccttagccttcatgtttgtgggtaaggggcttttcagctagtcatggtataaggtaagcatgttagcgagcttagatgattggccacagagctaacattatagcatccttcatcttttctggaagcacacttgaaagttccggcaccgagtgataatctgtggagcaaggcatgtgccacagagttggcagggaggccatcgaagggttaaccacttcaagattctaccatcgtgccctggtggactcccaagagccttgaggataaggatcgaagatgccttgcccgagatccctcgttgtcatcctatcctttcaaggtgtggtcccattggccatataacctctgggacatctagacattcagaggtcctgggttgcctcagcccgtggagggcaggtgctctttagccctctttctggccttgtgaagcaagggcctacagaaaaaggcctccacgcttgcccaactgaaccttgggcaaaaaagggttgcccg

SEQ ID NO: 705529 - DNA, 804 bp, Homo sapiens
aataccacggcaggacgaggcctggttcaaatcaggccgagggcctccccgtcccatactcggcgagcctccctactactcggcactgtcctttctgcccagcccctctctgggtgccaggtacgacgcttgccccgggtccacctacaccatcgccacctacatacccactctcaatatagctagaccaatatacatcacgccaatcgaccgtaatacgacagaatgaaacaaagcgatacccacccggcatagaaacacgatgcacacacagacatgatgtcagatgatatgagggactacgtcatctcgtgtccactgctttctgcttgatggccatgagggaaggctgatgcaacacgcggccaccacagaccacgcattgatgatcatggagtgctgagatccagatgtggagcacctaatccatacagaactagctcaccctccaaaaaaccacctgcaccacaaccatccatcccaccacatccacacacagatcccatatgcacacacccatgtgcaaccaccgttaactactactcccactattcaatgcaatgttctctaccacagatctaccactccatcccacaccctcacacacaatctagacgcccctctccactcaatatcccatatacccaagagcaacccatcatttacaatctcatcttctctcaccattctcacaagcccgcactgcatacatcctcacgtccaaaaaccctactcgccatcaacaagctttcttatactcctcatccttccttcccttcccctcagttcccgtataacgttcct

SEQ ID NO: 705530 - DNA, 282 bp, Homo sapiens
acgccggtgcagctgggggggccctggaggccctggtgtccctgggatggggaaccgctggtggcttccgcggaggtctcggcagtggcattcggggccggggtcgcttgccgtggacggggccggggccgaggccgcgaagatcgcgtaggcaaggccgagggatcaggagtggattgcccgtcaccaaggttgttggccgtccttgctcgaacggacatgaatgatcaatgtccctggaggaagattctatctcttctccctgcccattaagggaatcag

SEQ ID NO: 705531 - DNA, 191 bp, Homo sapiens
tagcctggatattgaaccaggtcacctgtgactgtatcagtaatgctacaccccttatgatatgatcctgaatgaaaagagtaaacacaagtatatggtacagacaatttttgctccaccaaacacttccgatctggaagactgtgtggaacagaggcaaaccctgtatgcattactggctaccaaattga

SEQ ID NO: 705532 - DNA, 134 bp, Homo sapiens
agttttccaaccccctaacgttttcagatctttgagcccagagagacctcagattttaaaaatataaattttgagtaccttggaaaccatgaggcttctcatgggttccgccaaattagttaggacccatcctt

SEQ ID NO: 705533 - DNA, 1474 bp, Homo sapiens
  misc_feature (157)..(157): n is a, c, g, or t
  misc_feature (164)..(164): n is a, c, g, or t
  misc_feature (947)..(947): n is a, c, g, or t
tcgggggcagccgccctgttgttggggacgcaccaactgtgttgtgtcaccccagcaaggcacgcgcgggtcgtggtgtgtaaccccccgctttcgccgcggggtatttttctcccccgcgcgggagtatttcctgtctgcggagccaccccgcgcnggttccnccgcttttagagggagacattgtgaagagtggtttggagccgtttgtgaatgacctctgtggtggcgcctgtttctccgcgtcaggggtgtttcactctcgtccctcgaagagagaagggggcgcattctctctgtgtgggggcctcccttctggtcggccacgaggtggaggaaccgcagttctccgccaatgggggggagggcccccacccacacacctttctgttatggcccttgtggcccaaaccgccccgcgacagggggattttgtgaacccgcgccgcacgcccctcccccgattatagaagcggtttctctctcccccagaaaaagagtactcttgcaacccctcctctcggtgttgccccacaacaccagcaagtaggtttaataggtggtgattacaatagaggaggggatatcctttggttttttccccgcggcaactatttgggggagcacccccaccattgtttcctagatgaggcgcacacacgcgtatgccccaacaatttcccccctctgtaggcgcccctcctattatttttgtaaaaagaaaatcgtaaatggggatttgtaaaatttctcccccgcgataagagggcccacaagctcactcccacgctatatttcctgcgcacgctttcccctctatagataagggggcgcgccttgagagagaaagtctgtggacccgggggcctttttatcacgcgcggtggccactcttctttcttcgtggggccctcgcgctcggtagagccaccccacgcgcttgggcnccccacgcgctaatctctcggttggggagaccgcgagagaccccaatatattttctcgggggccctcgcccacgtttctttatcgcacggcctctttccctctgcgattgattttgagctcccacgagagattgacctttcaccacagagggaggccgcctctggccccacagctcgccacggagcccctttctctcttctcattatcccctgccaccacccactcacttggactgcacccaaggagcctgttcctataagggtcttgaaatccacgggagaaagctatttgcacgaggagctccacagaaaaatgattggccaccgccatatataaggagagaagaaagcttcacgtttaactcgtttccactgcttaacactgagtttataaccacgctcacgaggctggaacactaatttaatatctaatttgaggttcccttaaagagtcttggttttccactgaataccgcatgtataataaaaattttaagaaataaatgttattttactttatttaccca

SEQ ID NO: 705534 - DNA, 254 bp, Homo sapiens
ctaatcgctggttgatgggttctcgcaagcctcgtagcgtcgcttgaccccacagattaggctactgggatcacgctcggtgctagtacccaggtactcctgatcaaatatcacgctcctacatagaggactcaacatactagtcacagccctatactcgctctacatctttaccagaacagaatggggctcactcaccgaccagagtaaacaagctaaaagcctcattcagacgagaaaagaaccctcatgtt

SEQ ID NO: 705535 - DNA, 217 bp, Homo sapiens
cacagtgctgcaaggagaatgtagagctttccatgaatatcttagaaaagaagaaagacttaagatcaataatctgggccaggcacggtggctcacgcctgtaatcccagcacttggggaggccaaggagggtggatcacttgagatcaggagtttgagaccagctgggccaacatggcaaaactcttgtctgtactgaaaatacaaaaattatccc

SEQ ID NO: 705536 - DNA, 727 bp, Homo sapiens
ccgggcgcggtggcgcgtgcgtgtagtcccgagtagctaggattacaggcatgcgccaccatgccggctaattttgtattattagtagagacggggtttcttcatgttggtcgggctggtctcgaactcctgacctcaggtgatccgcccacctcggcctcccaaaatgctgggattgcaggagtgagctaccgcacctagaccctaatttcaattctcttgggcacatacccagaagtggaattgctggaccatatggaagtttgatttttaatgttttgaggagctgccagaactgttttccacagtcgctgtaacttttcgcattcccaccaacagtgtacaagaattctagttactctgcatcctcaccaacacttgatattttctgggttttcatgagagtagtcatcctactgagtgtgaggtggtaattcattgtagtttcaaattatatctccctgatgatttagtgaggttgaacatcttttcatgtgcttattagccatttgtatatcttctttggagaaatgtctattcaagtccttttccatctttcaatttagtggttgcttcttttcttggtaagtttagggattctataatattttgatataaatccttatagattgccattcaaatttctttctattccgaagtgggcttttattcatactctattttttgtgaacaaacttttcatttatcaaggagaagttttcctaag

SEQ ID NO: 705537 - DNA, 1006 bp, Homo sapiens
  misc_feature (25)..(25): n is a, c, g, or t
  misc_feature (71)..(71): n is a, c, g, or t
  misc_feature (91)..(91): n is a, c, g, or t
  misc_feature (146)..(146): n is a, c, g, or t
  misc_feature (173)..(173): n is a, c, g, or t
  misc_feature (180)..(180): n is a, c, g, or t
  misc_feature (198)..(198): n is a, c, g, or t
  misc_feature (203)..(203): n is a, c, g, or t
  misc_feature (210)..(210): n is a, c, g, or t
  misc_feature (236)..(236): n is a, c, g, or t
  misc_feature (242)..(242): n is a, c, g, or t
  misc_feature (250)..(250): n is a, c, g, or t
  misc_feature (264)..(264): n is a, c, g, or t
  misc_feature (266)..(266): n is a, c, g, or t
  misc_feature (268)..(268): n is a, c, g, or t
  misc_feature (270)..(270): n is a, c, g, or t
  misc_feature (274)..(274): n is a, c, g, or t
  misc_feature (279)..(279): n is a, c, g, or t
  misc_feature (282)..(282): n is a, c, g, or t
  misc_feature (287)..(287): n is a, c, g, or t
  misc_feature (309)..(309): n is a, c, g, or t
  misc_feature (317)..(317): n is a, c, g, or t
  misc_feature (326)..(326): n is a, c, g, or t
  misc_feature (329)..(329): n is a, c, g, or t
  misc_feature (338)..(339): n is a, c, g, or t
  misc_feature (345)..(345): n is a, c, g, or t
  misc_feature (354)..(354): n is a, c, g, or t
  misc_feature (375)..(375): n is a, c, g, or t
  misc_feature (392)..(394): n is a, c, g, or t
  misc_feature (407)..(407): n is a, c, g, or t
  misc_feature (413)..(413): n is a, c, g, or t
  misc_feature (432)..(432): n is a, c, g, or t
  misc_feature (438)..(438): n is a, c, g, or t
  misc_feature (440)..(440): n is a, c, g, or t
  misc_feature (448)..(448): n is a, c, g, or t
  misc_feature (479)..(479): n is a, c, g, or t
  misc_feature (501)..(501): n is a, c, g, or t
  misc_feature (571)..(571): n is a, c, g, or t
  misc_feature (604)..(604): n is a, c, g, or t
  misc_feature (653)..(653): n is a, c, g, or t
  misc_feature (665)..(665): n is a, c, g, or t
  misc_feature (756)..(756): n is a, c, g, or t
  misc_feature (824)..(824): n is a, c, g, or t
  misc_feature (980)..(980): n is a, c, g, or t
actcccatcctggtatatgcaaganaaatgttttaagaaagggccagcatttcttactaaaatgctttgcnagtgtatttggcagatttgnttttatattctcctattccacataccactcaaagcactcgatgatcaaacatctngacccaaatcaagagaaaagtataaanagatatnaatttaaaaaaaggaagnaatanaacaaanaaaaaaaaaaagaaactaaaaaaagnatcatnaaaaaagntcaaataccagcantnananctcnctgcnggnattcncggctcagcaattaagcccaanacgggatnaggccctcnggnaggcggccnnggcgtnggggttgcnctagggggtggcgggggactnagtactccgctccactnnnatgatagtttganaagggnttcatactcctttaagtanatagtncntccaccanttttttttttttttaattaacactgattctnattccccaagcctgtgcatttntaaagctcaaggggcttcataaagtatactaaacagtaacattttcaccttttattaaggcaagtttgtnaaaataatttaatacaacaagatctcttcatgnactttcaacttacaacctttttaatgtaagaaacatacaaaaaattgtnttttataaaatntcgcctcaataccagaaaatagtaatgaaagattttgaacccagttttactctttaaagaatgctctttcgtgtctcaaattccaagtgcnactcatcatccttagagccagttttgcttaaatgcttcacaacatcaacccagttccagcctcgaggnagttctcctttgtgatctgttttgtctgccagcttacgcttctgggcttttgaaagttgttcttttttgtcttttttcttacttgatgggggctgtattaggagtttcaattgagatgatattgcttagcgatgttgcgggattgatgggattgtnattctccatgaactgctctttattgt

SEQ ID NO: 705538 - DNA, 546 bp, Homo sapiens
acgaagggcgactccatacgggcatggcggctccacagcgggcctggaaacacccttctcctcaggccagagtagctcatcatggggtctgggcctgcttcaggttctgccaggaggacctggaacttgtctgctgagagggacatgggaagaggctgggctggggtccctggggcagctggcaccgtccatgccgcaggtgcaccatgggctcttcgcacggattgcagcaggctggagctcagggtgtagtccacccggcagaccagacctgccaagctattcactgtgagatggggtgggtggctctcaggatcaaagcaggcaagccaagtagatctcagtcgataccctggtgtcagctctcaaccattcaaggctacgtggcctctaagaagctcccatcctgctgacccaggctcagaacagggcaggtgcccgataatcagttctgatcacccacagcagacctcagtgacaagaaaccttggggggagtcaggagacccagggccaggtcccagctctacggctgctagtaaccatg

SEQ ID NO: 705539 - DNA, 320 bp, Homo sapiens
  misc_feature (141)..(141): n is a, c, g, or t
  misc_feature (170)..(170): n is a, c, g, or t
actttgagactcccgtttggatggcacaggcagactaagcccaggtcaaagccctccccttggatgttcattttatcccaagctctttctggaccctggaatttggcatcccctaggccctgggtgggacagctgagccangttttagataacatgtctagaaaagtggncccctactgtgtgcctggcactttccgcacatgatcctctagctagaatatccaagggtcatggagagaaatacccagttaaaatatcagaaatgaaaaagtgataccattagagacactaaaaagacgattagagatactaaaaaaaaa

SEQ ID NO: 705540 - DNA, 104 bp, Homo sapiens
agtgatacattgtgtcatatacttaacatttatcttgccactagaaggtacacttctgaggaccagggtcatccattggccccagcacattgcctaatattaag

SEQ ID NO: 705541 - DNA, 112 bp, Homo sapiens
cacgagggctgtgcctagggagaatcctccgatgggggatcagtagcccaacgctcttgaggctcaggacgcacgcccacttatgtacaatagtactgactgcaacctaaag

SEQ ID NO: 705542 - DNA, 200 bp, Homo sapiens
  misc_feature (46)..(46): n is a, c, g, or t
aagactgcaagaccaacgccttctcttcctccccatctttctccgngctctgcctactcaatgtgaagacaatgagaatgaagacttttatgttgacccacttccatttaatgaatagtaaatatattttctctttcttatgattttctaaataacattttctctagcttactttatggaaggaatatggtgtataatac

SEQ ID NO: 705543 - DNA, 194 bp, Homo sapiens
aagcaaagatgctactttctttctttctatttaaatgtcatttatttctctcttgcttggttgctctggcccagactttcaaaactatgttgaataggagtggtgagagagaacatccttgtcttgtgcccgttttcaaggggaatgcttccagcttttgccccttcagtatgacattggttgccctttcgcct

SEQ ID NO: 705544 - DNA, 208 bp, Homo sapiens
  misc_feature (5)..(5): n is a, c, g, or t
gcagnggtgctgagatcacaggggtgagccaccacgcccggcaagattgtttctttcttttctttttgagatggagttttgctcttgttgcccaggctggagtgcactggtgcagtctcggctcactgcaacctctgcctcctgggttcaagcagttcttctggctcagcctcctgagtagctgggattagagacacacaccatcatc

SEQ ID NO: 705545 - DNA, 1541 bp, Homo sapiens
gtcctggtgaaggaagtgcattctcaggcctgtggctgtagcaagctgtctgcccttgggtgcaatgaaccagactgtggagccaaaggtgaccgcagtgggccccaggtctggagccacaaggataccctcactttgcgatgaggagctgaaactgaccagttgtccagatgttagccgcccacgatggggctgctcttgatatctatctaagaatgataccacgcagattacgcccgcttattccatcaggggcatacgagatggagtatctagaaaccagaatacccacagaggagtggtctaaaagcacagaataagtcaacaaaaaccttaattacaattacattgggtattagccgcgtagtgcaataacgattaccgtggtggatacaaggttgtcatgaaattagtgcaaccgttagaggcagatttgaccacggaagtaacataaatgaagtaacaaattgtaacggaaaattacatggttaagaaacaagcaacacaaaacaagaggcagagaagcaggcgacgaaagaagaaataccacaacacaaggtggccaccgacaagagacaaacgcggaatcccccacgagacatgtgtcagtgtgcagacacacagaggtgggactcacacagaaaaaggagaaacaaacggacatacaatagaaccacaggggacagacgatgcaacgcacacaccgactacacagaccaaaacgggtccgaccaggacagtgggacgaaaatacgcgtggacacaaaccgactaggcaggaaaacacacatggacgagacggcagaacacccgctaaaaaagaccaggacaggcagagcacaacaaatacgacggggggacaaccacagaggggcgaaacagggaagaacgtcaaacgcgcacgcaaacaagcgagcaaacaaaatcgaacccacgcaaaaaacacggcccacacagagggtgttacaacaacaaacaacgagcaagacaagcgccacggcaggcgaaagaaaaagagaggcgcacgacaacacggggacgagacagacaacgaacggaccgaacacaacaaccaacaaagcagaaccccaaacaggaagcaccaacaaagcacagagacaacacaacccaacaacacaccagcgggagcaagacagaagcaaagcgaaccaggcgacacagaccgctagaaagcccacaacacacaagaagacagagaacagaaagaagagagcggaggaagcgaggcacaaaggcgaagcggcagaaaagaaaacgcgaacaacagacagaccagaagagggcgacacgcagaacaacaagaagacagagaacgaaaacagcgagaaaaaaggagagcagaagaacgagagaggagaacgaaaacaaaaaagaggagcaaagaagcagagaacagaacgagaaagaagaccggacaaccacgaccagacgaagacaaaagcaagcgaagcacgaaaagaagagacacacgaaagagaagacgaagcgaaagacagagagagaatcaaggaacaaaagat

SEQ ID NO: 705546 - DNA, 85 bp, Homo sapiens
ctggagagcagcagccatggccctacggtaccctattgccgtggctcaacaaggccacaaagtacccacgacgtgagcaagccca

SEQ ID NO: 705547 - DNA, 143 bp, Homo sapiens
tgattctagaggatcccgcctagtttagaagtacatagccctagtttgagaagtttcaatagcattgtctgtggttcctatgtcagtaggggcttgcatttttcacattacaggagggaaatgctaagctgggtaccggagct

SEQ ID NO: 705548 - DNA, 130 bp, Homo sapiens
agtgtgagtccgtggggaagttttcctcaagtggggttcagtctgtaattttcctgtctgtttttagtttgttttgagttattttggattttgttctttagccaaataaaggcaatgtggtttttcctga

SEQ ID NO: 705549 - DNA, 582 bp, Homo sapiens
aggaaaactgattttctctctgctttttactgcttcccatattctggtggaagttaccaaaacaattcaaaatgtgttcaggatatatgtaaacttacctcggggctaataaaaaataaaaggacataattttgaggaggttctgctatatttagcagagattggattattttgaactaagattgtaatgataatccagcaaatctcccttttttgatgaaaccatgtcaagtcattctgttggatatcattggagactgttatctaagatatttaatgaaaaaaatggaaatcaatagcttggaggttagggcaaactgagctaaataataaagatttcatttggaatcctgtttgtcattaaatatcaaaaaaatttgaaagacttaggaatgtcccaggaacatagtaggtgctcaacaaatacattaaatgtgtgtgtgtgtgtgtgtgtgtgtataacactaagggtgtgcctactagtcttctatgggcaggaagaaggctttgtacatggcctgtggcttcttcagggttttcccctgagaaataatgcaattcgtgcttatgtctagtgggtaa

SEQ ID NO: 705550 - DNA, 117 bp, Homo sapiens
aagaacggaccaccttcgcatcgacaagccttccttcgcgatcgatcgctacttgcaaaatgagcgaaccgtagattttgcccttagcttcgctcgaatagttgagcgttccgatct

SEQ ID NO: 705551 - DNA, 122 bp, Homo sapiens
agaatatcataagcatgttaatgatattcatcttcaagtaatcaaatcatcattgcatattgaatgaaaagaaaaatgtagaactgacttcttaatcaagggctgtcctccctcagcatctg

SEQ ID NO: 705552 - DNA, 308 bp, Homo sapiens
cccatttcagcctcctgagtagctgggactacaggcccaggcccccaaacctgggtaatgtttaaattttatgtaaaaatggcggggggggcgggggtctccctatgttgcccaggctggtttcgagctcctgacctcaagtgatcctcctgccccagcattccaaagggctgggattacaggggtgagcccctgcctggcctggccgtaggtttggaactgttttataaaaaagccctggagaagacagtagaatgagcctatttagtttaaaaaataaaaaagcccgttggtttcccccccgccca

SEQ ID NO: 705553 - DNA, 877 bp, Homo sapiens
gcattaactgaaagaaaagttttcatgatgcttttttttttcccccgcagacaaggtctccctctgtcatccaggctggagtgcagtaacattgtcacagctcactgcaatctggacctcctgggctcaagtgatcatcttacctcagcctcccaagtagctgggactacaggcgtgcaccagcatactgggctaatttttcatttttggtagaggcaggggctcactatgtggcccaggctgtcttgaactccgtggccttaagcagtcctccgttgtctcaacctcccaaatggctggaattacaggtgtgagccaccacacccagccgtatgatgcatcttaaagaaagcatgcttctacttacctttaaggaagttttaatttcaccaagtatagtgtcatagagcagtataacagccattttcatgcctgaaaatggcaaaatttggatatctgagtgaggagtactgtatctagtcctcgattctacaaaaatatggagtactatctataaacagtaataattgatgcatgtgtagtcctggttctcaaatgcgtaataagatgttctttcacgtagtgctatacttacattcatagtatcttacagcgtattgtggtagtcactgtgtacttaatttttcacaaacattaataggttttgccacggtttgggggctgaacccctatccagtccttggaggctgggtggcgaatgtgggcctgatttggattgtgctggcacttgggaactccttgtctcagacccaattccggtggggggcctggccccaggaggggggggaaatggcccaagggtggggacaatccacgggaaagggccaaaaaaaaatggcgccgaatgggagaaatg

SEQ ID NO: 705554 - DNA, 256 bp, Homo sapiens
aagctttgctcagaggagcagattgtcagacagtcgtctatgctgcactgcgggctcgcagtcagcattcgtgttggttatattgtgtccgattcgtgttggtacgatcatggtgttgctgtcgcttgatgcatgactcaatcagttgacgcgcaaagtgagtaggtcaggtcttatgggcctagtatctttatatatcaggacacattggtatcgacggctgctcatcgtcaagcttgtcgctgtaccgagttgg

SEQ ID NO: 705555 - DNA, 785 bp, Homo sapiens
ggggtaccgggattgaggaccaggtcggggccgggttaccgggtcggggagcggctttccgtggcggcagctatgaggcgggacgtgcgcatcctgttactgtggcgaggcccaggtggggaagacgtcgctgatcctgtccctgtgtgggcgaggagtaccccgaggaggtccctccccgcgcggaggagatcacgatccccggcggacgtacaccccggagaaggtgtttagcgcacatcgtggactactcagaagccgagcagacggacgaggagctgagaggaggagatccaaaaggcaaacgtggtgtgtgtgggtgtatgacgtctctgagagaggccaaacattgagaaggattcggaaggtaaggtgggatcgaaaagtggatgaagtggggggaacacaagacagtggacaagaggatggccgatagatacctagatggggagaaaaaagatgaagagcatagctggatcagaggagtagatgcaatgggagggggcaggaggagtacggcacaagataagtgaagacgcgagagaacagccgggacgcgacatcgcggcagacgaccatgaggcgatagaagaggtggtaatagagggacaacaggagaaacaccgcaggaaaggaacacgagatcatcgaggaaaggccgggaaaagcaaccaaacacgacacacaaagacgaggacaaggagaacatgcagaataaaccaggaagggacacaacacagacgaagagggcacgcacagaaggaaccagagacaggagaagcgaa

SEQ ID NO: 705556 - DNA, 734 bp, Homo sapiens
gagcatgttccggctcctgagctggagcctgggccgaggcttcctgcgggccgcggggcggtggtgccggggctgctccgcgcgcctgctcccgggggctggcaggcaggtccggtggcccgaggtgccggtgccgccatcccggagtcgcgccgcacggccggggccccaggcctgctgccgctgctggcaagcgcttcgacctggttctcgaggcccgctgcggcagaggaggaggagcagcaggtagccgaagggggctcgctgcccgaggcagggggcgggacgaagggcctaggcagagatcatccgagctgctgaaagcggagccaaggtggagccattatgaaaggatgagccagaagagggttgagtaaatttaggcatgacggcttcttcggtcgtcggcctatcagaattgattaaacaagaagggcaattcattttaacagattattgatttgtgagtgggcccaattttaacgcaattaatacgggggggtcgaggtttggagatattgcttgaaacaaacattttttaaaggcacacaatgaggttacgcttccttggaagggggggtcatgaccgcagggaggacaaatgacattaattgtgaaattttcccctaaagggtggcagtatctatgctgggcagaaacagaccaggaatttgctagtgctgggtaatgaattctggatttacaagttctagaggacacaattgaagagaaaa

SEQ ID NO: 705557 - DNA, 153 bp, Homo sapiens
ctcttctactcaatacaaaaaattagccgggcgcggtggcaggcacctgtagtcccagcctacttatggaggctgaggcaggagaatggcatgaacccgaacaggcagacgcttcagctgagccgagcatcgtgccacgtgcatctccggccc

SEQ ID NO: 705558 - DNA, 230 bp, Homo sapiens
  misc_feature (2)..(2): n is a, c, g, or t
gnatatgctgtctcaagcaatgtcagacaacacagaaatgagtgtgaggggctaggaaatattctaggcaatatatcagaagccttcgggtgggggtcagctttagaaaaacggaggtcaggaattcgagatcgagcctgatcaagatggagaagcgcccatctctactaaaaatacaaaattagccggccatggtggtgcgtgcctctaatcataactactcaggaggc

SEQ ID NO: 705559 - DNA, 297 bp, Homo sapiens
ccccataatacgcaggcatatagaccaatggaacagaatagaaaacccaggaataaagccttacacttaaaaccacctgatattgtaaggctgacaaaaacaagcaatgggggaaggactccctattcaataaatggtgttggggtaactggctagcaatatgcagaataatgatactcgaaccataactttcatcatataccaaaattaactggagatagattaaagatttaaatgtaagaactcaagtgataataatcctagaagaaaaactcagaaatacccttcttgacattg

SEQ ID NO: 705560 - DNA, 948 bp, Homo sapiens
ttttgggggggaaaaaagattttggctctttgtggcccaggttggattgcaatgacgtgatctccgctcatggaaacctccacctcgggggtttaagcgattcttcgtgcctcagccgtggccaaccagtggcaaaacccttactaaagatacaaaaaaaaaaaaaaaattaccccggggggtggggggggggggctgggttacccccgaggtctcacgtgggaagggcgggaggcgaggaaatttcttgtggaaccccgagaagggcgaagggtggcggtgggaacccgaaaacatcctgtgccgtgtggttcgcctctataccgggggggtgcacaggagagcctaagaatccgcgtttcttacaaaaacaaaccacaaaaacaacaacagaagagagcctgactgtcgagaccagcgggaggaacagcggcgggtcccccgcggtgtgtgtgctacaacgagcgcgcggcgtgttgagaacctgcgcgggggccgacggggtgttttctcccccacgtgtgggccccccaaaagtgggggggggcaacgacggcgggggggaaccacggccgtcgctggggggcacgaaaagacaccacaggttttctctgaaaaacacagttgtgttggtgtctctttgttgtggtgcttccctcttgcgagcgcagggggggccgggcttcgagagaatactccttcgcgtgttggccccctctgttgttgggcgccccgagttttgtttgttttttcaattcccgcgtttttccccccccgatgtgtttgttttctccggtgttgttcccccgagtttccccaggcgtcttggtagaacagagggtgggtgctcgggaacgactagtgttttttccgcctacacgtcttgggggcgcggtgcagggagcggcgggagcccaccctctaatactgtcgggaaatttgtgcggc

SEQ ID NO: 705561 - DNA, 258 bp, Homo sapiens
cctcgtgaagactttagccagctctgtaaaccttacccctggcgacctcctggccaggcactcccggagggtcgatcctctgaagcttgagatcatctcaccgacgagactacgagtttgcactagacatgacgagggatgaatacaacgccctgcccgcctggaggcaggtgaacctcgaagaagccaaggcttgtactgagtgggaggacgccggaggagtctcacggttaacgtccaacaacaccctgaacaggg

SEQ ID NO: 705562 - DNA, 153 bp, Homo sapiens
caaaaatagctcggtaccgtcagcaccggaggctcacccacaccttcagcacgcccggccctgtgcccgcggcttgcggggggtgtgccactgtgtatgctcagttgacagggggcaacttcagtatttccttccttttcaaaatctctccaa

SEQ ID NO: 705563 - DNA, 407 bp, Homo sapiens
  misc_feature (316)..(316): n is a, c, g, or t
aacgaggcagccagccaagccacccaagacagccagccagccagccaagccagccaaatagccaagccagccaagcaagccaccagccaagccagccaagcctgccagccagcagagccagccaaccagccaagccagccagccagccaagccagccaagccagccagccagccactcaagccatctaagcaaaccagccagccaagccagccaagccaccgaaacattgtagccctggaacacattcagccagccaagccagccaagccagtcaaaccagcctgccagccaaaccagccaagccatccagccagncaagccagtcaagccacccagccagccaagccagccaagccacccagccagccaagctggccaagccactcaaccagccaagccagccagc

SEQ ID NO: 705564 - DNA, 638 bp, Homo sapiens
tgagctgtgctgtctgtgctgggctgtgctgtactgtgctgtatgtgctgtctgacgtgtgctgtgtgtccagtgctgtgatgtgctgtatgtactgtgctgtctgtgatgtgctgtgctgtgctgtctgtgatgtgctgtgctgtgctgtatgtgatgtgctgtgctgtctgtgctgtgctgtgctgtgcgatctgtgatgtgctgtctgtgttgtgctgtgctgtgctgtgctgtctgttctgtgctgtctgtgctgtgctgtatgtgctgtgctgtgctgtatgtgctgtgctgtgctatctgtgctgtgctaagctgtgctgtgctgtgctgtctgtgctgtgatatgctgtgctgagctgtgctgtgctgtctgtgctgtcttgctgtgctgtgctctgtgctgtgctgtgatgtgtgtgctgtctgtgctgtgctttgctgtgctttctgtgctgtgtgtgtgtgtgtgtgtgtgtgtgtgtacatgcatgcttatatgcatatgtgttaatgagtcatataagtgattgtagttgtgaatgttctaggcagaattcaagcagctgcaaaggccttgaggtcacaacaccctgtttcatttatagatccgaggtccacctttcagtagaccc

SEQ ID NO: 705565 - DNA, 385 bp, Homo sapiens
  misc_feature (1)..(1): n is a, c, g, or t
  misc_feature (10)..(10): n is a, c, g, or t
  misc_feature (12)..(12): n is a, c, g, or t
  misc_feature (35)..(35): n is a, c, g, or t
  misc_feature (57)..(57): n is a, c, g, or t
  misc_feature (74)..(74): n is a, c, g, or t
  misc_feature (86)..(86): n is a, c, g, or t
  misc_feature (102)..(102): n is a, c, g, or t
  misc_feature (113)..(113): n is a, c, g, or t
  misc_feature (121)..(121): n is a, c, g, or t
  misc_feature (128)..(128): n is a, c, g, or t
  misc_feature (143)..(143): n is a, c, g, or t
  misc_feature (166)..(166): n is a, c, g, or t
  misc_feature (182)..(182): n is a, c, g, or t
  misc_feature (201)..(201): n is a, c, g, or t
  misc_feature (205)..(205): n is a, c, g, or t
  misc_feature (210)..(210): n is a, c, g, or t
  misc_feature (214)..(214): n is a, c, g, or t
  misc_feature (222)..(224): n is a, c, g, or t
  misc_feature (237)..(237): n is a, c, g, or t
  misc_feature (249)..(249): n is a, c, g, or t
  misc_feature (251)..(251): n is a, c, g, or t
  misc_feature (255)..(256): n is a, c, g, or t
  misc_feature (260)..(260): n is a, c, g, or t
  misc_feature (264)..(264): n is a, c, g, or t
  misc_feature (277)..(277): n is a, c, g, or t
  misc_feature (291)..(291): n is a, c, g, or t
  misc_feature (294)..(295): n is a, c, g, or t
  misc_feature (298)..(299): n is a, c, g, or t
  misc_feature (304)..(304): n is a, c, g, or t
  misc_feature (358)..(358): n is a, c, g, or t
ngggaatttntnatttttttaaaaaaaaaattctncttaagtccaaaaatgttgtcnaaaaaaaaaaaaaaaanaaaatgtttaangtaaataagcacgaanagtttccacancctttcanactattnaaaatttcttcttgnggtttctttctttcccccccttnggataaattttctttntttgcttcccattgggggntatnagggntctncacagggnnnccctgtgtttccnaaaattctgaananaaannatgngggngagcaagcaaacnaggggggggaccanggnnggnnacctnaccccgacccaagaaaataatttcatctccataaaccactgtggaaaatttgtntccaaagaaaaaagaagtcctgttttt

SEQ ID NO: 705566 - DNA, 336 bp, Homo sapiens
tggcccgagcctccagggaatccctttccttttttccgtttaaaaaaaggaaagttttccttcctatttatttgcaaaaaggaaatttaaacctccttttttatccataaatgggatgggccaggacaaaaaatgcctcagcccccaaacctaaaaggacctttagtttccttcctggggggaattttcccccctccatccctcccaaattgcctgtattgaaaaaggactccctcattctgtaatagggggttaaacctggacccccttggtgggggggcctgtggtgaaggtttgcatccttccccctttgtcccaaaaaagtatgggggttta

SEQ ID NO: 705567 - DNA, 302 bp, Homo sapiens
cttgaaaaattgggcttttcataaaacccatcacatgtcattggctgctttttagaaaaacccttccaaggcagtacatttgtattgctactgaaaagggccttttcccagaacacagatttttttttgctttttgacattttgaaaacatctgttttttttttttaaaacaaaactttgggctcaagacaatttttacatgaaactttcataaaccatgaaaatgtagctggccttggggccttaggcatgaaataagcatgaggaacattttcccctaatttttcccccctttaaagcca

SEQ ID NO: 705568 - DNA, 619 bp, Homo sapiens
aatgccccatctgagtactatcgtatggcccaccataaggaccagcatacttgagacagtataccgcataaggcaacttgagctagtaaacacagactgccagactaccttcctcaccaaagcccataagggtctgacttatcccatactctgtgagccaatatgagcgaagctttgtacgttgaatcaattgtcacgacaatcgtaggcctaccggccgcaatactgatcattctgtccacccgtatattggtccccacctcgaaatattgtcattagcaaccgactaatgaccacccaggaacgagtaatcaaactgacctcagaccatatgagagccatgcacaacactaatggacgaccctggcctataatacgtagaatccgtaagcatttgaattaccacatttaacgaacggggactcacgcctcaatgacttacaccatgcaaccaactgtttattaacctaaccgtggctctgccattatgagcgggcgcactcggaattggcttacagtgtacgattcctaggtattaatggaaccataaggctacttattcaaccaataaccctggcagtacggctcgggttacatttccggatggccatcttgggct

SEQ ID NO: 705569 - DNA, 333 bp, Homo sapiens
  misc_feature (12)..(12): n is a, c, g, or t
  misc_feature (89)..(89): n is a, c, g, or t
  misc_feature (235)..(235): n is a, c, g, or t
  misc_feature (278)..(278): n is a, c, g, or t
  misc_feature (322)..(322): n is a, c, g, or t
ctggtacatgantttataaaaacatgtcacgcccggctctgtggctcatgcctgtaatcccagcactttggaaggccgaggcgggcggntcacaaggtcaggagatcgagaccatcctggctaaaacggtgaaacccgtctctactaaaaatacaaaaaattagccgggcgtggtggtgggcgcctgtagtcccagctactctggaagctgaggcaggagaatggcatgaacccngaaggcggagttttcagtgagcagagatcatgccactgcactncagcctgggtgacagagcagagcggggactccggagcaatgggnagtacaatcct

SEQ ID NO: 705570 - DNA, 252 bp, Homo sapiens
atttttttttttaggggggggccctttttggttggttaccgcttttttcagccttattccaaaaacctgcctttttagggggggtttgggcatttttactttaaatggggctccttatgggaggggccgactttttttggagttttccagagggggggtttttgacccttttttcaaaattcggtccgccccccaaaaatgggggttttggggttgtttaaattaaaattaacttttttaatttcccccgga

SEQ ID NO: 705571 - DNA, 819 bp, Homo sapiens
taacgatggcggcgctgagggcttatgtgcggcttccggggtcgtcgcggtccaggtgctgcggcctggggctggagtccgattgccgattcagcccagcagtaggtgttcggtccagtggccagccagtatgtgggaatgggcacagcagttagggggagctagttatgtacccagagctaaagaaacagtccactgtgaagcctccgaccttggaatgtatgtggaccgctccgaagaggacacaattgtgaagaacattacccgtgaactttgggccccaacgacctcagctagagcatggtgtcctgcggactagtggatgggaatggagttgcggcaagaatgctgcgaacagtgtggatcctcactatcaggagtgctccgtgccacctgagcggcactgcagcaacctcattctgaatacaagaacctaatcttcaggccgcttacagtactttagaccggctaggactatgtgtccatgatgtgtcacgaactaggcgcatatactcatagcatgtggagaaagcttgctaaaccatccggactccgtcctcggcgcacagttggatcccagagtgctgtactggacgacacttcacacggttggtcgaacccacattcagtggcctgtgacccacacaactgccctggaccacttggggccccatgacacccgtttcacttctgggctgctagtgaccgaaacgggaagaccgatggtccgaaggttctacgagccagaaatgtctggagcccagcacatgcatgccgcgctatatccggccaggagggaatgcaccagggactaaccct

SEQ ID NO: 705572 - DNA, 744 bp, Homo sapiens
gggactcggattcgacggaattgactccagcatctccagaggtgaaaggctattgggcaagttaggatgcatcatacttctaagaccaccctatagaacttcaacactattcctaagataacttaatatggcttgcataatcagggctgcacaaggctgcctaagctattaatgagatcgcgccagatgtccgtgggtcccagaattcaacaagttcgtccaagctccatgctggcaatggactccatacatggatacggcagagttactatcactggctctgctgccagtataagtctaggaccagtatctaatcaatgccaggctttcctctgagaatgggcatgggagtgcgagcatagaacaggagtaggtccctcaataacccgctttctgctgttcgttccatgatccagacatgtgtaagtttctggtctagtgattccaggttttaatagtaactctgtaagtgttcagttatctacacacacatttctcatccgtctaaggaagttgaagaatcacattctcggtatcagctgtaaatgctgggatccatattcagtctaatcagcgtttcccctgttgtctacgcaaagataacgggtatcagggctcatgaattgaatttactgttgtcgatacgaacctgtactgagtggcatgttaatcacatctcaagaaaagtacattgtaagtgtcacgaattcatgaacttcaactcaaacagggacttgggtctca

SEQ ID NO: 705573 - DNA, 956 bp, Homo sapiens
gcggagcaagatggcggacatctccctggacgaactcggtcagtgaagcgcggggcggcgagcgaaaggacggcttaatgccagacacgggagttggaggtgtccagatctcgagttgggatccagacaaggccttctcaggccagtcaacacgcacagccaccttccagcagagatttgatgcccggcgagaagattggactctcagatgcccgggtcaaactgggagtcaaggatgcccgggcgaagcttttgcagaaagatgcccgatttcgaatcaaagggaaagtgcaggatgccagagagatgtagaacatctcgcaagacaagagagaccacggtgcccccagaagacccagccagggtagctgatgcccgggagaaagatcagctctgaagaggagtgccaccatgcatgccttcataaacccacacatagggacaggagacacccatgatctgaaagctcacacaaaaccatccagaacttgaatatgaacctggatgaagatgactgatggtatagcatatcacgtatcctactacaacagatgaaagtatagcagactcaggcggcttactccagcaacatggctggggctaagaaagataccaaggcataacacaatgatgcaaaaggcacacaaccccatagtcaagcaaaaggtggatacagcaaggaatgcattacgaaacgaatccatgaatcataccacatgtccgtcctaaaggccgacacagaaaaggccataggaacccagacacatggaaccaccggggaaaacatgcgtagaaacaacgggaaaaagacacaccacaaaaagggaagcatgacaagcataggacgaaagccagcgagagacgtcaagagccaaaaggagaagggaaccaaagaatgaagtgaagaaatacaacagagggacacaacagagcaacaagagacagacggaccagag

SEQ ID NO: 705574 - DNA, 122 bp, Homo sapiens
tctagcacactcttagatgtatgtgaataaaaaaaacacaaaaaatcttttaaatttggttcatttatctttttatgtatccccaaatgccatctatcaaattaatatttattattcatgca

SEQ ID NO: 705575 - DNA, 865 bp, Homo sapiens
cagcatttaacaaagcttagagaaacctccaggagactgctaccatggccgagaagcccacaagatctgagtgaaatgagcaaaagtcacctgcccaataaagcttgacaagacactcaaaaaaaaaaaaaaaaaaaaaaaaaaaaaaaaaaaaaaaaaaaaaaaatacgaagaaaacattacgaaaaaaatgagactaaataaaccaataatgacttataaaaagaatttgacgctgaatattacgtaggagatgttactgctgctcaagtaaagcgtcgacatgtatcactcacggtcgaccgggaacaaaagtagcacacggggaaacattgaggcagggaacctttaacatttgcgggtgcgcccacatcagtcccgacaccacgataacgactctatcacagaaacagtttaagaacaacctcccaaacagaagcaactaaataaaacacatcttctacaaggacagtatatatatacaagtgtctcaacaacctatacacctcgacaaatatccacctccacactaatgaatagtaaacaaacctatctctcactcaacacacgacagactaacataatctatattccgacacaaaagacctacttataaccacgcgcggggcaggtgacaatggaggagataaaccacatcggcagcgagagaaatgatcttaacgaggaagattgtacgagaaacaaagagagatcgaacaccgagtgcagatgcacggagcagagagacgagccaaatgacaatacgaatgcagaacaaggacgaaccgcagagaggccgagcataaggagcaggtcaacgtctgtcagacagagaagtagggtgagacgtcgaacaagcgaagat

SEQ ID NO: 705576 - DNA, 181 bp, Homo sapiens
tgtcgccagccaacaggatggtctcaactctcttgaccttatgatccgcccgccttggcctcccaaagtgctgggattaccggcatgagccaccgcgcctggcctacacaaacaattcttaattttgagaacgtccagttcatcctgtctcctgttggctggatcctgttggctggcgaca

SEQ ID NO: 705577 - DNA, 128 bp, Homo sapiens
acattcatggacatctaccagtgggctcgtgcacaaacggtgttcactggatttgcaactgaccctgtgtcatattccaggcgcctcatcatattggttacatgtaggtggaagctgctgctaggggg

SEQ ID NO: 705578 - DNA, 749 bp, Homo sapiens
  misc_feature (62)..(62): n is a, c, g, or t
  misc_feature (120)..(120): n is a, c, g, or t
  misc_feature (125)..(125): n is a, c, g, or t
  misc_feature (141)..(141): n is a, c, g, or t
  misc_feature (170)..(170): n is a, c, g, or t
  misc_feature (178)..(178): n is a, c, g, or t
  misc_feature (182)..(182): n is a, c, g, or t
  misc_feature (191)..(191): n is a, c, g, or t
  misc_feature (215)..(215): n is a, c, g, or t
  misc_feature (221)..(221): n is a, c, g, or t
  misc_feature (252)..(252): n is a, c, g, or t
  misc_feature (254)..(254): n is a, c, g, or t
  misc_feature (287)..(287): n is a, c, g, or t
  misc_feature (318)..(318): n is a, c, g, or t
  misc_feature (333)..(333): n is a, c, g, or t
  misc_feature (395)..(395): n is a, c, g, or t
  misc_feature (401)..(401): n is a, c, g, or t
  misc_feature (430)..(430): n is a, c, g, or t
  misc_feature (441)..(441): n is a, c, g, or t
  misc_feature (497)..(497): n is a, c, g, or t
  misc_feature (520)..(520): n is a, c, g, or t
  misc_feature (525)..(525): n is a, c, g, or t
  misc_feature (528)..(528): n is a, c, g, or t
  misc_feature (543)..(543): n is a, c, g, or t
  misc_feature (567)..(567): n is a, c, g, or t
  misc_feature (625)..(625): n is a, c, g, or t
  misc_feature (664)..(664): n is a, c, g, or t
  misc_feature (670)..(670): n is a, c, g, or t
  misc_feature (721)..(721): n is a, c, g, or t
gcggcaggttgcggcggcgccggaacgggtctccaggctggcgagcgcccaggacaggcatnttgttagggactggcggccatggagctgaaggtgtgggtggatggcatccagcgtgtngtctntggggtctcaaaacanaccacctgccaggaagtggtcatcgcacnagcccaancaanaggccaaantggccgctttgtgcttgtgcagcngcttcnggagaaggagcggcagttgctgccacaaaantntccaatgggcgcccagaccacctgcggacagtntgccagacaatgtccagtttgtcctgaggcncacaaggcccaaccnagctgggaagccctcctcaaacagctgtccacccccggaacgctgcctaattcgtgccatcntccctntaaaaccacgggctgcgctgggctgtaanccccgcaaaanactgacccccgagccagcacccaacctctcacgccctgggcctacggccctgtaanacccacaccaagctgctgcacanacctncanggcctggagctcaangtgcagagagaatgctgaggagcngggccatgaggccttctgggagcaagagctgcgccgggagcaggcccgggagcgaganggacaggcacgcctgcaggcactaagtgcggccactgcngagcangccgcccggctgcaggccctggacgctcaggcccgtgccctggaggctganctgcagctgggcagcggaggcccctggg

SEQ ID NO: 705579 - DNA, 316 bp, Homo sapiens
attccttcttaatagcactgccgcttttatcacacgaggagctggtaccatctctactgaaactattctaaacaatggaaaaagagagactccaccctaactcattttatgagaccagcatcatcctgatactaaaacctggcagagatacaacaaaaaaaggaaaacttcaagccaatgtccctgatgaacatcaatgcaaaaatcctcaataaaatactagcaaaccgaatccggcagcacttcaaaaagcttatccaccacaatcaagtcagcttcactcctgggatgtaaggttgatttaatatatgcaaat

SEQ ID NO: 705580 - DNA, 155 bp, Homo sapiens
aggtggcagccatctccttctcggtaagtgttaatccctggcaattcgcatttcttcgggtttcatcttggcccgtcggccagttgttcggaggccttccctttagcgcggtaggttcctttggtattttttattttcagctttcttggggctgt

SEQ ID NO: 705581 - DNA, 123 bp, Homo sapiens
  misc_feature (5)..(5): n is a, c, g, or t
agacntaaaaaaaaatatttttacgttagatgttgattggttttgttgtccgagagtcaaagttactcggggaaatataatattaacattagatacttcatattttatgtatgtgtattacac

SEQ ID NO: 705582 - DNA, 866 bp, Homo sapiens
tatatctaacattgagcatctcagtgctagggaatagagtatatcgtcaacctcactatcctccgctaatagtgcctacgagaggattgaatagctatcgcggtgtggcaatgatagcctaatctcagtaaccctactgacatccaatcccgtctgtaggccgacatctggtggcctagtagctatgacatattgcattgtggccgcactggcgaagacaaacggtggacctataccctactaatgtcgccaatcatccgggaaatgagtgtgactgaaagcgtagcaagtaatataaccataaacttatatccaaaagttgcttaaaatagctaatcgttctcccaaacaacttgatcttaccctatgcgatgtgacactgaacttacgcaaagagaccatcacttacaacttcgagagtggaatgactgaagcaacccaaggaaggacctaacgtctactgagtgataattcccctggctagtaatgctggaacccaacatgtcaacatatgaaccataggtaacgcgttgttcgcaacacatccgtttttgcgtcggaaccccccgtaaaacgaaccactccactgggttaagactgaaatttatacatgaagctccatagtgcttgacgaatcatggtcaagggcgaggacacacttgctggagatgtaaagccaatatcaggaaaaatcaaatcctagccttttctactgcaaaggctcgctaagccaatgttcttaagtataacgcttcggcgcgcacgacacatagtccgttgtcttgccttcccttgtaacctgcactgaacggacctggcttacatcacggtggggcaccagaacagacgctcgacgcagcgccacg

SEQ ID NO: 705583 - DNA, 889 bp, Homo sapiens
gtctttgttatatatacaaaataaataataataaaaagaagaacaaaacacaagccacaaatgacaggagtgggttctttggaactatctacaatctgattcagagctgcctatgtgttctgggtcaatccccccggtgtatatgcttggacacagtaaatgtctgtgaagtgcgatcgcacgttcttggcaaacctggttaagggccaggcaaattgtgaatcccatgcctggacgcctttccaaaattttctagcccctctgagggtctctcctggtttcttcaagtatcattgggggttccacccgaaggctgccctgttccgagaccaaacgggggaccccctgccgcagaaggggagcgcctgcccccccctgagacggggggactacacatcaagaggcaaagtattcaatttgggagcccgaagagccgacccaccccgagccggcacccgttttgggttctcccttggccctgagttgttgcggacagtgaagtctccctagcaatctgtgaaaagcaggatgatgaatggtacaattttttttttagggggagagaaacttttgcactcgccccgccacgccaaatattgggggagagcaacccaaagaatcattgtctccaaaaccgaagagagagcccatcattcataaacacttcccaatgctttattccgcaggacaccacaaatcgtagagtcttttcctggaattcaactatagtcccggttgctcaagtcgcgcctataatattacaccttcatacatgatgcaaaactacactcttttctatatatatagctctctcccgtcaaatcccctgcagccccatgaagcaggatgtgactttaacattaaaataaagcaacccccccacaaaaca

SEQ ID NO: 705584 - DNA, 161 bp, Homo sapiens
tatcccctctcgtccaccaagctaatataaaatatataagatacaaaagtagatgaaatgctgaattacaactccttactttgactgtttcctttattctagggcctcacacctaatgatcttatcgcggtaaatatattctgccctgttattctataaag

SEQ ID NO: 705585 - DNA, 149 bp, Homo sapiens
attcgcggccgcgtcgacgcttagtgggccacccctgggccgctccctgggggtgggatttggaggcggtccctgccttgcaccctgtacagtgggtgggccgcgactgctgctcgttattgtattgtagcaggacgactgtttaatat

SEQ ID NO: 705586 - DNA, 536 bp, Homo sapiens
taggcgcatgacagtggtgcagaagcctgcccaaaggcagaagtgaagtggcaagggagtgtcatctgatcatgaggttggctttcaggagcggcatcttgatgatggtcataggtcatcacttctagtacagttgacaatggcattacgagcaacattgggagaggtccctttccagaggccccggaacccttcctctcgggcaatggtcttgtaggcattgacggtgctttggtatctccgaccacctccagcccgggcctgagcttggaatcggacctttaccacatccgtgggctgggccacagccacagccagggcacctgtggtgctgcctgctaggaggcggctcccaatgctggcatgcttagagcccttggtgtagaactgtttgacagaatcatacaggccgatgcggacagaggcaaagctcatttggcgctgcgggccggcaaccagcccattgtagaggcttcgggggccctcagtacgcaccatggtcagaatggtgcccatcacaccgcggtactgggcgc

SEQ ID NO: 705587 - DNA, 143 bp, Homo sapiens
cgtgtagtgagtgtcagtcttcggaataggataagctagacagagtaggtccatggaatcctgaacccactatctagcttggggtcagcacagatctcctatggcaaaaatggtctagaagatcacagctatctttgggacac

SEQ ID NO: 705588 - DNA, 605 bp, Homo sapiens
  misc_feature (444)..(444): n is a, c, g, or t
gatctgactcttcagtaagcagcaaatgacctagtaactcagggacaactatttttgaactttaagtgccactttaatgcagttagtttgataaaaccatgtgggttttttttttagggctagctctacgggagtggaagtgagagccaggcatgagtgcgtctccacatgcttttccacctgccctgagtgtgttacatactgaaacaggcctacatagatgttacaacttcccttcctctgtcggagatgtcatctgtgcctttctcagggttcatctgataatgtaaatttaaatgcctctacatttgatacgaaacccacattcaggtgacactgaacgaggtggcttttgttccaccagtgcctcattaaagtgaggggatttctctctggtttaggaaaatgatttttcccctaaacttgtgcaaacattaacaaatntcctagatcttatggattggagaactgttggtgttcctaaattaattcaagttctcgagaggatttagaattcaccctgggcttgaatgggaataaagaactgaggggctttctggcctcttttttgggttatccactaagacttgggaccaaccgggttt

SEQ ID NO: 705589 - DNA, 819 bp, Homo sapiens
gagtgcccattacgagccggtatccagctccatcgttctttgcagcctgtgtggctatgggtacttcgtggccgcacatcctatctgctcgtgaaatccatccagagtccatgttccaataaactagtgaggtcgtgtacaaataaattcttaaataggctttatcgtttatggcttaaatccctctctcccccttcttaaatatgtctcaggatcatatcaatacataatgtctctgggtaggtgttgaagaggagcgcgtgtacatccctcagcatgacacgtaatttgaatggtgccggaaaaaaaacacaccccgggatcccgcactttctgtgtgtttgtatccccccaaaataatccgccgcccaggttcacaacctttctctatctcgacagacaagtcttcagtgggaggctcaccgggcgtcaatgccaccaggggcacgccagggcgtattatatgcccgcggcgggcgtgaccagactcggtttcgagtcaatttgcctgggtgggcttcctacagatttaaacaaggaccgtctactaagctcaaacgggcaaggctccggggggatcccaagccgggctgtcaaccacccggccagacccacgggtccgagcggtgcactctgcgtaacactcaccagatgggacaccttttaacaaaacccaatacaaagcctccagataatagaagaacagagccattccagtcacgtgccacgtcaacttgatgtcacacagaccctgtgtccacatcgaaaaccggcttcaagaacacacaccacaagagcacaaagaccaagatcaaaaga

SEQ ID NO: 705590 - DNA, 144 bp, Homo sapiens
gcttctgcggtcgactctgacggactccccggcgtggtggtacgggcgttacaggcggacagaactcagactgtgcgtgaaggtgacattgggccgcggtggctgcaacctgccgccgtccctaagcacagcagaggcaggaca

SEQ ID NO: 705591 - DNA, 306 bp, Homo sapiens
ctgtacagagacgaaaacgacggtcagcatccaacaatctgaacgtgaccttactcgagagctgatgacatggcagggtccgcggacagtactatcccgtcggaggacctgcaggagcagatctaactgaatcggacgcatgctgaacaccatctacacgcagcgcgtgctgacccttcgacgacaacatctgcctgcgcgagaccctgagagaaaatacatgaagtgcgtgtccgttctgcgacttcgacagctccgcgcccttcctcagctccaccacccgtgctcttccgtgccatccacccc

SEQ ID NO: 705592 - DNA, 796 bp, Homo sapiens
ggatagtgaatcattctttacatgcaaacatattccagttactataactgatcagtttatatattgatacagtcactccattaatgtaaagtcactagtgtcattattgctatatcagtaatctcttggactccgttaaatattttactgtgtgtaatatagagaagaattaaagacaagaaaatctgaagtattgtcttgtcatttaataagacacatacagtgtgcctagtagtatagagaaggtcacttaatattgtctcatttatgccacctggaaattaggaataatgtagaaagttgcgaggcagtgaatttcctttgtggaaaggactctgaaggcagaataagaagggagagaacctcatgggcagaatattataaacacgagtgtcatacttccagcattgagaactcggaagagagaagagtgaagatccctagttgccattattaatctgccctgtgtctatttcctattgaacaatcagtttgagcgtgctgcagttatgagtttctcatcatagatgacagccctacctattgtaaacgtcaaatgccgatttaagactttccgtggctgtttataagaaacgaaattgtcttcatgagacgtggtgactatatcatttggtttggacctgctcaatagtaggtcgaatgggcagcactccctttgccccctgttcctggggttcatgcagggaatacttttaagagtctatatagggcaagtggttctttcctctgaaattacaggatggacaaaggtcatatccttttgtccgcgaaaata

SEQ ID NO: 705593 - DNA, 171 bp, Homo sapiens
tggaaacagtgtctggtttggtggcctaagcgggaaggcaaggtcacaatctgggctcacggcaacctcaacctccggggctcaaggtgatcctccggcctcagcttctcaagttagctgagaccacaggtacaagccaccaggcccagctaattttggtgagcaggtggg

SEQ ID NO: 705594 - DNA, 265 bp, Homo sapiens
  misc_feature (121)..(121): n is a, c, g, or t
gacctgatgttcggtcggtggtacaattggctgaggtgctgggctttgggaatgcattccccgacggtattggtcgtcgctctcgcaagagcctgcctcccgcagtacaagcgtccccggntcgggtgggaggagggcactccggtaggagaaacatggcgttggtggacctcgctcttcattcctgatgtgaacatggactccaagggggtcttcaagttatgtgctgatccgagtcgtctcggctccccgctcgggggccctc

SEQ ID NO: 705595 - DNA, 175 bp, Homo sapiens
  misc_feature (65)..(65): n is a, c, g, or t
actgtgcctggctgtctcttgggaaaggtaggtaagttggacatacaaagtgcaagggcttggangggatgctgcttggtgaagaaccctggcgagggaagccgacagaggaggctggaagcacgtttgttgcgccaggatgtttctgcctggccgtgccacggagtgtggggat

SEQ ID NO: 705596 - DNA, 1539 bp, Homo sapiens
  misc_feature (180)..(180): n is a, c, g, or t
  misc_feature (892)..(892): n is a, c, g, or t
  misc_feature (921)..(921): n is a, c, g, or t
  misc_feature (949)..(949): n is a, c, g, or t
  misc_feature (1214)..(1214): n is a, c, g, or t
tttggacgtccccttctcgtgctgctcggtagatcacatcccacactactgccgtgtgtgtgtcgagacctcctatcgattagaaaacccccgcgcgcgtgtctcagttatcccactgccctctcccggtggtttttatattccctttgtggcccccggggggtgcggggataaataccnattgtgttgcaccgcccacggggtaaaccgcgttattggcacccactttgggcccccatacttttttaggagtgaccaccagctatattgagaacacaagggttgtgggaccaacaaaaaaaaagcaacagggtgtggtgtgtataccccggtgttccccgcggagagttattccccccccggggaattattattttcgctcgctgagccccacacacggcgcgtgtccccggccgttttttttctctcgccggcccacggggagtcccctctagaagggcctcctgttaaggagcctcacacccaacttgtggcgggctcccacaccccggggagattggggcccaaatggggtctccttgtgaataagccccccccacccttgtgccgacaccacaaagggagctttgtgtgggcacaaccagggtgcggccgagttggtgccccacaacacaggggggtgtcctacacccacaagccccgggccccccggtgatagagttcccccgcccaggacaggtaaaggcccccccgggcacaaagcccacaaaaggcgcgcgcgctcccgcaaattctgccacacccacgcggcccaccccgcggttctcggggtgccgccccaatcaccggccgcacccaatctcgttgcacctttgccccccaccccgggtttcctcggtgagccacacacacgaaaaaggtgtgccgccgnccggggcgccgccgggcgttttcacaccnctctgggagaggagagctttcacaaggngtgtgtgcccgcgccaacatttcacacacacagagatagagtgtggccccgggagccacttcgcgcactattttctctgtgggatatcccgagaggagagggccggagaaacacaaggttcccaacgcgagagtgcccctctgcacaggccccacacagtgtgcacagcgcggctctgagaaggagagtgaccccgctctcccaaacatctcatctccttgttctccccccagagatagaccccctctgtgcccccccacagaanagagggagaacccagattcttgtcctgtgaagagaacactgtataacatgtgcccaacacccagactgtacccgggacaccggtctcaagtcccctctccggaacagtttataaagaaagagagaaaagactctgagatctcatccactgagagaagaagaaagaaatttccaaagccttctgctaagatttcccgtatggccccgtgcccaacacgccccggcgttttctggccataacacgggccaaaagagcccaggaaacccccaggaccggatgttgtataaagaaaaaattaagccctcctggggacttggaatccaca

SEQ ID NO: 705597 - DNA, 166 bp, Homo sapiens
  misc_feature (61)..(62): n is a, c, g, or t
ccccccccccgttggggaatgggcccattttatcccccagccacccaagaccaggagcctnnaaacatttgggattcaagggtttgcacccccccccagccctgaggatgaacaccctcaaaaaaaaggtggtttaaagcaaggaaaaaaatgaaaccagtgccca

SEQ ID NO: 705598 - DNA, 367 bp, Homo sapiens
tcctaaacacagcttctctcctgagtgtactaattcccacaatgccacaactacatggtgttcggatctttggaattaataagtgttgaaatgttttgaaactgaaaaaaaattttacagctactgaatttcttataaggaaggagtggctagtaaactgcactgctactctgataatgtgaaatgagaagtatttacattggatggccaattgggtggtccttcaagagctgttttgaagtgcatatttccaatggatgatgccttcgtttaatacaccttgtacatttcttgaagaggggctttaatatcctgttgggcatgcccagcttattagttaaaaggtctttttacttagggtgggtaa

SEQ ID NO: 705599 - DNA, 286 bp, Homo sapiens
ggtgttccctttgtctccggctgctcgggagtgctgaggggggagaatcgcttgaacccgggaggcggaggttgcagtgagctgagatcgtgccaccgcactcccccagcctgggcaacagtgtgaaactctgtctcaaaaaaaaaaaaaaaaattccagtatttggctaaagcttccatagggtttccaggattctattctcctttaggagggatgcctttggatctcatattttggttttaagattgatgtgtggcaagagttctggtaagacaaggggaaaca

SEQ ID NO: 705600 - DNA, 115 bp, Homo sapiens
  misc_feature (64)..(64): n is a, c, g, or t
  misc_feature (109)..(109): n is a, c, g, or t
tgcagtttgagcatcaaggaaatcttcttcctcttcctcggttcgcttgtgttttaaaaacaantcagacttttagaagcggctgtagctgtcgtacttcatgagattnaagatc

SEQ ID NO: 705601 - DNA, 1218 bp, Homo sapiens
cgtaagggccaaagtcgcgagcggggctagggcgggcgcgacgttcgaaatgtaatatatgttatgggagactgctcgggaaagctgtggtcagtgtgtgtggccaccatgtactgttaggccagtgtcttcatcagtggctggagacacggacacgaacggcaagagtgtccagtatgtaaagctgggatcagcatgagagaaggtagttccgactttatgggcgagggagccagaagccccaggatcccagcattcaaaaactccaccccgaccacagggccagagacccagctccggagagcacgaggggcgcactccagccatacggtgataccgagggagcattccacgatactacattatggatagtaggatgacttacaccactcttggccttataaacaaccaacgaactttccaatgccacatgagccctatcccagaccgggagtaccagagttgtggaattcttgggaaccacgggatccacccaagaccataacaggactgagccagcgacttccccatacattcccatggatatcctacagcaaaatcctatctatcctaataaccagggctgccttcagctacttcagaagccctaacatgtcctagccatcccattggagaccaacccaatcccaagaccacagacaaacagaacatcacaggcacttggaacgcgggtatcccttgccttggacccccgacttcacagtaaaactcacataggaaccacccacatggaataacccctaccctaattcgccctgacagaagcgcccacaaaaagcacaacacacccccgggctaacccatctatggtcaccaaagagcaaaagtcgacccagggacaaacgcaccaagaaacacagaaagcactccagcgctcacactaccaactgtgcgacagaaagcaccagtcacgacatcacgaagagctccaacacatcagcaaaacccaggaatagtaaaaaacataaatcaatacacctatattggcaaaaaacaccaccatataaacattacaataacacaaatctttcatataaactccccccatcaccataaacacacactataccattttacccccaaaaaattctacacctacatttaaaaacctatccaaaaaagctcaacaacaaacaattcacccatcatataacaaatacatacaaccaattacccatcattatcaaaaacaaaaac

SEQ ID NO: 705602 - DNA, 271 bp, Homo sapiens
tagggaaggcaggaacactagctacattaaaaatcatttcattaaacttatacagaaaacattattcatatacttaggattcccagagtaacttatttcccttaccagtataggtatatcaataatactagtctttctttactttatcgtggtcatttcatattaaaaatactttttccagcatgactcaactaacacacatgtatatgtttatgaacataaacactactgaaacaaacgtttcagacaacgtttttcttactgcactctg

SEQ ID NO: 705603 - DNA, 226 bp, Homo sapiens
acctacttttcacagggtgacatatttctttttcccctctattcaccgatttgccacttcgcttcaacagcatgccctgtttaattgggatggctcggccgctcccaatgctgtccgctcgactctccaggcctttcgttctctttgtctgggtcgctccctttccgagaagtgaacaggttggaccggcgcttagactgcttgcgaacgggcgtgcgcgtgtggt

SEQ ID NO: 705604 - DNA, 219 bp, Homo sapiens
  misc_feature (87)..(87): n is a, c, g, or t
  misc_feature (105)..(105): n is a, c, g, or t
  misc_feature (146)..(146): n is a, c, g, or t
  misc_feature (163)..(163): n is a, c, g, or t
gctaagttttaagaccttcagtagttaacaaagcagacagagactggccaggcacagtggctcacacctgtaataccagcactttgngaggctgagttgggtggntcacaaggtcaggagattgaaaccatcctggccaacatggngaaaccccgtctctacnaaaaatacaaaaaaaattatcgccatcacgaggaggcgcgggcacggagcccgaac

SEQ ID NO: 705605 - DNA, 585 bp, Homo sapiens
ctctcgaggagtttggaggcaggacactggaccccagagtctgtctgggaagtcgacccccagccaccatcaggcaagacaaacccaacagtggcgacgtgcaggtgactgaggatgcgtgcgccgctactgacacggaagccatgaccactaaaggacctgctgaaaaagttccagaccaagaagacagggctgagcaagcgagcagacagtgaacgtgttggcccagatactcaagcgactcaaacccgagcgcaagatgatcaacgacaaaatgtacttctccctcaaggagtgaggcttggtccaatacatggctctgacccccagaacttaaggctctcactgccccttcgccatcctagagtgaggctctgtccaatacatggctctgccctccagaacttcaggctctcagtgacccttcgacatcctgcttgatcactgactcccagggccccgtagttagcaattctggaaaagttaagccatcttctcctctggcccttacttctggaatcttcagatgccagttaggccttcttattgtcctcctcctcctgggctcccacagtgtcctggact

SEQ ID NO: 705606 - DNA, 1096 bp, Homo sapiens
  misc_feature (759)..(759): n is a, c, g, or t
cagtgagccgagatcgcaccattgcactccagtctgggcaacagagtgagattccgtctcaaaaaaaaaaaaacagaaaagggaaaaaaaaatagcatttatacctccttcctggttcctcacaccggccattgaaacatttctgaacactccaaattctcaggtggaattaattccaaaacaaaattttatacaggtattaacacctaatttttacctctcttatagctaatagctatactttaaaaagccctcagggctatactatatcgtctctaaacagcctacaactctcagctgccaggctacatttaacccaacttattgttctctctagcttgagaaacaacttaggcccatatttcacttgctggtgttagccctcaggtgccttaacatggggttgccaaattaaaatattccgctagaaatttacccgtgacattggctaaaacccattgcgtttctggtttacaattggccaaaacttctcaaagggcccgtgttacttcactgtacatccttgtgacaactctactcactctcgactctggaattcctcacgttactcggactgggctggggtggtgacttacgtaccataaggtacctcaatatttataaaaccctcaaactactttggcactcgacttttacagcaaaattccttccccttttctaccaagttaatttcttcttaccaaatcatgcgggtaatctcgctaaatggacttactcattccatggggtctcttaganaccccactgttttcaacctatcttgcgccttcatccagtcatcacctgcgctctacctattcccacaacaattctccacactttccccacgacctcattccttgacctgcagaaatcggctaggcgaaaagtgaaccctttcacaactttgggctgacttctcccacacccttggttcacacagggcggtccctccacagggactacacatgcgggcctcccccaacggggtgtccgctccggacccatactttgaccttccacgctctacctcacagggcgcgcgaccctcctcccctaacctctcctcacacacacggcgccccaaatcatacaa

SEQ ID NO: 705607 - DNA, 131 bp, Homo sapiens
cctcccgggttatttttttccgactgagtaccaggccgcccgagccacctgctcagagcgttccaggcgaagtagacacattgtgtagtgccccgtgttgtatgccagtggcgacatcaaagacaggaagg

SEQ ID NO: 705608 - DNA, 95 bp, Homo sapiens
ggccccttaagggcaggaaaaggacccttttttttttttgctttcccaaagcaaagtttttggcaaatgaatgtttaaaaaatgtttgttgaata

SEQ ID NO: 705609 - DNA, 501 bp, Homo sapiens
  misc_feature (302)..(302): n is a, c, g, or t
ggctcggacccgcagtttacaaagctccagttacaacactttctcatttttacagctaagacatgttaaattcgttaaatgccataattttgtgttcaagctgctttgtctgttcaatctcacaagtctagaatgtgattaagctactaatctaagtattcacagatgtgtcttaggcttggtttgtaacaatctagaagcaatctgtttactaaagtgccacctaagcattttatagaaagcaatttaatgccaccaaacatgatgcctgctataccttggaaacaaaaatatctcacacnctaaattctagcagagtacactattcctcctcgaatgtactgtatatccatatggcacatttatgactttgttctatgtcattcatattacaggtttaggtgtgtggtatgtagctaggattcccatggtcgtcagcttttctagagctgttgtcattggccttttcaacatctgaaggctatggtgtctggggtacca

SEQ ID NO: 705610 - DNA, 419 bp, Homo sapiens
tccactaagaagctcaacatccagtgaggcgcccgccgccgccccctttcccggggctaaaaataaacgtttccaaagtggaaaaaaaaaaaaaaaaaaaaaaaaaaaaaaaaaaaaaaaaaaaaaaaaaaaaaaaaaaaaaaaaaaaaaaaaaaaaaaaaaaaaaaaaaaaaaaaaaaaaaaaaaaaaaaaaaaaaaaaaaaaaaaaaaaaaaaaaaaaaaaaaaaaaaaaaaaaaaaattggggccccttttgccaaaataatttttaaaactggcaaattttatatagggggcccaaatttgggccaattgggcaaaacccccctaaagggggggttaaaaaaaaaaacggggcgctgtttaaaaaacggttaatgggaaaaaccctgggttacccaaaaaaaaacccttgaaaaa

SEQ ID NO: 705611 - DNA, 329 bp, Homo sapiens
gtggtcccccgctcccgggaagtcaccattttgatgccgaacttagttgcggacacccgatcggcatagcgcactacagcccagaactcctgggctcaagcgatcctcccacctcagcctcccgagtagctgggattacaggcatgagccactacgcccggcagtaagattaattttaatttctcaaacatactgaagaggaggtatgaacacaaaatgctgagcatggctgctgtgaggagtcaggtgtgtaattccagcagtgattgtgtcaggctttacacgtgcactgcaacctggcaaaaattcctgtttgtggaggtagcact

SEQ ID NO: 705612 - DNA, 690 bp, Homo sapiens
gcaggctatgctcgccggtttcctggcgttccgctccggccagccagagtctctgtctcaacctgtgtcctgtgctccagcatgtctcctcagccctggccccgctggcgcggttggctgtgcctggctgccccatggcgcgccccctcctcctgatgtgctggctggagatccatgcccaatgcctctgaccctgcaagcctgatcctgctgcatgcgtgatggatgtggtgtcccagtgatggtggtgaatatggcctgtgatctgtgcccaaatgatggatgggctgtcatcatggctgtctcctgaggacatggacagttcgtgttttggttaaagagagacatgtggacagtatttggccaagcgtataccatgcaatgccttctccatgttcatgcatgtcttttaacccggaaacaagaagactgtccataggtctagacaatggtacaatctcagagtttatattgtcagaagattataacaagatgactcctgtgaaaaactatcaagcgcatcagagcagagtgacgatgatcctgtttgtccttggagctggatgtgggtgctgagcactggacaggacaagcaatttgcctggcactgtctgagagtggggcagcgccttgggagtgttatcggaccagtgctgtggcctcaggcctgcatttgatgttgaaacccgg

SEQ ID NO: 705613 - DNA, 1121 bp, Homo sapiens
  misc_feature (281)..(281): n is a, c, g, or t
  misc_feature (316)..(316): n is a, c, g, or t
  misc_feature (616)..(616): n is a, c, g, or t
ggcagtcgccacaccttagaccctgctgcgatagaccctgtccgccacttctagtcggtatcctgcccaccgctgcttgctagctggctggacagttccccacggcgggcggtgcagggcgttcccctctgcgagcgttacgacggtctttgaggaatgggccagtcagttaacctacaagacaggcaatctatacctgcgggggccccctgagagaagtcccaatagtcactcgacttggtcaagtcgtgacccttctactagtagaagagcaactggtngcaggttggctagcctgaactgccttacctggatnctctgagtgatgcttctgttccccaacaatggctggttaggtcagttgcgacgtatgcttcatactgtccagcgccctggttgtccccttaccggaatagatggtccaccatgggaaatctatatacatttgttcaacgttgaggcagggatcgtgggcatgctaccaatatgtcgccatgcgattcggttaggtaaacgcaggagaacgtgggcatagatttatccaattcaaaagggtggggcatggccttgccggtggtttgcggaactgacaacctttgacacacttggcagcgtnaggccccttttccctgtgtatcccagtttggtcctggccagtggcgaacacacaaggtatcggacgggcaccactgggaacgcaaagaaaaaggtttcctgtggcgcaacgttaatgggcccctgggcaaggccttcattaaccggccgccaccaaagggccttgggttcggcccagggaaccacacttaatttcgattggggcaccggtttggtgtggccacactatgcggcggaggaaccccggggcgggggcaaatttgctctcaggcttcccaattggggcaaaacagaccgcaacaaagccggccgccaaggcgggggaaccacggaattgggctttccttgcccaacaagaaccaaacgaccagaccacacaggaagtggtatttggtttggccccccgttggggggtcccaccccgggtcgagcaattggggggaaaaaccgccttgtgggggacaacggatttcaagggaaccccaaggatttcccttttaaaccta

SEQ ID NO: 705614 - DNA, 339 bp, Homo sapiens
  misc_feature (5)..(5): n is a, c, g, or t
accgntaatatgtaacctttctcccttcctttcctttttcctttttctttgttgagacaggtctcgctctgtcgcccaggctggagtgcagtggccccgtcttggctcactgcaacctctaattgatcctcccacctcagcctcctgagtggctgggactgcatgcgtgtgctgacacgcccggctaatttttgtttatttttttttttgggagaggaggtctcactatgttgccgagtctagtctcaaactcctgggctcaagcgcttctccggccttgtgctcccaagtgctggtgagctctcacaccggtgcattgttttcgtgtttcatgttttc

SEQ ID NO: 705615 - DNA, 785 bp, Homo sapiens
caagttcccagtaggaccgccgggtaatattcacggatagaatcttgttttgattcggacaaaaaaatggggtaggtaccaataacactaaaggggtgctcttataggcggcccgaagtgtgcccctccacaagagttgcaacatttgttgggccaaggaacaattgtgcgaccgttttgtgggaagaacagtccggacaaggggtctctccgctgtcgtgatatgtacccctcgtcattagttaccgttggccatccccaccggttttcgccgcccatgggatcacgtcagcggcctcaacacctggtacggcactgcaggcgggaacatcacacgcgcgggttactccggcaaaaaatataccccctgccaacacgtagcaaacacacgggatgcgccccaaagggcggacacactcggtcgagaaccccttcataaaatgagtggccatcaagggcagactaccccagagcaagtgcgataaagccgggaccatcaacatccgagcgtggcaataaggtcacgtcctccaaatggtgcttctaagggcccctgtcccagagagggcggtttcactcccggattccttccctagtttatagttcatcacgatccggtgtccgagtagaagaattttgcttcatttgaactcggctatctggacatcttcagttcacgccggcttcaaaacatgcttgcaaaggcgccaactggtctcccgaagacccggaccacactgcaaatcatgctctcccaaacaaaaaagaacccactgcccccatga

SEQ ID NO: 705616 - DNA, 146 bp, Homo sapiens
tggtagcgccaggagcctgggctggacatcctacagggaggcagaacgaaaagatgtgtatgggcgcatcatctgtatggacttgtatgtattcttgttctgggcgaaaatttttcctcttgtagttatcttctattcattgaaat

SEQ ID NO: 705617 - DNA, 161 bp, Homo sapiens
cctcaccaagccacttcataataatggtcctccacgggaggatcctgcccttggtggcacgagcgctgtcgagaatgagtatactagtccaggagcttgatggtgaaggggtccagcacgcggtatgttgatctatttctattcttcagcgtccgtagcgg

SEQ ID NO: 705618 - DNA, 133 bp, Homo sapiens
ctttcgtctcggccgctaaacctgagatgacgaagggcacgtcatcgtttggaaacgcgtcgcaataagacgcacactgttgtgccgccctctgtggctctaaggcctaccaccttcagaagtcgacctgtgg

SEQ ID NO: 705619 - DNA, 189 bp, Homo sapiens
gagcacaatgtgttcagcttggcgaatcgaagaatgatacagatcagtgccctacccgcctttaccgacaactacatctggttgttacaagaccctacgacccagcgctgcgccgtggtcgaccccgcgcgatgccacgccaagtgctggccctggctcagagcagaatgccgatgtgggcgcctcagc

SEQ ID NO: 705620 - DNA, 916 bp, Homo sapiens
ttgtcggtagcagtccgctcgggcccgttcgcgcccgtgctgtcggccacgtccgcggggtggagggcgagacagtgtgacctttgatgaatgacacggtgcttgggctacctctggaagatgtctgtgtggaagcatgaagcggcacttcttcaactgtgaataatgatcatcaatgacgtgcgattggactatgatgatcgtccgttgggatcggctaatggatcctctgctatgctgattagtatatatcctcacagctaagaaccattctagatggttgacgtggcaccctatcattatgaactaatccgagcgtgcaatgtgagagatggttaaacataagatagcataaagatcctgcagatgataaatgcgacgtgagcgcatgagaaatcgtgactcctagtccttggatacacgtgagacgattacttttaatcgatgaggtagttgatgtaggcatgccatagattgtcgatggcccaaggttcgatgaccaagcttagagtgcatatatagctagaatgcttgataagagcccatgagtaaacatcgaaatagtctcaggagatccgcatattccaggaagcgactacaagcgatgttgcagcagaatgtgcgattgtcacaccccatgtcaagagggtatatagagtctacaatagtccatttgagcaagggatgtggtgagattgagttataactcagtgagggaaccgtcagcatggatcctgagataagtgtagtccaaagcatgatagggttgtcatgataagagtgttttccaataattcttggttgaggacggggagtaagatgcagggagattttgggggggtttacagccttgcatgggtctagtggatgattgactatggtcaagaccggatggggccgggttctataaacatga

SEQ ID NO: 705621 - DNA, 434 bp, Homo sapiens
acaagttggggtctatgtactaaaattcttagaactctatttctttacatgccatgtctctaaacactctctctcggataacgagaacattgtcctgtgcctattaacaaacacctacctgaggtcaggcacagtggctcacgcctgtaatcccagcacttcgggaggccatggcagatggattgcctagaggtcaggggttcgagagcagcctgaccaacgtggtgaaacctcgtcactactaaaaatacagaaattagccgggtgcgacgacacgccccttgttagtcccagttacttgggaaggctgaatgcgtgaggatcctaggtgcctggggaggatgaggttgcagtgagccgagattgtgccactgaggtccagccggggcgtcaaaggcgagagtgtctcaacaaagcaaatcaatggtggtggc

SEQ ID NO: 705622 - DNA, 534 bp, Homo sapiens
ccctgggccttatcttatgggaaacctacccttgtaggacaaactcaagtggcctttgttgggggaggggacagacagcccggagttgggcaggaacgcttctctacacagtaaatggagaggacgagctcttcattcctggggaggctccattaaatacccattctctggagccagttcggcgtagacgccctcagacttcatgtacatgtctcgggtgtcgttggccagaccatgcagcccgttgtgctggacagcgcccccacgtcaggtttaatggctgccccgctgactgcttcgataggcccggtagcgctccagacatggtcacagtgatgatccccggccggagcccttcgagctcggtccgttggatatggcggggtcccgagcacgaggccagtgcgtttcctctgtaccatatgggctgtcaaggcctatttacgttggccccattccaaatcaggcctatgagcaccgaaagcctcgaggaaaaaagtttgaccaattttgttttttgggtgtggtaggggg

SEQ ID NO: 705623 - DNA, 395 bp, Homo sapiens
accaaccaggggaagccccctaatcccgaaagttcctgggtgtatccccggaaaaaccaaacccccggacccccgagggagggccctttcctcccatttttccccccccaaaaccaaaggccttggttcctgttccccccggaatgttttttttgttgtgggagccggaacccctcctctttgggcaaaaaggggcccccttccctcccccctgggccccaagaaaaggggtttttggcccaagcccccctcttccaaaaaagaaccagggatttgggttccctttttttttttttttttgggggaccccaagggccccggttgggaggggaaaggtaagggcttcggggggggcaaaaatgggcccccggtttttaaaaaaaaaatttcctggg

SEQ ID NO: 705624 - DNA, 633 bp, Homo sapiens
tacagaacacaaatcatgtcccgaggacttccaaagcagaaaccgatcgaaggtgttaaacaagttatagttgtggcttctggacaagggtggagtcggaaaacatctactagcagcagtgaatcttgcacttgcactagcagcgaaccgattcgtccaaggccatggattggctagactgtggactgtgtatggaccttcagattccaagagatgactgacactctgacaaggacaatccggacacttatcacagagacaacgctaatgaggcctctcttctgaacttatgcgtacttggcgttgctctggtctactggggctcttctggctctgaccgacacgatgaacccacggctcggatccggaccgacgcgccctacctggtacactgagctgcgagcccgtgaggacaaacagacgcggaggacaaagcgaagtgctcagtacggatggggagggcacgacacggcgcgcgagcaacgcaggaagacacgacaagcacgacgtgccggcagtgcaagggaacaccgtggcagcaagtgatatgcaagcgagaaaaccagacacaggcacagacaggacagaacccacccacaacaacacagggaaaggactcgacgcacacaaggc

SEQ ID NO: 705625 - DNA, 1130 bp, Homo sapiens
agatcgtccgcatgtcgctgccctatggtataactcgtccggactgagaatctgctgtcttgagtacctctctgatgccagcgcagatggtatcaacactatctccgtaagacctcgctgccgcactcaccttcgcatcgtcacttaagtaagcctatccttcgaaactattcagtctcatgactacacgtggcaaggagatcccagtgccctgccaagtgggtgatggcatcagaaagaaatctctcgcttcggcgttgctgtcttggtgcactagtgccccggggtacacagttcagatttcgtgtattccccttagctcttgcgaagagaactcagcatccctataacttaattcgacaccccacgatggtctaagtcctcggtgtcggattggaaatgttcgtaggccacgtactcttacttatgcattttggacttcgatttgtttgatccaccaagaacacggaggtacggtggtcggtaatgagtataaggaggatacctcctcttcttcccgtgacacggactatactcgcgtacatcagatggagttgactactctgcatccgaataaacaaggtcgtggtccatggcggtggaggatgggacttttctacctattcctggccctgaatattgttaatccatctaattaatttgccacgtaaacttggaccaacaagaatacagaaaaataagaataaagcttcttgccaaggaaaaggtatactttactgaaaccgtagctatgagcgtgttttttaggcctaagaccccttgctcaataaataatgttcataatacatgacggtggaaacgggtcgtcagcaagtgcgtcgtttacctgcacctatcattgccctggctgcctcgagggttgctctaaacaccaaaggtgcttctaaccaaagaggaatttccctgggcccattgcaggtcaatagcccattgtgagagaaaaataaaaccacttaatggggtcaaccacgaacattgtggcagcactctatgatatcaaaatcaaaaggaaaaccgtagttagcagggatacagtagagccacatataccaaaaaacgggtgacacaaacaaaagattttttgttttctattacctccacaaccaata

SEQ ID NO: 705626 - DNA, 281 bp, Homo sapiens
ttctatagaaatagtaaaaaattagcgggtgtggtgggggcgctgtagtcccagctactcgggaggctgaggcaggagaatggcgtgaacccgggaggcggagcttgtagtgagccgagatcgcgccaggcgacggagcgagactatgtctccaaaaaaaaaaaaaaaaaaaaaaaaaaaagtttttttttttaaaaattttaaaaattttttactcgagggagacccgcgccccctctcccagcgccatccgggggaaatacggggtaaggagaacacat

SEQ ID NO: 705627 - DNA, 221 bp, Homo sapiens
  misc_feature (26)..(26): n is a, c, g, or t
  misc_feature (130)..(130): n is a, c, g, or t
  misc_feature (152)..(152): n is a, c, g, or t
  misc_feature (155)..(155): n is a, c, g, or t
tcgttttctttttttttttgttgggnttgttcatgaaaatttcataagacattaaacaaagctagccatcatctcaagtgtatttccctgttaactattgttgtgacagcacatgcatgttaggcaagtntcaaaaaaaaaaaaaaaaaatnttnaaagcaaaaatcctaaaaaaaagttaaatacatgggtttttgttttactgctgtgcttgatataca

SEQ ID NO: 705628 - DNA, 756 bp, Homo sapiens
  misc_feature (463)..(463): n is a, c, g, or t
  misc_feature (501)..(501): n is a, c, g, or t
gagagtgagagagatacgagacaaattagacaaccatttacccagatagagagtgagcgatagatatagagacactagcgcagagatatagtaccgcaagggatagatgactatgttacccaagcattctttaggagagactaacacccatacgctctgcataatgatgtaactccatattactctctgtggagagccaaagctgacaccccggtaaccagacgagcatcctaagaacacgtttctgagcacacccgtctatatatctaaatagtgcgaagagttataggtagaggctacacacctatcctgcctggtgatatctgcctgtccaagatagaatactagttcaactttaaatctgcgcacaaaacactctaaatgcgcttgtagatttatctgctagtccacagaggaacagctctttgagcactacgacaaaaccttgtgtagagagagatanattgatcacccatagagagcctatatgcagacaccatntaagaaagcgctctagctcatcacccactacctaaaagaatccgaaacatatatactgactcctaacacccaattggaccaatctctcaccctatagaggaactaatgtgtgcataagacacatgataacatctttctacgcataagcctgcgtcagatgcactgaactgactatttacagcccatatctacatgatccaacacgtcttattacactgactgtgtaccacacatgtctgctctatggagggtgtt

SEQ ID NO: 705629 - DNA, 172 bp, Homo sapiens
cgggacgaggctagtatcctgtatggaggaaatgtacttgttcgtgctctgtgttgagtaatgcagagccagcacttgctgaggggatgagaacatgggtaagtggtaaattcattcctcatcagttttccacagagaattccacatgtctccactccccgggcagtgttgg

SEQ ID NO: 705630 - DNA, 234 bp, Homo sapiens
tgattgcctgtgtcgaaggcttgacgcacggactttccccgctggccgtgagcgacgcatgcatgtcatgccggatgacgacgtgtattacatcactgatgtgaaaatagatgacgcaggggtttacaactgtactgctcagaactcagccggttctatttcagctactgccaccctgactgtcctaggtttgccaattggtctcctgtgtgtgtgtgtgtgtgtgtgtgtgtg

SEQ ID NO: 705631 - DNA, 658 bp, Homo sapiens
  misc_feature (466)..(466): n is a, c, g, or t
ggtcactaacatggctgatgggtcgaccacttcctgagcagtaagaaagagatgtggagtggagctggtacgctccgtggccctaacactcgaagacgctggacgctcgcagtttcaacaactccgcgtacacgatctcgacacgctatcgtttcggagaaacctcctggagcatgtctcacacacttgacacgcgacagactacacaggatgcgaatgaggcacgcagtccaggacacaacagcacgacacagtccagtaccggactctttccttcaaacaaggtactgaaagccaaatagaaacgtggacagagcgatgcagatcccaacagtgcatgagaaagtcggcccccttaagttggaaacacgggaaaggctgggttcccgttgtccttgggcggagcaaaatttgcccccgatcaaggaacttaatgctgggcaaagttaatacatttctctagagnagacttccgctcaattaacacaatacacaaccaatgttgcttgggaacaaccctaggtagcaccaaaagtgcttacttaaataacccttttcccactagggaaagttttacccaggggaaagggggagggtcaaaaaccaaatcaaagggtcaaaaaagggcaaaaaataaaaaagcccgggccctttccgc

SEQ ID NO: 705632 - DNA, 155 bp, Homo sapiens
  misc_feature (23)..(23): n is a, c, g, or t
  misc_feature (69)..(69): n is a, c, g, or t
  misc_feature (87)..(87): n is a, c, g, or t
  misc_feature (138)..(138): n is a, c, g, or t
gcaagggctcatgacgacccctnctgagcactgttcaaggacggcggctagcattcctcgctgtgagtnctgaacagcagcttctcnaatatgaccgacgtcatgtctggcacccctacgcaccgacgatcggggcanacccaatgcttgcagtg

SEQ ID NO: 705633 - DNA, 450 bp, Homo sapiens
agtaagatcgcatgaacggcaggttatgaatgatgtctgaaatactggccacattacacttgtaagacctccttcataatgtattctccaaggtttggcaagggctgtaatattactgaagacttggtgacaatcattacattagtcaagtttccctataccacggatggctggatggtgagtaagtgtggactgaccaccaaaggctctgccacactcattacactggtacaattcctttccagtgtgaattccagtatgtggggccaagtgtgaatcacacccgaaatccttgtcacaaaccttacattggtatggtttctctccagtatgaatcctgcgatgctgtgcagggtgtgacatattatggaagaccttgccacattcattacattggaaatgtttctctccagggtggatcgcatgatgattagtgaggcttgaacgcat

SEQ ID NO: 705634 - DNA, 404 bp, Homo sapiens
gaccggttacagcttctactaattttaaatatttgttaatgatttctttacttatattctattacaaatatgcaatctattttttaatctaggctacctatattgaagcaaaattctattaggtcattttcagtacaggtttgaggagaacaagaagagaatcaatgttatataattaatgcctactaagcaatagtcatctgacatagataatttcactgaaattcaaaataccttgaagtcaatatcatcttcactgaacgttagtgtcacaagccacatcataagtacgtattggaactatacatcaaattgacatttttcaggacaaaggactaccttacataccttgatttgcattattcaaagatgacagctaaagttgcaaagtcattaaatcctcc

SEQ ID NO: 705635 - DNA, 345 bp, Homo sapiens
  misc_feature (1)..(1): n is a, c, g, or t
  misc_feature (12)..(12): n is a, c, g, or t
natatggagganaagttatgagataaaaagaataaaaacagagactattcaaaggctatgcatgggactgggcactgtggctcatgcctgtaataccagcactttgggaggccaaggtgggtggatcagcaggtcaagagatcaagaccatcctggccaacatggtgaaaccccatctctactaaaaatacaaaaattagctgggcgtggtggtgcacatctgtagtcccagctactcgggaggctgaagcaggagaatcgcttgaacctgggaggcagaggttgcagtgagccaagattgcaccactgcactccagcatgggcgacggagtgagactccatctc

SEQ ID NO: 705636 - DNA, 379 bp, Homo sapiens
cccttttttttttttgggggcccgggggtttttccccccgggagggggccttttttccccccaaaagatttcccccggggcctttttccccaaaagggggtcttttttggtttttttaaaacccccccccccgggccttttggctttccaaaaacacctttaaaaatttttttaattgggggggccggggaattgggggggtttttttccccaaaaattttgaaaaaaacttggggggtgaaccctttttttttttggcggggggttgaaggtttttggggggggttttttttggagggggtttttttaatggggccccctctttttaaaattaaggggtttttcccttaaaaaaaaaaaatttttgggccacccccca

SEQ ID NO: 705637 - DNA, 90 bp, Homo sapiens
cctgctcctagtgacacaggagatagaagttatttaggcagatagtgagggtacgagttcttggcaaggcttcccttctgtcgtcttctc

SEQ ID NO: 705638 - DNA, 170 bp, Homo sapiens
tgtgctaagtacaactgagaggccaggaaagcggggagggtcctagatcagggtcaggaggccacctacagaagcccaggcccaccagtgcccaagcacatagtcagggctcagaacaaggcctacaaccaacgagggttgataggcctaccagttacaagaaactagta

SEQ ID NO: 705639 - DNA, 129 bp, Homo sapiens
tacgtcttcatcatacctacccaccctatgtgtaagtgactgttttcctcttaatttcaaataaggaaaacagtcacttacacatagggttggtaggtatgatgaaggaggtaggtatgatgaaggacg

SEQ ID NO: 705640 - DNA, 471 bp, Homo sapiens
  misc_feature (7)..(7): n is a, c, g, or t
  misc_feature (299)..(299): n is a, c, g, or t
  misc_feature (342)..(342): n is a, c, g, or t
  misc_feature (464)..(464): n is a, c, g, or t
ggcagancaaaaacttttcaataaacataaaagtagagacaccagtttaatgagctatcatatacccatcacatagatttaaaaactattaacatttgcaatatttacttcatttgtttttctgaagtatttacaaaatagttgacagtagttatgtaattgcatcctgatattcatccctacgtaatttactttccctctaaaaacatgagggcactttttatatgatcattgtcatacctaatcaaattaccagtaattccttaatatcctctaagatcaagtttacattcagatgncttgtcctcaaaatgtcatttgtgattatttttttctttgacnaaagatagtaagatctcaagatttaatgacagagattccatgttagccctgatgtctaagctctgtggtccattgtggctttacttgaagtctgaggctaggcgtggtggctcacatctgtnaaattct

SEQ ID NO: 705641 - DNA, 209 bp, Homo sapiens
ggctgtcagtgagttcacctctaatcacacgatcaaaagggacaagcattaagcacgcagcaatgcagctcaaaacgcttaggctagccacaaccccacgggaaacagcagtgattaacctttaacaattaaagaaagtttaaattaagctatactaaccccaggttgggtcaattttcgtgccaggcaccgcggtcacacgattaacc

SEQ ID NO: 705642 - DNA, 1302 bp, Homo sapiens
  misc_feature (378)..(378): n is a, c, g, or t
  misc_feature (402)..(402): n is a, c, g, or t
  misc_feature (447)..(447): n is a, c, g, or t
  misc_feature (455)..(455): n is a, c, g, or t
  misc_feature (463)..(463): n is a, c, g, or t
  misc_feature (472)..(472): n is a, c, g, or t
  misc_feature (475)..(475): n is a, c, g, or t
  misc_feature (507)..(507): n is a, c, g, or t
  misc_feature (519)..(519): n is a, c, g, or t
  misc_feature (543)..(543): n is a, c, g, or t
  misc_feature (555)..(555): n is a, c, g, or t
  misc_feature (586)..(586): n is a, c, g, or t
  misc_feature (628)..(628): n is a, c, g, or t
  misc_feature (682)..(682): n is a, c, g, or t
  misc_feature (686)..(687): n is a, c, g, or t
  misc_feature (722)..(723): n is a, c, g, or t
  misc_feature (727)..(728): n is a, c, g, or t
  misc_feature (730)..(730): n is a, c, g, or t
  misc_feature (751)..(751): n is a, c, g, or t
  misc_feature (762)..(762): n is a, c, g, or t
  misc_feature (773)..(773): n is a, c, g, or t
  misc_feature (823)..(823): n is a, c, g, or t
  misc_feature (849)..(850): n is a, c, g, or t
  misc_feature (858)..(858): n is a, c, g, or t
  misc_feature (860)..(861): n is a, c, g, or t
  misc_feature (882)..(882): n is a, c, g, or t
  misc_feature (943)..(943): n is a, c, g, or t
  misc_feature (977)..(977): n is a, c, g, or t
  misc_feature (981)..(981): n is a, c, g, or t
  misc_feature (1088)..(1088): n is a, c, g, or t
  misc_feature (1239)..(1239): n is a, c, g, or t
agaccggactccagaaacctgatatgaaggaagaggagactctgcgcagagcactatgagtccggagggcgagactacggcggaagcattcccgggcgggtgacccagcatgggtgcctctcgtgattaggattcgccattatatctttctcgctgctaaatcaccgagcccggaagattatagagacctatatctgggattcctgtagacacactcacgcacatacatacatttatatatatatatattatatatatatagaaatacatatctctatattatatatatagaatatatatatgctctctttaaatcaacagagctaatgttataggtgtcttcactggatgtatctgactgctgtggactcgagttgngaggggaatgttcccactcagatnctgacagggaagaggaggagatgagagactctggcatgatctttnttttgtcncacttggnggggccagngtnctctcccctgcccaggaatgtgcaaggccagngcatgggggcanatatgacccagttttgggaacacngacaaacccagncctggcgctgagcctctctaccccaggtcanacggacagaaagacagatcacaggtacagggatgaggacacnggctctgaccaggagtttggggagcttcaggacattgctgtgctttggggattncctnnacatgctgacgcgcatctcgcccccaggggcactnnctgnnantcaggagcctgggcggcctcncttactctacntgctctgagtngcccagaggccactggcagatgtccggcgaagagagagacacattgtggnagaaagcagccatgacagctcccttnnctggactngnnctcatctctcctggtcccttnctgggtgcagctaaaggactatgtctacacattgaaccctagtctgtccccaggagactgntggtgtgggagtgtgactttctcatcctggcttncttncttcgagccagaagcaggcaggatcactccatgtggggcggaaagaaatgttttatcgactattaaatccttttatagaataacagtattataagatagttctttanattctgtaaataatcacttttaaaggacttgctcttgcccttatttcccggttggttaaacagtccaactttttcttacggagacatcttctatacatataattttaacaaattctctccccccgtgtcgacacctttataaagtgatacncactctattttctgccggcgggtgtatatatatatctatattgtataaaaacctcttcttatt

SEQ ID NO: 705643 - DNA, 170 bp, Homo sapiens
ggccggttcctgccttaactgatgacattccaccattgtgatttgttcctgccccaccttaaccgagcgattaacctgtgaacttccttctcctggctcagaagcttccccaccgagcaccttgtgacccccgcccctgcctgccatagcacaaccccctttgattgtaa

SEQ ID NO: 705644 - DNA, 791 bp, Homo sapiens
  misc_feature (2)..(2): n is a, c, g, or t
  misc_feature (21)..(21): n is a, c, g, or t
  misc_feature (791)..(791): n is a, c, g, or t
gnggggctccccaggtttccntctttacggccgggggacagactgttacttgctgttacaggcacaggtgattaatatgctaaatattgtatatttaagctttgttagtatatggaaaagttgaagggaaaatattggaatgcttcttcaaaggttaaaaaataaccgtgtcttttgggattttgatccaacgtgtttctgtgaccatcatgcatgagaccttagagtatagaggaccaaaaccaacctaattgtcaactctccacacgttgttgaggctgtaatatccgcgctctcgctctccccggttgctccccctcgaaattgggtagtcttgtgttgtggttttgttttgcactcttcataactttgtacgcgaatctcaatcccaccctcctctcggtttcgctatcgctctctgggtgttgtcgatatcgcattcttgtcctcccttgtatgcatccctcaccttcggatttctcttgacttttccgtccaatctgttcagtccccgtctataaccaaatttatcgttcttccttctccggcgatgcgcacggcggcgtcggagtgaagtgaacgaatgtgtactgctcattctcttacagcaccatctcgacgtagcgatcttcatataggtgagaactcgtcgatttttaatatcgttgggtattcgcttcgctgttcgtgttgcgtgtttgtgttcgtttgatgtcacggtgtctttatgtgggagaccgcgtatcctcgcccggacgcgccgccttgagctaacctgtcccgatgtgacn

SEQ ID NO: 705645 - DNA, 283 bp, Homo sapiens
gcagatcgacgagccgtggatcaaggcaacgatctacacccccgacgaatacctcggatcgatcctgaagctgtgccaggaccggcgcggcatccagacgggcctcacctacgtcggtgggcgcgcgcaagtgaattacgagctgccgctgaacgaggtggtgttcgatttctacgaccggctgaagtcgatcagccgcggctatgccagcttcgactacgaacagatcggactgcgcgagggcgatctcgtcaagatgagcatcctcgtcaacaacgagccg

SEQ ID NO: 705646 - DNA, 629 bp, Homo sapiens
cgggagctggagtcagcgcagagattgtgagggagcggtgagatacgggacggggaaggctaggtaggtgtaggaggaaaggagggaggagaggacagaagcggagggaggagaggtagggaaagaagccccgggggtgaaagtaaaccggaagttaggggggaaagaaaaggaaggggaaagggaggagaagacgggcgcggaaataaagggagagcagacgtgaagagggggaggaggaaaggttgtggaaagaggaacggcacgtagaggagatgaatggcgcagggaggaaggattgggaagagtattgtttttgttttcggagagaagaagcggagtatttgtagagggaagagaaagaaccatatataggaggagggttgtatttaggaggagaaaaaaagagtatgggagcgcggagaaacagagttaagataagagggagggagattggggggaggaggatgtgtattgtaaggagggggacgagaagaaatttatttgccgacgacagcgttgtgtgagaaggattggggggcgggagtttatgagaggaagagaagatctcacaaaagaagagaggggagggatgagagtaaagggggagtaagaaaagagtataaaga

SEQ ID NO: 705647 - DNA, 189 bp, Homo sapiens; identical to SEQ ID NO: 545746

SEQ ID NO: 705648 - DNA, 634 bp, Homo sapiens
ttatgtcgtctgatagtctgatcttccccgtcaaagcccacccaggagtccaggccatagggaatttacactcataccaaaatttcagtatgatcttcccggaaaatgtctgggaaaaacatctaccactccatagcaaaagatgagcatcgccaagcgtggtggctcatgcctgtaatcccagcacttggggaggccgaggtgggtgtatcacaaggtcaagagatcgagaccatcctggccaacacggcgaaaccctgtctctactaaaaatacaaaaaaattagccgagtgtggtggcgggtgcctgtagtcccagctacttgggaggccgaggcaggagaatgtcgtgaacccaggaggtgaagcctgtagtgagctgtgatcacgccagtgcactccagcctgggcgacagagcgagactccatctgaaagaaacgatagatgagaggtgggtggaggggtgtgagtgaacggccgtcctgatgagatggctccttgcagaggcctcgacggtgatagaaaaccgggccatgaaggatgaggacaagatggagatccaggagatgcagctcaaagaggccacgcacttcgcgggaaaggctgaccgcaaatacgaggaggtgactgggg

SEQ ID NO: 705649 - DNA, 797 bp, Homo sapiens
gcccaggcccgcacttttctgagcagacgtccagaggcagagtcagccagcagtgaccgagcgccgcgtccccttctcgctcctgggggcccccagctgggcacccgcttcggcgactcggtacccagcatagccggcctcttcgtaccgaggccttcggggctggcccccggctggccgggaggagtgtggtcgcagggggttaaggcaggcagcagctgggccaagggcttacgtgcggcccccctgtgccccccggcccgcccatcgacagaagcccccggcacgggggcgcgggctcgccaccggctattaacgaggccccggcggcaggcttcacaagggccgggggaaaatctacaaggacagagccgggggcgggatccctccgggaaccgaacttccgcggcgccaccacaccagtgggcgggaggaaccccgggatcatgggaccagagccttgtttagttccccccggtgggggaattcaggtcccagagccacccaattgttgtggtcccgggccacccccccgggtggcgaaccgacaggaaagcgcacgtgagaacgccgcgcggctccgaacgaggtaaacccccacaaacggacggatatctagtccggcgctggttttgctccaccctgggcgaagggatattccaaacgtccggggggaccacaaaacagaccaaacagcgaaagacgagacacgcccggcgaggcctgagagcaacgacaagaacgccacgagtgggcggctgatacgcacattcacttgcaccgagcggggagtgcca

SEQ ID NO: 705650 - DNA, 156 bp, Homo sapiens
tttttggggccaaaaaaaaaagttttttttttttaattccggggggttttgggtttttttattttttactttgccaaaaaattttttttgggcctggttccgggttggttggggggaattttttttttaaaacctaaataaaaaaaaaatttgcca

SEQ ID NO: 705651 - DNA, 700 bp, Homo sapiens
tatgcgggtccgaggcagtgggaagagatagcgggccctggacatcgtcgagctggcgagaaccgggaggaagtggagtgtgctggagcccgaggaggatttcgagcagtttctgcatcccggtcatcaacgagatgcgcgaggacatcgcgttcgtgtgacgcgctgagcacgggcgggctgtacctgcggaaccggagcaagctgtgggagatggacaatatgctcattccagattcaaagaacgcaggtggaggcctcggaggagagcgccctcaaccatcatccagacccccgggcctgacgcggacgaggggcacggcgcggtccaagaggtgcgagacggggcgaggagaaggccaaggaggattgcgaagatggcagaggatgctggtggagcgtaggtccggcggatagagaagagcgagtcgtcgtgagcgcggtcggcgggaaccagccaatggattctggtcaactggtggagattgggctgacaccctggagaagccgaaaccagagagcctttggttttctctttgggcctgtctatgcgtctgtctcacttaacactacgttttgtgctatggtctgtggttgatgacctccatatgagtctcgactgtaacgtgttttgtgggacgtgctttggttggcaggtgctctccctaccggacttggggctgaatgtaaggctgccgcg

SEQ ID NO: 705652 - DNA, 91 bp, Homo sapiens
tcaagcttctaacgatgtacggggacatgagtttcatcatataagaatgtcattccagcctgggtgacagagtgagagactgtcccaaaaa

SEQ ID NO: 705653 - DNA, 437 bp, Homo sapiens
  misc_feature (396)..(396): n is a, c, g, or t
atttcggcacagctccatttcaaaaaaaaaaaaaaaagggtacaggtatctgcctaagttctaatgcataaggcagtttcttcaatatttcttcaaaggcattattagccactgtatctgacagtcactgtggtgacttccttgaattaatttgaagaatgccaacgtctaatgggaagtgtcgtcttacggtctagcagtcctgttgttcctgggggttttgttctgtgtgccagttgcttctgatttccacagtagacattacatttatttgtgtgtctagtgaatgctcttctcaactaccatcatcaattaggaatttattttttaattttttaaggccgtaggtattcttcatgtggcttgagggcacatgtgggtttcatttttaaaccntacaatttactgggctgggatttgtcttcttttctaggtat

SEQ ID NO: 705654 - DNA, 349 bp, Homo sapiens
taggaatgtctctatttcgtctaagttatctaatttgtcactgtaggccgggtgtggtggctcacccctgtaatcccaacactttgggaggccaaggcaggtggatcacttgaggccaggagttcgagatcagcctggtcaacatggcaaaacctcatctctacaaaaaaaaaaaaaaaaaatagccaggcatggtggtgcactcctatagtcccagctacatcagaggctgaggcagagaatcacttgaacccgggaggcacaggttatagtgagctgagattgcaccactacactggagtgtagtgcaatgcctcctgggtgtttttgagactctgtctcaaaaaaa

SEQ ID NO: 705655 - DNA, 1068 bp, Homo sapiens
ggagagaactagtctcgagtttttgattttttttttagatgtcatttggtgtaagggcgcaaattgctggaacagattgttgatagcgcctaaccatagtgtagatttgggattagggggctatttcggctagggggtggaaccggatgattaaaaaaattcctgtacaatatagggtgcttgagtggagcagtaagggctgagactgggtggtggggccttctaagggctgaggggatgtcacgggtgttgagagacctaatggggctagattgcgcctagctgcttgctaagagagagaggcctagtagtgggggtagaggcttgacataagcgttcagacgggctattgagtcgggggctctcatgacgttcggagttgtacgcgataaatcatgctaaggcgaggatgaaaccagatatccgccaaaaaacggggtgggcatacgagatcggcttgaagggcctaccggcacgtggcgcactccggccccggcgcagacatccaccacaccgctgcgaccaaacgaaggggactataatcccattacgccccctcctccagccagaatgaaccacgctccggcacatcacggcccgcacacgcggcgacacacctaaacagactaacccacggcgcaactcacccgaaaccgcaggagcccgcctctccgggccgacaccccaccacacgcacgcgccactccgccactcaacctcacacccaagcccgagaaacctccaactgtaatgccccccaacgctacgcgcccccacaggcctacccggcatacacccctacacgggacaccgcacacgcaactattgaccgcccccgcacacaccgcgctgtcagaccttcagccccccccgcacccccagacaaccacacccccgacaacagccacctacaatcccgtgcggcacagagcaccgaacacccacgtgctccacaacaccacaacacaggcgcctcacaccgaaccccgtcaacaagcgaaccaccaccacaacacagaccccaaaccacgctgcagcgacgaacacgcgacaccgctacacgacata

SEQ ID NO: 705656 - DNA, 267 bp, Homo sapiens
cccggctcattcgttctcatctcccacatccagtctgcaaatacacacaaaaaacatttttatttcatatattttattttaacagacagggtcttgctctgtcaccaaggctggggtgcagtggtccaatcatagctaactacagcctcaaactcctgagctcaggcaaactctccagcctcagccccctgagtagctggtattcatggctgttcaacaccaagcctggttaattttctttcatttttggccaacactgaacatgag

SEQ ID NO: 705657 - DNA, 120 bp, Homo sapiens
cgtcctgggaaaagattatggcttttacgtaatggattctctatgctaatgctctctcgtctgtctagtctgtctgcccactcccccacccaccacggtgcgtagctgatgggtaccgag

SEQ ID NO: 705658 - DNA, 352 bp, Homo sapiens
gaggatccccgtacaatgataagaggttatgagaagaatattacaatgaaatatccggacatttaagtctggatgtcccacattcgatagctctgtgactggatcggttagtagaagaatagtatacatgcatggaactatctacaaaccaactcagataatcggagtccttcgaggggactagaaagcgtgatgtaagcgaaggagatggatagccgtcttaaactcagagagctactgtcatatcagaacccttgcagtcttagatgttataccaaatatatatctgaattgtaagagttgttagcacaagttttttttttttttttttaagcccttgtttggggtccaa

SEQ ID NO: 705659 - DNA, 363 bp, Homo sapiens
aacttaaatgaaacggaacaatgccttgaaatacacaaactatggccgggtgcggtggctcacgcctgtaatcccagcgctttgggaggccgaggcgggtggatcacttgaggtcaggagttcgagagcagcctgtccaacatggtgaaatcccgtccccaccaaaaatacaaaaatgagccaggcgcgatgcctgtaatcccagctactcgggaggctgaggcaggagaattgtttgaaccagggaggcggaggttgcagtgagctgattgcaacactgccctccagtctgggcaacagagcgagagtctgtctcaaaaataaataaattttttaaaaaagtatatgggaggatgtgtgtag

SEQ ID NO: 705660 - DNA, 651 bp, Homo sapiens
  misc_feature (65)..(65): n is a, c, g, or t
  misc_feature (484)..(484): n is a, c, g, or t
ccctcgtgtacaatgtcttacacgtccacaggggaagcgtttcgtttacttgcaacatctatcancaggcgttcttctatagtgtgatggagtggtacagttagtgtgcacagctcatctacctctttggaagagcctgatcattgtagactgtcaggcacgctatctctatgtgtgccgctgttaggccaatgatgcatcatgagtgcctttccccaaggaaatggcattcaccaagtgcgcgtagaaccgccccactatgttctggcagttatatgttcgccctctggtaacctggatggttgctaagctcccagggataatgggtctgttcgctggatcagaagctatcagcaggcacggtaatcatgtgcctgtattcaataagtcctccggttctttggatccatagctgtggcgagcgtcatgagagcatgatactgtagtgtaggcattgttctggctattcgtgcgggctactcangctgtctgacagcgtcctagcgctatagtcaatgtgctacgtctcatgcattcatagggtgcacaccggcagtttcctcatctgcaggcagtctgtctccatagctctcagtcgtccagccgtgggcattacccaaggctgtgtgatactcaatagcatcaggtcag

SEQ ID NO: 705661 - DNA, 204 bp, Homo sapiens
aggatcttgggagtaagtcaaatggcagcagataaaagtgacgagtggtttgccaacacaataaaccccaagcttcagtgttaacgtgaatgacattatgcatgagcaatgcctctgtgattccttgtccagacactgttagggctgacggtgtcagttcccaataaatgctcttctgatatggtttccgtacaggccaggagg

SEQ ID NO: 705662 - DNA, 426 bp, Homo sapiens
  misc_feature (15)..(15): n is a, c, g, or t
ttgctaaaagagtanattttaaatattttcactacaaaaatgctaagcatgtgatgttactgacatgccaagtagcttgatttaattattccacaatgcaaacatgtattgaaacataacattgtacattaattatatatgattattatttgtcaatttttagaaaggacccagaaggtagtggttatagattgaggtcctatacttggacaaggacagagtcagaggggacacccacaggatgctggcttccaacctcttcatcctatttatgtttccattatatgatatctaaaggttcctcctgggctacagcttacagcttttgttttaagattctcctgtttgatttagaattgactttctcttattccttaccctccttagactgaggagccctcaggagaagatacacaggaattttgc

SEQ ID NO: 705663 - DNA, 1077 bp, Homo sapiens
  misc_feature (325)..(325): n is a, c, g, or t
agcgggttcggtgccggatgcctagaccgcggtcggcatgatcgtctactggaatcgtggtgctgatcctgagcttcgcgtcgtacagcgtcatggcagacgcttagggatgtaagcccgccattactagtcgagcttgtgtttatcccaccgccagagctctgaagtccgcaggcaggagccaactggagtggagtggcgaaaacgcgtgacgtggccactgcgtcgtatcaggatgctggttatggaatatcgactatttgacttctgctcgaatgccagaagcagaacgatgcctggatcctactggatgggtgcatagaantcctctattgatgctacatgtggcgtagccgagatgtgtgagtgacattggcgacctcgaattcagctgttaccgtatgaggaggtcataatccgagtctcaaatagagtggtcgacaaatgctgcaacagcattggcttgaagccccaaagctgaacgatgttggaatggtcttcatgcctatggacttgatacatgaactcgagctcggtgcgaaatggtcagacgccggaaatcaaggcgccttttctatccagtaaacacatcaagccaagggcatcgacagaggtacttccaagaacccatacagctgaagagcattcagcttacctgcaatcggtgttgcagatggtccttgacttggactaacttaatgtggtcccacaaagcgactagtccttctactagtaaccttgaaaagaagaagtgatctttcccggagggtgctacgggtcagcggtggaaacccgtctgtgccttggatttgctggcgcaaatggagataagagggacatccgtggggcaatttgtccaggcattcttggcatgggtcgcgtcctcgtgagaagagttctgagtggcgtgctgtatgatgcccggactggggattcgccattggtcttttgaagtagggcaagacagattgacggtcgattaaggcccatgctgatttcttgggccaataaagaaaacgggggagacatggactctgaaagctgagaaggaacaagggggaagggcgaagtagatga

SEQ ID NO: 705664 - DNA, 585 bp, Homo sapiens
ggcggctgttcacaggattggactatgtaaataaccctttgtaccccacagcaaagatattagggaccgctcaaatgcaagaacgacagcagagctccaacctgagaggaattacttatgactcctgtgagctccatgagaaagacagaggaatccactcacccccgcccctccaaaaggaagtacagcatttttcctatgtatctcagaaggtctcagggttttcagcagtctccttcaatttcctttgtggtcaccaggattggccaaaggacaaacttacacgtttagatttgaagatctcgactagctttatagcgacttctaggattgggcaatgtctcattccataaaatagaataagtgtcccacagagttgagcagaggggattcattttatagacagagggggttgaagaaaccagagagcataagaaaaaatggtgggcttcgtcttttggaagttagctcccgttagaaggtgagaaaaggaaataggaaatagagaaaatgcagatgggttagctcaggttacgtggggtcatttggttgtcaggattaaatagagggaatttgttatccatg

SEQ ID NO: 705665 - DNA, 458 bp, Homo sapiens
  misc_feature (52)..(52): n is a, c, g, or t
  misc_feature (64)..(64): n is a, c, g, or t
  misc_feature (68)..(69): n is a, c, g, or t
  misc_feature (71)..(71): n is a, c, g, or t
  misc_feature (75)..(75): n is a, c, g, or t
  misc_feature (89)..(89): n is a, c, g, or t
  misc_feature (95)..(95): n is a, c, g, or t
  misc_feature (131)..(132): n is a, c, g, or t
gacgcaggagcgcggccactgccgcggtgcgcaggacggtgaggccttcgangccataaaggcnggcnngncacnttccaagttccccnccgcanagattcattgcggaccagctcgaccatctcaatgtnnaccaagaaatggtcctaatcctgagtcgtcacccttggattttatggatcacggagcttgaccatctttacctggtcctggaactgaaagactgtagcttgtgtgaaaatgagcctttggaccagtctttattatgactaaacaaacatgtagtagctcttgcatatctgagatatctagagctcatagaacccccacaatacgttaatagtctaatagctgtcctgtggtttcattagtctgataggaagatagggatttccgtcagtcacagcatgatgttcgaggtgaagctgcaaaaagcccattgcattggaggctttggt

SEQ ID NO: 705666 - DNA, 341 bp, Homo sapiens
  misc_feature (130)..(130): n is a, c, g, or t
  misc_feature (188)..(188): n is a, c, g, or t
  misc_feature (237)..(237): n is a, c, g, or t
  misc_feature (249)..(249): n is a, c, g, or t
  misc_feature (251)..(251): n is a, c, g, or t
  misc_feature (288)..(288): n is a, c, g, or t
  misc_feature (331)..(331): n is a, c, g, or t
  misc_feature (335)..(335): n is a, c, g, or t
agagggctccccaagtcctcatccctgaaaagggactcccagggtcacccccctgaaaagggctcctcaaaaggccccccgaacggggtccccctaagactgccctctgaaggaggcccccgaagacttnccccgtgaaggtgccccccaagacctgccccctggaagagggctccccaagacctctncccctagaagagccccctaagacttttaccctggaaaagggctctctgnaaagctttcctngncgtgcgcctttgagctttggcagatagggaggagctntgtactcgacataatacttaggatctgttgtcctcccgttttncctntcccgg

SEQ ID NO: 705667 - DNA, 911 bp, Homo sapiens
  misc_feature (910)..(910): n is a, c, g, or t
gtggcaagctggttgaacccgctgcggcgccatttatccgcgtctagccatgagtgggctcacctgacaaaagttaagatagagactgatctgcattggcaggccaagatgtctggttcttctgctccgttctactgatcgcaagtatcgaaagcagaacaggtcctgaaaaaggtgaggaacccagggtattctttgtcgggtactatgtcaacacgtcttggtccgttcgccttgtgtagcctggagcaagatcacagcgatgctcgcgtttactcgctgtagtgctcacaggtcccaggcacctgatggcattccctttgccctgagtctgcagcgggtttccttttatgtgcttattcttctcctcaggtaagcctctcttcgccctgtgcactccccggggggtgaaagagtggtttccccgcttttcccaagtggttactcattagttccttgtaagtggcttcacccccattcagtatttagaactgtagctttcgttacactgaaacttgaagatgaatcaaaagaatataccggtcgttttggcatgacacctcgagaatggatgccggcgacaggggacaaggttggattctgtcaccaatatttttcaccaagggtttaacacacgagttcctaaaaaaaagcgtaatcaaattcaaaaagccgggtaaccacgataagaacctaagaaaacagaacaaaaacactgccgcgagcatagcacaagaacagcacacaaaactcttgatacacggagaagcgaacaacacctacaaagagaaatctacgcacaacagagcaagcatcgaaccacaaccacgaccactaaccacgaagacacagcagcacaacacgcaaacgcagaaaaagcagagcaacaagaccaaacccaataccccgna

SEQ ID NO: 705668 - DNA, 325 bp, Homo sapiens
gtcttgttaccaatcagctccacattatattattatatatagagaggaaaggaaatactctcattaacttttagtcatatttccctgatgggacgaagatggccatctgctcccatcagcgccaagctgtttgcaatgggacttagccatcgttggctgaagcatttgagcatgacgactcggaaaaaagaccgtagcttcttttccttgatgtatttgcaagtcttgtattaattgatcgagacttgcagccggcaaccagttttctccgttagaccaatgccaaactccattggtttcaggcatccctgatgggagaagactg

SEQ ID NO: 705669 - DNA, 775 bp, Homo sapiens
  misc_feature (194)..(194): n is a, c, g, or t
  misc_feature (215)..(215): n is a, c, g, or t
  misc_feature (257)..(257): n is a, c, g, or t
  misc_feature (266)..(266): n is a, c, g, or t
  misc_feature (287)..(287): n is a, c, g, or t
  misc_feature (289)..(289): n is a, c, g, or t
  misc_feature (322)..(322): n is a, c, g, or t
  misc_feature (372)..(372): n is a, c, g, or t
  misc_feature (389)..(389): n is a, c, g, or t
  misc_feature (392)..(392): n is a, c, g, or t
  misc_feature (419)..(419): n is a, c, g, or t
  misc_feature (458)..(458): n is a, c, g, or t
  misc_feature (471)..(471): n is a, c, g, or t
  misc_feature (474)..(474): n is a, c, g, or t
  misc_feature (576)..(576): n is a, c, g, or t
  misc_feature (597)..(597): n is a, c, g, or t
  misc_feature (623)..(623): n is a, c, g, or t
  misc_feature (635)..(635): n is a, c, g, or t
  misc_feature (701)..(701): n is a, c, g, or t
  misc_feature (710)..(710): n is a, c, g, or t
  misc_feature (742)..(742): n is a, c, g, or t
gcgttgctgcattgcgccccaccgactccactatgttgaagaaattcgacaagaaggatgaggagtcaggcccgtgtatttaatgaaactcccaacaaccctcggaaatgtgcccacatcctcaccaagattctttatctcataaaccagggggagcacctgggtgaccacggaagcgaccgaggccttctttnccatgaccaagctctttcagnccaatgatctcttacttttcttttgtttttttacttgaccancaaggagangtcttgcattgcagaggatgncntcattgtcaccagcagcccaacaaaagacatgnctgggaaaaaaaacaacaaccggggcccggccgtgcgaaccccccgccanatcactgaaagcaccangcngcaggctattgagacgctacaagaaanaaaccaatgtagacaaaggagcccagtgtctccagctcngcccccgtgtctnccntgcacctgctgaagtgcagctttgacgtggtcaagcgctgggtgaatgaggctcaggaggcagcatccagtgataacatcatggtccagtaccacgcactanggctcctgtaccatgtgcgtnagaatgaccgcctagccgtcaataanatgatcagcaangtcacacggcatggccttaagtctccctttgcctactgcatgatgatccgggtggccagcaaacanctggaagangaggatggcagccgtgacagcccactgtttgncttcatcgagagctgcttgcgcaacaagcacga

SEQ ID NO: 705670 - DNA, 310 bp, Homo sapiens
  misc_feature (39)..(39): n is a, c, g, or t
  misc_feature (75)..(75): n is a, c, g, or t
  misc_feature (243)..(243): n is a, c, g, or t
taattattgtatttatgtagagatgggattttgatgaanttgcccaggctggacttgaactactgggctcaagcnatcctcctgctttgccctcccaaagtgctgggattacaggcgtggcccgcgcccggcccccccaattactcttaaaggtaacatcactattgtgaacctaagatcagctttttgagatgccttttcaggtgtaatggttaatactgagtgtcagcttgattggattgnaggctacagagtattgatcctgggtgtgtctgtgagggtgttgcacaagagattaccttggggaggc

SEQ ID NO: 705671 - DNA, 340 bp, Homo sapiens
  misc_feature (171)..(171): n is a, c, g, or t
  misc_feature (304)..(304): n is a, c, g, or t
  misc_feature (330)..(330): n is a, c, g, or t
atcccactagttacttccccaaagtcttaactcattccagcattaacccaaaagtcaaagtctgagtctcatctgaaaaaaggaaaatcccttctcccatgagcctgtagaatcaaaaacaagttagttatttccaagatagaatgggtgtacaggcattgggtaaatgtncccattccaaatgggagaaattggccaaaacaaaggggccacaagccctatgccaagtccaaaacccgggtaggcagtcattagatcttaaagctccaaaatctcctttggactccatgtttcacatccaggncacgtttgttgcaaagggatgggctnccacagcact

SEQ ID NO: 705672 - DNA, 832 bp, Homo sapiens
  misc_feature (757)..(757): n is a, c, g, or t
  misc_feature (766)..(766): n is a, c, g, or t
  misc_feature (829)..(829): n is a, c, g, or t
ctcacacggccactgctctcttaaactttctcgctatcaaagggtatagggtctccccctccaaggcccaactctccatctccatgatgacttacttaggaattcaactttcccctggggcccaggctatgactccagccagggcagcattaatagaaaatctacccccaccctcctccaaaagcgaaatcctttccttcccagggctagcaggcttctttagaatatggatttccaactttgccctcctagctcatcccctctatgaagtggccaaaggccctcccaatgaacccctaaacccctcacataacatactcccagcttccacaaactccaaactgctcttgtcactgcgtcagctccgtccttacctgatatctcccaacctttcactctctatactgctgaaagctgaggaatagccctcggtgtcttaggacaacagaaaggaaatcctccttcctttgcccctgtagcttacctctctaaacaactagataacacagtcaaagggtggccagcctgctttaaagcactagaagtggtagccagcttagctctagaaagcaggaaactaactttcagccagaataccaccgtccacagttctcataatcaacaagatctcctctcctcccaagcagtaagctcccttctccttccaggattcaattactccatgccctctttataaaaaatcccaaattcagtcttaccagaagtgcttcctcaacccagcatccttacttcccgnatcctcttncctttctactcattctttcactggaatcctgggacacgtcaggcaccactttcccaaaatttnctt

SEQ ID NO: 705673 - DNA, 215 bp, Homo sapiens
  misc_feature (154)..(154): n is a, c, g, or t
  misc_feature (178)..(178): n is a, c, g, or t
acctggctaggctcacacctgtaatctaacactttcagaagtcacgtcagggtattacttgagctcaggagttcaagaccagcctgggcaacatggcaaaaccacatactctacagaaaaattagctagggcgtggtaggtgtgtgtctgtagntcccaactattcagtgattcaganagatagagacggacgtaccgagcttcgaactatcgta

SEQ ID NO: 705674 - DNA, 161 bp, Homo sapiens
taattattttctagaccgcaaatagatgtgatggccccttcagttctaatggtactagtgtaagtaaccgtgatcgcctcttgaatctcctgattgatgtattctacccctacaggctaaaaaagacggtttgccagctgtccatcaggtaacacgacatg

SEQ ID NO: 705675 - DNA, 173 bp, Homo sapiens
tccccccttaatatccctcttttttttttttgttataaaacccctttttggtccccccgggggggcccggagagcccggggcggggaaactcgggcgtggggtctctggacgaagggtggctcggggcaccctccttgtatggggagcatgtgggtgactatacgttctcctt

SEQ ID NO: 705676 - DNA, 1247 bp, Homo sapiens
tgtgtaggtgtgtggtccacgagtctctgtggctgttgggtgggcgcgcccgtggtgtcgggttgctgccggccgccgtggggatgttccgagtggtggtgcctgacctcgggtgccagagtgggtgcgccgtgtgctagagaggggggtggtgacggccgctcgtgggtaggaggggtgatccttgctggggggccagacgcttttgtgtgcggcggattgtgtgtccggccggggcagatccggcggttgtatttttaggggggggccgtttcattacggggggagattgcatgacggcgtcgttcggtctgtagtgtgtgaacgtcgttgctcggttggaggaagacggtgtcccaaaacatgggtgtcgctgataatccacgtgtttgctctcgtctgtgggggcacaacatatgttgggggttccagcccccgtgctggtgtgttttgtaaatccggagggtttagcttccaacatgatggcttcgggttctaaacatatggtgtcgaatttaaggatgtgctctgtgttgtggatggtaaatgcagcgcgtggagtggcgggcttttgaaacctttgggggacaccccgttgtagagtcacatgtgagaatatgtcgcgcgtgggcacacagaacgcacggacagctgcgtcttgtgctctcttcgaggtcggcatagtgttctcacaaagtggcacttgtgagattccagcgcgcctctcacatgccgtctgtcctaagtatatgctcggagtttcttgttgccaccgcatggaaaacagttcttggtgtggcacaccacgtgtttaaggaggcgtccacagggggaacacagtgccagtgcctgcgtgcattccagggctctccacggcgaggtgtcatccgagaggagccgccgagctttgcagaacttccgagaagtcataggtcccgcacacttctgattatcctttgtctgtgaactgaataccacttcccgcaccgcttctggggacacccacaatggcgacggctggtggcacgcactggagggtcactcattgaacttaacgtgccactgctcttgtgggacgtctctcgggtccggcaccacctgtcacgtaccactcatggcatcactgggcccacaataaggctaggggtcttcctggagtatagattctgattgtagttatatgttttggtattctgtacaataaagtatttattgtcaacagcaccaataaatttttttgatttgta

SEQ ID NO: 705677 - DNA, 906 bp, Homo sapiens
tctgtttgtgggtatgtcacctgttgtttttttgcgtcgcgggtgtgttggtgttgcgtgtctgtctacgtgtgtgtggtcccgtctgcgtaccactgggctgggggtggtgccggtgtgctcatgtcgacgtggccaatgtccctcgctccccttccgagcctgtgcagtctcgcgcgcacgccatcctgggactccccagtccctggcctgatatactttaggaatatggattcttagacttctgtccccccccgtattaaacgccagcatccttccccccagtccttggatacctcttatcagggaaagtcttttcctatgaagccatccatgatttgaaagaagagacagtacaccagatgcacaaatatgagtgtaaggatataagaacatgtaaaagccaggaaacaggatgcctctgaaggaacaccgtaattctctaggaacaggtttgaatgaaaagccatacctgaaaatgccccaaaaagagattttaaataatgttattagaccagttccgtgcgatacaagagacatagaccaactgcagaatacattttcttgtcagcacatgaacattctccaggataggccatatgtttggccaccaaatatatctccaccaattttaaaattaagataatatcacagtaccttttcagactaccatggaataaaactagaaataaataataataccgagaaatcagaaaaaccacttatgatctgagtaagaaattcacacagagatagatatcataaagaaagaacccaacagaaatactgggactgaagggttccatgaatgaagttaaaaatatattgggaggccgaggcgggcggatcgcgaggtcaggagatcgagaccatcccggctaaaacggtgaagccctgtctctacta

SEQ ID NO: 705678 - DNA, 453 bp, Homo sapiens
  misc_feature (1)..(1): n is a, c, g, or t
  misc_feature (11)..(11): n is a, c, g, or t
  misc_feature (37)..(37): n is a, c, g, or t
  misc_feature (39)..(39): n is a, c, g, or t
  misc_feature (41)..(41): n is a, c, g, or t
  misc_feature (72)..(72): n is a, c, g, or t
  misc_feature (88)..(88): n is a, c, g, or t
  misc_feature (98)..(98): n is a, c, g, or t
  misc_feature (101)..(101): n is a, c, g, or t
  misc_feature (112)..(112): n is a, c, g, or t
  misc_feature (123)..(123): n is a, c, g, or t
  misc_feature (126)..(126): n is a, c, g, or t
  misc_feature (128)..(128): n is a, c, g, or t
  misc_feature (148)..(148): n is a, c, g, or t
  misc_feature (151)..(151): n is a, c, g, or t
  misc_feature (153)..(154): n is a, c, g, or t
  misc_feature (162)..(162): n is a, c, g, or t
  misc_feature (184)..(184): n is a, c, g, or t
  misc_feature (193)..(193): n is a, c, g, or t
  misc_feature (198)..(198): n is a, c, g, or t
  misc_feature (287)..(287): n is a, c, g, or t
  misc_feature (298)..(298): n is a, c, g, or t
  misc_feature (300)..(300): n is a, c, g, or t
  misc_feature (307)..(307): n is a, c, g, or t
  misc_feature (312)..(312): n is a, c, g, or t
  misc_feature (328)..(328): n is a, c, g, or t
  misc_feature (330)..(330): n is a, c, g, or t
  misc_feature (333)..(333): n is a, c, g, or t
  misc_feature (344)..(345): n is a, c, g, or t
  misc_feature (368)..(368): n is a, c, g, or t
  misc_feature (371)..(371): n is a, c, g, or t
  misc_feature (373)..(373): n is a, c, g, or t
  misc_feature (376)..(376): n is a, c, g, or t
  misc_feature (396)..(396): n is a, c, g, or t
  misc_feature (398)..(398): n is a, c, g, or t
  misc_feature (412)..(412): n is a, c, g, or t
  misc_feature (415)..(415): n is a, c, g, or t
  misc_feature (417)..(417): n is a, c, g, or t
  misc_feature (425)..(425): n is a, c, g, or t
  misc_feature (437)..(437): n is a, c, g, or t
  misc_feature (439)..(439): n is a, c, g, or t
  misc_feature (441)..(441): n is a, c, g, or t
  misc_feature (446)..(446): n is a, c, g, or t
nctgatatttnagaaacgcgatgtctctgtagctccncntncactgcccgggtattgctctgtatttatcancgatgccccgctgtcnccatgccttnccnaattgtccacnatggtggaaancgncntgtaatatgatcaggacccnccncnngttcgtcngaaagtgtgacagtgtccagcnggttctgcngcacnaggggagggggcagatggtggttgcatggccttcctgggtctccactctccgtctggccgaaaggtgatgtatttggtgtttggccctncagtccccgcncntgagccntaagncgcatgtggcacaccncnccntccagcagtanncgctttactgttacctgtttagnccnanaanttttcccgcatctgtaaatntnatttaaaatctaanccntnaatatgcnttatttattaanananttatncggattt

SEQ ID NO: 705679 - DNA, 502 bp, Homo sapiens
tatcatgattatatgtgtagatcgcagaccattatgaacagagcaataatatatgaacagcaaaataccgtctcgtccttacctcataggcacatttaaattattctagcactatacgagaacttttcactctcagaaggggtaactactggagttcagaaagcatttaatggcctgcctcctgcactgaaagctgctctgtgcagcacagaactgtactcaacctgattgaactcccacggaggggtaggcttccaaacgcaactgaatttcattttggtgcagcacctttctgcctcaaggccttagctttgatagctttagaaaataatggatatggtaacactatgcaggtaagacatggtttaaccagtggctcagagatttaagcccaattggcagtgtttggtgttagaagtaatctttatttcttgtaagcttcatactaagtacccattcaccaaatcagagggcactgaactctttacccctcagttatgga

SEQ ID NO: 705680 - DNA, 149 bp, Homo sapiens
tttttttcccaaaaaatttttggggggggggggggggcccccccttttcccccctttttccccttttttttgggggggggggtccccccccgatgggggggggggccccccccggggtttttttcccaaatacccgtttttttttttta

SEQ ID NO: 705681 - DNA, 529 bp, Homo sapiens
  misc_feature (78)..(78): n is a, c, g, or t
  misc_feature (97)..(97): n is a, c, g, or t
  misc_feature (123)..(123): n is a, c, g, or t
  misc_feature (128)..(128): n is a, c, g, or t
  misc_feature (164)..(165): n is a, c, g, or t
  misc_feature (179)..(179): n is a, c, g, or t
  misc_feature (186)..(186): n is a, c, g, or t
  misc_feature (206)..(207): n is a, c, g, or t
  misc_feature (224)..(225): n is a, c, g, or t
  misc_feature (228)..(228): n is a, c, g, or t
  misc_feature (272)..(272): n is a, c, g, or t
  misc_feature (351)..(351): n is a, c, g, or t
  misc_feature (353)..(353): n is a, c, g, or t
  misc_feature (429)..(429): n is a, c, g, or t
caaaatgttcaggctacaatagagtattaagcgtaatgttcattttatgatttgtggtacaaatggataatctttctnaaatgtcgctttgatttcngggataatttatttaggcagtaagtngaatnaatttctggcaccccttgagtccctcacaagtttcnnctcttaggaaaaanaagccgnttttcttttggatgaaaaanncaaaaaagaaaaaaatnngcnaacaggaaagaaaaagaagaaaatgccaagacggcagccgttcntgaaggatgtaatgggccaaacaacatccagaaatggttaagtagtacggaaattatcaaatggccaaaacaaaatttntnaaaaacggagggggaggtaaaaggaaaaacaagaatggaagtattgcattacaattttggaaacagaggcctggcnggccgggggaccaaccacaggagagccttgcctttggaacaaagaccaagaaggtcggaaaaccataccaataactgaaaagccgaaggaaatgatcaaa

SEQ ID NO: 705682 - DNA, 481 bp, Homo sapiens
accagcatggggtttcgggggccggtttgcgtttgcagagtttgcaagtctctttctgttttttcccaaacacagcaggttaatggcgcccgggactcccaagatttggttgcaaaattaagagcttttcttaatggggcccgggttacccccgaacgtaaaaatttaaaatggattggttttgatttgagcaatggtaaccctcgagcccccaaccaagcgggggggtttgacccccccatagttaaagttaagggtttgaaatttgcaccagaagctgcaatcccccttttttgaattgatgttttttttaaattcccccccgaaagtaaagatgataaacatgggagttatgaaaatgctgttccttttggggcccttaatgtttgttttgatgttccttttttttttaccaattttaaatgcaatttttttgtcccgtgagttgggttttacccattaaagtaaagtccaaccggta

SEQ ID NO: 705683 - DNA, 149 bp, Homo sapiens
cagggctcatcactctgcactctgacataactgtacaaccataaaactcagacctacagggggatcacgagcatgtagatgatcggagcctggaaaatgcagctgtatatgtatcttcacgacttctccctgcttatgtgtgtgacttc

SEQ ID NO: 705684 - DNA, 463 bp, Homo sapiens
tgctgtagaccggtcacaccatgtggtccaggctggtctcaaactcctgagctccagcgatcctcccagcttggtgtcccagagtgtggggtcttaggtgtgagccatcgtgcctgtcctgtttttcattttaatggtgtgacatgtaatgtataatgtaccctctaaagcatttgttagtgtccagtttggtggtatcaagtacattcacatgatggtgcaatcgtccccaccatccattcacagaagtctttcaacttgcaaaagggaaacggtctgcatgaagcaatcactatcccttccttcttgcctctgccccagctcttggtaaccaccattctactgtctgtctctatgcagtggtctactctagtaacctcatataagtgaaatcacgtatgagtctgtctgtgactggcttataacagttagcataatgtcctcaggtgttatccgtgttata

SEQ ID NO: 705685 - DNA, 495 bp, Homo sapiens
  misc_feature (146)..(146): n is a, c, g, or t
ctgaagtgtgagccatctcgcccagccctgttttggttttagaagttgacttctcgccgggcacagtggctcgcgcctgtaatcccagctttttgggagttgaaacaggcggatcacctgaggtcgggagttcgagaccagcctgnccaacatggcgaaaccccttctctactaaaaattaaaaacttagccaggactggcggcaggggcgctttataatcccagctataagggaggctgaggcattagaatcacttgggctcgggaggcagaggttgcagtgagccaagattatgccactgcacctttaagcctgggagacagagtagacactgtctggggaaaaaaaaaaaatatctggtcatgggttgcatgtgcctgtaagtccccaggtacttgggaaggctgaaggtgggaaggatcacatgagccagggaagtcgaggctgcagtgaagctatgattgtgccactgcactccagccttgggcaacagt

SEQ ID NO: 705686 - DNA, 318 bp, Homo sapiens
aatccgggccctttttttcccgggcggggggtttgggttaaagcccaaaaaaggaagaaaatttaccttcctttttttccccaccccccccaatttccggggtttaaggccccaaattttttcccatttttttgccgggttttttgcaggaaccggggttttccccttaggcccggggggggttttttttaaaaaaaaaatcctttttttagggcgtttttttcccccgggtttttaagggggtggttacccaaattatccctccgccaggactttgggggggccaaaagggaaaaaatttacccccccccttttgcg

SEQ ID NO: 705687 - DNA, 100 bp, Homo sapiens
  misc_feature (39)..(39): n is a, c, g, or t
  misc_feature (56)..(56): n is a, c, g, or t
tggaaatgctttccactcttgtggcccaggctgaagtgnaagggggtaatcttaancccccaaaacctctgtctctcggttccaagcaattctcctgcct

SEQ ID NO: 705688 - DNA, 457 bp, Homo sapiens
acgtgagacgaccttgcagcctgcattctgggctgctgtattctcccttgttgctatctgacgagcacagcatgggctcagagtacagacaggaggaaccagctaataaggagaggtctagggtgaaggctgttgccttgtggaagaagagagaggtctcattctaaagggatggcattggaagttcatagtgataaagcaaagccaacaggttttggggctgagagttaaacacacagctctggtttctgccttttcacagtggtgatgaaagagcactgagagcctctcgagctaaagttgtcatcattgctcttcatagtctgaaggtgcatgaaatggtcaactttcttccaaagtgcttttatgcctaagcctgtggttagtgtataaacagatatttactgaagtcctgctgggtgcagacactgtggccagccctgaggctacagtcaag

SEQ ID NO: 705689 - DNA, 124 bp, Homo sapiens
cggcacttatcgtgtagcacacccttctgacaaaccgaactgcgcagaacacaagatgagactggcatggctttatttgttttttattgttttgttttggtttttatttttatttaattatggg

SEQ ID NO: 705690 - DNA, 107 bp, Homo sapiens
ccttatggcgctgacaggctccaaacaggcatgcagtgcttggaaagccccaggtactgtggccaggttcacatttggccaagttatcatgtccatccgcaccaagc

SEQ ID NO: 705691 - DNA, 830 bp, Homo sapiens
  misc_feature (684)..(684): n is a, c, g, or t
ggtcttcttgtggacagcgtctctcctcctcctccccccgcgtgcgttgggctatgacaagtatgtatacctttctcctgcgcgacggttcttcctctgcccgcgtgatcttgcacgttccatttgtttgttcctctccgcggcggaagagttgtgcggctgcggtgcgtcgactccacctctaccaccactgctgttgtgcgtcctcctgctgccgtggatgatttccttcttctgctggtggatgatctcccactgttgctgcctcctccttcgttcgtcccccaccagcggatgtgtgttcgtcgctcttgttctactagcccgccgcggcttggtcgctcatcccgccgcagtaggataccatcgtcgtcggggtttttccttcccatcgggtccctctcccgtcgagctgctccctgcgcagggctcagcacaccttctcttctttctcacccgtctggtctctcgataatgtgcttttgcgcgtgcagagtattttcttgcgccgcctgcacgcaatcatatgcgtttcgcgtccccccgcgccggcgtgcctgtgggaaaactacgcgccgtttttccacccgctgtttcctaagggtaggctcatatgttcttcccattgccacgccaccacggggtgttctagccgctcctggctattctctcgactagagcgcncgcgggcatgttcacgccacccacgtggttgcgccccccaaccgttgttgttatgcaggtgccacggaggcccttgcactccgcggtgcgtccgcccgcgattgaatcttctctccgggcgcccccgaaaacaacaaacatgacaa

SEQ ID NO: 705692 - DNA, 259 bp, Homo sapiens
  misc_feature (19)..(19): n is a, c, g, or t
  misc_feature (62)..(62): n is a, c, g, or t
  misc_feature (124)..(124): n is a, c, g, or t
  misc_feature (143)..(143): n is a, c, g, or t
  misc_feature (212)..(212): n is a, c, g, or t
cccaagttaagctgctcgnagctggaagtgagaggcaggtggcggccggggccgaagccagnagtgtctaaacccccggagccatcttgctgccgacaacctgctttcccctcgccctagggtncccttgccgccctccctgncagtatttatggcctcgtcctccccaacctaggacacgtgtgagctgctcctgtctctgctcttattgnagctccaggcctgacgtttaacggttttgtttttactggtttgtgtt

SEQ ID NO: 705693 - DNA, 135 bp, Homo sapiens
ggtagagggctccagctcctcaatggtgttcagggctggtgcgcactggaggcacctgtgcactcagccgtcgatacactggtcgattgggacagtgaagacgatgtggttttcagggaggcccagagatttgga

SEQ ID NO: 705694 - DNA, 350 bp, Homo sapiens
  misc_feature (12)..(12): n is a, c, g, or t
  misc_feature (50)..(50): n is a, c, g, or t
  misc_feature (205)..(205): n is a, c, g, or t
  misc_feature (208)..(208): n is a, c, g, or t
  misc_feature (234)..(234): n is a, c, g, or t
  misc_feature (240)..(240): n is a, c, g, or t
  misc_feature (272)..(272): n is a, c, g, or t
  misc_feature (304)..(304): n is a, c, g, or t
  misc_feature (316)..(316): n is a, c, g, or t
cacattcatttnttaaaatgatgtaacatagagataataattttctacanaaattagccaggcatggtagcgcatctgatagtctcagctactcaggaggctgaggcaggagaatcaattgaaccgagcagacggaggtgagctgagagctgagattgcaccactgcactccagcctgggtgacagagcaagaaaataataatantantaattttcaaaatgttaggcttgggngccatngcaagccactttgggaagccaaggcaggtagnatttgtagcccaggggtttttagagcagcctngggcaaaccatnggcaaaaccctggttttctaccacaaaagtttaa

SEQ ID NO: 705695 - DNA, 183 bp, Homo sapiens
catggatttgctggtgcagtacaactaggcttaatagggacatggtggtgcatgcctctaatcccagctactcaggaggctgaggcacaagaatctcttgaacccagacgtggaggttgcagtgaaccaagatcacgccgctgcactccagcctgagtgacggagcgagaccctgtcccaaaa

SEQ ID NO: 705696 - DNA, 1416 bp, Homo sapiens
  misc_feature (208)..(208): n is a, c, g, or t
  misc_feature (1161)..(1161): n is a, c, g, or t
agcgtgtcgcggcacccatgatgcaaggcctggacgacggcccggacttcctctcagaagaggacctgcgcgaacgggactctatgctctgtcgctagcgctggaggtgcatgtaggtgcgtaccattgcactctacgtagcaaactctctggcttccacaagtttacgaatgcatagtcgtctctgcctcatgactcgtcctccagntagctagggacttacagggtgcacggcctaccactgccccagttaatttttagtctttagaggctagacggacgaagttgtcagcccagtgtgtgggcacaaggatgggtccttgaatctcctgtgacgtatacagtgaatcgcacctcgtctcgtcagcgcgtcccgcatcacggtgcctggggagttgaccaggggttggtgaggcccaacaaattcgatcgcatggcgtatcaaacctttacataggcaactaaaatgataaggaatgcgtatcaacagcttgaattgacctgcctcccttgccaggattgcgcacaggttctcctgagactgccctgcgttatgtgtgaacgccggggtacttaattacgcttacacaaagtctcaccttgctttcattcaactaacaaggaacggtttccactttgtccccacaaagttgttttcccagaccagagaacaagcggagggtttgttaccacgaattttgcttgttctggggcctaataacccatttgggaatgcgcggaaactttttggattcttttgcgcccctgttccacattggcaatttctccgttttatgctcttccgtcacatccttgttgcgaccgtaacacctttcctggtcccccggggtttgaacgttaggttccacttttccccgaggcccaaggcgcgaaccctagatcacaagaagcgaccccctggaaatttggccctggaattagcctttcccaccggggcggacatagggaaaccgctcatcgagcggaacacgtgcgcttttgccgatgttggaccccgccgacacgcaacagcggggcgggtcccaatattggaactcgcaaaacgcggatagcggaacacttttccacctaggaagaggcgaatgtgacaggaggcccattgcggagagaccctttggggagaaaaagccccggcagggnctccgggaacatataaaccaaccgacggagaacaatctcttgtgggggcggttttataacttctcgtttaacactactggctttaaaaccatttcccaatttcccttctcattggcccatttcccgtattcccttgtgctgcgcaactatgagttactgttctcacacctcttggacgattttgcatacttaaaccgccttgtcaatgcacgtgacacggacatttctccaacaacccttttcttttcccaccaa

SEQ ID NO: 705697 - DNA, 122 bp, Homo sapiens
gtgagccactgaggccagcccagatcatttcgaataataacagttgtacttacttacttcttaattgtaataatttaacccccctttttctcgcttcattgtattgactaggtttacacgcg

SEQ ID NO: 705698 - DNA, 114 bp, Homo sapiens
tcccgctctccagtcgcaacgtgttgctcccccgttccgggcaggtcaccatattgatgccgtaacttagatgcggacatccgatcggcatagcgcactacagcccagaactcc

SEQ ID NO: 705699 - DNA, 923 bp, Homo sapiens
  misc_feature (652)..(652): n is a, c, g, or t
  misc_feature (752)..(752): n is a, c, g, or t
tccaaggttcagttccctttaatgacccccatctccctgaaagggcaggtgcaggcagctaggtaatggcaaaaaatgttcatttgaaaatcttgccctgattgaaggcttggcccacttgctggaaggccccctcccaggaaaagtatctctcaaaccaggcgttcctggggttccttccctcgcgtgccaggactccagtttcccgccaggtgtgttttgactcgttagtctccacctgttgccaatctcgtggacctcagcggaaaggcaagcctccctgtggccctcggaagacccagacctccaaaaagtggagcgtgcttattgtggtgggtctccaaaaaaggagtgacacgtggcggagagagcttttctctcctccgagctgtgtgtctccccaggctcgactgtggaacacctatctcccgagggtgaaagtgaagatatgtgccaggctctcaaagtgaagagggctcctgaaaggtgaagtttcctctcgaggggacaagccgaaatcacttctgtgaagttcaccccacgagcggcaccaagccggctcccctttattcacagagtgtgctctccccaggaaaaatttttggggcagggtgcccacgagcaggaggtgtgttgctcccctcgtatgggnggcagctaaccgtggcgcccttaatattcactcccaaacaacaaagggtccctctggcggcgcacgtgttgacgcagacatgggggccccccttgtggcnctgtgggggcctcaaagacagccacaaggcgcctggttctccaaactttcaatcgcaatcgtccatcactcaaggaagccgggggggcagcccggccttttttatctccatccctttccggatccagcccgtggggggcctcctgcctccttcttcccggggaaccccttg

SEQ ID NO: 705700 - DNA, 327 bp, Homo sapiens
cccaagtagcaggactacaggtgcacaccaccagaacctgctaatttttaaattttttgtagagacagggttttgctatgttgcctagtctggtcttgaactcttggcctcaagctatcctacctcagccacccaaagtgctgggattataggtgtgagccattgtacctggcccccgcactagcccctttttttttttcagtccttaaaaggttggtatagatcaaagattatctgtgtctttgtaggtttgatactacttgcctgagaaaacatcttgggtgttagaatctttaaaggtgtgtggggggggcagaataagcaatt

SEQ ID NO: 705701 - DNA, 230 bp, Homo sapiens
gcaaggaaccaaagatcgtggcgcgctatacgaaaaagccaaacttcccttcatctcatacgccatagtcgacggcaacctcgtcgccggacagaatccaacatcgaccaaggagacagccaaaaagctcgcgtcgcttctccggtagatcagcggctaccccaaacagccgcaaccggccgagcggatgaccgaagccgtgcggcgggcgttaacgccgtctgcggccg

SEQ ID NO: 705702 - DNA, 851 bp, Homo sapiens
gtagtcctttgaacctaggacatgtttatccatctattacaaagaatgttggctgagcatggtgtgcatgtgcctttagtcgcaggtcctcgaggggctaaagtgggaggatcgcttgagcctggaagttgaaggttgcacggatctatgatcaaaccactgcactccagcctgggcgacagagcaggacatctggctcaaaaaaacaaacaagggctttatcagggggttgcgtggggaccataggctccgcttccgagaatgagaggtgtcacaagggtgtctcgtctgaaaaccattctttgtcggaaagtggtttgggcccaatggcgttgttaggatattggtcccgggaagaaatcctctttaagaaatgcgaggcggtgtccatctactctgagagcaggaattgagggccctttttggataaggcacaagaaggctgggcagaatcacgaggttcaggggcatgatcgaggagccagtcggggtgttgaactacggggtgtaagcgctgggttgctgttgtaaagtatttgcaggcctgatagagtggcccaaaagactaaggaacaaatgtgggacggcggcggcacaagtcgaagaagaaaagtcttctccatgaagcaaaagatgtgagtggtgcagccccacatagggagttgaagcacgggccggacaagagggacgcctcgacgaaaggcctgggcacagacaacaggtcgggggatacccgccaaaaaaaaagccgccggtgaaacacggtgcgggtaaacacacccacggaggctgggacgcacggtgttccaacgacggaccggcagtgaataatatacgcagtggggggagag

SEQ ID NO: 705703 - DNA, 634 bp, Homo sapiens
  misc_feature (521)..(521): n is a, c, g, or t
cccagatggcacgaggaattcgtcataatcaaggaaaccttatccgggtggatatctgtgagattactgagtgtgcatccatcattaacctgatccctggctgataaacactctcaacggaaacgaatgacatatccccagatctattgagcagcactgactagggagcagtgctacccgcactggtgcatcgcacacgatatagcttggtgcaggataatggacattgataatatggtgggcctgcacctggccgtaatgctgaacccgctgaatggctctgtgaactttgtattgcctttatgctgacctatgtgaggatgagcttataccatcatgtgaataatatgcttaaatctatgtattgagaacgatgatggattcgaatggcaacagtccatgatatgcaatggctacattgtcatacaaagtgggaagccaagaatgcgatcaagcaagcttatcatggtcgtaagtagaatagccgcctttttagggtttgtgccaatgtggacatctgncgaatgtctgctggagcattccagagaccagaatgagtgtaagaatcatatcctcgatcagagtgctgacggagctggagatgtcatcggctacccgcgctggctatcagagc

SEQ ID NO: 705704 - DNA, 269 bp, Homo sapiens
  misc_feature (157)..(157): n is a, c, g, or t
  misc_feature (190)..(190): n is a, c, g, or t
  misc_feature (210)..(210): n is a, c, g, or t
aacacagagctgacagaagattgtgagatcaagcaccttggacaaagtctcgactgcaatgctaacgtgtacatgagaccttgggagaacaaagtcatcccgactgtgaaatgccaagcattagataagactattcctatccgaagaggcctccagnttttctcctttccggtcagccaaagtacaaganacaaaagcaggaacaactangctcctacgcgcgtgcacgtacaagggcagactctcaaaggcaggggcacagcacgcgc

SEQ ID NO: 705705 - DNA, 291 bp, Homo sapiens
agctcccaactgctttgggaggccaggcgggaggatcgcttgaggccaggagttccagaccagcccaggcaacaacaagataccacatctctacaagaaataaattagccgggccctgcacgcgtgtagtcccagctactggggaggccgaggccggaggatcgcttgaacccaggagttccaggctgcagtgagctataattgtgccactgcactagagtctgggtgacagagacactgtctgaaaaaaaaaccaacaaagcccttagctcttattgcccaggctggagt

SEQ ID NO: 705706 - DNA, 214 bp, Homo sapiens
aacacggacacacacattattgttaactatagttatttaaaaatacaagggatttggactgaaagccagtagaactaataagatgattcagttaactgcctctttactgaataaaatattaaaatcccttactcttttaaatatgagtaataatgatttcgactatgtaatagaaaatagagttaggcaacataaggtattgggcgtacgagga

SEQ ID NO: 705707 - DNA, 732 bp, Homo sapiens
  misc_feature (131)..(131): n is a, c, g, or t
tttagagaaactgcaactggcatgtgattgagtgcttctgtggattctcacttctgtcatctagcatgggtcaattacacgctaataaacaaggtaggactgggtacctcgatgtagcattcactttgtgnttatacaaatctcgcggagacgtcggtctaccgatctggcatcaggacttactagcgtggtcattaaaagggctgatgaaggcatctcgtgtacagggtgccatttctatcactatgagtggataacgtgtgatattcttcgtgtcagatcacatgtaaatgacctccctgttggacgctctgtggatgagactttgatgactagttcaggccttccaggttcgacttgacacaatctatggaggatatgtgttgccctagctgtgctaggaaatcgcgtggcgagatgataccatcaagccgtgatgtccaatatagagcgaacacgaatagtttctccaacgcagaagtgacgcgcgcgctgtttagtgccaggctgcggtgggcagccatgagaacaaaagctcttctgtattgggggggccattagtacaacaccagacttcagattcagccgaatggtggtgtcttacaaggcaggcctttcctacagggggtggagagaccagcctttcttccttgggtaggaatggcctgagttgccgttgtgggcagtgctactggttcgtatgatgtattaagtagagcacccattaaatct

SEQ ID NO: 705708 - DNA, 506 bp, Homo sapiens
ccgcgggcggggacatgcagaaagaaaccaggtgatgcagaaaaatgggagcaatttggcagtctccagaaaaccagagcacatggtcccaataactacagctaaaaggtaaatgtcagtatttggaagtttccttatagcagtaaactctgaacacttcacatataaactatgccttgctttagtttagtggcagtgagtaaaaaaaatctgtaccgcagtggcaaggaaaaagaaaatcaaaaacagaccaagaaaatagtttaagctgggcgctgtggcttacgcctgtaatcccagcactttgggaggccgaggtgggtggattgcctgagctcaggagttcgagaccagtctgaccagtatggtgaaaccctgtctctactaaaaatacaaaaattagccggtcgtggtggcgtgcacctgtagtcccagctacttggcaggttgagacaggagaatcgcttgaacctgggaggtggaggttgcagtgagccgagactgaa

SEQ ID NO: 705709 - DNA, 389 bp, Homo sapiens
  misc_feature (17)..(17): n is a, c, g, or t
  misc_feature (19)..(19): n is a, c, g, or t
tttttttttgagacggntntggctctgttgcccaggatggagtacaatggcacaatctcggttcactgcaacctccggctcccaggttcaagtgattctcctacctcagcctcccgagtagctgggattacaggtgcccaccaccatgcccagctgatttttgtatttttagtagagacagggtttcaccgttctagccgggatggtctcgatctcccgacctcgtgatccgcccgcctcggcctcccaaagtgctgggattacaggccattttctttattaatatattgtagtcctctttccatatcagcacatgtagatgtagttagttattgatttgaacagtaatcctctgtctgtatatagattcattttaaagtcgacgcggc

SEQ ID NO: 705710 - DNA, 451 bp, Homo sapiens
gagagggggaggcagtaggatgggctggcatggggatcattgggaggggggatggggaagagagagagccatgacactgatttctggccagtgggcaaggctgagtcatgtctatgtctcaaaacatggtcacctcctcagcctcctgattcttctagtgtgtgcgtcccttagagtggtcagttcctggcttcagtgggaacctatctgagggaggcgcaagtctatgtcctcccttctctcgggtcttctcctcccacagctgcagcactttggctgctccttaagtggaacaggacgtggagctgtgacatgtttttcccgaagtccttgctttctaggtctgagcttgagaagagagaagatcccttcaggcttgtcactcatggtcttacttgctgtgtcttctaccaaacccaaagcaattctgaatacaccttcccagggtctg

SEQ ID NO: 705711 - DNA, 113 bp, Homo sapiens
acccgactgatatgcagggaagcatatgaaatgatctgcggcagtgctcgtgagccctaggatcatctttcttttcaccgtaggtggccgtgacggcatggtattagcaaact

SEQ ID NO: 705712 - DNA, 261 bp, Homo sapiens
agagtgtataggtgtgaagacatcctgcatctcagtcccacacaggcagctgtctcaggctttacaagcgatgagagactcatcagagccctgggcactgttgctggacgcagcctagagagcagctccctggctatattcctattatacatctcctatgggccatactacctaccgtctagtaggtacatagattacacctccttgtattcctcctgtagctagagccctttccttagtagtaccatactgacccatctt

SEQ ID NO: 705713 - DNA, 316 bp, Homo sapiens
  misc_feature (124)..(124): n is a, c, g, or t
  misc_feature (299)..(301): n is a, c, g, or t
ttaaaaatgggcaaaggacctgagcagacatttctccaaagaagacataagaaatggccagtaggtatagatatgaaaaggtgttcagcatcattaatcataagaataatgtaaattaaaaccnctgtgagctatcacctcacatctataagaatggctattaacaagacatgagataaatgttgatgagattgtgaagaaaagagaccctaagtacactttttggtgggcgtgtagactggggcaacccgttatggaaaaagggtatggagggctcctaaaggaaattaaaaaatagnnnctggtttaaaaaaaa

SEQ ID NO: 705714 - DNA, 285 bp, Homo sapiens
attaattaaattccaatgtttattgacctaggaggacagctgagactatgacagcttatatgtctcatgttcggacatgagtacaggaaatgtcactgtcttatcctcttggtaggagttattatttggtttaatctttccacagagcaacatttatttgataagtttactatttacactaatttgataatgccaattctacagctatattcactcagatatttgtcctatgtgtatattgtaacattgtttgttcctgcatacgttggaaataatctctatgtc

SEQ ID NO: 705715 - DNA, 800 bp, Homo sapiens
gcggaaaccgaatgtgaggaccttaagggatccacatgctgccgccccccgcagccatccagagcgcggtcacatgtcctgactggctggcacggaggcgtgctgggtgcggcgtgcgtgcggcagctgtgcggctggctagcgtgcgtgcgtgcacgctgtagctgcagcagcaggtaaacgacgatgcgttttcccaaagaaaataacatagcacagacaggacacaaactaaccacacgacattgctgcagattttactttatgtgagaaaatctacaatttcttcgacgacactcatactaacagatataggtgaatgaactttgctacgctatggacttcacggcggctgcgacaggtctcatggcattgccacacgtccagaactctacaatggaccataccatgcactatgcaacgactttagttggcctggacactggcctggtactgtcagcatacccgaactggcagcacccatacttgcttcgttttacacgcttcctgatccggctggtcactaggttcttcctgcatgttgcacaccacgatgactgcggcactaacctctttgcactcaatggccccctctgccgccatgcacaacatttgctcgctctgggtaccccttgactaattcaattccaacaacgaaggcaacacttgcacctgttcacgctctacccacgcacaagcgctacgtgactatagatccaccctgcaaacagcacggctacagttgcaacaccacgtgcatatgatctcgctccactattcaacagaacttatcatcacga

SEQ ID NO: 705716 - DNA, 88 bp, Homo sapiens
gtcaactgctacacatttttttgtttgtttgagatggattctccagcctgggcaacagaacgagactccgtctgagaacaacaacaac

SEQ ID NO: 705717 - DNA, 236 bp, Homo sapiens
cgttggttagagacgaagagggactcgctggcagcagcccagacctgtaccgctcggagtgtaactttcccttgaacaggccaaggcctgttggcccagtggcctcgcctttgtaccattacctcccctccctggcggcagcctttccaagggtttcttccctttcttttccccgccccccaaggcccttttcaggggcaaggagggccttgccaaggcttccgggccgctaagga

SEQ ID NO: 705718 - DNA, 917 bp, Homo sapiens
ggttactgcagaagtgaataatgataggtactatctcgtgtaaggcaaagtcctttgaaagggctcctgaaagcgtcaaggcctccgacctggatgaatagaatgagtcaggcacagcccagctccacttcacggatgggaaaactgaccgtactgattgcctcgctgcaaagatgcgagtgcagatgcggaggaaccagaaagcatcacgttcttctcgaggcgtgagtgctctaagtctcgggatccccccgaccctagtaagtggctgtagacggtctccgacgactcgagtccacagcagaccctccctccgggaaggggaagtctcctcggtggttccacaggacaggttcaaaatgacaatggtcaagaagacgaagaggccgagggctgctccaccgcgtgtactttggagccagataccgttgggatgcgcaggcagagagctgtggggagcgtgtggtatgccctcaggcgcgatgtgggcggtggggggcggtcgccccgcgaccccgggtcctccctcaggggcccgtgggcttctctctcaggggccgttcccggtgggcgggaacgagagcgcagaaccctgccaggtctttctcgatgactgggcctgctcgctgaaggagtcatctagccgacgagagtatcggtggtgcgtggaagccccgaaggccggcgagacccaggacatacgagagccaggggtgcggcggtgggtatctgtactgaagcagggaacacagtttcccagtgtttatggctatgagaaccggcgcatagcttgggtaaaatcccaaagtgtgggcgaactctctctgtgcatttatggaatctatatatttcgattaactttcccattgtgtggggtttcaccggcgctggaattcagagaaaggacacatgggggg

SEQ ID NO: 705719 - DNA, 182 bp, Homo sapiens
cttcgagtctctttgacattcatgccaatggtatactctatgtctctgctgtggaccagagtgcgggaaaagagaacaagattactatcactactgaccagggccgtttgagctaggaagactttgcatgtatggtccaggaagctgagaagtacatcgctgaagattacaagcatagggac

SEQ ID NO: 705720 - DNA, 283 bp, Homo sapiens
  misc_feature (103)..(103): n is a, c, g, or t
  misc_feature (236)..(236): n is a, c, g, or t
tactggaccagcttgtgtcgtgagttgagacagcctggcatcatggtgaaaccatctctactaaaaatacacaaaattagccaggcatggtggcaggcgcctngtatcccagtctactcaggaggctgatgcaggagaattgcttgaaccctggaggcggaagttgcagtgagctgagatcacgccactgcaccccagcctgggtgaaagagtgagactccatctcaaaatatatnaattatttaatattaaatgaactccaaagccccattggcgcactgac

SEQ ID NO: 705721 - DNA, 153 bp, Homo sapiens
acgggtaacgccggagttcctgtgtaacaggcagatttgctatttgggataatgaagaagatccgggagatggatagtggtgataggtttcacaacaattgtgaatttacttaattgccagtagaactgtacactgtaaaaatggtcgaattt

SEQ ID NO: 705722 - DNA, 1027 bp, Homo sapiens
agttgttgctgttgttttttgtgatatcagtatgagtagtcttgttagtaatagctacgatagagacgaaaatatagtaagataacaacacgtgcatggcagccgtgacgacggggtacccccctttacttcccgttcaagaacggcctggggccattcgccagggtacacacccaacggcgggcgcaaacaccgccccttcgataggcgcctaaaggggcccagaagaaaggggggaacacatttcagaaagagtgggtatgaaggaacccccggcgaaggtccaatatacgaatttgggaaaaacgctcgtcccccggacccagggaccccaatggcatctgaggtctccaaggtctgtgtttggcaaggagtcttctggatttgccgaatggatgaatgtgccatttagaaaattccagctgattactgaagatagttccgggtaaaaactgcctgactaacttccctggcatggatcttacccgggaccaaaagggttccctggtccaaaaaatggccagaccatgattgaagctcaccttgatgtccagactaccgatggttacttgcttcgtctgtttctgtgttggttttactaaaaaacgcccacccattcagattcggaagaccttcttatgctcagcaccccaacacggtccgccccaatccggaagaagatgatggaaatcatgaacccgcagaggtgcagaccaatgaacttgagaagaagtggtccataaattgattcccagaccagccattgggaaagacatagaaaaggcgttgcccatctatttatcctcgtcccatgaagtcttcgttagaaaagttaaaatgctgaagaagccccagtttgaattggggaagctcatggagcttcatggtgaaggccgtagttttgggaaagcccctggggacgagaccggtgctaaagttgaacgagctgatggatatgaaccccccggcccagaatctgtttaaagttcagacttccaaatagtggccaatataaaagtgctatttg

SEQ ID NO: 705723 - DNA, 844 bp, Homo sapiens
gggtgaaatcgtaggacagtgaagatgctgctggaattgtccgaggagcataaggaaccctggcttctgctcaagtggacagcgcggtggtcgcgagttgggcggattgctgtggcattcctgagacgcgggcaaccaacaaatctacgaaggcgcccgcagaaaatcaattgtgagtagtgacacttgtccagcatggtgtggacggattacccgtatctcctcatctggagagctcaacagtccatgatttctgaactgcacttcccaggactctcgtctggtactgggattctctgaaagacattaacacaacttctgtgtcgctcacacggcttcatcctggaccacaaccgacacacgagacgatcccgacaccgatctagcggtgcctcggcacccaaacgcattccccagttatcattcaccctccgacctggcggacctccgactgtcccggctcggcaccgttccgacacgtctccaggcccacccgcactaccacccaacgcacgtgactatcacacgcttcccccttctcacacatggccgactcacccacaccaacagttctggccgaagagcaccccagaccaccctgtcccatatgcttcaccaatggacccagcctctggcagcccatgcagacacatcactgtacggcaagctgtcccgcacccctccacgtcctcacaccctcccgtctcacatcctccgcctccctctgccatcgtgcctatcccacatccctttccacatacttctcctccacctcaccgcgcccaccactcctctctccgtatatcccacctccgcgccacccgacgcacctggtcgcctgcaa

SEQ ID NO: 705724 - DNA, 968 bp, Homo sapiens
ttctgtttctttcctcgttcaatcttggcggttatgtttttccaggaatttatccatttcctctagattttctagttggtgagtgtgcagctacccataatagtctctaatgagctttgtatttctgtggtttcagttgtaatgtctcctttttcatttctgattgtgtttatttggatcttctctcttctttgttagtctagctagtggtttatcatttttgtttatcttttcaaagaaccacttttcatttcaataatcctttgtatttttaaatctctatttcatttagttctgctctaatctttgctatttcttttctactactaactttggggttggtttgttctggtttttctagttccttgaggtgtaacattagatcattaatttgtgatcttctacttttttgatgtaacttctcacctggtgctgctttgctgtatctcacgtgttaggtatgatgtgttttcattttcattcttttcaaaaaaatttttaacttctgtcttcatttattcattgacccagcaattgttcaggtgcatgttgtttaatttgtatagattccaaagttctctggatattgatttctaggctttattccaatgtggtcttgagaaaatacttgatctaattctgatttcaaaatttgctaaaattgtttggtggcctacatggggtcacttgggaacatcccctgttctgggtaaagaatgccctgtagttgatgttggtctgggcccaacgtctggcacagttcgagcattatgcacaatccatacatcacagtctttgtaatgcgaccggaatccaaatcggtataggaaagaaacacaggaaagaatgaacccacgtcaaaagctagataggacaccaacgataacaagaacatacacctatataatcaaaatacttagacgtaaaacaagcagacacaaatcaaaataacaactaatctaggttat

SEQ ID NO: 705725 - DNA, 107 bp, Homo sapiens
aactgaaaatgatactgccaaaaagtaaggcattaagaaacgaactgcaggagtagaaactaaatagcagtaactcagcatcccctcatcgttggcccacagagaat

SEQ ID NO: 705726 - DNA, 190 bp, Homo sapiens
gcgggtggtcatgttataatctacactttggaggaggtgagaaggcggatcactgaagtcaggagtcagacagctgcgatgtgtgaaaccagtctctattaaaaatacaaaaattagcaggcatgtggcacatgcctataatccccagctaccgtggaggctgaggcaggagaattgcttgaactcagaa

SEQ ID NO: 705727 - DNA, 510 bp, Homo sapiens
attcacatttacaatatttttgtcactacctgcctgagaacgttcattatttcaaacaacaatgaagtggtttttggagatcatttatttttagtattgcagaactatattctttgggcatcaatgtatttttctatttacaagcctatgtaaaagctgtagtgtatcttcagtgaaccatgtgccaattaaactttaataaaaaagtggcctatgcctgcacaaccttactcatttcttacattaaaaccttgtcgcgcgcctggccttggcttttgttttaaaccctttaccttttcagtctgccaacttctacttgtgttttcctaagctactcaaagcactgctttttggtcccttgtttcttttgccttacaccatcttgcccaaacaccccctaccgtaccctcccccataaaccatcgaaggccatccggttttttacaaacacaacccttctcctctaacgccccccccttttcgcccctccaccacaacttccattttcga

SEQ ID NO: 705728 - DNA, 204 bp, Homo sapiens
ttccggtaatgacccatgtgcacgccatggtcctcatgacacctcatttcatagtggtccttgttggattctctctctagcagcacctcctgttccttgcaccattactcttgatatgttcttcacttctctggctatcaacctctaaccctagtgccttctagaggatacatatcaatggaactcagaggattaacatcttac

SEQ ID NO: 705729 - DNA, 1039 bp, Homo sapiens
  misc_feature (503)..(503): n is a, c, g, or t
ggtccgccgatacctcctccttggtcggcgtgtacttgtgtggcgtcagatagaatagggctagtaacttccgagcatatgagaaagatctggttcgactaggttcagaatatgacgacagcagaaataggagatatctgaggcatgcaagactgaagcgggccgtgtggagaggctgcctgccgtcctagggaggaatgggagctcagcgtctgtgatccatccgtgtgcaccatgtgctgcagagcctgagtagcacgaacgatcctgagaattcccatgtgcgtggaaagactcatggcctccaggggaccatcccagacgtgaaccaagacggagaagacacacggagatagaagctcggtacggtcgctgggatggcacaggatgctggaacagtgtgcatgagaccgagatggtctgcggtggcgtaggtcaccaggaggctgggaaagcgcagggccgatcttcgcaaggctgtgaggcccgtgtctcgaacagtnggctcggaggcagacgcagcgtcgtctcgtggcctcaacgcgggtccatccggtcctcctactagaatccctagactagcgatagtctaccgcagtgacgcgcatagtgggagtcgcccgcagccaagaagtcgcagatcatcatccagctagaaggatggacgagtgatgtactgacgggttgggaaccgctagtttgagggcaagttgaaccacactgaacgggacggatggggacggcctgcggaagggtcgtgccagccaagggttgggcgtggcatgcgtaagacgggcctcatcgggggaaaaccccatcgtcagggaacgcaccacgaagatgggtttccccccgaaaattgggctccgcaaaaacgtgtgtgtggccgcccaaaagtagggttcccccttcccatgagccatattgcgatgggttctactagccctttgagcgcgagttagggacatgagggaaaagcggatcatgggggcggcaagtacataagtgagcgccctcggtgggtagcggcttcttaccg

SEQ ID NO: 705730 - DNA, 517 bp, Homo sapiens
ggggcgttcaaaattggcccagtgccggggatttcttcgaagtggagtaggaccctggtggagatatgctaagttggagtctcctgcttgagttcttcagaagttttctaggcaacccccaatcaagggcttccgcagagtttgggaacaaacatgatgcggttctgggcccaacagatatcatggttcagtacatggaactcttccacaagatcccaaatcaacagcaggtggcggtggttgggatttgtatattattagcagctcccagctaggttttgtcaacaagggtattcccagagaggagcaggtggtgatttttaggtccttggaccccagaaacccagggtagacatggactttactttccttttttggttttcagctgtgggttttgttttgggggtgggtcccctccccaaccccctgattttcaaacatagccccccatcagctgttttactccgggccttaatggatttggcctgtcctcaagaatggtaattatgaagagtga

SEQ ID NO: 705731 - DNA, 268 bp, Homo sapiens
ctaaaaagtacaaaaactagctgggtgtggtggcgtgcgcctgcagtcccagccacaggaggctgagacgaggtggaggttgcagtgaatcaagatcacaccaccgcactccagcccggtgacagagcaagactccgtctccaaaaaaaaagaaaaacaaaaaacagaaggtaaaaatgacaatggtgactaaacaaagggaacaaacatgaattggtatgaggacgtcctaaaagcctagcttcagaaaaaccggtagtgacttcac

SEQ ID NO: 705732 - DNA, 236 bp, Homo sapiens
tatatgtctccatgtactgatcctcacaggtctccaccaaatacttcgtcatcatgttgtggaacatcatcatattatggaacatcatatgtactcgatttcatcatcttattgtggaacatcattgtcctcgaaattcattatcatcaatcagatgtcatcaccaacaaatatccataagtcataaccattcgacatcactatctaaagtctcttctaccaccatgcaaattacc

SEQ ID NO: 705733 - DNA, 757 bp, Homo sapiens
gaaagtaaatcatgagaaagggtttgactgaagtaatgggggctgcccctgaagccttgtggcagtacagcccagaaccaaacttcagtttcaaaattgtctttcctaatgcctggctttctggatggatcacagggcccatgaaaacatcgagaaaagaggtgaagaaagctttctatggtttgaatcttctggaaacatcagagaaagactgtccttgccatccatactataacaaaacttcaggacttgggcttcgggttcatggtttcacaactgagaagggttcatccaccgtttggaactgtgcacccattggaacccttgaggtaaagctaaccaggaaatttctcccaagaagaagatggcatccttgatgtgaacagcttttcccaagttcacagattaagacttctactgtcacaaaactctgatctttgaatgttttttcttgcttatgcctctatgaacaatagaagtggaaacggggtctgttatgtgcactaatggggtgtactttcgtgaaggagtttgccagccatcctttatacatggataaaccttaaacttgatagataaatgatgaagggcccatgtcaatacgcaccttttatgttgcctcattatgtcatatgttggctcctaatcagtcaaaaccacacttgattcctcctctaacaatcatggttaaaaacacttacagaggctcactctctaaaggcccctcaagccttccgggaacgcaacagttcacttc

SEQ ID NO: 705734 - DNA, 474 bp, Homo sapiens
  misc_feature (3)..(3): n is a, c, g, or t
  misc_feature (92)..(92): n is a, c, g, or t
  misc_feature (106)..(106): n is a, c, g, or t
  misc_feature (158)..(158): n is a, c, g, or t
  misc_feature (162)..(162): n is a, c, g, or t
  misc_feature (173)..(173): n is a, c, g, or t
  misc_feature (175)..(175): n is a, c, g, or t
  misc_feature (178)..(179): n is a, c, g, or t
  misc_feature (184)..(184): n is a, c, g, or t
  misc_feature (189)..(189): n is a, c, g, or t
  misc_feature (192)..(192): n is a, c, g, or t
  misc_feature (194)..(194): n is a, c, g, or t
  misc_feature (196)..(196): n is a, c, g, or t
  misc_feature (198)..(198): n is a, c, g, or t
  misc_feature (200)..(200): n is a, c, g, or t
  misc_feature (205)..(207): n is a, c, g, or t
  misc_feature (214)..(214): n is a, c, g, or t
  misc_feature (216)..(216): n is a, c, g, or t
  misc_feature (218)..(218): n is a, c, g, or t
  misc_feature (224)..(224): n is a, c, g, or t
  misc_feature (242)..(242): n is a, c, g, or t
  misc_feature (254)..(255): n is a, c, g, or t
  misc_feature (260)..(260): n is a, c, g, or t
  misc_feature (265)..(265): n is a, c, g, or t
  misc_feature (269)..(269): n is a, c, g, or t
  misc_feature (272)..(272): n is a, c, g, or t
  misc_feature (275)..(275): n is a, c, g, or t
  misc_feature (278)..(278): n is a, c, g, or t
  misc_feature (287)..(290): n is a, c, g, or t
  misc_feature (292)..(293): n is a, c, g, or t
  misc_feature (296)..(296): n is a, c, g, or t
  misc_feature (298)..(298): n is a, c, g, or t
  misc_feature (300)..(301): n is a, c, g, or t
  misc_feature (303)..(303): n is a, c, g, or t
  misc_feature (306)..(306): n is a, c, g, or t
  misc_feature (320)..(320): n is a, c, g, or t
  misc_feature (322)..(322): n is a, c, g, or t
  misc_feature (328)..(328): n is a, c, g, or t
  misc_feature (332)..(332): n is a, c, g, or t
  misc_feature (350)..(350): n is a, c, g, or t
  misc_feature (354)..(354): n is a, c, g, or t
  misc_feature (359)..(360): n is a, c, g, or t
  misc_feature (362)..(362): n is a, c, g, or t
  misc_feature (364)..(364): n is a, c, g, or t
  misc_feature (391)..(391): n is a, c, g, or t
  misc_feature (398)..(398): n is a, c, g, or t
  misc_feature (404)..(404): n is a, c, g, or t
  misc_feature (407)..(407): n is a, c, g, or t
  misc_feature (414)..(414): n is a, c, g, or t
  misc_feature (421)..(421): n is a, c, g, or t
  misc_feature (427)..(427): n is a, c, g, or t
  misc_feature (438)..(438): n is a, c, g, or t
  misc_feature (451)..(451): n is a, c, g, or t
  misc_feature (456)..(456): n is a, c, g, or t
  misc_feature (462)..(462): n is a, c, g, or t
  misc_feature (464)..(465): n is a, c, g, or t
ggnactttagtaaagacattcatctcagtcatttctctctcccagcttgaccttaggttaatatttcatttgggtcaagaaaataatacgtnggagaggtatgttnttttaacaaacaggaaaatggacaaaaaattgatagtttgcctacattaaantaanttaaattcatntntcnntatanttaantcntntnananctaannnttctatntncntttccnttgtcttacttgggcttnttctaaacttannttctntttancaanttnttnttnatatacacnnnntnnttntntnntnttntttccaactttttntnctcttntttnttcttcctccattaattntttnttttnntncntccaaatatattttttttttttttttnttttttntttttntanttttttnttttttntttttnttttctttttnttttttttttttnttttncttttntnnttttttctt

SEQ ID NO: 705735 - DNA, 143 bp, Homo sapiens
tagaggatcccttctgccgcaccactctgctgcctcccagcctcacaatggaaccactatccccactgccaggtcacccccacactcattaatgcaaagccaacccatgtctgccagtgagaagtcacagcgcagcaagaagg

SEQ ID NO: 705736 - DNA, 184 bp, Homo sapiens
ggtggtttctcccacccccccccccttggggaagaacggggttttttttatttcccccccccctttttcccctgcccccaggattgggccccttttggggggggcagggggtcccaaattggctccccctgaaaatgtaagaacccccaacaaaatttttattaaattaaattttgggttccca

SEQ ID NO: 705737 - DNA, 657 bp, Homo sapiens
tcccaggcaatgccctggagaggggctaccaagtgcacttataaccaggcacactgctgcaccattggatcgacttggaggacctatgtatgagacaggaactggctcaatgacacaggtgatgaacatgcatggaaacctggccatggacacagtccctgaaaaggtgcctttcttcaatagcaccttctatgataaactccgtaccaagggtcatgacggggtgaaaaggtcgaccagaaacggctacatactctgtaaggagctactgctaatacccatccacctggaggtgcattggtccctcatctctgttgatgtgaggcgacgcaccatcacctattttgactcgcagcgtaccctaaaccgccgctgccctaagcatattgccaagtatctacaggcagaggcggtaaagaaagaccgactccaaagtctcctctggaccctgactcgggcctcctatcatgtactctgcccaacggttttgggggacaatctgggcccagaaggggagcgcaacttggcaccccctgatgccagcatcctcatcagcaatgtgtgcagctttcgggaccatgtggcccaggaccttttaagggctcaaaattgggcatggcataagaagcaaaaagccctgggagaaagccggccccc

SEQ ID NO: 705738 - DNA, 649 bp, Homo sapiens
aagtggcatctgttgaggtaggcacactcagaactcgaaaccaagggcatccccctacctggacgtgcgctgcgatcagcatggtgcactgaaacggctccagccatccgacagctcctcccgtgcccttggcttctaccactgcctcacatcagggacacctctgtccctcacatgcacgagagagaggagggggtttacactttctgaagccctttgtgcaaagaaaaaatcctaaggagggtagagaggcagaactgacttctgtgctgggcctactatctgcctactaacagttacggttgacaagtatcaagtcttcctgtgccctgggaattgtgctaagggaattgcacgcctctttttaaccaaaggcttttaacaaaaggagctttaatctcaggtcattccccatttcacagactgagaaattcagatccaggcgaatgaagcaactgaaggagccatgtttccaatgagagaaaatgaggacaagagcccacatctggttgacccgtattccatttcctgattcaagccagacacaccgtgggtggaaggatcattcctttagcctcttagcttccaaatgcaaaaggggaggacaaaagccaggctcagtataagacgatgagggctgaaaccaccc

SEQ ID NO: 705739 - DNA, 124 bp, Homo sapiens
ctgtgagccggtttgtgggaagagcagtgatcattgtggccgccgatgagagcaccatcagctggggtccgtcaccgaacctttggggaactgggctacggggaccacaagcccaagtcttcca

SEQ ID NO: 705740 - DNA, 333 bp, Homo sapiens
atttacctaggaaagagaaacaaggtgtctagccgtcaatacatatcaagttttgatgattgcaaattcatattagcattacgaaggtggatttacagttcttgcttatatcttcttttacaaaaaataataatttaagaaaattttcaggacaggtctagtggctcacatctgtaatcccagcatttaggaaggctgaggcagttggattgcctgagcacaggagttcaagtccagcctgggaaacatgccaaaaccctgtctctaccagaaatagaaaaaattagcagggagcagtggctcacacctgtaatcctaacactctggaaagtg

SEQ ID NO: 705741 - DNA, 209 bp, Homo sapiens
gtgggaggcggctcagtcgcgggctactgcgactggcggatacgcgtcggatagaataagcgttcaggatgccaggacccgcactgctggagaagctcagggcattgctgcccatgttccccgaggtaagcccaatgccaccgccactgctactagcaccagtggaattcatcacagagatattcacggctcccactccccaagagcga

SEQ ID NO: 705742 - DNA, 564 bp, Homo sapiens
  misc_feature (19)..(19): n is a, c, g, or t
tcataggtcgcaggacaantggcacatgaaagggccacaactttggaatgtttcatgacgactattctgcaagtgtccttctacaatatgtgtgatggacaaagcactgagcttctatatacccacagacttcagttcctgcagccgtctcagctatgacaagttttttgaagataaattatcaaattgcctctttaatgctccattgcctacagatatcatatccactccaatttgtgggaccagttggtggaaatgggagaggactgtgattgtgggacatctgaggaatgtaccaatatttgctgtgatgctaagacatgtaaaatcaaagcaacttttcaatgtgcattaggagaatgttgtgaaaaatgccaatttaaaaaggctgggatggtgtgcagaccagcaaaagatgagtgcgacctgcctgaaatgtgtaatggtaactctggtacttgtcctgatgatagattccaagtcaatggcttcccttgccatcacgggaagggccactgcttgatgggcacatgccccacactgcgaggacagtgcacagagctg

SEQ ID NO: 705743 - DNA, 110 bp, Homo sapiens
acacattttgaaggcaacattctgtatctatttactccaagctcccagtccctcccactctttccccttccctcttggaaaccacaagtcaattctccaagtccatagag

SEQ ID NO: 705744 - DNA, 186 bp, Homo sapiens
ccatcttctaggtcgtccagctagtttcagtagctcctccttcatcttcccgcagaagatccgagtacgatccggaagatccattgcccgtgttctcacagttcttaagcagactcagaacgaccccctcaggaaattctacaagggcaagaagtacaagcccctggacatatcgagcaggcgtaa

SEQ ID NO: 705745 - DNA, 1485 bp, Homo sapiens
caggtgtcgtgaaaactacccctaaccgccacactgggaaaggcacacgactcatatcaacattgtcgtcatttggacactgtacgattctggtgcaatctccaccactactggccatctgatctataaatgctgtgtggcactcgacaaacagaaccatcagcacaaaattcagcagcaagtgcagtgcttgcttgcagcattgggcacaagtggctcccttccaagtaattgccttgtggctcatctgtgcatccaacacttgcacacagacttgcagctgctgcaactgtatggatactcacccaatatgacatacttctccctatgctgcgacacacttattgatgacgccactgcacactgtaccatagatgctgacacatagtcaactcttgaccttgccacacacgtgcacaccatagatgaactttacaatacacctacaacacacgttgacctctaccacgtgtgatcactcatacactgtgccttgaactctgagtgactttgctcacctggacctatcgacttggcctcggccttgacgttgctctctgccgtctgacacctctgatggacactgccattgccgctaattactctgtacgacaatagcacgacttgagtgcgccatatcaacaccctgcatgaaaggccaacttggacatcacagttataccttgtgccatttacacaagcaacccattgacgcgcttcggactgcaacacaaagccgaacagcctcacaagctctcggatacacgtcgcttgggccttcctacgcgccacaacaacgcaaagtgggccccacatccacccaccaacccatagtgaacgccccgccaacaccaccaggtagaaccctacgacggcccaacggcacacgacggcaacggcgaacgtaacttgccacggcgtcaccgcacagctcctggcctcacaaccacgccaggaccaacacggcttccaaacagcaccacaccccgccacccacacgcacccactgccgcgccctggccaacagcaacacccaactcacggcgaccgctgtcaacaccgacaaaccaacgcccccccctccacggcgcatccacaccgccaaaagagcgacgacagaacaccaacaccactaccaccaggagcgaagcagcgccgaacacacaccatgcccaccccacagggcagccatccgcgccaggcacacaaacactaggcgtagtttgcacacccacaacacccacacactcgcgacaccacttggggcaacggtccacccacacctaggagccactgagccagcaacaccaacccaccaacaagtgggtcccaccgtatgtcgcaccgtataacccccaacacgagcggggcgcgaacacttgtcgcacaaagccacaccaggcgtacccaacccaacccacgccgcgcaaacacaccgtgcaaccagactgccgccagcaactactcggccgccacagcgcaccg

SEQ ID NO: 705746 - DNA, 184 bp, Homo sapiens
caggctccagccaccagagtccatctcatatgcaggaatgtgaatcttttcctctcttacatggttcaggtgccacggggtaaattagggcttttcaaaacccagaggcctttccttccagcccctttcccatgttccctgccatgtcaagttcccaccttagggaacctttcacgggggtggg

SEQ ID NO: 705747 - DNA, 400 bp, Homo sapiens
ctccctgacgtatgtcatcatcactcttctaatctcagctaggtcgtcctcttccacaactgaagcttgcatctctcactgaatttccatcatccactgacatttgaatgctacacataacacaaaacctaagatctttgctgtcatttacagcacaagaagagactatatctaagacatagttcaatctggacaattattctggcatgatcaaaataccagtaagatcttcagatgcctaaaagattccaagtatttaatacctttagactaacactttatgtattatatgaatgttttgctttggagccataggggcctgaccttgattcccaagtgtcccacttactcagtttactcatctgcagaataaagaaaaataatagtactgatcagtctg

SEQ ID NO: 705748 - DNA, 796 bp, Homo sapiens
tataatgctagcatataccatctcacttctaggaatactagtatgtcgctcacacctcatatcctccctactatgcctagaaggaataatactatcgctgttcattgatagctactctcataagcggcctcaacacgccactccctcttagcgcaatattgtgcctatgccatactagtctttgccgccttgcgaaggcagcggtgggcctagccctactagtctcaaatctccaagagatatggcccagactacgtacataactaaacctactccaatgctaaaactaatcgtcccaacaattatattactaccactgacatgactttccaaaaaacacataagttggaatcaacagcaacacccacagctaattataagcatcatccctctgctattttggaaccaaatcaacaacaagctatatagctgttccccaagcttttcctccgacccctaaaaaaggcccctcctaatactaactacctgagtcctacccctcacgaatcatggcaagacaagccaattaatcaggtgaaaccactatcaatgaagaaaaactcttagctctctaatactaagtctcccttaggaatctccttaattatacatccagaagccaccagaacttaatcataattgagatctgtcttgcgaaacaaaatttatcccgcaccttgggtattcatccacccgatgggggcaccaggcaagaaagggctgaagcggggcacataatcgctagttaaccttagttgggtccttcccctaattcataggcgaatttaagtcaagc

SEQ ID NO: 705749 - DNA, 164 bp, Homo sapiens
tctcttagagtgatcccgcacagtttgggggagggaggaataggctcactgggtaatctctgaacctgtaatcattaccagtccaatattagtgcgtttttgatgccgattagaaaaatcactccttctggggaaaggcaggttggccaactgagaagtccgga

SEQ ID NO: 705750 - DNA, 535 bp, Homo sapiens
aagagaggaaaaactgggcgtctgcttgggaatctattgtggaaacccaggctgtttcccgaccagtccctgggcgccaactagagtatggtctgaccaggtacctggatggagacctgagctggagaaggagatgcgcttgggaggaaattgcagaggccgtcaacatggaaaagcagccccagaacagcaggagaggcctcgccccccgagaggtgccgccagctgtagggctgctgctgatcatggccctgatgaatactctgctctacctctgcctcgaccacttcttcatcgctcctcgacaatccactgtggaccccacacactgtccctatggtcacttcaggataggacagatgaaaaactgctcaccttggctgtcctgcgaggagctgagaacagaagtgagacagctgaagcgtgttggggaaaggagctgtaaagagagtcttcctgtctgcagtgacacgagcacaaagtcgcactctcacagctcaccagcctggagatgacagatgatttcctccatgga

SEQ ID NO: 705751 - DNA, 248 bp, Homo sapiens
  misc_feature (10)..(10): n is a, c, g, or t
  misc_feature (30)..(30): n is a, c, g, or t
  misc_feature (37)..(37): n is a, c, g, or t
  misc_feature (76)..(76): n is a, c, g, or t
  misc_feature (90)..(90): n is a, c, g, or t
  misc_feature (123)..(123): n is a, c, g, or t
ttccattganaatgtcctgcaggacagcanccccgancactgtgccgaggcccacctgctgaaatctacctgccanccctggggcccgantcctgctctgttggtatagacgagtaagcgganggcccacctccatggaagtagcccacggcctcgccaccaccagccccacctggcctccacttggtgccccagccccgatcccagcctgggcgacagagcaagactccgactccaaaaaaaaaaaa

SEQ ID NO: 705752 - DNA, 428 bp, Homo sapiens
  misc_feature (390)..(390): n is a, c, g, or t
gtttgagacagagtctcactctgtcacccaggctggagtgcagtggtgtgatctcggctcactgcaacctctgcctccaggttcaagcgattctcatgcctcagcctctcaagtagctggggttataggtgtgcaccaccacacctggctaatttttgtattttttagtagagacagggtttcaccatgttggccaggctggccttgaactcccgacctcaggtgatctgcccaccttggcttctctcccaaagtgctgggattacaggcatgagccatcatgcccagccaaactcagttttaaatggggaaacaaaggcacaaaggttccacttgcttgagtttagggatctgaacctagcatatagattggttctggtgctgagcctncagatgtggcatgggctccttggtctgccatggtctgc

SEQ ID NO: 705753 - DNA, 960 bp, Homo sapiens
atcggttgcccttcgacaccggctgtactgtatggacaccgttacgatggcgggttatgctgggcgaaggaggatcgaatcatcgcgacggatggcaacaataatgcaggaggcgatttgcgggtagtaacgctcacggcaatggctgcacagcatcgcccattcggttttgctcggatacatttcatgcccgcagtaaccacagtatttatgcgatcggtaaaactccgccagttgtacgcctcgtccggccagttgaaacagcccaacatcgagatcaatgacctgacgtaccgaccccatatcgtgacgccgctgctgttgtactaaccaaacaggttccccctgccattcgccgatttgtagtgcgcgctgacccacaagatcgaaatttgccgcttcgccatatggcaattctcccttcggcaaccataatttttgttcatggctgacgacccaccagccgtgatctaatttttcaattatacgatccatagctcttgcactacctttgcatcactggcatgtttaacatggtttttacatttctcactgagcagtttttgaatacaaacttgcggagtcaatcatgcttaaccagctcgataacctgacggagcgcgtcagaggaagtacaaactggttgattcgctggctacatgtacgtaagcatcttgctcgtgggcttactacaatcttggttgtgccattaaagcctggccaaaggaattcgtacatgcagggctaaaacgaaaaaagcccttggagtgatttttgtcaggagcctggtccgattacttgtcttgcccggaccattgtccggtatttatgagcgcattcttccataagctgggaaaggcaacggggcaactcgcggcgccgccgggaaaatttggccgcaactcgaaggcgattctctcaccgattatggatttctcgcattcccgtctggaaacggcc

SEQ ID NO: 705754 - DNA, 485 bp, Homo sapiens
accagctggaggaccccagccttgctggagtgggatgcagatgacttccggatcttctgtggggatctgggcaatgaggtgaacgatgacatcttggcacgcgccttcagccgcttcccatccttccttaaggccaaggtgatccgtgacaagcgcacaggcaagaccaagggctacggcttcgtcagcttcaaggaccccagcgactacgtgcgcgccatgcgtgagatgaatgggaagtatgatgtcgcgccccatcaagttcgcaagagcatgtggaaggaccggaatctggacatggtccgcaagaagcagaaggaaaagaagaagctgggcctgagatagggtctgtggcacagacaccagctcccaactggcagagcactagctcctcactcagaaatcattagaaaaccaccagaaaacacaaatcccctaccccaaaaccaaattcaataaatttaaaaacatataccaaaaaaaaa

SEQ ID NO: 705755 - DNA, 457 bp, Homo sapiens
acgacaaaattgccataggcttgtcagacaagtctaaaagaagctgttttttctttctcttccctatatttcctcttcctttgtttaaatatccctgagatggccgggcgcggtggctcacgcctgtaatcccagcactttgggaggccgaggcgggcggatcacgaggtcaggagatcgagaccatcccggccaaaacggtgaaaccccgtccctactaaaaatacaaaaaactagccaggcgtagtggcgggcgcctgtagtcccagctactcgggaggctgaggcagaagaattgtttgggcctgggaggtggaggttgcagtgagctgagatggtgccactgcactccagcctgggtgacagagtgagaccctgtctcaaaaaataaataaaaaataaaaattgatttggctttcatatcaattgtttcctttggctttcatatacattttat

SEQ ID NO: 705756 - DNA, 95 bp, Homo sapiens
agtcgcttgaacctgggaggtggatggtgcggtgaaccatgatcatgccactgcacttcagccaaggtgacagagttagattccatttgccacca

SEQ ID NO: 705757 - DNA, 139 bp, Homo sapiens
agtgcatggctgacctgatatagccaacaggaaagtctgaaatctatctagagacccaggaaagagggctccccaattccacaggactaaagactatttaggaggatggctacatagttgtctccagcatgatgcatcc

SEQ ID NO: 705758 - DNA, 465 bp, Homo sapiens
  misc_feature (18)..(18): n is a, c, g, or t
  misc_feature (29)..(29): n is a, c, g, or t
gctgccttcgttgctttncttttggctancccatttatagttagtagtggaagatgtagcccaccttttttgggaaaggctaaaagtgaacattttgaaagtttttttttttaattggtaaaaaaaaaatagtaagagaataatgccaccagagactttagtggacattgcccattttgaaggtgccattcttagaagccaagaatttggtatttaaagtttatcttgagagaataacctgtaatataatttgaaataaaggtatagtaaccttaagagcactgtagcaaaaacattggtgggtggggtgaatttgtaaaatgaatgactttgataaagttttatgcacaggcaaatgtattcattagattctgtgtagtgatctgctttccctttgtaatttgtagtcctaaaaagattttttttttttaaaataaagtccatccttgcatttaaaaaaaaaaa

SEQ ID NO: 705759 - DNA, 470 bp, Homo sapiens
tgttgatgatcatatgctgctggaaatataacgcgtgaatataaattacctgaaaaaggtgtgggtatattacccaaatattggtatcaaccatgtaattgcctataaaatgggctattattataacagacgggtagatgtgaaaagcacatactgccgtatagatgccttatacaaaatatgtatacgctaaatatttagtgactatgcgactgtattggagaacatggatgttgtttgagaatagggcgtaattgggaaacagaaaatgctttgcgatataagaaccggtgttgcgaaactgagaaaggtacgttatatgatgtactgacggaactatgtgggtattaagggaatggtgacaatgggggagggaaacaaaaaattttgtacggtaactattattaatgcccatattaggcttgcaagtacgacaacggggttacccggaacttctccccacctttggc

SEQ ID NO: 705760 - DNA, 1278 bp, Homo sapiens
ggacggcgtgggtctgacccacgcgtccgccggacaagatggcggtgcggaagaaggacgggggccccatacgtgaagttactacgatggtccgtcggacaccgtagacccacgttcgacaacgtgcggctgtggctcggctaagtaactacaagaagtatattgcaagctgaaccacaccaccaatcaagtccctgtctagcctgtgttgtacatgttgctacaactttcaggaagaagtttattggcaaacatgtcagcgaatgcagccgatcactaatactgccgattcaaactgtttcgcatagcatttcaaacgcgggagtgcatccttgatgcccacattctatgcagctgcctacgaaacttcaacgagtgaccagggcatggcgggcgtgtacgattctccagaatccatcacgcatggacccgcaatagtggcaaaatgtattatgaccattgaggacgtcctatgggtgcagaatacattgcctgatctcgatccgtaaccagtttgtgtctgtagcccggaagatctgaggcccgaaacgtacctagaggaacagttacaagtgacagttatcgacgagacaccagggaacagtcactgaggcataagaacactgcctcccatgtcgatagtatccttgtacccggggcaactctagacagcacagaggaaatgagcacgcagcaagtcagtgaactacgggacttgagccgcgtccctctgcaactggggacctacgaatcactgacagataacgaccacgctgtgatcccaacaagtgcatcttcgaggccacatctggtgtagaaccacgcctcccaaactccatgacgaccccgtcaagacacggggctccatgcccacgtgtgcgaccctgcgaccaccgaaccacttcactccgcaatgcgactcaactgtgaacagaaaaacgacagacacagtcacgaccacaaacaccgccctcccgcggaaaggaacatactaccacatctactgctctcacactttcgactacctaaccacaaactaacggacaacagcacacaactatctcaaattctaagacacgccccacacactaacacacaccaatacactaaaaagcgtatacgccacaacatacacctatccagctcctcaacaacccagactaaaaatcaacaagcaccacacacaagaccctcacactcacaccacacacccaacaccacaccacccaccagcacaaaaatcgacaactaagcctaccctataactcacatacattc

SEQ ID NO: 705761 - DNA, 652 bp, Homo sapiens
gttgtgctagaggagccagataatgccagtctcaacaagaggattattcaatagccattagatcatcccgctgccttcctgcttccgagtccattggactttgcccatggcctgtactcccctgagactgccatctggctagacctgatctatgactgggttccaaagttgaggcctaggttgtcgctgggatttagatcttttccggcaccattttgacagcattcaggaaaacggttattgaccccatagactagggtaagaataaaggcaagcaaatttgggctgactcagaatataggagatccatatatttccctggaaagcacagtatacactaaaatgtgaaactgaaggtttagttacacacaagagaaagataatgagcttcatgctttgtttaattacataatgatttccattacgctatttctgtgaaatgcagcaggttcttaaacgttatttcagtggcatgggctggaagcttatcacaaaaagccatgtgtgtggccttatcagaacagaaagagacaggctggtgcccaaagctgctgcctgctccaccttttggcagctctggacatctgaggacatcccggcagatctggaatggggcctcaaatgaaccattgttctcagaattcagttgaaa

SEQ ID NO: 705762 - DNA, 257 bp, Homo sapiens
tctggctttgtggtctcttcctgacctcacgattctcctgcctcagcctcccgagtagctgggattacaggtgtgtgccacacgcctgggtcatatttgtatttttagtagagacagtgtttcaccatttatggccaggactggtctatgaacccttgtaccttaagatgattttgcctgcctacagcctcacaacaagtagctgtggattacatggtgttgatgccacctgtgccatgtgccacccattttacttt

SEQ ID NO: 705763 - DNA, 648 bp, Homo sapiens
  misc_feature (594)..(594): n is a, c, g, or t
tgcatggtggctcacacctgtagtaatcccagcactttgggaggccgaggtgggcggatcacttgagaccaggagttggataccagcctggccaacatggtgaaacccggtctctaccaaaaaatacaaacatttgccgggagtggtgttgtgcatctgtagtcccagctacttgggaggctgaggcaggagaatcgcttgaacctgggaggcggaagttgcagtgagccgagattgcaccactgcactccagcctgagcgacagagcaagactccatctccaaaaaagaaaaaccaggcatggctgggcacagtagctaaggcctgtaatcccaacactttgggaggccgaggtgggcagatcacgaggtcaggagatcgagaccatcctggccaacatggtgaaaccccgtctctactaaaaatacaattagctgggtgtggtggcatgtgcctgtaatcccaggtactcaggagactgaggcaggagaatcgcttgaacccaggaggcggaggttgcagtgagccaagatcgcgccactgcactccaccctgggcgacagagcgagactctgtctctaggagacttaacanattaataccaataacaacattgtgccaggcacagtggcccacgcctattcttgg

SEQ ID NO: 705764 - DNA, 277 bp, Homo sapiens
  misc_feature (270)..(270): n is a, c, g, or t
gattacccacaatcaagctaattaacatatcctatgacacatagttaatatttttgtgtgtggtgagaatacttaagatctattctcttagtaaatttcaagtataccaatagttgccatcctgttgtaagcccaaatcactttggcttagtgattttggggacctgagattatttttcctttcacactgtacattaggtttccagaacttattcaccctataactgcaagttggtaaacttttaccaacatctccccatttcccctaanccatgac

SEQ ID NO: 705765 - DNA, 1228 bp, Homo sapiens
tacgcaaataggctagtagaggccgcgtgttcatcggccgaggctgggcggtgagtgccctgccgtggcactggctccagcgtcgtgctctcgaattcatttgctttccttaacgagagaaggttccagatgagggctgaaccctcttctgcctctgcccactggccccatgaactgctgtgtgtggagtgagtgcatggtgtgatgtggtgctgtgccactcaaactgtggtcatttgcccattaatagatgacctctaaacaacctgccttgctaaaaatacccgactggatgtgatgcataaaatgctgcatgcctgatgcccatgctgcccctgaactttttcatgagcagacgtccatgagcatgagtcatgccatgcattgacctgatgctgtctgctgtcccacttcttctgctcacttgctgtggtgccccctatgcttgtgtggacccactttcctgcctgacttgtgtaccctggcatatgcctggccttctttctgcaccagtgccattcagtgtgcttggcccctgtgctttgccctggatgtgcatgttgcgtcttgcaatgagtagcgatataatgtggctgtgcaaacgcctactgactttgtgacccacatgtgcttaactagtttggctggccacaccacttgtgcacacacccacctggcacatgacctaattccttgaagtgacatgccccatgacaatgattggagacatgctgaccacatgcacattaacagtgaagcctggacatggcggccttcacagagcactctggcagcaaactccatttcaaatggcactagccaggggtgggtgcattccgaggggacggcaactcccttgtgtcaacacatctttggctatgatgcaacacggggttgtggtgcagaccagatatgatccccacttatggagatttagttccaaaccacaacatttttccaggcccaccaggctaacactctagaatcgccttcagacacggtgctcccacacgaaaacccaagagtgtgactcttgtgggccggttaggcgattgagtcaatggcacttccacaccgcctggtcgcaacaacggaccatacctgtaacgaggatcgctaggggccaacgctaaacctagacgaccaagttgacgcatttacacattttctatcccacggggatatggcatttcccacgctcgcactgcaaaacagtttaccgagcgag

SEQ ID NO: 705766 - DNA, 1608 bp, Homo sapiens
  misc_feature (326)..(326): n is a, c, g, or t
  misc_feature (915)..(915): n is a, c, g, or t
agggaaaatgaaattacaagtcaatacctccacagaagaggataacctccttaattatttcctatgtgactcctctgtgaacccttattttaaacccctccttaaaattaaaaattattcatttgtgtggttttccttatttattttttacacctctataagaggcggggcctctgtgactataatttgcgccggtgggcgcttgtgagtggcatacaggatattatagcgcaccaagcgcatatataagcgcctccctatatccacccatatatatatagcgccttgtgcgctctttctcggggcgcttctcacatctcattatntagagacacccctataaacccctctatatacgaatttatagaacacggaaacacacactgtgtgtattatacaacacaacacacagagaatatacagagcggtgtatacaacaaaacaacacaaacaagagaggcgcgggcgcgcggcctctatagagagatattccctccctcgagagagggcgcccccacaagagcgctatcatagcgcgctgataatcatcccccgagatgtttctctctctgtgctgctacaccacaaggaggtgtgggtccccccctatatatgatgagatgagagcctgcgctatcatctatatatacgacgcgcatgatgagagcacacgcgtgtggcgcgcgcgcagaggtgttttttaaaaccacaaggcgtcggtgagagatctgtgcggcgaaacacaccagtgtgtcgcaaactcctctggtgcgcgcacctctcctgtgcggcgaaaaggcgcacaccctatataactatctctgagcgcgcgcgtgcgtcgcacacaatatatatgtggtgcggaccccaaacatcacaccctcatcacacgcgacacgatcatcttcttctaanacagggcgcctccctataaagggggggcatcaaccaatttctatcacaccaagcatcttcttttctaaaccagagcggtggataccactaccgcggctgcgtcgtgttccacacccaccttataactccgctgcgcccacaattattgctgcccccatgcgaccgtcggctcatttatgaaaaaaacacatctgaggcgccactcacacacggggggcggagcctaaatgttgcacaccttcctcctggctcgcgaccaccaccaacccttttttgttatatcacccccccgcagggcggagatcacctgacagttaacaagtcaacaaagaagaacaacacacgcagccagctcacacatacacacgcagaagtagacaacaagctagatgatggaagggagagtgacttaacgaggactgagaacgcggtggatccagcgcagtgcacgggcaaactcggagcccaacatatgtaaacaggagcgcactgtgcatgacagacgagtgacgagcataggaatacaatgtgactgtggttagaaccgagcccgacatacgcactcagccggcgacagcatcacgccgggtggtgcagtgaccgcgtagctaacggcgaactaggagcgatgcgtcggcacccagcagcacgggagataacggcaaaaagagcacacgcacaccacaaacaaca

SEQ ID NO: 705767 - DNA, 306 bp, Homo sapiens
ggggaatttgtggtgctgctcttttgaccccctatttagatgagaagaaaattaggggagacccagaagacgacagcttagctgacaaccaaagaagatgatatacgggcgcccatggaatcttatagcttgagcagcacttttggcaccaacctgcacccaaagagcatctttaaaagttgtcacatacttgctccgggcagctctttcacaccactaccatgctctgtgccagacatgactaattttttaaatctctgacactcttaattagacatgagctaattctgtaagaatgttagagta

SEQ ID NO: 705768 - DNA, 124 bp, Homo sapiens
gtgaagctcttaagacagggtgcttgcgccaggcgtgcttgactcatgcctgtaatccccagcactttgtggaggctgaaggtgggcgggatccacggaggtcacggagatctgagacccatcc

SEQ ID NO: 705769 - DNA, 151 bp, Homo sapiens
ttgaactatccaaatacctgctatctcctatgttctgtcctccagaagctgcacgcttgtacgtaggagttcggtaccttataacgatagtccaccaggccaaagggtaggcaatagaagaccttacccaccctttctccaaggacatgct

SEQ ID NO: 705770 - DNA, 364 bp, Homo sapiens
  misc_feature (292)..(292): n is a, c, g, or t
  misc_feature (335)..(335): n is a, c, g, or t
aactatgtagacttggagattgtgaaattgtggtcattattgcctagcataaattattttatcctagatctgtggggaggtggcactttgcaaagctatttgaaatgctaagtgttttatgttacccgctttaaggtaagtacacaagttctatgaggtacttgtttgttaaaacaaaatagagcctctacagcactgtaagtcagtaaaataagtttgatttatgagtggtcatttcacttaggtaggcactggtggcatctttgatattagatatgagttgagttatctntaaactgcataatacatccactgtttgcaaataagtatttttnggttatttcaaaaattttatcccaccagt

SEQ ID NO: 705771 - DNA, 400 bp, Homo sapiens
  misc_feature (58)..(58): n is a, c, g, or t
gttggttcccccccaaatgtcctgacaaatacccccgccgaacttcagttttccctgntacttaccacctgccgccggttgccggaggccatcgaggaagtgaaaaatggtggctggacctcgtggaagcccctctggctgtgtggctatggactcccgcagagccctgtcggcatcatcggggtggggggcataggtgaggctccccccggcccgcttgcccgccccggctttcacagggtggtttgcatccctggccccccgtgtttgaaggctgagaagacccccatgctgtcagggccctttgcttgcagtaaagatatttttaatgagggatacagctttgtaaaacccaggcaaatacataaataaaccaaagcaggattccttaagaactcca

SEQ ID NO: 705772 - DNA, 110 bp, Homo sapiens
gagaatttaatttttaaaagactttgatgtgtttgtgtatgaagtacttgtaacgtatgtatttcattcgctgtgtcacactctgtgtgttgtgaggttaatgtcttcct

SEQ ID NO: 705773 - DNA, 320 bp, Homo sapiens
ccaaaagggccctggggggtttttttttggggcccgttttttttttaaccccccaggggttttaatttaaaaaaaaaaaaaattccccccctccccttgggggttcccccccccgccccttaaaaaaagggggccggggtttctgcccccccacctgggggccggcctttctgggaggggccggttaaaaaaccaattgggggacccgccggggccccccccggttcccttggccccccaaaaaaacccctttttttctccgccccaatatttggccccgggggccacaatccctttggggggcgcgataaaatccccaa

SEQ ID NO: 705774 - DNA, 617 bp, Homo sapiens
gatatctttataaagaaatctttggaaattaggagaaggaatttcaggtgggtttaatcagagctagttcccccaccggaagatcatttggaacccggttgttatcccctctctttccgtcccgttccctagatccaatccatagtaagtgtggccctatttcacgtgacatagacttgaattatttttagggaagcccctataatggattccgaaatcactaccagcagcctttagactgaagttgggatattctgttgaccctcaaaccttgatatcacttctgtgtatatagaatgtaaaagggatattacacgtgttatactgccactatatgtatatacacccactccattagccttgtaatggcccaatgcacttcccccctgcttttctgttttccaaaaaattgtgaaaaccaatccactcttatcccccacccgctgcctaattttaggagtctgaccctccacatctcactggtgtgggtgcaactggggctttggagtgggtgtccgtatggatgtgtctgaatgtgtgaggccttggaagggactctttctgcagatactgtaaataccagtaccctttttataaagcatgtaccataaacccca

SEQ ID NO: 705775 - DNA, 948 bp, Homo sapiens
gacgagatggacctcactgccggtcgcttcctagtcaagtgctcagtgtggctacgtgctaaaagctgtcctgcctgcggcaggctgactcgacctttgaccccgagtacccaggacctcccagaaccactctcagcatccaggtgctgactgcacagcagctgcccaagctgaatgccgagaagccacactccattgtggagccccctggtggcggcattgagatccatgggcgtgcccgtgagactgtgtcccggcaggacgactgactacgtgctcaacaatcggcttcaacccccgctgggtggcacgaccctgaagttccagctgcgggctccggagctggcacgtggatccggtttgtggtggaagattatgacgccacatcccccaatgacttcgtgggccaggttacactgctcttagcatgctaaacgcaagggtaccgccacatacacctgctttccaaggacggggcctcactgtcaccaaccacgctcttcatccaaatccgatccagcgctcctgagggcccacgctcaatcgccttggggtctgagaagtgcagtccagatcccctgcagagcctctcctcctctggagtcaggtggtgggagtaacaggcccccaagaccaccacattgggccactcaaaccgatttcgaccaggcaggctggactcaacctgtggtgactgaagagactgccaggagccctcctggaggcacagaaggggtgggccaagtgactctccaggacgatcccaacccaggggcccgaaatgcgcgcagacccctggtctgagccaacccgcacattggactataggcagcaagcggtgcccgccggaaatagggagcaggaaccgggccgcaaaccactggcccgggcacacctccccaagagaaagacccggcgaccagaagcaaaaaacaaaatgacccgcag

SEQ ID NO: 705776 - DNA, 231 bp, Homo sapiens
tgactctacaggatccttactgaaactacaggtgccaccaccaaacaggctatttttttttggtattttccggtggagacaggtttggccatgttgcccaggctggtcttgaactccatctctactaaagatacaaaaattagctggatgcagtggcacatgcctataatcccagctactcaagtggctgaggcacaagagttgcttgaaccaaggaggcagaggttgcag

SEQ ID NO: 705777 - DNA, 107 bp, Homo sapiens
ttcgatgtgggactcagagggacacagacactgtccagagctgatcgcatatggtctttaacttgtatccataggtgacctttccatactgcaaaactatggggtag

SEQ ID NO: 705778 - DNA, 163 bp, Homo sapiens
acacaattagtagtgtgcatggttggcgtcacctgttgtccagtcatccttgggagtgctgaggtgaggcaggacccatccgttgagcctaggaggtcattggcttgcatgtgagctgtggtcttgctactgcgatctctggccaaggtacgagcgagacctc

SEQ ID NO: 705779 - DNA, 100 bp, Homo sapiens
ttttaggtcctatttgttttcaatacgattataatcgatcagagtaattcttttgtacattgagaatgaggggctggtttaaaaaaagacctttccctct

SEQ ID NO: 705780 - DNA, 378 bp, Homo sapiens
actgtgcatctcgtgcctgcgaggtaataatttccatatgggtcctagtcctccccggtggttttcccatctctgatggccgagtccttttacgaagtggtgttcggctacggctttagagatcctcctgtgccttcttcttcttcttgggtttttctcctgtgaattacaggggggtgggtagctatctctttgtagatagctaataaaatcacttaattcacggccaccttcatatttctttggatttagcttcttgtaggctggagagaagtatatggtaggaaaacctctgacttcatatggagaaggcacatcattggctgtggcatccatcttggctatgacgatatttgggtctttgctgagcttctcgcc

SEQ ID NO: 705781 - DNA, 125 bp, Homo sapiens
accgagcctggtgatagctggttgtccaggataggattttaggttaacttaactttgccacagaccttttaattccctgttaatttaactgttagtcaagaggacgctctttggactagggaaaa

SEQ ID NO: 705782 - DNA, 246 bp, Homo sapiens
aaattgatatatagtataaacatatataccacatatataacaggataagcaataatacatagctagctaaaaagtagggtctctgagatatcaactagtagataaaaaaacaagtgccgcacgtataagagaagagcagatcatagctatagtgacatattgcatgagatataacacacactattttgtacatgaagaggcttgtgctagtggtagggtacgatataataccctagcccatcccca

SEQ ID NO: 705783 - DNA, 282 bp, Homo sapiens
acaccacagctcgcggcaacgccggatcgttaaaccaagtgagcaagggcagggatcaaacccacaacctcaaggttcctagtcagattcgttaaccactgagccacgacaggaactcctgtctacttttctttatacttcatttatttttattagagtatagttgatttataatgttccttcaatttctgttgtacagcaaagtgacccaatcatacacagttccctgtgttgtacagtagggtcccattgctacactgtctacttttaactaaagatgtc

SEQ ID NO: 705784 - DNA, 145 bp, Homo sapiens
tagggaaacagaagaaaacacgttaagggcacactgaccaaagcttccatgtcacacatgcaaactgcggaggcttctgctcaccatgtgattgcagcctccattcttctcaatgcagatgttgcacttgggaccactgcaggag

SEQ ID NO: 705785 - DNA, 183 bp, Homo sapiens
ttgttaaaagttccaaccacctccaccataaatatacaaaaacctatttttagatatgtcaaattgcatgaatattttctaaagcttgaatttgctcttcactggatattatctatagctgtttctgtaacagactacataaacattgatatattattcatgcctttgaactgtgcaggactt

SEQ ID NO: 705786 - DNA, 475 bp, Homo sapiens
  misc_feature (1)..(1): n is a, c, g, or t
  misc_feature (100)..(100): n is a, c, g, or t
  misc_feature (108)..(108): n is a, c, g, or t
  misc_feature (130)..(130): n is a, c, g, or t
  misc_feature (143)..(143): n is a, c, g, or t
  misc_feature (167)..(170): n is a, c, g, or t
  misc_feature (173)..(173): n is a, c, g, or t
  misc_feature (212)..(212): n is a, c, g, or t
  misc_feature (214)..(214): n is a, c, g, or t
  misc_feature (248)..(248): n is a, c, g, or t
  misc_feature (250)..(250): n is a, c, g, or t
  misc_feature (262)..(262): n is a, c, g, or t
  misc_feature (281)..(281): n is a, c, g, or t
  misc_feature (285)..(285): n is a, c, g, or t
  misc_feature (291)..(292): n is a, c, g, or t
  misc_feature (294)..(294): n is a, c, g, or t
  misc_feature (308)..(308): n is a, c, g, or t
  misc_feature (313)..(313): n is a, c, g, or t
  misc_feature (326)..(327): n is a, c, g, or t
  misc_feature (329)..(330): n is a, c, g, or t
  misc_feature (343)..(343): n is a, c, g, or t
  misc_feature (345)..(346): n is a, c, g, or t
  misc_feature (360)..(360): n is a, c, g, or t
  misc_feature (365)..(365): n is a, c, g, or t
  misc_feature (368)..(368): n is a, c, g, or t
  misc_feature (373)..(373): n is a, c, g, or t
  misc_feature (376)..(376): n is a, c, g, or t
  misc_feature (405)..(405): n is a, c, g, or t
  misc_feature (413)..(413): n is a, c, g, or t
  misc_feature (425)..(425): n is a, c, g, or t
  misc_feature (432)..(432): n is a, c, g, or t
  misc_feature (437)..(438): n is a, c, g, or t
  misc_feature (443)..(443): n is a, c, g, or t
  misc_feature (468)..(468): n is a, c, g, or t
nccttttacacaaaacaaagtagaagaaataatacaggattaaaactgcaaaagtagttaatcagtagaatatgtatgcacacaaaaaatccagatgggnagacaggnttatttacaatgaaagtaaggnaaaattaacgtanttttcttatgaaataataaaaaannnnccnacatatggtacaatgggcaccactgttcacagcaatatncnagaggagaaaacaacacttatttaatagggaaananatacaaaaaggnacaaaaataagtgcaatanattnagaganntntattagagatagtnaatgngtttaggggtggnncnngtgagtgggattngnngggggtaagaggtnggttnttnaaganttnaactaatctaaatttgtaggtatcaagangttaagantgattattagangtttttnttggnnttttnttttttttgttgatcagaggtgaantattatt

SEQ ID NO: 705787 - DNA, 945 bp, Homo sapiens
  misc_feature (700)..(700): n is a, c, g, or t
ccggtgcttccctgaggctgaggcgcgcggcctcccggccggcgcgctcctagatgaatgtgtgagcagctgcagcgcgcaaggaagtgtagtaagaaaacaataaactgatgaccaagatgaatgtgtcagccgatgctaccgatgtccagccgcaggaaaatggagagaagggagaactaccacaagtctgggtgaatgccaagtactagtgttctatgacgcgaactgccgtggcagtgtgacaggctgctactgacgtgcagacggaagcgagtccatatcttctcccatgctgaacatgctcacaggacccttctttcgcgcgattctgaatcctataacaaggaaactggtgcatagccctctagatagacatcatagatgtgcctgagtcaggtggtctggtgatgtcctctagatctcttgtcacttcattcttagctagctaacattcagatcgctcaggagtaaacttgagtgctagtccaggaaggacgtctgttggtctgcctcagaagagtcttggggtgcacctatgtactttgagtacgacggataagctagcggaattttagtaatcctgggacgaagtcaaacagaggaattcggtgcgtcggcatatcagccagagcacacgggaagagagtgaacgcataccctgacccaatgctagacctctcgcacttgtccttgagcntagggtccgaatactggctcgatgcgggggtgctaggggttcagaccgcacgaattaaatgacccaagctgctgcagaacgtcgaagttgccccccaggcaggtcatggggactcttctggtgaagggatcatttcgccagacagcagaaccatggttccgagaagatttccacgtcattgtgggcccttgtatgacgagaagctgggagctctcaggaaagccttccccctgtttgctgctccg

SEQ ID NO: 705788 - DNA, 139 bp, Homo sapiens
gctgatgcagctggagaagaagttgcattccctgcagccgcattccttcatccgatctcttcctcaccactggagcatcaacctccaaggatgcctcgtcacatctgactcctgtgcgggcacgcatctctttgtgttc

SEQ ID NO: 705789 - DNA, 255 bp, Homo sapiens
  misc_feature (38)..(38): n is a, c, g, or t
  misc_feature (112)..(112): n is a, c, g, or t
  misc_feature (142)..(142): n is a, c, g, or t
  misc_feature (145)..(145): n is a, c, g, or t
  misc_feature (154)..(154): n is a, c, g, or t
tggcaaattcatctcttttatcctcgcttatgaataanatgtctcagggcaaccctggcctgggcagcctgctgaacatcaaggcggaacagaggggagccccgctgcggancctcgcccttcctaggcaaggcgtcgaagngcntggttcagnagaagttggcagagcctggaaggtgtacctgcgcaggtttggtacaaaggacttctgtgacggccagtgtgacttcctccacaaggcccacttccacttgc

SEQ ID NO: 705790 - DNA, 293 bp, Homo sapiens
ggataatccaagcaaggtctgtacctttcttgtttttatctcgaaatagttgattccatacatttccaggtcctgagcaaacttcaggtattccaacatagcattatcttgtgagcatcccatggatgtccgcaatgccacagctggatccggtcctcccaactggtccctggtcgattggtgctggtccctcactcttagcagggatcagccgctcagagctgagagtacccagcacttgtgcattacttggtagtagtccccaacacttggcctggccatcatgccaaggg

SEQ ID NO: 705791 - DNA, 486 bp, Homo sapiens
  misc_feature (125)..(125): n is a, c, g, or t
  misc_feature (137)..(137): n is a, c, g, or t
  misc_feature (169)..(169): n is a, c, g, or t
tatcatttacagagaagtccgtgtcccctaaacaacaggcttctttaaatttaaatgtttctcaaagtgcagaagcatttcgtggggaaatttcaaatattccagaaaaggggtaaggatggccnccataagcaaantctctgccatagacttcaattcctgaatgaanaactccaattccaatggatgaggtatattcgttcatccaatactgaaaagtggtcttcagagtgtaggaaaggagcacccccaggatctttaaataattcagctgggctattttcttgaaaaatgttagcctcattcatattttaacgaggttgcctttaacacacaaggaaagggtgtgttggctcctgttcacctttgaaaagattctagcacaggcacccgaaagctgtgaccttctggacttagaggggcttgggagtttctgaagacgtagccatggagagagtcggacagttcggcagaagcagaggagct

SEQ ID NO: 705792 - DNA, 1174 bp, Homo sapiens
agcggcgttgtaccgctgatgctatgatggtcgtccatggctgacggctcgaagtgcggatagggccgcggtgcgcctcagggcgctctggctgcatgccgctggcttcgtcggtgtttattgtcgagtctgcgctggcggctggcgtgcggcgggcagcgcgcgtgcagccgccgtgtcccgctggctgcttgtggtcgatgtgacgcgggacttgtggtgtctcctgcggccgactatgtcatgaaggccactagtcattcgagcagacgttgcaggcatcatctatccatacttccgatccgcggcgcgcttgtgagcttcggagtcccaaaggagattgttgcttcgcttgctattccgttgcaagtgacacagcgtgaacgcattgaacggatttacaccacgcactatgcgctgcgtgttgtctttgtgatagccaagcagagtgacagagcgagcctttttcatagagcctagagaggaattggcccttgagatcccttgggccccacctccgtctactttggttgcgtgtcccttgacggtcgagcgtcgtgtattgcaagctcgagtagctctggagcgcaacttacccttgcacgcgaggacacggcatccgagtggccaaggcgccccccttgcagttgtcggtagccgtgtgccaaccgcttgcgggcgagcctagacagcttcatagtgccatgtcgtccactgctcctgcctcgctccatctccgtcgtgtccttacacgcgcctgacattcctggtctgatgggcgccccgcaggggcaaaaggtctcgtcaccagtgccgaggtggaattgagtgttccctccggtgcgcagtgtccctgaaggctgcaacctcagagggtccagacccgagttggttccgatacaccaggttgtgtcccctctagcaggcgtgtcgcgccctttccgcggggcttttgtgccccgttgaattggtttgccccgttggttcgggccctcgccacgggggcttattgggtcgagagcaggcctgggttccaaggaatatcattccgccaggccacttctcaccctggctgaatccccgttcctcccctgttaaagttaccacttgaaagctccgattccgccggattcctgttcctgggggccggaaacttcactggggggcgtccatg

SEQ ID NO: 705793 - DNA, 295 bp, Homo sapiens
ggaaccttaaacttggctttcccagccttcagcctgagtctagcatgtttctagctccccagtcccttgtgaagccttgaggctggcagaagggttaggaggttgacctctagataccctctgtctttgccttcttttaccctttcctcaacctcctcgacttggcctaattgtggtcctagttctctgtctgacctattaaggcaaaggactagctatttgctagatcattgctggaaatgactagagagcagagagaggttccagagtgctaggtttggagtgaggcagaagt

SEQ ID NO: 705794 - DNA, 90 bp, Homo sapiens
gctgagccccactgtttacaggaatccagagagtttcaaggaacagttcgttcgcaagacccgcgagaaaacggtggaacccataggttg

SEQ ID NO: 705795 - DNA, 135 bp, Homo sapiens
ctgagatgacagtcggctacatcggcgtcatctgcggggaaacgccatatcgggggcaccgattattagggtgaactagtcagttgccaatagcctccgacttgtgatgggtattactagtgaagaagattatta

SEQ ID NO: 705796 - DNA, 552 bp, Homo sapiens
ccagtgcagctgatctttgacaagcaaacaaaacataaagtggggaaaggacacccttttcaaaaaatggtgctgggataattggctagccacatgtaggagaatgaaactggatccttatctctcatcttatacaaaaatcaactcaagatggattaagggcttaaacctaaaacctgaaactataaaaattctaaaagaaacattggaaaaacccttctagacaatggcttaggcaaggatttcatgaccaagaacccgaaagcaaatgtaataaaaacaaaggtaaatagctgggacctaattaaactaaagagcttttgcatggcaaaaggaacagtcagcagagtaaacagacaacccacagaatgggagaaaatcttcacaatctatacatctgacaaaggactaatatccagaatctacaacaaactcaaacaaatcagtaagaaaaaaacaaataatctaatcaaaaagtgagctaaggacatgaatagacaattctcaaaagaagacatacaaatagcccacaaacttatgaaaaaatgttca

SEQ ID NO: 705797 - DNA, 741 bp, Homo sapiens
  misc_feature (33)..(33): n is a, c, g, or t
gggtttgcttaggtcgcagaacggggaaccggnagccaacatgccagctcggcctcggagtctgggttatgtcgcatagaacattagtgtgacgcctcgcggagacccattgcgagaaatagtcgtcctcgagcagagacgctagaagctagagtcggcgacgtatgcggactccgcgaacaaactgtgaggtcctgcgagggctcaaaatttaacccgtggcacaagactaccgcaaaggaccgccacgggaacggactcgacgcatctgaatgaagaaggacccacaggcgtctgttcgaaggcaacgccctgctcgcggcttggctggtccgcattgggatgctggatgagggcaagatgaagctggaatacatcctgggcctgaagataagaggatcttcttagagagacgcctgcagacccacggtcgttcaagctgaggcattgggccatagtccatccaccacgctacgcgtgctgatccgccagcgccatatcagggtccgcaagacaggatggttgaacatcccgtccttcattgtccgcctgttgattcccagaagcacatcgacttctctctgcgctctcccatacgggggtggccgcccgggccgcgtgaagaggaagaatgaccaagaagggcccagggtaggggctaggggctggagacgacgaggaggaggattaagtccacctgtccctcctggctgctgactgttatcgttttcctgccaataa

SEQ ID NO: 705798 - DNA, 760 bp, Homo sapiens
cgagagattagctgaaacacagaatatagcgccatcattcgtgaaggggtttcttttgcgggacagaggatcagatgttgagagtttggacaaactcatgaaaaccaaaaatatacctgaagctcaccaagatgctatttaaaactggttttgcggaaggttttctgaaagctcaagtcagctcacacgaaaaaatccaatggatttcccttaagggcggaaacccggtctggattctctctcgcgtctcgtgtcgtgtcatattcgcggatagtatatgagtagcttctaagaagacacccatttatcatgctgtccgtcttccggaacaacaagcgaggggcttgcatgtctgcagtagatcctgtccagcatgaaaagatgtcacctttgaacatgttaaaggggtggaggaagctaaagaagaattacaggaagtcgttgaattcttgaaaaatccacaaaaatttactattcttggaggtaaacttccaaaaggaattcttttagttggacccccagggactggaaagacacttcttgcccgagctgtggcgggagaagctgatgttcctttttattatgcttctggatccgaatttgatgagatgttgtgggtgtgggagccagccgtatcagaaatctttttagggaagcaaaggcgaatgtccttgtgttatatttattgatgaattagattctgtggtgggaagagaattgaatctccaatgcatcaatattcaggcagacataatcaatc

SEQ ID NO: 705799 - DNA, 482 bp, Homo sapiens
  misc_feature (318)..(319): n is a, c, g, or t
accctacgccagaagcctcttaccctgttatccatccctgctgtgcacctaaggtgcaccccatgccctatcagctgtggccacatataggaaccctgcaccggagctatgcatgcctactgtgaggacttgaaagaccttggctttgcgcacgccaacaggctcttccaaccagtgcctttcctccaaatgatatggcgatgttttgctttcccaggtcgatcttaagccattcccaacaaggagtggacatccttgtgtgaaaaacactgtttttcttgctccagtcacgtctccttgcctttcttgtcttttggnnggagtgtgcagaagcagaggtgcaggaaatgttgaaagggatcacattctaagaatgtagttataatggcctgaagaattcaagagaatacatggttggaagatgtgtcactttatggttacactataaaactccaaatgaaaaataaaatatcattcatact

SEQ ID NO: 705800 - DNA, 667 bp, Homo sapiens
  misc_feature (387)..(387): n is a, c, g, or t
  misc_feature (446)..(446): n is a, c, g, or t
  misc_feature (492)..(492): n is a, c, g, or t
  misc_feature (532)..(532): n is a, c, g, or t
  misc_feature (553)..(553): n is a, c, g, or t
  misc_feature (589)..(589): n is a, c, g, or t
  misc_feature (635)..(635): n is a, c, g, or t
agtttgaccatgaggtgaggttcctataaaccttttataaccctttacaaatttttgttaaagagcagatcaatacattaagaaaaccctgttatgctttaattccaatgcttgatttacggaaaaaccaaatcatacccttttgaatttagttgatctcaaatgaagtttcttttacaagattaatttttaccaacctttcacaacttctttaaacctttagctttatcttatctgatttaaaacaattctttaaccctctaaactaggcaaaaatttatattcccaagccttcttataatattttaccaaaaatatattttactttctttacacaccttgcatgtaaatctatttttagtagtcccaattatgtgttataatggnaactcttagcaatttttaattttagtggaaaacccgggaagctgttttaattatgtacnaggtgcagctaagatctggacactttccagtataagtaagaggggntagttaactccacaagtcccaagggcttaccaaactggtnaagcagacaagccgaacaggntttcaaaaatccaaagaaagcagtttatgaccttanagcatttagcaaacctaatatccgaacataatttagaccacaaggntttacattttgaagacatttgtattttaccaa

SEQ ID NO: 705801 - DNA, 167 bp, Homo sapiens
aaagttttattttacattgggattttacatttaaatataactttttttaatgctattttatgaaagatattggtaataaacttgatggggttgtattttggttaatcttccatgaattgaaataatggttttttttaaagcaaaataaagttttttaaataaatgtt

SEQ ID NO: 705802 - DNA, 277 bp, Homo sapiens
aaagttaaattttggctggcatggaggtacatgcctgtagtcccagctgctcgggaggctgaggtgagaggattgcttgagcgcaggagttcaaggctgcagtgagccatgattattgccactgcactctagcctgggtgacagagagagaatctgtctcaaaaaaaaaaaaaaaaagggaaaaggggtatgggtttggaaactagataaatctatgtaaaaattcgggaataaacggggatggttaaattatttcttcattaataaaaggaggata

SEQ ID NO: 705803 - DNA, 142 bp, Homo sapiens
tcgcaggacccgaacacgatacggacacacacagaggagccaaaccaaaccccgaacaacgggaggcaactccgacggcaaccgagtggttagggctccccagacaccatgacggtcagggcctcctaaaacgcctactgca

SEQ ID NO: 705804 - DNA, 901 bp, Homo sapiens
gaaatagtcttaaaatagggaaaagagtgaaagttactcttatgcatgggagtgggcttaaagggttgacttccaccagctgagtacaaacaaggtgtaaagaaaaactatggataaagtatggagtgtcattgagcaatatgttccataatgcaaatctttaatctgggttcatcagcagtcaatgcaacatccacccaataagacaacgattcccatttcatcttggatcttctgtggttcagcagcaggagtcatggtctagctcatgtacagccagccttgcacaggcaaccaacgtcataaaggaatgacccttacaacaaggtagcttacgtataacctgggtagtattgggcacacaggtactctgaacgagtgacactgcagaacctcagcttggctgtgtttgtacaatcttgtcccacatggaccctacacctttaggtacgaactatgcagatcataatataagtccacgtaagaaaagcacaaatgtgcctctgcacatactgttgcatactctctggattatactgcatgcgcacacgtctacccctgccagagctgcgactgcgggtgtggaaaaatacgaggttaaactgcaactacacttgggtccggtatacacggatgtcaatttatggacatggaacgcgatgtgttatcgaatgtacctctcagacttcacagatgattaacgttatggtaatgatttacacttgggcacttggggaataccacagttacgaaagttacgagcgaatcgcattacgttaacagaccaacaccacgatgggattgctcattaaaagccccctcatgttcactggtaatggaacagctaactagcccagtaacattgtgaagcgaatattattgacgatagagcagatatagg

SEQ ID NO: 705805 - DNA, 440 bp, Homo sapiens
  misc_feature (176)..(176): n is a, c, g, or t
  misc_feature (317)..(317): n is a, c, g, or t
  misc_feature (324)..(324): n is a, c, g, or t
  misc_feature (330)..(330): n is a, c, g, or t
  misc_feature (343)..(343): n is a, c, g, or t
  misc_feature (345)..(346): n is a, c, g, or t
  misc_feature (379)..(379): n is a, c, g, or t
  misc_feature (388)..(388): n is a, c, g, or t
  misc_feature (420)..(420): n is a, c, g, or t
  misc_feature (423)..(423): n is a, c, g, or t
  misc_feature (426)..(426): n is a, c, g, or t
cctggagctaccaggctcctcagtcatcagggtccctcccaacactaaggctttcctaggcaggagctgggctgagccacccggggggcagagcctgaagagaaactgactgggctttcggggtcggggcagagggaaccccacggacatggatcccacactggaggaccccaccncgcccaaatgcaagatgagaagatgctccagctgcagtccaaagcccaacacccccaagtgtgccatgtgtgatggggacagcttcccctttgcctgtacaggtggagaagccgaggacaggctcagggaaccggagaccnagaaggngctgtnctcttcactgcangnnccctggaccagtgccggccctgatcatgcagcncttccaggnccactgcttcttcctgtccactaggccacagncgnccnccaggcccactatg

SEQ ID NO: 705806 - DNA, 242 bp, Homo sapiens
ctcccctgacgtctggtgtactcctccagccggaagcagcagaatgtggaccaggcggtggccactgctgcaagggggaggggctgatgcgtgacgggcaccgtgtgctatgtgagggaacggcggaggacccgggagcggctaggtggccatggcatgtgaagcttcagtggcggtatcgatatcctagtctccaatgctgctgtcaaccctttcttgggaagcctattggatgtcaccga

SEQ ID NO: 705807 - DNA, 555 bp, Homo sapiens
  misc_feature (9)..(9): n is a, c, g, or t
  misc_feature (25)..(26): n is a, c, g, or t
  misc_feature (34)..(34): n is a, c, g, or t
  misc_feature (38)..(38): n is a, c, g, or t
  misc_feature (43)..(43): n is a, c, g, or t
  misc_feature (49)..(49): n is a, c, g, or t
  misc_feature (55)..(56): n is a, c, g, or t
  misc_feature (65)..(65): n is a, c, g, or t
  misc_feature (68)..(68): n is a, c, g, or t
  misc_feature (73)..(73): n is a, c, g, or t
  misc_feature (92)..(92): n is a, c, g, or t
  misc_feature (127)..(127): n is a, c, g, or t
  misc_feature (132)..(132): n is a, c, g, or t
  misc_feature (140)..(140): n is a, c, g, or t
  misc_feature (145)..(145): n is a, c, g, or t
  misc_feature (147)..(147): n is a, c, g, or t
  misc_feature (152)..(152): n is a, c, g, or t
  misc_feature (155)..(155): n is a, c, g, or t
  misc_feature (162)..(162): n is a, c, g, or t
  misc_feature (174)..(174): n is a, c, g, or t
  misc_feature (194)..(194): n is a, c, g, or t
  misc_feature (212)..(212): n is a, c, g, or t
  misc_feature (221)..(221): n is a, c, g, or t
  misc_feature (230)..(230): n is a, c, g, or t
  misc_feature (242)..(242): n is a, c, g, or t
  misc_feature (273)..(273): n is a, c, g, or t
  misc_feature (279)..(279): n is a, c, g, or t
  misc_feature (284)..(284): n is a, c, g, or t
  misc_feature (286)..(286): n is a, c, g, or t
  misc_feature (293)..(293): n is a, c, g, or t
  misc_feature (296)..(296): n is a, c, g, or t
  misc_feature (309)..(309): n is a, c, g, or t
  misc_feature (318)..(318): n is a, c, g, or t
  misc_feature (329)..(329): n is a, c, g, or t
  misc_feature (333)..(333): n is a, c, g, or t
  misc_feature (346)..(346): n is a, c, g, or t
  misc_feature (369)..(369): n is a, c, g, or t
  misc_feature (390)..(390): n is a, c, g, or t
  misc_feature (417)..(418): n is a, c, g, or t
  misc_feature (421)..(421): n is a, c, g, or t
  misc_feature (435)..(435): n is a, c, g, or t
  misc_feature (437)..(437): n is a, c, g, or t
  misc_feature (441)..(441): n is a, c, g, or t
  misc_feature (470)..(470): n is a, c, g, or t
  misc_feature (472)..(472): n is a, c, g, or t
  misc_feature (486)..(486): n is a, c, g, or t
  misc_feature (524)..(524): n is a, c, g, or t
tggaaaaanaagtttatttgtaaanntagtcaanaaanaaaantgaccnaaaaanntcagtaaanttnaaaancactgggaaggccaacccnaaaaaaaagaattccccaggacagtaaccagaagnaaccnaacccaanaccancnaaatnggnagagggncagggggcgggngttttgggccccccccccanaccaagtttttaaaaaanaaaagccanaagaaaaanaaccccgggacngtttccccagcagaggagaaaaacccaaccnagtaangagancnaccacanaanaaaaagaaaagcngccccaacnagtcagaatgnaagnaaaagaagaggcnggggggaaaaacccgttttttcnagagccccaataaaataaaancccccagtaagtgtttgcattatcagnnagngggtaaaatgtggnanaatnagggcttatgcaagggataaatgcgcctngnattttactactatnagaacaagttcagttagaagaaaaccaactgggctttnaattacacaaaccttaatgacaagactcccc

SEQ ID NO: 705808 - DNA, 291 bp, Homo sapiens
tttttcctgggaaaaagcccggggggccccccccacttgtggggagaaaggtgtccttctttttttttcggcagaggaggggaaattagcccttccccccgggtttaaagggggggcccaaattcccgggggaaaaagggggcggggggtttttccccccaaacaaccccggttcggccccgggtttggtaaaaaaaaagggggtttttaggggttgtttttttttgtccccctttgggaaaaaaaggggtcctgtggggtgggggttttttttaaagggcccttttttta

SEQ ID NO: 705809 - DNA, 541 bp, Homo sapiens
atagagaatttgagcgtgagattacttaagaggctatgagatatatatgtcctgaaggactagggctcacttagttctgaagccccaggaggtagccaggttacaatgggagagtcatgagcgtgaagagtcagagtctgctgcctgtgtgttcagtgcagcctgatctccaagcaagcttctgcttccctcatttcctccatgggaacctgcactacctaacatctccttgtttggggcaagaggtgtgtttccttggtttccgtgttcttagaggacctctgttcttatatctaaaagagactaattcaactgtccttcttggtgtcgaatttagagtgccacatgtttggctctattcttggaaaaaatcatctaacattagaacataattttataatttacagagtgctttaatgtatattatgccatttgcttctcacagcaacctcgctctgtgaagtttctttatttcctctacgtgggaaatttctctcttacacacttcttgatcattttcatctctcctttcacaggcaaa

SEQ ID NO: 705810 - DNA, 333 bp, Homo sapiens
ggggggggggggccgaagggaaattttccccttgggcccaaatttaccgttgaaaaatttaaaaaacccaatcggcccgggtttccgggggttaaatttcccggaaagggtttccccctttgaattgggcctttagggttaaaaaccaaaatttccccccccccccttttacccggggggggaaaaaattttttccaagggcccaaaggtttttgggcccaagggaaagttttttttgtaaaaaattttggccccccttttggccaaaatttttcccccccgggccatttttaacccgggttagggcccaaaaaattttttatttttttccca

SEQ ID NO: 705811 - DNA, 137 bp, Homo sapiens
tctagcaggatctgatctggacacgtcagaacatcaacaagatcttggtctccaagcggtcaatccagttcctggcactcctcctctctctagctggataagtagccagctacttgctttggaaaaagggggaaaaa

SEQ ID NO: 705812 - DNA, 279 bp, Homo sapiens
gcactgtcatccaacactttgagcaggcccgaggctgtgcaatctacttgaggccaggagttcgagaccagcctgacaagatggtgaacccctgttactacaagaaatataaaaattagccgggcatggtgacacatgcctgtagtcccagctacttgggaggccgaggcaggagaatcacttgatccctggacggcggagggatttgcgggtgaagccggagaatctcggccaattgcattcccaggccgtgggttgacagacggggaggacctcttg

SEQ ID NO: 705813 - DNA, 536 bp, Homo sapiens
gtcgacaagatttcgaaagtcaaggaagactgagcaactagttaaaatgaagagcccagagcagccatgacagacagcatgggatagcacagcacagacagcacagaacagcacagacagcacagcacagcacatcacagacagcacagcacagcacagacagcacagcaaagacagcacagcacagcacagcacagcacagacagcacagcacagcacacacagcacagacagcacagcacagcacagcacagacagcacagcacagacagtacagcacagcacaacacagcacagacagcacagaaagcagaggacagcacagcacagcacagacaacacagacagcacagcacagacagcacagcacagacatcacatacagcacagcacagcacagcacagcacagacagcacagcacagcacagacagcacagcacagcacaggcagcacagcaaagacagcacagcaaagcacagcacagaccgcacagcacagcacagcgcagcacagcacagcacagacagcacagaa

SEQ ID NO: 705814 - DNA, 227 bp, Homo sapiens
tcgctattcatcggcaccagggatgataaacaactcagaattgtttgggtggggcacggtatggggctcatgcctataatcccaacattttgggaggtcaaggcaggagaatcgcttgagagcagagagttgaagaccagcctgggcaacattgtgagatccccatctctacgaaaataacattaccacaatagttagacatggtagcaggtgccgatcaatagcga

SEQ ID NO: 705815 - DNA, 116 bp, Homo sapiens
gccctgatgttccactgcagtgtctgtgacaactgtgtggaggaatttgatcatcactgcccctgggtgaataactgtattggtcgccggaactaccgttatattttccgttttcc

SEQ ID NO: 705816 - DNA, 783 bp, Homo sapiens
cgcggtggctcacgcctgtaatcccagcactttgggaggccgaggcgggcggatcacaaggtcaggagatcgagaccatcctggctaacacggtgaaaccccgtctctactaaaaatacaaaaaattagccgggcgtggtagcgggcgcctgtagtcccagctactcgggaggctgaggcaggagaatggcgtgaacccgggaggcggagcttgcagtgagccgagatcgcgccactggactccagcctgggcgacagagcgagactccgtctcaaaaaaaacaataataataaagactttaaattataaaaaaaccagacgggttggaagtttggaggcttcaaagtgggggtggagtaagattactggtaaaaggattctaagacgccttacacagggttctccaaggggacagattattcggaatatcagattaagaagacaatatttctatgaaacggcgggggcactaacagtgactgtttggccaagcaactcaggggcaatgcaagggcccaaaaatgccctgcaggctcttgggaacttcttgcccgaaggtgtgcccatctaattcctaatctctccaaggaaggtcacagatggactctccaacgacacgtcgcgggcgcaatcgggtcctggccaatgtgtacattcgccgggtcaaaatgggccaaaacgcctccgggtccaccttggtggcctaagggggaccaggatctttgcctcggtgaacaggataataacacccaggcattggtaaggtaacccttggaaccgtg

SEQ ID NO: 705817 - DNA, 465 bp, Homo sapiens
gcatcccccaccccgtaattagcatcgtttagttcacaaaacctttcctgggagaaatctgttctctcgttccggggctcggttcagcacctgattccgccgggtgaagcgaataaatcactgcggcggcgggggagccggacccaagcccgccagacggtggccgccgggagaacgaaaaagtgagaaagaggcagcggagccaggaaaaatgatgcagggagacggcgcaatcctagcccaggaagagtgaggggcccgggaagggaaacccagaggcagagaaggggccaaaatggaagagggagatacagaaagagacagaagagaacaagaaggagagtgccaaggaaaagcgaacgaaaagaaagggaaaatgaggaagggaaataagttaaagaaacaagagcgaagagggagattaagaaggaagggacaggcgaataaagaaaataaaaaaaaaaa

SEQ ID NO: 705818 - DNA, 364 bp, Homo sapiens
gaccaccactgcactccagcctgggagtcagagcgagactccgtctcaaaaaaaaaaaaaaataaaaaaaatcagacactggtgcaaagtgctatattaacatttgtgcttgccgcatgcagtggctcacgcctgtaatcccagcacttggagaggatgaggagggtggatcacttgaacccaggacttatagactagcctaggcaacatggaggaaccccatctctacaaaacatacaaaaattagccaggcacagtgatgtgtacctgtagtcctagctacttggtaggctgaagtgggaggatcgcttgagcctgggaagttgaggctatagtgagccaagatcatacaactgcactgcag

SEQ ID NO: 705819 - DNA, 117 bp, Homo sapiens
  misc_feature (85)..(85): n is a, c, g, or t
atttaattgcattgaaaatgtcatcctttctgttgttagataattggggtcttcccctgatatccaaccgagaaattgcctccantgggagagtgtgtcatccagcttttcatgttt

SEQ ID NO: 705820 - DNA, 225 bp, Homo sapiens
tttgccggtcgcatctcgcggctaccccccggtcagctaggccactctgctattcctgcctgtttttcctcccacaatttgtgtcccccccactgtgctcaggccagtttccactggggtggggttcacagttccaggtccagtccagttcagcagcagcacaacattgtcatgctccagctccgggtcccgcagctcgcacattcagtactccatggtcctcag

SEQ ID NO: 705821 - DNA, 2399 bp, Homo sapiens
gtcaaggactcattgtgggtgcccaacatgatgtcctacagcgagagattggggggaccggctgtctccccacttccagtccgtgggagacacatggtgcatggggcaacctttgcttatgtgcccagcccacaagtcctgcacaggattcctggaacatccacctatgccatctccagtctgagcccggtcaccctcacagagcacagctgtccctgtggggaagtcctggaatgtcatgacccactacctaccaagctggctcaggaagaggagcaaaagccagagcccaggctgtcccagaagcttgcccaggttggcacgaagctcctgaaggtgcctctgatgctggctttcctttacctctttgtctgctccctggatgtgctcagctccgccttccagttggctggagggaaggtggctggggacatcttcaaggacaatgccatcctatccaacccagtggcagggctggtggtggggatcctggtgacagttctggtgcagagttccagtacctctacatccatcattgtcagcatggtctcctccggcttgttggaggtgagctccgccattccgatcatcatgggctccaacatcggaacctctgtcaccaacaccattgtggccctgatgcaggcaggggacaggactgacttcaggcgggcttttgcaggggcgaccgtgcatgactgttttaactggctgtctgttctggtcctactgcccctggaggctgccacgggctacctacaccatgtcaccgggcttgtggttgcttccttcaacatccgaggtggccgtgatgcccccgaccttctcaaagtcatcacagagcccttcacaagactcatcatccagctggacaagtctgtgatcaccagcattgccgtgggggatgagtccctgaggaatcacagtctcattcggatttggtgtcacccagacacaacagaggcttccacttctatgtccagggtagaggccatcggcagccttgcaaacaccaccatggagaaatgcaaccatatcttcgtggatacggggctgcccgacctggccgtggggctcattctgctggcgggctccctggtggttctctgcacttgtcttatcctccttgtgaagatgctcaactccctgctcaagggccaagtggccaatgtcatccagaaggtcatcaacacagactttcctgcccccttcacctgggtcacgggctactttgccatggtggtgggtgccagcatgacctttgttgtccagagcagctccgtgttcacctcagccatcaccccactcattggcctgggtgtgatcagcattgagcgggcctaccctctcaccctgggctccaacattggcactaccactacagccatcctggcagcgcttgccagccccagggagaagctatccagctcatttcagattgccctctgccacttcttcttcaacatctcgggcatcctactgtggtacccgctgccctgcacacgcctgcccatacgcatggccaaggccctgggcaaacgcaccgccaagtaccgctggtttgctgtcctctacctgctcgtgtgcttcctgctcttgccctcgctggtgtttggcatttccatggcaggctggcaggctatggtcggagtgggcacgccctttggggctctactggcctttgtggtgcttgttaatgtcctgcagagccgaagtcccgggcacctccccaagtggctgcagacatgggacttcctacctcgctggatgcactctttgcagcccctggatggccttatcacaagagccaccttgtgttatgccaggcccgagccccgttcaccccaacttccccctagagtcttcctggaggagcttcccccagccacgccctccccccgcctggcactgcctgctcaccacaatgccacccgtctctaggctacaggccccgactactgcctggaacgaggagtggtatttttacaatgcccacagtagaaagacagagcatgtgtgtgtgtgtgcacacatgtgtagatgcgtgtcacttgaggtacatgcttttgtgccacccttgggtacctgtgcatattaagggccacagtggcatgggcttttgtaattaagaggtagtgtgcacaaatacatgctaggtactgagcctgtgtgaccattagtgcgggtgtaatgtgagtacactgtgtgggtacaggggggtgcagatgcctagggagtctccaaacttttctggaaagagtcagctataccctctcatcttctcacaactcttgtaccaacaggagggacagaagaacagctggccttctgtatacatgggccttacttctgccaattctgctaactgtgcatagaaaaaaaaagttgaaagttgcatc

SEQ ID NO: 705822 - DNA, 189 bp, Homo sapiens
ggatcccctccccccgttttggccgggaaaacccccccggtcccgaaggttttgggggttcccgcctccctcaggtccccgggggttcccgggggcaacccccgaatttttccggaggcccggtcccccccccccaggcggtttcccccccgtccttcaaatcaattttttccccccccgcgccggcca

SEQ ID NO: 705823 - DNA, 315 bp, Homo sapiens
gccccccccccccccgggttttgggttttgggggggggaatttgcccccccgcaaatttttgagccccccctgcccgggggcccccccaaggggggcccccgaaaggttttttggttccttgggcccgaggggggccccccccccaaggcccggggcctagggctggctccggcccggggggggcaaaaaagggccaagggggggggtggggcagggccctgcccccctcctgccctttccccccccccccgtttttccccccttggttttgaatttttgttttttggccataaaccaaaaatccccccttggga

SEQ ID NO: 705824 - DNA, 2162 bp, Homo sapiens
gtcaaggactcattgtgggtgcccaacatgatgtcctacagcgagagattggggggaccggctgtctccccacttccagtccgtgggagacacatggtgcatggggcaacctttgcttatgtgcccagcccacaagtcctgcacaggattcctggaacatccacctatgccatctccagtctgagcccggtcaccctcacagagcacagctgtccctgtggggaagtcctggaatgtcatgacccactacctaccaagctggctcaggaagaggagcaaaagccagagcccaggctgtcccagaagcttgcccaggttggcacgaagctcctgaaggtgcctctgatgctggctttcctttacctctttgtctgctccctggatgtgctcagctccgccttccagttggctggagggaaggtggctggggacatcttcaaggacaatgccatcctatccaacccagtggcagggctggtggtggggatcctggtgacagttctggtgcagagttccagtacctctacatccatcattgtcagcatggtctcctccggcttgttggaggtgagctccgccattccgatcatcatgggctccaacatcggaacctctgtcaccaacaccattgtggccctgatgcaggcaggggacaggactgacttcaggcgggcttttgcaggggcgaccgtgcatgactgttttaactggctgtctgttctggtcctactgcccctggaggctgccacgggctacctacaccatgtcaccgggcttgtggttgcttccttcaacatccgaggtggccgtgatgcccccgaccttctcaaagtcatcacagagcccttcacaagactcatcatccagctggacaagtctgtgatcaccagcattgccgtgggggatgagtccctgaggaatcacagtctcattcggatttggtgtcacccagacacaacagaggcttccacttctatgtccagggtagaggccatcggcagccttgcaaacaccaccatggagaaatgcaaccatatcttcgtggatacggggctgcccgacctggccgtggggctcattctgctggcgggctccctggtggttctctgcacttgtcttatcctccttgtgaagatgctcaactccctgctcaagggccaagtggccaatgtcatccagaaggtcatcaacacagactttcctgcccccttcacctgggtcacgggctactttgccatggtggtgggtgccagcatgacctttgttgtccagagcagctccgtgttcacctcagccatcaccccactcattggcctgggtgtgatcagcattgagcgggcctaccctctcaccctgggctccaacattggcactaccactacagccatcctggcagcgcttgccagccccagggagaagctatccagctcatttcagattgccctctgccacttcttcttcaacatctcgggcatcctactgtggtacccgctgccctgcacacgcctgcccatacgcatggccaaggccctgggcaaacgcaccgccaagtaccgctggtttgctgtcctctacctgctcgtgtgcttcctgctcttgccctcgctggtgtttggcatttccatggcaggctggcaggctatggtcggagtgggcacgccctttggggctctactggcctttgtggtgcttgttaatgtcctgcagagccgaagtcccgggcacctccccaagtggctgcagacatgggacttcctacctcgctggatgcactctttgcagcccctggatggccttatcacaagagccaccttgtgttatgccaggcccgagccccgttcaccccaacttccccctagagtcttcctggaggagcttcccccagccacgccctccccccgcctggcactgcctgctcaccacaatgccacccgtctctaggctacaggccccgactactgcctggaacgaggagtggtatttttacaatgcccacagtagaaagacagagcatgtgtgtgtgtgtgcacacatgtgtagatgcgtgtcacttgaggtacatgcttttgtgccacccttgggtacctgtgcatattaagggccacagtggcatgggcttttgtaattaagaggtagtgtgcacaaatacatgctaggtactg

SEQ ID NO: 705825 - DNA, 351 bp, Homo sapiens
  misc_feature (79)..(79): n is a, c, g, or t
aaaacaattagtaagtatttatacatcttaaacattaggaaaggggacagtaaaaacacagcattatggccaaggtgcnggttgtcacgcccgcaatcccagcaccctgggaggccaaggagggcggatcacccgaggtcaggagttcaagaccagcccgaccaacatggaaaaaccccgtctctaccaaagacacaaaaccagccggttgcggtggcgcaagcctgcaatcccagccaccagggaggccgaggcagaagaatcgcccgaaccagggagcggtggccgcggcgagccaagaccgcaccactgcaatgcagcctgggcaacaagagcaaaaccccgtcccaa

SEQ ID NO: 705826 - DNA, 112 bp, Homo sapiens
ctcgtctagaggatccagcactgtgacgctccttggtagcataaacacagtgcagatctaatggttgaattttttttgttgttatttaaagtcaaggtctcgctcctgtcgc

SEQ ID NO: 705827 - DNA, 581 bp, Homo sapiens
taatggagagagaccactgagggaagggtcttttttggaatagggagaacataattatgtttataaacaggtgggaaagcaaccaggaaagaaagcagcaagggagaaggaaacataaaaacaaaaagaagaaacaaaaaagggcagaagcaaacttttttttttttccccaattggaaatagtttggctgaaagcacttttttgggtagggtgtataaatttcctagggctggctgctgctggctgtaacaaatgtaccatcaactgggtaggcgtttcaaacagacaatggtattggtgctcacaccttctgggaggctagaagtctacaaatcaaggtgttggcagggccttgatccctttgaaacctgtagggaatcttttttggcctcttcctagcttcggggggtatggcgggcagtcacgggctcttctcagatctacaaattctatgactccggtgcactaatagacggtatcattacagagtccatatccttaaagggacacttacttacagtctttactgctcgggcctatagcctgcaagtgggtgtccatattcatcatcatcatgtga

SEQ ID NO: 705828 - DNA, 161 bp, Homo sapiens
  misc_feature (53)..(54): n is a, c, g, or t
gactctacaggatccccctgctccgcccctctctgtcagcaccatctgctccnncctgctcataatccttctcaagggcagccaggtccttatgtccctctgaaaactcgcccccctccatcccctcacccacgtaccagtgaacaaaggcacgcttgtca

SEQ ID NO: 705829 - DNA, 106 bp, Homo sapiens
  misc_feature (81)..(81): n is a, c, g, or t
ttggcaagagggtgagaatattatatttcgatgtgtggatacgattatccgcatactggaacttttcattatattcacggncattggctttcactatccgttccac

SEQ ID NO: 705830 - DNA, 232 bp, Homo sapiens
tggccggccaatctccatgctaccagtcgaaaggcacatatatccacacatgcacacacagcacacacacaaacgcacagcacacacaaacgcacagcacacacgcacacacagcacacacacgagcacacagcacacaaacgcactgcacacgcacacacatgcacacacagcacacacactagcacacagcacgcacacaaagacacagtacacatggaatgcacacaca

SEQ ID NO: 705831 - DNA, 253 bp, Homo sapiens
agaggatccgtgagagtactcgtggtctgagaataggccatctgcgctgtgtgccgcaccagcctcaacggggcagtacagtgcgtacgtgagatgagtgtgctacttcactggcacatcacagatgtctcctcgtgatcgtgtatccagcggaaagagtatgtggcagcagtgcgcctggagcgatgtgtgctgacctgtgagctatgccgggcctgggcagagtgtgcgctggaccaaggatggagaggag

SEQ ID NO: 705832 - DNA, 419 bp, Homo sapiens
  misc_feature (102)..(102): n is a, c, g, or t
  misc_feature (117)..(118): n is a, c, g, or t
ggcacaaaaaccaatctcaggggctccacccagtggcagcagggtcaattttggggccaaaacccatgaagtcagcattatccccaaggatattattgaatncccaaataaaacganntgaaacatatttctccaaaaccttcccaagaagtcgactgttttctttagtaggctaactttttaaacattccccaaaaggaagggcctgcgggttccttttttaaaagctttgtgggttgattttttttcttttcttttttgcgccatttttaattgcagtttaaaagtgaatggtaaaagaacctcagcattgtgcccgataaaagaatgggccaggatttcagggttttacattttatctgtaaaatgtgacttttttttttttttttatcccaacaaaagtaaaatgttgctttgta

SEQ ID NO: 705833 - DNA, 993 bp, Homo sapiens
gacgtgttcggggagcaggccaccttgtggggtggccaatccgggacgggaatcttaaacttttaactcttggtgcaaagactgatccactggcggctttacggtgagcgggaacacacacagtcatgtgaagcttgcccaggtctcgagaccgaggtcacgaggttcagcagcctgccggctcccatttggcacccatagacgcagcagtgttttgcccgccaaaactggcaggacctccagcaattgagattcttgggtgtgcaccaggcctttcacgcgtcattcagccggcgttcctacaccaggcactgcaatcgaccctacacttgaggaccagcttatagggtcagggagaattggtgccatggaagtgagacctgctctctgctttcaaggctccagctgtatccactacatgtgctcaagggcaaaatcctctcatcctaggtcctcaggacttcttcatctggcaagaatgaccaggactggcggcgtccccggacggctagccggtacctaaaatgggttggaaaggccaagcaagccccctggaactcaggcaagcttcagccaatgaacaggagcacgaagccagggaagggccccggggcataatcggagcgaaggcaggatagagaaaggcaagaaaacgaagggcagggtgagacactttcaagagagaattggatgtctggggaaaaatacatgagaaaggaaattccccaagaaaacaggggacagggacaatgtggacaacgaccatacagataagaaagcagccggtcacagtatactcgcgaaaggcgacgacacggagcaacatttggcgcatgtgggcccataaagatgccaagaaacgggtgcgccaaacaaacgggaccatggcaccacagggacaggtggaaaggacacaaggacaagcactacggtgtgacagacacacgaggagaaaagacgacccgggaaaagcggggaggtgcgaaccaacgg

SEQ ID NO: 705834 - DNA, 895 bp, Homo sapiens
  misc_feature (52)..(52): n is a, c, g, or t
  misc_feature (64)..(64): n is a, c, g, or t
  misc_feature (67)..(68): n is a, c, g, or t
  misc_feature (79)..(80): n is a, c, g, or t
  misc_feature (100)..(101): n is a, c, g, or t
  misc_feature (114)..(114): n is a, c, g, or t
  misc_feature (120)..(120): n is a, c, g, or t
  misc_feature (135)..(135): n is a, c, g, or t
  misc_feature (137)..(138): n is a, c, g, or t
  misc_feature (141)..(141): n is a, c, g, or t
  misc_feature (145)..(145): n is a, c, g, or t
  misc_feature (147)..(148): n is a, c, g, or t
  misc_feature (150)..(150): n is a, c, g, or t
  misc_feature (154)..(154): n is a, c, g, or t
  misc_feature (175)..(176): n is a, c, g, or t
  misc_feature (180)..(180): n is a, c, g, or t
  misc_feature (185)..(185): n is a, c, g, or t
  misc_feature (188)..(188): n is a, c, g, or t
  misc_feature (199)..(199): n is a, c, g, or t
  misc_feature (202)..(202): n is a, c, g, or t
  misc_feature (230)..(230): n is a, c, g, or t
  misc_feature (244)..(244): n is a, c, g, or t
  misc_feature (262)..(262): n is a, c, g, or t
  misc_feature (275)..(275): n is a, c, g, or t
  misc_feature (278)..(278): n is a, c, g, or t
  misc_feature (302)..(303): n is a, c, g, or t
  misc_feature (306)..(307): n is a, c, g, or t
  misc_feature (309)..(310): n is a, c, g, or t
  misc_feature (312)..(312): n is a, c, g, or t
  misc_feature (317)..(317): n is a, c, g, or t
  misc_feature (323)..(324): n is a, c, g, or t
  misc_feature (327)..(328): n is a, c, g, or t
  misc_feature (332)..(333): n is a, c, g, or t
  misc_feature (346)..(347): n is a, c, g, or t
  misc_feature (349)..(349): n is a, c, g, or t
  misc_feature (351)..(352): n is a, c, g, or t
  misc_feature (357)..(357): n is a, c, g, or t
  misc_feature (360)..(360): n is a, c, g, or t
  misc_feature (391)..(391): n is a, c, g, or t
  misc_feature (397)..(397): n is a, c, g, or t
  misc_feature (401)..(401): n is a, c, g, or t
  misc_feature (404)..(404): n is a, c, g, or t
  misc_feature (410)..(412): n is a, c, g, or t
  misc_feature (415)..(416): n is a, c, g, or t
  misc_feature (418)..(418): n is a, c, g, or t
  misc_feature (440)..(440): n is a, c, g, or t
  misc_feature (445)..(445): n is a, c, g, or t
  misc_feature (452)..(452): n is a, c, g, or t
  misc_feature (459)..(459): n is a, c, g, or t
  misc_feature (461)..(461): n is a, c, g, or t
  misc_feature (466)..(466): n is a, c, g, or t
  misc_feature (478)..(478): n is a, c, g, or t
  misc_feature (482)..(482): n is a, c, g, or t
  misc_feature (485)..(485): n is a, c, g, or t
  misc_feature (745)..(745): n is a, c, g, or t
  misc_feature (786)..(786): n is a, c, g, or t
  misc_feature (849)..(849): n is a, c, g, or t
cccagtgattcccctgactcagcctcctgagtagcggggattacaggcaacngggagtgggccnggnnaatttttttgnngtttttaggggagatagggnntcaccatcttggncaggcnggtgctttaactccngnnctngggntnnanatgnctcaggcgctgcccaaagggnngggnttacnggnatgagcgcacngcncccagccagatatcgagctatttcatcnccatccagccttcnaacaaaagcattaggggnaaaaaaaggggcnggngggggggggggggggggggggagnnggnnannanggggnggagcnnaanncgannaaaacgctagagnnangnntcacnggnaagaataaaacaaaaacactattaatatgcntcaatnaccnttnttaagnnnccnngnaatccttcaggtttctcccacnggggngcttaangcaaaananatggnatttataaaacntttngcnttaaaaaaatactttccaaaaaatttggacaaaatttacagtcattatgtacaaaacactacaggtctacaatttaaaacatatttgaaaaataaaacagaacatacatcccagtactgtgcagacaatatatgtgaatgctacgtaaccaagaagaaaggacagaacgagggattagaagttactggaacttccacaggaattttagagccaggcagggcttctcataaaggtttcacagaattcaggtctgataagtntcaaaggccttttgatatcttggggcaagggagagtgaganataaactgaataagaactcagaagaggaacaactagtatgcagaaattaaaaacatgtatcanggagaggaagagtatataaagtaggatgctgaaaaagagaggcaag

SEQ ID NO: 705835 - DNA, 427 bp, Homo sapiens
  misc_feature (19)..(19): n is a, c, g, or t
  misc_feature (44)..(44): n is a, c, g, or t
  misc_feature (56)..(56): n is a, c, g, or t
  misc_feature (87)..(87): n is a, c, g, or t
  misc_feature (123)..(123): n is a, c, g, or t
  misc_feature (198)..(198): n is a, c, g, or t
  misc_feature (236)..(236): n is a, c, g, or t
  misc_feature (244)..(244): n is a, c, g, or t
  misc_feature (302)..(302): n is a, c, g, or t
  misc_feature (377)..(377): n is a, c, g, or t
  misc_feature (396)..(396): n is a, c, g, or t
ccggggcaaacctcagggncctcctgaggcccaaaatttgtgcnccgtgggacaantttggtataaccatacatttattttggtaantcattctcccaaatttgaagctttattaaagggtantcctatttcccactggcttccccttaacttgaataaaatttactccccagtgccgtggctcatgcctgctgcaancccagccctttgggaggccgaggcaggaggatggcttnaggccaanagtttgagaccggcctgtgcaacatggcgagacccagtgtccacagaattaaaaattnaccacgcagctgtaatcccagccacttgggaggctgaggcaagaagatgacttgagccctggcatttggctatgntcttgccactgcactctancctggcaacagagtcagactctgtctcaaaa

SEQ ID NO: 705836 - DNA, 813 bp, Homo sapiens
tacaggcttccgggtcttaaagggggcgggggctgggggcagttcatccaaaggtggctccgaaagcttgaggtcaacctttgggggtgggcctctgtgcagggcaaaggggatggtaaggggcccgtacaggcgtggggggactcttgaaaggcggaaggaaagccccagtgggttggcagccacagcttcaaagtttggaggaggagctttccctgtggcccagtccccagagaagttttcaacaacaaggcgagggccgtggggcccaggcaaaagcttgcatggccctctgtgggggcctccttgtggcaggcgcggtttcccacaggtgggccgggagacccccagggacgctgggtgtgggtgcccaccttgggattcccgtgccacagccccttgggccggggccctcggagagacccccgggggaacgcgaaccggcaataatctccaggggcgctttacacccgaggggccctcggtgggccttcgaatttcggaactctgtggactcttcgtgccccgcggttgtgccctcgttaaggtggtttccccacacagtttccggctcgtgggcccttttttcccaagttatgtgcctgtggttgccccccccggggtccacacagatgtgatcacaggtgtttcagcggctctacattgcgggcccaaacaaagtggtcacgccgaaaagatgttccggggttaaccatgtggcgaatggggaaccgcggtggatctccaacaagatgtaattgggggaagaggtgtttgcccgttaccttctggctattgccccgaagaaaacaa

SEQ ID NO: 705837 - DNA, 130 bp, Homo sapiens
ggctgggtatcgaactcctgagctcgttgatccccccgcctcagcctcccaaactgttgggattacaggtgtgagccactgcgcacagccccccgccctttttttttggagaccacgtggggtaggaggt

SEQ ID NO: 705838 - DNA, 422 bp, Homo sapiens
agcaagccttcaggaaacatattgacggtgcctgaaacaagcaggcacactggagagacacctaacagcactgtccagtgtcgagggatttctaatcatgtccatcagatgacggcagatgctgtttgcagtcctagccatggagattctagtcacaggtttactaggtcagacatctcagctctctgcctgttgatgggaaagccatacatgtggtctggacctgtgacacgtcatacatccaccgctgttcatacaggctgatactctgtgctctcacatctcagcattcacagcacactctcaaatccctagcgcaccacacagtttacagcttacagcctacagtgctcaacattatgggaggtgagattaagccatgaacagtctctttgtaccaacctgccagcatcctattctgt

SEQ ID NO: 705839 - DNA, 459 bp, Homo sapiens
  misc_feature (216)..(216): n is a, c, g, or t
  misc_feature (394)..(394): n is a, c, g, or t
  misc_feature (399)..(399): n is a, c, g, or t
  misc_feature (427)..(427): n is a, c, g, or t
aattcggcatgaggcgtgtggacactgaggcccttcctcgagctctttaaccaaacccaacctccccaattcgccgccttccccgctcccacaaccacacgttcccgtgtgagggcttattgcctccagccagccagcgtccttcgcccccacattcacgaggtttggagccggcctcacccgcggagacggacaccgcccacccgcgcgtgcacntacgcagtcatcctgcgacctccagaatccaccggggtgcagcgaggctgtggaaagtcccacccagaacgtgaggtgaagaaggcttgggctgcgctggttctgctctgtccgggtcggagatgaactgacccgggagagcagcggagggatgtttcttttggccaacagtggggantcacntgcacgttttgcgaagaggcccacagtnctttgcgtggcgctcggactacatttcccaac

SEQ ID NO: 705840 - DNA, 103 bp, Homo sapiens
agtataagtaacctaatgtatgtaatcagaatctatactaggtggccgtcaagcgtaaactgtgtttccctattatatccctcgtggagactgagaatcaaat

SEQ ID NO: 705841 - DNA, 394 bp, Homo sapiens
tattgagacgcggtctcactctgtcaccctggctggagtgcagtgacatgatcacagctcacagcaacctccacctcccaggttcaagcaatcaatcctcccacctcagactctggagtagctgggtacaggcatgtaccaccatgcctggctaattttttaactttttgtagagacaagggtctcactataatgcccaggctggtctcgaggtcctgggctcaagcaatcctgccatgtcagctttggaagttttgggattacaggcgtgaaccactgtgcccggcctagcctgagaattctaaactggaacctggctttccagataccatggtgtattttttaaggtaggagaagagaatgtgtcctctacgcttttttaagtttggtttgc

SEQ ID NO: 705842 - DNA, 122 bp, Homo sapiens
atttcaaattaaataattttaaagttgctggcctaataagcaatgttctcaattttcgttttcattttgctgtcattgagacctataaataaatgtattttttttttgcataaagtaaaaaa

SEQ ID NO: 705843 - DNA, 731 bp, Homo sapiens
  misc_feature (4)..(4): n is a, c, g, or t
  misc_feature (67)..(68): n is a, c, g, or t
  misc_feature (71)..(71): n is a, c, g, or t
  misc_feature (73)..(73): n is a, c, g, or t
  misc_feature (80)..(80): n is a, c, g, or t
  misc_feature (82)..(82): n is a, c, g, or t
  misc_feature (106)..(106): n is a, c, g, or t
  misc_feature (112)..(112): n is a, c, g, or t
  misc_feature (164)..(164): n is a, c, g, or t
  misc_feature (185)..(185): n is a, c, g, or t
  misc_feature (202)..(202): n is a, c, g, or t
  misc_feature (227)..(227): n is a, c, g, or t
  misc_feature (230)..(230): n is a, c, g, or t
  misc_feature (247)..(248): n is a, c, g, or t
  misc_feature (252)..(252): n is a, c, g, or t
  misc_feature (261)..(262): n is a, c, g, or t
  misc_feature (280)..(280): n is a, c, g, or t
  misc_feature (304)..(311): n is a, c, g, or t
  misc_feature (313)..(313): n is a, c, g, or t
  misc_feature (342)..(342): n is a, c, g, or t
  misc_feature (416)..(416): n is a, c, g, or t
  misc_feature (422)..(422): n is a, c, g, or t
  misc_feature (479)..(480): n is a, c, g, or t
  misc_feature (489)..(489): n is a, c, g, or t
  misc_feature (491)..(492): n is a, c, g, or t
  misc_feature (522)..(522): n is a, c, g, or t
  misc_feature (526)..(526): n is a, c, g, or t
  misc_feature (535)..(535): n is a, c, g, or t
  misc_feature (537)..(537): n is a, c, g, or t
  misc_feature (587)..(587): n is a, c, g, or t
  misc_feature (619)..(619): n is a, c, g, or t
  misc_feature (621)..(621): n is a, c, g, or t
  misc_feature (727)..(727): n is a, c, g, or t
tgtnaggtcaaataaaatttaaaggaattcgcccaaaaaaaaggatttgaaattaaatataaaaacnngtngntgaaaananacagcaataccaatcccatcaagnaaaaancgtatctgtatccaaccacagcaaaaccagtcccaaggaacacagggcttgnatggcagaactgccaaaacanaaagcggtgtgcaaganctggggaaatgaacactgttaccanggngaggaaaaaataattcnnagtnttggcaggnntccctgagaaccattttnccatcttaaaagagacaaaaattnnnnnnnngnttgttttttctttttcttggggtctgttnttctcgttcctatccatacctcagcggtttacaaaatagcgctgatctcagggcatagccagggggttcaattntaaaangtcaaactagcagtgggctgggcgcagtggctcacgcctgttatcccagcacttttnngtggccaangnnggttgtctgcttgttccaggagttcgagancaanctggtcaananagggagaccctgtctctacaaaaaataaattagctatgcatggtggtgcncgcctgtggtcccagatacttgggcggctggngnagtgcccacagcgtcaaggcttcagtgaaccttgatcacgacactgcactccagcctgggtgacaaagcaagaccttgtctccagaaaacaagaacaaaaacacanaaaa

SEQ ID NO: 705844 - DNA, 384 bp, Homo sapiens
ctggactggttgctgtcatcattcttcttgccatccctgtctcatgggtgagcacatttcctggactttaacctgtttgggacatcctgttgagaattacagattccagggaaggtgcccttcttggctcggggggtctgatcgtcagagctactcaggtgtggaagaagctgcctggagagggagtccccatctgcatggaatgcccccttcgtggggatggctggcacagctcacacacggaggcactacttcagtcctcccattaccaaactccagggcacacgtgccactgtgtcttgcccacaaacatgcacacagagtatcgatctgtctgatgtttcagggacccagccatgtcatggagggtacatgggcaggtac

SEQ ID NO: 705845 - DNA, 199 bp, Homo sapiens
ataacagatcatcatgctgtacagtgaaaaacaattgtattgtgtgtgaaataactatcacagaaataaaacataataataaaaaaaataactttgaagaataccacacagacacacacacacacattttttctttttagggtggcacctgtggcatatggacgttcccatgctaggggtcaaactgaagctgtaactg

SEQ ID NO: 705846 - DNA, 503 bp, Homo sapiens
gtaggattggagccctaacaggctcctctgtgctggctactcctcatccttgtaggtacaggatctccagaaacctctcttttacctcccttcctcccactgactctcctgcactcccccaggatactgtggggactgctctcacagatactgtgctagaaactcccatactatatttagagtcctctctagcaaggctcacaaagcactgcactggtgtctccattcattttatgtatcccataacacatgcagcaaccatgcatggcagcagaacaacaataaatacttggctaacattctagtcgactccactcattcaagttctgcccacgcatgtcccaaggtattcctgcatcacctagtacttgatgagcgcaactgtatccatcattctgcatgctgcttctccacaatcttttggagcgaatcgtatcgcttctgccaggactccatttccacttctggaccttctccactggtctgctccaaagcctgttagg

SEQ ID NO: 705847 - DNA, 257 bp, Homo sapiens
ctatcgcaaggccaagtccagagcggttagattaccgtagtagattccatggtatgcattcacatgtagtttgtccaggaaagagaagatgccctaaggcttcttcagactgttcaagatagagctacacctggtgcttggtgaacagacatctttggaagaatcatctggcacaagttcaagcagtgggttataccttggcacctaaataaaagatacaataggaaacgattcttggccttgccatatgcaggtac

SEQ ID NO: 705848 - DNA, 1170 bp, Homo sapiens
ggtccgtgcgcatatctcagggaactagtgaggttgtccgcagatcggcgactcctaacataaggctcgaacacaatttgaactgaaataatctctactcgcgttaacctggattgccatgatggaatatgcatccgaatgtagaaggtaggcggaaggttgacacacatccagcgcaacatcaagtccataattctgaccacactccagtagatcaccatcaaattgattcctattagtcgtatcaaatgtgccaggccagggagttcagtttgtaacctggaccgtggcatggttagatccacctaagtagcgttctggactgtccctctgagcagacaagtgctacaagcgtatgatcgctgacagaaggctcgttcaactataggatctgtggtgccatagctcaggcttaactactcattccgctctaaacctttaccgtaagatagcgccttgatgttgggggagagcgccatggctatgggtgttgcatgcagagtgtcagtacacttcaatgagtggagtgtccgaggaagcctagttgaccgatatgttcggtgtggtaccttggagaagacactttccagtagggaagggcgtcgtgtccaatgcttgcgctgtcagaacatcgtcccaatggagtccgggggactagattctcggctgtgtggcttatcccatgtctcgccctaccttggttggcagatgccatggttgggtccgtgatctacgatcgcacaagcgattgaagtgtaggcaacgtctgccgtgggagatccatcctgtgttggcatgggtacccccacatggtgcgtagtttggcccttgggagaggcccttgcgtggaacgcttcagcatttgttgcctcctcttgatggatatttgaccagccgtacctatataagaagcggatcgtggaattacctgaaacagcttgcatggcaatagggtaccccataacgtcatatgttcgcccatggacgcgggaacgggagtctggggggtgggcgccaagaacccttagtgaagagtttgggacgcgaaaagaaaaaaaggaaaccaacaagacaccggattagaaaggggtcagcgtgacaagaaaataaccatcttgtgctaaccgagtacgatcagacaaactatttcaacaaggagtatcgttccga

SEQ ID NO: 705849 - DNA, 214 bp, Homo sapiens
catgacttcccaggtccgctgtgctcacaagccctgctcctgtcctgtcgccctctacacctgtctctgctttatctttcctcaggactcttaccacatatatggcgtgcttgtgtgtgtgtataattcttttttttttttttttttaaaaaaaaatttccattctggtggcccaggtggaattgcaatggcttgatttgggcctcactgcacc

SEQ ID NO: 705850 - DNA, 664 bp, Homo sapiens
gggatgcccggccggagctgggtctggagacgccgtggcagcctgaacggacgtgtgcgacgtgattgggaggtttgtctacagattttgagcgttcgaagattgacccctgactaagtatagctttgcttgctccctcagcctttgaaaaaatgtctgtcacatatgatgattccgttggagtagaagtgtccagctgacatgctatctgggaggtcgggtgaactaacgaagctgtgacgtgtagacagctgtgatctgatcgatgggcacagccgccatggtgtcagccgacgctccagtgaacgtgcctgtcatgacgcgtggctgcgcatcgagaaggctgtatgcagcagcatgctcactgagtgggcccggctgctggaggcagcttgtgtgagaaatgggccccagtactgggaccgtggagaaggcctggatgggcttcatgtccgaggcagagagggtgagcgagctgcacctcgaggtgaaggcctcactgatgaacgatgacttcgaggaagatcaagacacgtggcagaacggaagcctttcacaagcaagatgatgggcgggcttcaaggagaccaaggaagcctgaggacggctccggaacggcacagaaagacctggggcaagaagcgtgacagaggtagaagcagca

SEQ ID NO: 705851 - DNA, 674 bp, Homo sapiens
aattcgaatgcgaggggcggggttttagattgataattactggccggtcgtccgtacaattgaacactctcagccctcctaatgacctccggcctagccatgtgattacacttccactccataacgctcctcatactaggcctactaaccaacacactaaccatataccaatgatggcgcgatgtaacacgagaaagcacataccaaggccaccacacaccacctgtccaaaaaggccttcgatacgggataatccatattatattacctcagaagtttattatacattcgcaggatttattctgagccttattaccaactccagcctagcaccctacccccacaataaaggagggcacatggaaccacacaaaagagcatcagcccgataaaatccccatagaagtccacactccataaacacatccgtattactcgcatcaggagatatcaatcacctgagctcaccatagtctaatagaaaagcaacacgaaaacacaaaaataatacaagcaaagcgacattaacaataattaactgggccctctaatataaaacctacacatacaagaactcagagtacattcgagtgtcccatacagcatattcgcgaagagattaagagatcaaaatataaaagtaggcagaggctacacggaatcaggtataatag

SEQ ID NO: 705852 - DNA, 321 bp, Homo sapiens
tacaggatcggattttatccccttcgtgtgtgtgtagtatggaacgtgtgtgtagtcaatggaatgtgtactgtgtgtactggaatgtgtgtgtgtatggaatgtgtttctgtatgtgtatggaatgtgtctgtgtgtagcgtaagcaatgtgtgtgcatacggaatatgtgtgtgtacggaatgtgtgtgtatggactgtgtgtgtgtatatggacatgtgtctctgtgtgtgtcatggcacatgtgtatatgggatgtgtgtgtgtgtatgtatggcatatgcctctgtgtgtttctcgaatgtgtgtgtgagtggaat

SEQ ID NO: 705853 - DNA, 631 bp, Homo sapiens
ttgagatcagcctggacaacatggtcaaggaagcttttcctgatccactaactaaggacaatcaaacccttcatgatctagaatctggagactgtgtcttctgggaatagtatcagagaaagactgcccttactgcccacatgtagcaaaactttgagacgttgaattatgggtccataatctcacaactcagaggggcacctctagactcttggaactgtatatctattggagactttaaggtaaagctgaacagagagacgtttttctccagaagcagacagcaccatagtcatggacagctttcccaagatcacagatcaagacttctctgccgtcatgagactcataacctcttaattttttcttgcttatgcttctgtgaacaatagaattggaacaaggggtggtcccgcgtgcacccatagggtatacttttatttgtggcaggattttgctgccaaccttatacatgggcaaacttatgccttcatggatggaagataaagggctaatatgggttagaaattttaatggtacctttgtttctccataatcattcagaaacagaacactggtccctcttggttaccctacatcatagttgaagagaacattgccggaggcctca

SEQ ID NO: 705854 - DNA, 427 bp, Homo sapiens
caccggcaggttgtactcaaagagattgccgttttcttctaaaagttctatagtttgagctctgaagtttcgctctttgatccagtttgaggtaaattttggcagatggtatgaggcaggagttgcgtttcactctcctgcctggggcggtgcctgcacggtgtggaaaaaggttgtccgtatcccagtgaacggtcacagctcccttgtctaagatcaacgagcgctgaacatgagggttccaactggactcttagttctacgtccacgtggcctgtgtctgcccaccattactaccgccgtgcgatactgaggtcaggctggggctttactgggctgctgggtgatctggagaatgcggttgtgtgagccgcaggaagggcagagctgagcgtatgaccgtgtgtcgtacccctccagaaatacc

SEQ ID NO: 705855 - DNA, 117 bp, Homo sapiens
gggtaggggggccccctcctgggtttgaaggggttaacttaaaccaaaactggggtttagaattagatgggggggttttattccggggcccaaattaggggagttttaaaaccttga

SEQ ID NO: 705856 - DNA, 246 bp, Homo sapiens
cgcagatggtatctgctgcagagcaaccacagaagaatgtggcaactgcacaacccgctccaaccgctcgaagccgatcaacaaatccagccgatccgttggcaagagcatctaacgccttagaaagcttagatgttgctccaggtctagaagaactagaaatgggtgcgcaacgtgtacaagttgacgacaaagcgatgattaactgtcgtgcggacttaaaccaacttgtaccgttcaaatacg

SEQ ID NO: 705857 - DNA, 195 bp, Homo sapiens
atttatcgaaatctttaaaataaaaatccattcgacagttgatgaacggcttcagcgaaggaaaacaaagacgaactcgagcttctctaatctgtccatttcgaaacaccaaacacagtgtatctataagtacagacatatgaatgaaaatatctgaactaaccatttggactttaaacaatatttacagaaact

SEQ ID NO: 705858 - DNA, 161 bp, Homo sapiens
tgtggtggttgaactgggagaagcctgggtggattgtgagcacttctgggacaaggggaaacgctgtgaatactccctagtgaggttggatggtcgaagttgcaactctggtatgggcagtacttgcactacttgaaatcctgttggcgctctcttgagag

SEQ ID NO: 705859 - DNA, 113 bp, Homo sapiens
atcccctctgagcagctggcagcgagggtatgtataaaatgcttggcctgcaccacggctagggacgaggaccgacaccaaggaggtcactgcgtcgtaggagagggccagcg

SEQ ID NO: 705860 - DNA, 424 bp, Homo sapiens
gtaggtggagccacatgctttgacagtatcgagactgtatttgaaggtgggtctcatctgtctactccgggatctgatcaatgctttgctggagtgatctcataaagaaggctggagatggtcaaagaagatcaaggctgctgggattccatccacgtggtagaagtgcaggagaaatccagcggtcgcaccggccattacaagttgagctccacggtgatgctgtggctgcagaccaacaaatctggctctggcaccatgaacctcggaggcaggcttaccagacagatggagaaggatgaaactgtgagtgactgctccccacacataggcaacatcgggcggctggtagaggacatggaaaataaaatcagaagtacgctgaacgagatctactttgggaaaacccaggatatcgtccatg

SEQ ID NO: 705861 - DNA, 383 bp, Homo sapiens
cagatatcaagacagtaggacattacaagaccaccactggaggaatttgccagcaaacacaagcaggaggtccggaagaatcctgagttccgtgtgcagtataccagagacatgtagtgcaaacatatagacgtgaatccgctgagacctactgagaacaggattatggtactgaaatgctagggcgtggggaacttctattacgaactaggtatccaaattatcgaagtgtgcctagcagctgaagcatcggaatggaggtctgatacctttggaggaactacatcaacaggtgttgaagggcaagggcaagttcgcccaggatgtcagtcaagataacctgatcagagccatcaagaaactacaggcacttggcactggct

SEQ ID NO: 705862 - DNA, 273 bp, Homo sapiens
  misc_feature (138)..(138): n is a, c, g, or t
  misc_feature (162)..(162): n is a, c, g, or t
  misc_feature (195)..(195): n is a, c, g, or t
  misc_feature (218)..(218): n is a, c, g, or t
  misc_feature (246)..(246): n is a, c, g, or t
  misc_feature (256)..(256): n is a, c, g, or t
tggtagaaacgggggtcactatgttgcccaggctgggagaagctttcccattgatggattgattcagggtctcgcttgtctgtcgcccagggtggagtgcagcagcgtgatctcgcctcactgcctcaacctctcaanctcaagtgatctccagcctcagcntcccaagtagctgggactacagatgcacaccancatgcctggcttaatttttgtantttttgtagagatggggtctcccctgtnttgtccaggntggtctgtaactcctgg

SEQ ID NO: 705863 - DNA, 118 bp, Homo sapiens
tgatctagacgatccttatgggtgcatgcatgtgtggctgggtggagtagctgaagccggtgcctgtggcgcaagagaacagtgcgtcttcttctcggggaactcgaaaccagtgtga

SEQ ID NO: 705864 - DNA, 109 bp, Homo sapiens
  misc_feature (99)..(99): n is a, c, g, or t
ctctagaggatccttatcagagcataccctccctctaattcctcacaagtgtgggcgcctcttcatcgaaaagtactgtgtattttactataccagggnatttttgaag

SEQ ID NO: 705865 - DNA, 138 bp, Homo sapiens
gtagatagtcaatcgtggatggaactgacttatttatcgcgaagactataatactgcatgtggccgtaatgaatccaaacttgtgtcatgcctgtatcatgcccatgtaaacactggaaataaaaagtgctctggtga

SEQ ID NO: 705866 - DNA, 461 bp, Homo sapiens
  misc_feature (413)..(413): n is a, c, g, or t
taaagcattcatctgcatgttatattacagttaatacaaggaggtacttaccattttatctttactttaaaaacaatgccttttccaaaatataaaaaaaagacctatttttaaagaactatttaaagatggctttgaaaacaacacttttatttacaacaaatagatggtagtgcaacagcactcgtggcttgtttcgataaataaaaatactattgttctggcattctttgggtacaggcccctttatatttatagatggctaccaagacttcttgaaataaaatcccttaagggcctttaatttggtattttaaacccgaatttggggaaacccaaggaagaattaatcttttttttttggggacctagaagcgctttttttttgaaaaactggaaggtttaaaaggttnttcaatttcccatttacccctggggcaaccaaaaatattttcccaaac

SEQ ID NO: 705867 - DNA, 984 bp, Homo sapiens
ggtgggacctcaacttcctgctggtgtcctccctcctggcttccctggcctggctcctggtcttcgtctacaagctgccgcagacggtactgacgagtctacatgcacttgggccgcggagtcttgctttcattgctgggcattgatcgaagccgtggtccggttctagatgtgggggcttgcaggccttgtgtactctgctagtatagcatgctgcatctggtctagagagcctaaagctcctggggcacctggacctcatcagtggggcacatgacggagcaggggagatacatggaccggggcgtcctcaatgtggtcatccagatgagcgcatgactttgctagcgcctaggcctgtcgacatctgtgccattgccattgagcctgggtaggcgtatatgtgatcaactagccttggtcaacatctgcctcatcggcactcagaagctctttgccctggttgctggccctgttgggatgcagatgaccggggcctctgtggaggatgacagacgtagctggctgccttcctagcccacgatatccagcagtggctgttggccatggaccatccttccttgggacaccctgccaactaggcctggagctgctggctcagatggccggctccatggccagcttttgagactggtcaatctcactgggattgggtgtagctaagctttgtgtgctggcagtgacggtggattgtgtgggcatccggaagttcaccctgatggttggctaaccaaggcactccagccagctccatgcccggcaatcctaccaccgttttcgagaaggatgtccatgcgggctcatctccgacatagacattgggcctccagacggactggagccgagactggaagcgcagtctgcaggctggcgagctgggcaaaacggaggaggggcacgctggaagctccacaagggtggacctaccagggcaccccaaataggaaccggagacaggaacca

SEQ ID NO: 705868 - DNA, 556 bp, Homo sapiens
ggccgagtatctgtgtatccccttatccagtaactctacgtgcgccgttgtcatagttgacttgtacgtgagtcagtgcctgagcaggttctagtaagacgtggtagctgcctaatcaccaagctaatgtggaaagtgagccaagaaaccttatcagaagaggcctcttctcaggcaaccctaccaaatcagcctgttgagaaagctatcatcatgcaactgggaactctgcttacatttttccacgagctggtgcagacagctctgccaatcaggcagctgtgtggacacctttgttaaagtgacttgtgcaaaatgtacaccatacttacagccctcgtcagatataatctccaggtgtgtcagagctcccggagaacttccaaaaaatatgggaaaagctggtgacgctagtctggtactcatctgacccccctgtgtaatgcttacatttcttacgtacagaataagagtaagagcctgaactatacgggagagaaaagggagaaacctgttgccgttgccaagccatggcccagagtcttcggggaaacca

SEQ ID NO: 705869 - DNA, 153 bp, Homo sapiens
cgtcggagttcccatatggcttcgctgctgtggtttcctgcaggagacgtagcagttgaggaacctcctgcgcatagcattagatgtctcgtggtggagcgtgccgatcatgaatacagtcttgaattttctgttgctggacaacactgggac

SEQ ID NO: 705870 - DNA, 543 bp, Homo sapiens
  misc_feature (39)..(39): n is a, c, g, or t
agcctccttccctctcaacaaagaattatccaggcccanaatgtcaagagtggaggttgagaaaccctgccatacagcagtggttctcaagccctagtttgtaccacaattaccttcagggttggtaaggccgattattgggcacaccctcagagtttcttactcagaaggcctgtagtggggtcccaagatttgcatttccatcgatttcccaggtgaagctgctgttagattgggggcacatttgagaaccactaccctagaaagtccccatgctctcctgattaggaaggagcgaggaaggtttccaaagtaggacaggggtgggagggtaagggagagtggcgggaagagctggcccgctggggtgggttatttcggccgttctggcctcgcaggcgttttcgggatccctctaggcgccgcggaggtcctggagtctcgatggtcgctcgggccggggcgtggcctggcccgggggcgtggcatggaaggccggccgaggtgcagcgagccctctggtgccggacgttgcgcggccgc

SEQ ID NO: 705871 - DNA, 596 bp, Homo sapiens
  misc_feature (565)..(565): n is a, c, g, or t
  misc_feature (585)..(585): n is a, c, g, or t
tgggtagtcttgctggactgtattgtgtcttgccacatgatagacatcaggaatttataaaactgtactgatgacctcgtttagaaatcgtagaagtcgataatcaagtcggtccgtagtgccattccaaactaagtgtgactcgtgggcctgatcacgagaggcaaccgtagtcgataacctagcaacaatccctaaacgtaaagtaacgctggctcgccgcagaaaaagctcattcgttcgatgacagaacttactttactgccttcctagaaattctagaacgagagctctatgaattgtgtactagagtctcttgaggacgacatgtagcagtacctggcacgcgttgcgtatttgcgcaatcaacatgcaagtatgtgcgaatccactttgccagcagtaggtagctggaaaaagatacagtttgattttctcacaactttggaacagagaagtgaaggtatggtaaaccatcgtcattgaagttctggcttgtatcatgcttatgttgacgtatatagtgacgtgttcctggtactaagcttatttacacgctgttcantacttcagaggcgggggctngtagacataaa

SEQ ID NO: 705872 - DNA, 239 bp, Homo sapiens
gagggcgagaagatccgaaagaaatacccggacccgtgtccgtgtatagttagaaaaggcctcccaaagcctcggataggagacctggacaaaaagaaataccctgttgtccttctgattctcacagtttggttcagtttctaccttcttgattccggaagcgaattcatctccgagctgaggatgccttgtttttctttgtcaacaatgtcattccacccaccattgccacattggta

SEQ ID NO: 705873 - DNA, 774 bp, Homo sapiens
tgcgcccctagtgtggtcagttaggtgcgcagctggcgaccaagctgagcatgtggttcactgaagcgtgttgttaaaagtacccaatagtcactcttgcctggggagaagcagcattttaaggagcatcgcattgaagactgtgggacgcagctcttccacttggcccgggcacacgctttcatgtgaaaccttcaaagtgtgcttttccgtggcctgttttgtagcctggcttcttaaatacgtctggattttgttgcagaatctagatgtctagccgcatgggtgctgtgtgtgtgacggtgggggccttaggcccggcccctctgagaccggcgtttctgtggttctctttgagcctgcggatcagccagcttttcctgggatggacagctgtggcccactggggcttcagcgcgtgggcaagatccactgcagaaccctaaggagacgtccgctcagcagccatagtgccttgggacacacggcccgacgctgcatcctgcgggccgtgatactctgctgcggtacgctcgttcctcgatctgcctccccacggagcctccgcgcatgcgctcacgctgtgagctgccgagggcgcccagcctccgtgttggattcgtcgtgcgccatggggggtcttcgcgtcgtgcatcttgggatgctattgatggtccttccctgatcgctgggctgcgagggtctgccttttttgcctcgacttggggatgcccctgtgtttctgccgtgttcagtccgtgcattctagggtcg

SEQ ID NO: 705874 - DNA, 121 bp, Homo sapiens
gttcatgttggcgagccccgagggttgggctgtttgcacaggcgagggatatcccatcggccccgtgcatgtcggaaagtgatggggagctggctccaaagcaagcgcgagggaatctccg

SEQ ID NO: 705875 - DNA, 202 bp, Homo sapiens
ataattgagtcagtaagtgatcccagggacattgaaaatccaaaaacagggctgagtgtggcatggtgcacatgcctataattccagcgctatgggagatcaaggtaggaagaccgcttgaacagaggaagtttaaggatgtagacagatatagattgcacacactgaaaacgagacactgggtgacagggaaacatacaag

SEQ ID NO: 705876 - DNA, 1055 bp, Homo sapiens
gaaccgtgtagcttggccaggattgtgaggaaccgcagcgcgccgcaggaccgggccgctgagcctgcagccgccccgcgccgtgacctgctgaccctagaccccgacatccctttggactcagcgccgctgcgccccagagcctcggcccgggcggcagcagactgggaggatgagcggcgggcggcggaaggaggagcctggctcagccgcagctggcctaacggtgtccctcaaatgtctccgtctggcatgtaaggtgctgcggacgcgaccgcggccctgggacggactaaggatgaacttctttagattgtgatctactggttccgacagatcattgcatgtggtcctgggatgtcatttgagggagttgtggccattacgagggtacttgtgaagtagcaggattctgtcctgaatcaatgacaggagtcctgtacctctacttcatcaattacctacacgattgagtgagggaaagcatcttggtgtcacgtgggaagcgatcacggacacgaacggggtaatcgcaactctcttctgcctgtgcttccatggtctgtcccggatctactctttatatcggctggtcatccaattagtgatttgatggtgtacaggctccacatgtgactcccttattccagtaccgaaagggactcctctttgatttcagcttcaggacacttgatcgctgggggaaacaccaggccccctggcgtaacttgggatgaacccgtgttaccctcggatctggaagtcagtagtcgagggcaatagtggtttactgcaggggttgtgacctgaatctttgaaaaggcatccgacttgggggaacgcattggtgatgttccgtttactgacccattatcgtgggaatacccacccagttgacgtattgtttccacgattggctgacattacagtattctcccttgaggcaaattagaccagaaaggtttcccgagccacacgcgtcgtaaagcaaggatcagggctaagccttttacacaggtgatccggccaaacggagactcaaagactggccagtg

SEQ ID NO: 705877 - DNA, 298 bp, Homo sapiens
  misc_feature (60)..(60): n is a, c, g, or t
cctaggggttgttgataattaggaaggtgagggtgcacacagccttgcttacagtgtggnccctctgggcatgtttttcttaaaataacagaacagagagaagtctttctggttttcagtctcctttgtggctcacaggccctgccactccggtgttctgaccttgggtgggttactgagccttggagtcggtttccttgtttctgttacaagcagtctcacgagggtggatggaaaggcttcctgcctggccagggaatggagaatcatagcttggtcattgcaacacggtctctca

SEQ ID NO: 705878 - DNA, 493 bp, Homo sapiens
  misc_feature (381)..(381): n is a, c, g, or t
cagataatgatagggtggggcgtgtgtcctcaccgaaaccaaatggactggtgtctcacagaatccccacgtgtggggggagggactcaggggaaggtaattgaatcaggggggccagtatttccggtgctattctcatgatagtgaataagtctcgcaagatcggatgggttcaccagaggtttccacttttcttcttcctcatttttctctggccacgggcatgtaagaggggcctttcacctcctgccatgattctgaggcctccctagccaggtggaacggtaaatccaattaaacctcttttccttcccagtcttctgtatgttttggtcagcagtctgaaaacagactaatacagatcaggcttatagggtcggntaaactaagtttgagtggtagattcagatgtggggataaggggactacttggtcagtgaccttgaccaggggagggagatactgaactatgtctccctgaaggggagccaaa

SEQ ID NO: 705879 - DNA, 358 bp, Homo sapiens
gcagcttatggcttaaaatgtactctccttttatgtggtctcttggggccgatggagaaagagaaatcaatagtgcaactgtttgatactgaatatgacaagtgtcttttcgaaataaaagaacagtccccaaaaaaaaaaacaacaaaacaaaaaaaaaaaacaatttgtggcgggccggcttcggcgcctgggaaaaggtttttataacaccaatcggtgggcgcggcgcgggccccaagaggggtaaggcgaactgcgggcaaaacggcgggtcccaaaggaaccccctgggcagcggaaagggggctgggttctcccccaattaaaaaaagcgcccggggggcacacccgggcg

SEQ ID NO: 705880 - DNA, 243 bp, Homo sapiens
atacatcacatatcgaagaaaagagtattacagcaaagcttagatagtttaacataatgatttgtacattgattcttagaaaagtcttggtcttagtgggcttttttcttcagcttacacattaaagatgctgctgcagtaaccagtgtgagggaagggacatcagtcttcatgaaccataaactgacagaagtttcaatacagtaggtttccatatggcaatttgtagtgcacatgacagta

SEQ ID NO: 705881 - DNA, 703 bp, Homo sapiens
ctcgaggagctgcatctgcggcaactgtgtgctgacgctacgtgcctcctggctccgacgtactcgcagctccccagtctcactccattccttccccacctggcgcgcacctgctcaagaccaggtcctgccaagcgctaggagggcgcgtgccagggctgctaggtgaactgcggagcgcgcgcgccatggggcctgccgcctggggccggggtctcctgccgggtggtgcggcttttccagatttgctggcatggtgcttcctgctggccctgagtccgcaggcacccgggttcccggggggctgaagcagtgtggaccgcgtacctcaacgtgtcctggcgggttccgcacacggggagtgaaccgtacggtgtggggaggctgagcgaggagggcgtgtacggccaggacttcgcccgctgggagccctgtgggctgggggtcctggtacctgccctgacggggccccggtggccgcttaaagcgcccttgtaaacccgcacacgaaatttcacggggtgcccacgggtttgggtgaaagcaccgtgcaaagtcttctttgggttagcgggcctcatccaaaccggcggccggtgggccttgacaccctttcggccatgcaccgaaggattccattctgggcgcttattgcacgaccacggggggccgtaccttgggagacccgctccactcttttcac

SEQ ID NO: 705882 - DNA, 444 bp, Homo sapiens
  misc_feature (6)..(6): n is a, c, g, or t
  misc_feature (88)..(88): n is a, c, g, or t
  misc_feature (95)..(95): n is a, c, g, or t
  misc_feature (132)..(132): n is a, c, g, or t
  misc_feature (173)..(173): n is a, c, g, or t
  misc_feature (178)..(179): n is a, c, g, or t
  misc_feature (184)..(185): n is a, c, g, or t
  misc_feature (194)..(194): n is a, c, g, or t
  misc_feature (209)..(210): n is a, c, g, or t
  misc_feature (216)..(216): n is a, c, g, or t
  misc_feature (226)..(226): n is a, c, g, or t
  misc_feature (266)..(268): n is a, c, g, or t
  misc_feature (277)..(277): n is a, c, g, or t
  misc_feature (302)..(302): n is a, c, g, or t
  misc_feature (310)..(310): n is a, c, g, or t
  misc_feature (315)..(315): n is a, c, g, or t
  misc_feature (317)..(317): n is a, c, g, or t
  misc_feature (327)..(327): n is a, c, g, or t
  misc_feature (345)..(350): n is a, c, g, or t
  misc_feature (361)..(361): n is a, c, g, or t
  misc_feature (367)..(367): n is a, c, g, or t
  misc_feature (379)..(379): n is a, c, g, or t
  misc_feature (383)..(383): n is a, c, g, or t
  misc_feature (394)..(395): n is a, c, g, or t
  misc_feature (398)..(398): n is a, c, g, or t
  misc_feature (412)..(412): n is a, c, g, or t
  misc_feature (442)..(442): n is a, c, g, or t
aaaaangcccatacctctgtagccaacaatgaaatacaggagaggacaaacaaacgcacaaattggaaagtagctacagatgaaaggnctgctgngagctcaaaggatgactaaatgggaaacacttttgtnttccacatgactgtggatatttacagttcttactccttgtngtttnnccagnncctcttgtncagcacggggcctgnngtcagncctgtcttgngccatctgtatgtcctgacagacgtcttgtcttctatttnnncgttaagcntgatccccttttcttgttaaaaggnaatctggnatttngncatgaaggcntcttgaagagattttttnnnnnngggatttattncgtttngtgtagagtgcntttntagcaaatttnnggncccagaaagctggntccaatagtgacctgggtacaccaatcggnat

SEQ ID NO: 705883 - DNA, 116 bp, Homo sapiens
gatcaggagtaggagccagagttactgtgccaagagacccgtccccaaagcatgcaagcaccttctcacagggcaaggccttggagcaggttcccaaggagcccctcctcatcctg

SEQ ID NO: 705884 - DNA, 157 bp, Homo sapiens
  misc_feature (144)..(144): n is a, c, g, or t
aaaaacggggggggtttttccacgcggttaatttatgcttaacttaggaaaagataaggttccttgagcaccaaagatgattcataactctgtataggtgccagcgtgcttataaaagcatcttagcagataagcctctccaanttgtgcttttgta

SEQ ID NO: 705885 - DNA, 542 bp, Homo sapiens
  misc_feature (52)..(52): n is a, c, g, or t
  misc_feature (90)..(90): n is a, c, g, or t
atctccacgcaggcatcgctgattaggagccagtcccacggctgggcctgcnttggctctgaccgctgggtgtcttagtagcctcaaatnttaaaaggaaaaggaaaaaagtgggggagctaaagaggagtttaaatcctttaggattttaaaaacatcctcacattgttatgacttaagaaatataattttctctttcacaaatctttcttagtcaaataaagacatgccccttctctgcagaaccaaacggtcctttgttcacgactcagaaatgcttcacctcccttggggacgctcccgaggctgcccgggaagtcgtgttggccccaccgcttctgcaaggatgagagcacacgtggtcagcagcacaattccagcaggaagatgtcaaagcattcaacaaaatctcagatgtgagcaccggggattaccaggactttcagattcacattcgttttcataatgtgcttcattttctgagaattctgtggcattttggcctctgccatgaggaatacattcccgttctgacaattcaa

SEQ ID NO: 705886 - DNA, 194 bp, Homo sapiens
tattagaggattcgtggtactctggagacagcgaggagcggtgacctggcggagctggataaactgtcaggaggtgctgaaatttgcaccctggagatgcttcctgcgtgcagtaccttggtggccatccccatgagaaaggcttgactcccaaggctgctttctgcgcgggtgccgacttgctctgctgccac

SEQ ID NO: 705887 - DNA, 182 bp, Homo sapiens
gtcagatagcaataagggtgctttgtgccaagccttagtacatcttctatgcccagaattcgcatgctagactatcaggtcaccatcttagcttagttctccagacatctgactcacggttcctttatgcagatcctgggaactgctcttcttgtagacagcatccataaacttctgaacat

SEQ ID NO: 705888 - DNA, 98 bp, Homo sapiens
gtccgtctccacttttttggagggcaagaaccccccaatgccaactcttaagtcttttgtaattctggctttctctaataaaaaagccccttagttca

SEQ ID NO: 705889 - DNA, 239 bp, Homo sapiens
ctcaattagcgtgagccatcatggctacagagccatacctgtctccaaaaagaaataaacaacagctacagatcggtaaaaatatttgcagaccatatttttaacaaaggactatcatatagaatatatacagaactctcaaaattcaacagtaaaaagccaaaatggcgcccgggcacggtggttcatgcctgtaatcctagcactttgggaggccaaggtggattgctcaccggggc

SEQ ID NO: 705890 - DNA, 1163 bp, Homo sapiens
  misc_feature (366)..(366): n is a, c, g, or t
  misc_feature (501)..(501): n is a, c, g, or t
gaattcagagttggactcctcgaaccagcagtacactgccatcatagttgatatccttcaatcctgctcaatactagtacatcaatcagctcttcctagcaggtagaatgatgattcatccaccagtcatccaaatgtcattgcacgaatattcaactggacctatctactatgttcagaatgaagttagtcagcgggatatctatcagaataaacacgtgagagcataggccaaatttctctacaatccatcgtagtgttccattgtcaactctcttaggcatagcatacctcgtgtaatatccatatgataatcctatacatatataaatcttctacattacgaagtaagactcatatcttagncctattccttcgggacaggacggcgtattgaatccccaaggcctaaattttattgtatacatattccccattctcctacgtaaataggatacacatggcaccgaccccccattctcgttcttaactcacggtatncgaccagaagagcccgtagacactgctctgctcctaatatatcactgtgggtcaatttaactgagactcctgggttgatcggagaacccaaattatacattcaggcattcgacacatttacttacacaacacgtaattcacacgacatagagacccatccgctattcataggctctcttaccctggtcgtatccaggcacaaaggcgggttaacaacagctcaatcccatttgaaaaccttacttggcctttgttcatggagccatggaaccgactcgtgaaaagttcttcttggcgcgaggctcattctatattcggacaaacctttattggtacttcctcccaattgatttcttacattctaaattcgggttaggacccactgtctcaaccttgagaacgcagcattgcaacggataagcgactcaatcttacactatgaggcccaagtgctccccatattggttccataacggaccattactaaggttggcagtagaacttggaagtcctttggtgaacgcggaacaatttctttatctttcccaataaccactatcaatagcggccacttccggtttcatccacatttcgagcgacaatttttggcgagataccacagatactctaacattcacatcttctacacacacacacttcaa

SEQ ID NO: 705891 - DNA, 124 bp, Homo sapiens
tagtgttataccttacccaatgaaagcaaagtttttatgtgctgtgcaaatggtcttcatgtggtctgacaatttatttttgccatcatttttttaattaaagaaaaaatttccagaagaggaa

SEQ ID NO: 705892 - DNA, 123 bp, Homo sapiens
tcagcattaatatgcttgtatattacgctgttactgatgatagcagtgatgatgcgggtgaaaaagcctgtctttaggctcaagaaaaggttaggggagaccaaatgttagcaagcagaaaag

SEQ ID NO: 705893 - DNA, 615 bp, Homo sapiens
  misc_feature (395)..(395): n is a, c, g, or t
  misc_feature (613)..(613): n is a, c, g, or t
gattcggcggcgctgcgattgcttggtgctgatgagctggcgaggaccacgtgctgcagcgtcgcagctgagtcgaggatgaaaggcggtctcgagtctgccgggctgcacgcgccggctgcttgcagaacccgcggctgatggcactcagctctacatgggtgcattcatgctgtcagagctgttcgtcctcatcctgtgtgcaactgatcgagctggaccgagacgtccaccttcgcatattgtcctcagaggcgtccctgggtcgaatgctgctaagacgtggaatctgcgttgtgatgagcgggcactaggaccgtcatttctcgcgattgcgtgcctgtgaacgactagaaagctggaacctttcgtaagggccacgggtgactagcaanaccaggcaaggcgtccgcatgtcagcctgatgcgtggactctgtcccttcccacgtagctgtggcggctcatcgaacgcttgacttgacgagacggcgatccgaacgtacgtttccgacgagcagagagaggctgggacgagccctggtggggcccagactaggccattgagcgtgacaacgaaagaggagcccttggttgattgccagggacaattntg

SEQ ID NO: 705894 - DNA, 410 bp, Homo sapiens
  misc_feature (52)..(52): n is a, c, g, or t
aagagaggagccaagaatgactcagaccggcatggtggttcacacagtaatncccagcactttgggaggccaagacaggaggattgcttgaggccaagaatttgagaccggcctgggcaatatagcaagaccctgtctctacaaaatagttttaaaattagccaggcaccggctgcccagtctggaaagtgaggagcgcctcttcccggcagccatcccatctgggaagtgaggagcgtctctgcccggccgcccatcgtctgagatgtggggagcgcctctgccccgccgccccgtctgggatgtgaggagcgcctctgccaggccgcgaccccgtctgggaggtgaggagcgtctctgcccagccgccccgtctgagaagtgaggagcccctccgcccggcggccgct

SEQ ID NO: 705895 - DNA, 144 bp, Homo sapiens
gaggcaaaaaacgggcgatgtcgcccgtcaattcccttcagcaggcggcttggccgccgatcgcgtgcccgacgttccgtgcgcttcagcgtgcgattaggttcacacgtataggcgcaccacgcagcgccagccaatgaaaat

SEQ ID NO: 705896 - DNA, 257 bp, Homo sapiens
ggccccctggggatatgcattgcctatctacgcgttgagtatttcatcagagatttgtaaatccttaccctgtaggtctccattattcgcaggtcgtgatctacaaaagtcttgattgcaacaagtgtggagttaccacatgggattcttggtcagtgaggatgaaagcaaactggatccaggcacagcagaacaagtccctgattttgtcaccttcctttaccaaataactagaggaattgcagcaaggagttatg

SEQ ID NO: 705897 - DNA, 189 bp, Homo sapiens
  misc_feature (95)..(95): n is a, c, g, or t
agttttgagctgccagtggaccgccccttttcccctaccaaaattaggtgatcccgttttccccatgacaatgttgtagggtccccccacccccncccccccaggccttggtgccttttgtatccctagtgctccatagtttggcatttgcccggtttcgaagtcattaaactggttaaacgtgtctca

SEQ ID NO: 705898 - DNA, 455 bp, Homo sapiens
tctcatggagctgtgagcacattaggccttcattcaagcaaatcacaacaaatgattaatttttggcccctccaaagtccctgttgtgtaacttgtgcatacctgacactcaacagtttattttcatggaaacacctggcacacaatggaaccccccagcctgcctccgttcgtaccacaggacacttctgtactagtgtggctgggaaatgccagtcactgtctaacttaactcctcaccctacttcctcagtggcgccaggcattttacatttattttccttgcttcttacgcatccagtaagcagcaactctggcggcagaagtgcatatgacatcagaattctcagagctaagggaacttgcagagatcattggactcatcactgacctgaaaccatgctaaacctcttctttcccaagcacacaagcaagctgtgtccctcaaatgacaa

SEQ ID NO: 705899 - DNA, 235 bp, Homo sapiens
  misc_feature (89)..(89): n is a, c, g, or t
  misc_feature (217)..(217): n is a, c, g, or t
agcggggaacaatcacttgatgcccatggattgagaccagcctgggcaacacagtgagaccctgtctctccagcaaaaattagccaggncatggtggcatgcacctgtcgttttaattacttgtggaggctgagacaagaggattgcttgagcccagtgactttgagtgctgtagtgagctatgatactgctactgcactctatgccttgtgtgacngaaatgtacgtctgagtc

SEQ ID NO: 705900 - DNA, 394 bp, Homo sapiens
agaagaaagagggtctgacacatcgagaggagttcgtctggggactgtcagagagatcagccatggaatggccaaaccacaggggaagattatcttctcactccatccgctttccagctccccatccatcctgctgaaagcctcctccatcattcaataaaatctctgtattcaccatccttcaagtctgtaggacctgattcttcgtgaatgctagacaaagacccgggtaccaagagcacagggcgtaaaaggctgccaccttgactctcctctgagctggtttaacacttagccatccgcgacacagcaactgctaaaagagcattaattgtaacacacccatagatgctgccatggggctagagcccaagagcgctcaccgcgtctcgtg

SEQ ID NO: 705901 - DNA, 419 bp, Homo sapiens
  misc_feature (1)..(1): n is a, c, g, or t
ntgggttgtcatctctgtgatgcaagaagcgttcgtttctagcagggtcctgttaagcacagcagtcagccgtttccccataggtttcgcgaatagcgtgcatatgtgcatgatctgtctccaaacagggtatgaagtgatctgtcccagtttacagatctctcttcggcatcgcatggttcagcaaatgcagttaccacagccgcgaaggttacatggtctccaaatgtaccctgatagagatagtgagcacagacaatctaccgcaagccagtgagatttgcgtctcccaaatctttactgccatgagcaaccggactctggtgtgcatcacgccgtcacgcacatgtggaataacacgtgctacacagactatctatcgcgctctcgctctctctctctctcgctctctctctctc

SEQ ID NO: 705902 - DNA, 632 bp, Homo sapiens
gtatattttttgggatctcaatatatgatctgtggactcgaagatctgtgctatgtaattggcgcgctgtgtattaagcgcttatatattcgcggtgcagggaccttttacctcggattcactgtgcccacacttattttatgtttaccactggtgccttactcactggggatgcacatctcatagcagcgttaaacagcgtgttacgaaaggctttgattcctgataagcttatatgttaccggtgaggctttattacttgagagaattttcagggcctgttagcatgaggtctagcctctaaccgaccattgccagggctatctttggaaggccaagctagataatgtctgtagaaagacgggtctaactaaagatgccgggcgaatgagttcaataactcgtattatctttctttgtgcaaacgccaagccggacttgtggggcttggttcaacaatgttcggaaccttattcccctgttttggcgggaattaacgggccgcctttcaaagccgggggtcactttaatctttaccaacgccgggatccaatttgcccaaagcgcgttttggtacaattcttcttcataggcaataaagggggataacaggactgtgtttccttggccgc

SEQ ID NO: 705903 - DNA, 458 bp, Homo sapiens
  misc_feature (346)..(346): n is a, c, g, or t
ccgccgtaccagttgcggtgtagcacaaggtcacatcttgtggtggtgctgactctgaccatctgaccttagccaaggcatctgcctcatcattactaggggtggccaaaggcatatggcctgacacatgataaatagttacctctttttgatgacctatttcccaaaggtcttgccatatggcttggctcaaatgggtctgtggctcactagccaattctgtattttccaagtagttaaccacaaggttaagcctcagtagactgcccagctatcagtacagattaccacagttgtcacctccttggtgatcaccatccacactgctctgagttcagcccattgnctactttgtccgcacccagtttcaaaccatatggtgtcagtactaggttggactgcaacagtggtccaggcagcagtagcacctcatctactgtcgcaactggtacggcggg

SEQ ID NO: 705904 - DNA, 145 bp, Homo sapiens
ccttccagagagcaaatccccagtcttctgcaaaggtatgtacaaagatagttcctcaattgtgtggaaggggatgttactgaagtataaagcgttgagcagaagaaaagttggaaagtagctgaggttgactggcttatgttta

SEQ ID NO: 705905 - DNA, 277 bp, Homo sapiens
acccagtgaaatatctccggataaacaggtccctcgcatcacccgacgacgcggagaacctctccgggctcagagggccaccccaaaaccccattcgtggcacggaacaacgtctcccgagcatcggtggctctaacgccaacagctcctcctagaacaggctctgtgcagacacctccagatttggaaagtcctgaggaagtcgatgcagctaaaggagccccagacgtggtcggacctaaatctgaagtggaagaagggcatggaaaactcccat

SEQ ID NO: 705906 - DNA, 103 bp, Homo sapiens
agtgtgtagccaaggacctccttctgcacgatccaataggagacaccagtactagactgaatcatgcccccaactaaagtcacaaacatgagcggacgtaggg

SEQ ID NO: 705907 - DNA, 740 bp, Homo sapiens
  misc_feature (275)..(275): n is a, c, g, or t
  misc_feature (334)..(334): n is a, c, g, or t
  misc_feature (364)..(364): n is a, c, g, or t
  misc_feature (684)..(684): n is a, c, g, or t
gggacttccggtcggcgtgagcgtgaggtgtgggtgttcgtttctcaggtaaaacatggctaaaagcttacggagtaagtggaaaagaaagatgcgtgctgaaaagagaaaaaagaatgccccaaaggaggccagcaggcttaaaagtattctcaaactagacggtgatgtttcactgaaagatgttcaagagatagcaactgtggtggtacccaaacccaaacatttgccaagagaaaatgcaatgtgaggtaccaagatgacacacgatgacntgcaacatggaggactgatattaagagaacacaacagagactcttctagaccagcatgnacagtacccaatatggatgaaccaaaggcnaaagaacaaggctgaaggcaacagcgagagaaaagaacgggggaaaagccaaacgcaaaagcagtgaaatgtggcaaagggttgtgcctggtagactcttaaaaccttggaaaatgccacatgggatagattgacggattagaatgtatacaccatgtatactttgatttcaactgcaccaaattgaaaaaccaattgtttcctatttaacttggccttttttcttcaattcaaacccagcataactcctcaagtttgtgtatgggaacttgaataaacatattttcttgtgatacatccaagctctactgatacttaantggtgctacccaatatccagttatatcagggctcaacgtgctgtcaggtattaatc

SEQ ID NO: 705908 - DNA, 263 bp, Homo sapiens
aatgccccccccataaaactccaacatcaatttcattgcccagactgactgtagttaattttgtcccagaatttatgggctgaatttaaggcttccaaaaatgttgtttgtttgcaaaaatcaaacattgttaggcaagaaattttttttttcaaaatgaagatttatccccttgtggtttaagctgtactgaactaaatttgtggaaagcattgtgacctgtaaaagcaaagtatcaataaaggttatagcctttcccccca

SEQ ID NO: 705909 - DNA, 224 bp, Homo sapiens
gtatgatcctaacaggtgaggagtgagggtatcagggtgagtgagggtgtcagggtgagtgagggtgtaggatgagtgaacgtgtccagggtgagtgagggtgtcagtgtgagagtgagggtcagtgtgaggagtgacggtgtctggggtgagtgagggtgtacagggtgaggagtgagggtgtcagcgggtgagtgcaggggtgtaccagggtgagtgcacat

SEQ ID NO: 705910 - DNA, 313 bp, Homo sapiens
ttagcacaacctagggtcagttttgcaggtggtaagccatttaccaagatagtgtaggtaaagaagggcagatttattagagaaatgtgaaaatatgttgcagtgggcagctcagcagagaaggggctacctgcaaagaggcaagggctggaggaaagttttatagggtcctgctgaagggtgctacgtgtggaatgaggtcattgtgcccgcaggttgtttgtgattagctgtctctaacaattgttcatacaataattgttcattattgttctcaacttggggctctccccaacctggggacccttcctta

SEQ ID NO: 705911 - DNA, 372 bp, Homo sapiens
tcttgagtatcccggtcagcactgaagcgtggtcagtcctgagctgtgggatcaccaggacatcaccgaagacatgcttttccctcttctggttgctggagctccgagctagagatcgtggtggtggggactggagatcggaccgagaggctgcagtcccaggtgcttcaagccatgaggcagcggggcattgctgtggaagtgcaggacacgcccaaatgcctgtgacaccttcaacttcctgtgtcatgaaggccgagtaactggagctgctctcatccctccaacaggagggacttcacttacatctttgggccaagctgctcaaatgacacgccaggaactgacctgctgactgcactctggcagggt

SEQ ID NO: 705912 - DNA, 123 bp, Homo sapiens
ttggtagtattgcactccacaaggtccaaaaaaataatgtggtaccttaaacttgatctaatgcatgatggcactgagatattctattatggcttctcaattaattaaatagagaatcagggt

SEQ ID NO: 705913 - DNA, 453 bp, Homo sapiens
  misc_feature (69)..(69): n is a, c, g, or t
  misc_feature (73)..(73): n is a, c, g, or t
  misc_feature (83)..(83): n is a, c, g, or t
  misc_feature (90)..(90): n is a, c, g, or t
  misc_feature (125)..(125): n is a, c, g, or t
  misc_feature (138)..(138): n is a, c, g, or t
  misc_feature (201)..(201): n is a, c, g, or t
atgaagaaaaacgagcctcaacacagaaatgtagttggaaaaggaaggcatgtgttttaaataaagccntttncagattgtgnataatcnttgggactatgccaaaactctgataagtggtagcntctttttttttanttttttttttttgagtctcgctcttcttgcccagactagagtgcaatggcctgatcttggctnaccacaacctccacctcccgggttcaagcaattatcctgcctcagcctcccaagtagctgggattccagacatgtgccaccacgcccagctaattttttttttttttttttttagtagagacgggatttctccatgttagtcaggctgatcttgaactcccgacctcaggtgatctgccccctcggcctcccaaagtgctgggattacagcatgagccaccacgcccggccgacaagtggtagcttcttaaa

SEQ ID NO: 705914 - DNA, 333 bp, Homo sapiens
  misc_feature (110)..(110): n is a, c, g, or t
  misc_feature (275)..(275): n is a, c, g, or t
  misc_feature (329)..(329): n is a, c, g, or t
tgagacagggtctcattctgtcacccaggctggaatgcagtggcacaatcacagctcactgcagccttgaccttctgggctcaagcaatcctcccacctcagccgggacnggtatccacagacgcacacaaccacaccctgctaattttgtattttttgtagagatggggttttgccttgttgcccaagctggtcttgaactcctgagctcaagcgatctgcgtcagcttcccaaagtgctgggaagaacaggtttgaaccaccgcgcccagctnaaaaaagttaaaatttatcaaaactatggcacattcaacatttacagaaccatnacgt

SEQ ID NO: 705915 - DNA, 203 bp, Homo sapiens
tgagccataggatacatctttcttattcaccgtaggtaggcatgactggccattgtattagcaaactcatcactagacatcgtactacgcgacacgtactacgttgtaggcccacttccactaatgtcctatacaataggacgctgtatattgccatcaatacggcggcttcatatcactggatttcccctaattcatcaggc

SEQ ID NO: 705916 - DNA, 111 bp, Homo sapiens
acattagaggcgcgtcacttgtgggtttgggccggcgttcacgtagagcaggttgacctgcttggcctgcaggtatcacgcatgcgtgaggtcagccagatgctccattga

SEQ ID NO: 705917 - DNA, 126 bp, Homo sapiens
ttgctgaagatcatgaccgccactcatgggccaccggatgtggtccttgtcccatttgttagggctgcatccatccttctcagaagatgagtcctgttccttgcgcagggcactgtttggactctg

SEQ ID NO: 705918 - DNA, 256 bp, Homo sapiens
gaattcggcacgagggacacccctgctctacccatgagcctgcccgctgcaatgcctagacttcccaacagccttagctgccaagtgctggtaactaaccaacaagggttggaaccccaagctaccccttctttgaagggctaaggcccccaaccatagcccctgcccccgggggaggccttgggggaacccatgaagttgtcagctttgcacttaatctcctgcctctctctaaagactggccctccttgggctg

SEQ ID NO: 705919 - DNA, 221 bp, Homo sapiens
cggtttttgttttggggggttggggtaacccccctagcccaaattgtttggttttaggggggctaccaatacccccttggtttgggaaatgccaaggttaaaaatgtttttaggctgcctgttgaccgggttagggactcctggttttggggaattttttttccaatttttttgtttttttataattattttgttggccctttttttttttcccctcctta

SEQ ID NO: 705920 - DNA, 262 bp, Homo sapiens
  misc_feature (22)..(22): n is a, c, g, or t
gttcagttccctccagggattnaaatcgggtctgatgctggccttcggtgcgcagccagtctttgatcgacgcctgatctgtgctgaaaccctcgccttagtcgggctatcaagcccatcgagcacgccattccagtgggagatgcggatgtcatcgatcgggccttcgagtgattgggtcaagctgattctggggttcaccgggtcctgcagaatcgcagcgtgttgtcgatctgatgacgaggcaatgtcgggaaatcgc

SEQ ID NO: 705921 - DNA, 244 bp, Homo sapiens
  misc_feature (29)..(29): n is a, c, g, or t
  misc_feature (71)..(71): n is a, c, g, or t
  misc_feature (87)..(87): n is a, c, g, or t
cttccctgatttttatgttgtaacaaagnaaaaaacaaccataatttacttgatcagcgtgaaaaagcggnaatcatacacttctgnaatctgaactggcaatcacatatttcacaacgagggcgcgaaaagatgactataaaatgttcatgagggactgaatactgaaaactgtgaaatgtactaaataaaatgtacatctgaagatgattattgtgaaattttagtatgcactttgtgtacg

SEQ ID NO: 705922 - DNA, 362 bp, Homo sapiens
  misc_feature (158)..(158): n is a, c, g, or t
  misc_feature (230)..(231): n is a, c, g, or t
  misc_feature (291)..(291): n is a, c, g, or t
tttttaagattcaaagtcaaaattgttttattgtcactcacatatttaacaataaaaagaaatgcagaaaatggctcaagtatcgtattgaaaaaaaatcccaggttgtgcagcttgttctattaacatctgggagaagagcttgttcccacatcagnacagcagctgcagttctccaacgtccctttgcagacacaccgtggcacacttgcacaccacggggcagcagnncagcagctcttcttgcaggaggtcatttgcactctttgcacttgcaggagccggtgcagntgcaggagacaccagtggtgcaggagcagttggggccatttcgagccgcggtaaggctggagatctcaagc

SEQ ID NO: 705923 - DNA, 774 bp, Homo sapiens
  misc_feature (329)..(329): n is a, c, g, or t
  misc_feature (386)..(387): n is a, c, g, or t
  misc_feature (392)..(392): n is a, c, g, or t
  misc_feature (407)..(407): n is a, c, g, or t
  misc_feature (409)..(410): n is a, c, g, or t
  misc_feature (415)..(417): n is a, c, g, or t
  misc_feature (423)..(423): n is a, c, g, or t
  misc_feature (433)..(434): n is a, c, g, or t
  misc_feature (436)..(436): n is a, c, g, or t
  misc_feature (438)..(440): n is a, c, g, or t
  misc_feature (533)..(533): n is a, c, g, or t
  misc_feature (536)..(536): n is a, c, g, or t
  misc_feature (541)..(541): n is a, c, g, or t
  misc_feature (553)..(553): n is a, c, g, or t
  misc_feature (556)..(556): n is a, c, g, or t
  misc_feature (558)..(558): n is a, c, g, or t
  misc_feature (567)..(568): n is a, c, g, or t
  misc_feature (582)..(583): n is a, c, g, or t
  misc_feature (594)..(596): n is a, c, g, or t
  misc_feature (599)..(600): n is a, c, g, or t
  misc_feature (605)..(605): n is a, c, g, or t
  misc_feature (608)..(608): n is a, c, g, or t
  misc_feature (612)..(612): n is a, c, g, or t
  misc_feature (620)..(620): n is a, c, g, or t
  misc_feature (634)..(634): n is a, c, g, or t
  misc_feature (640)..(641): n is a, c, g, or t
  misc_feature (644)..(644): n is a, c, g, or t
  misc_feature (654)..(654): n is a, c, g, or t
  misc_feature (661)..(661): n is a, c, g, or t
  misc_feature (664)..(664): n is a, c, g, or t
  misc_feature (669)..(669): n is a, c, g, or t
  misc_feature (677)..(677): n is a, c, g, or t
  misc_feature (679)..(679): n is a, c, g, or t
  misc_feature (755)..(755): n is a, c, g, or t
tccaagccaggcctcagctgggcctacctggttctggtgacccaggctggaggttccctgcccgcactgcacttccaccgcgggggcacccgcgccctgctccgcgtcctcagccgctacctgctgttggccagctccccgcaggactcccgcctctaccttgtcttcccccacgactcctctgtctctctccaactccttccaccacctgcagctctttgaccaggacagctccaatgtggtgtcacgcttcctccaggatccctactccaccaccttcagcagcttctcccgagtgaccaacttcttccggggtgccctgcagccanagcctgagggagccgcctccgaccttcccccgccacccgacgattagcccgagcctnnattcnaggtcatttcctgtntnnagctnnngcctcngccaaccgtnnancnnngccctccagttacagaggaggagtgggcacgccacgtgggccctgaaggtcgcctgcagcaggtccctgagctgaagaaccggatcttctctnggngtctnagccccagcctncgncncgaggcctnnaagttcctcctagnntacctcagctnnnaanncacanctnattntcacaatncccacatactcaanaaaacnnatnagtatttccncatgaanctncagtngaaatctntnagccctgagcaggagcggagaaactcacttctgcatggataccgcagcctcatcgggatgtgagccgcactgacangaccaacaagttctacgat

SEQ ID NO: 705924 - DNA, 188 bp, Homo sapiens
acacttgcactgttttgtctgtttgtagctcatcagagactcccgatctattaaaagaaactaacaaaggaaatggtcaaggatgaacgatagaagacttgtctgtacgtattcaaatgttagagctatagtgatccacatccagctaggatctggttcttggaacaccaaatgcattgacatggagt

SEQ ID NO: 705925 - DNA, 111 bp, Homo sapiens
caccagcccagtctgcaggcctgagctctggccttgggtgcatgctgccggcagacaagatggggcaagggccttcctagaaggatgacatgaggattaggcccaatctgg

SEQ ID NO: 705926 - DNA, 143 bp, Homo sapiens
acccccccccccccttgggggggagggcgcggcctttggggggggggcccccccacgggggttttttttttttccctttttcccctgggccccggggggttttgggggttttttgttttttaagggggggtttttttttttta

SEQ ID NO: 705927 - DNA, 482 bp, Homo sapiens
atcacaccgctgaatctgacccagtggctgatggtgctgaaaatctccttgcctgtgatcctcatggatgagacgctcaagtttgtggcccgaaactacctggaacaacccggtaaagagtgtgtgcagcctgccaccaaatcttcctgctccctgtcggcatgcaccgatggcatttcctggccgtttgtgctgctcattatgcccctggtggtctgggtctacagcacagacactaactttagcgatatgttctggtcttgactgacagcgctacatacagaagatgtttaacttaatcaattaattttttattgtttaaagcaactgtctatttctgctgaattttcacatgaacatattggctggtgaaggaggtttcatatctagattttgttttgctttttctgactccagtgggacaagattttcctttttttatacacataattaaagtgtccattgacgtgtacagagaacta

SEQ ID NO: 705928 - DNA, 187 bp, Homo sapiens
  misc_feature (9)..(9): n is a, c, g, or t
ccaggttancggcaccttggcgtaccaccacaccgccgggcttatgcgccgtccaggcgcgtcctatgcggattttttcttcgcacttggcggatttacaccgctaatcggtacttcggttgctacctttccgaagttttaacgaattgggcacctcaaacaactggttgtggcgctaattaaccac

SEQ ID NO: 705929 - DNA, 168 bp, Homo sapiens
tcttacatctacaaccaggtatggggtgatagactattgtttgacatggcacaactgtattgaattgggtgggaatcttttcccccagttagaaaaacagatttaaataacttggtgctacgtgaaatcatattttacgcgaacaaatagagatagtgaatacagttc

SEQ ID NO: 705930 - DNA, 190 bp, Homo sapiens
ccgcggccaaggcagggtgagtgctgtataaaatattctatgttacttcaacttctgttctggctatgtggtatctgatcctagcattagcaatatgggtacgagtaagcaacgactctcaagcaatttttggttctgaggatgtaggctctagctcctacgtggctgtggacatattgattgctgtagg

SEQ ID NO: 705931 - DNA, 440 bp, Homo sapiens
ctcacaaatccggccatggagtgcccctaaggtaggccggggtgacctggacatccagaatgcctgggaagccatgtcttgggagcctggtggcggccatgtctgggagggactagcagagatctgggccaggaagcatcagctcagggccatcggcccttttcctggtgccccttgggagcaaggggccagatgccctagaggtgtacctggctgggaggctttcttggctatggggcacccccagtgaaggtcccttcccagtgctggagttctacgggcattggtgcttgcggtggctggcattggattgttcttccaatctctgggagaagacgggctgcttgagaccctgttggcccatactcaaacctttctcttttttttgacatgattgaagcaatgctatgccaaccaccttaagaagccacggtcaccgg

SEQ ID NO: 705932 - DNA, 931 bp, Homo sapiens
ggggcggcggtggcgattggacttggtgggtccgggccagggcgggctgccgcatggtgtacctgttcggccgcaagaagcatgagcctgcgtcacgtgagcatggacaatggccatcctgcaactgaagcagcagctgtggacaatgcttgagtgcagtaccagaagatggatcgcccatgcgagctggatgcgctgatgctgcgccctggccctggcagtctgctgcgggactggccaggaacgtgaactggtgccaatgctgcttgctctaagaagaacgctgataccctgtgatgcatgccgtcctgtgacatgtgactgtgatgacaccaagatccatgcatggccttggcacggcacatgtgttcagagacgtacttcgactgttcaccgcacgatcggacacacttgacacacgttgactgcgacggggggctgcaggatattggtgagcaatgatgcatgctcttgagacgagagaagttgccaccaggagttgatttgtccgatttgcaaggaagagttgggaagacggggatccgttgtgacggaggaactggcaggggagggccggtgcggcagtacccagagctgtgccaacattatgacggatgcttcctttgtggccacgcgaaagcctttcagcttcaagtgcagcgcattgaacagactgcccaatcccttgcgcaaggaacgcttgacgccgcaaattccaccttcaggggaaagcaacactacgaaggcttgcgcacgaagggtttcacgcttccggaatgcgcccttttcccttgaaggaacagattccccaggagaacaccgtgtcccattggtccaaagggcccacgggcccccatgtggccagggccgggacgccttggcctgggcagcgcctttccgttaacctgtaggcccttccgtctttggtcgg

SEQ ID NO: 705933 - DNA, 393 bp, Homo sapiens
  misc_feature (19)..(19): n is a, c, g, or t
  misc_feature (54)..(54): n is a, c, g, or t
gcgcttaacgggtccaccnagccctgggggaaaatgtccatctcctccattggngtagtgggcgcccccgaggacaaccgcagccacagcgcccacttctttgagtttttcaccaaggagatagccctgggccaggaccggaaaattatccgctttttccccttggagtcctggcaaattggcaaaaaagggcgggtcatgacttttttatgattgggcccggagggatccagggcatctgtgaactggctgctttttccaaaaagatctcttggcaaagggagggcctggaaaaaaccagctttggattatcccgcaggccccattcctggggtcccaaaatcctttttttcccccccaaatgaaaaaaaagaaaagagcttcccccttcca

SEQ ID NO: 705934 - DNA, 261 bp, Homo sapiens
caaccttccagcctcctttgctggcattgatgggggtccctttttgaatgaactagtttaatgtgggtcccaatttattgggcatattctttcgttttggttttccaaaaatgggttattcccatggaaatggacccccgtttagccctgggccccccccttaccctcatatgtgtaaaagcttaccccggtttcagaaaataaatgggttccttttctcttaaataactaggaccaaataaaaccgatgtccgttgttta

SEQ ID NO: 705935 - DNA, 682 bp, Homo sapiens
cttaactccagcccccacccacaccaccatccacccaagccacaggccccacttgctaagggcaaatgaacgaagcgccaagctacctttcggacgtaatcctgccgtgggaaggcagagcatgtaagtgcacatgttacagctggggtatgcctatgcatacgagagtattaatcttacgagaacaacaacaacttgtcacactactcttgtatttcaggttcccatcaggtgccgttccctccttatcccgtttgctcgtacgtctccacccctctttatgttccccccactacctcaacatggcatataaaacgaagacagccagtcacgtgcaaccgtatacggcgaacgaagggtaagcagccaggagagtcacatagaaaccccctacaacccgtcaagcacaacacaccaacaccaaagaggacccacaatccaacacatcacaacgattggcatcccaaccctgacaccacaccccgtgtcccagctacgcgatccttcagcagcccgcactcttctctatgcggagaaccatcacatctgttgtgccagctcgagactattaacctccctactctaggaagccatggcatcattatatcctccctctcgctccgccataatgactcactccctctctcagatattattcggattccgacgcgtactgatcagc

SEQ ID NO: 705936 - DNA, 755 bp, Homo sapiens
tcatctgtgagaataatcgctatggaatgggaacgtctgttgagagatgcggcagccagcactgcattactacaagagaggcgatctctcattcctgggcctgtagagctggcatgcgcatatggatatcctgtcgcgatccgagcaggcaacaaggctttgctgctgcctattgtagatctgggaaggggcccatcctgatggagctgcagacttaccgttaccacggacacagtatgagatgaccctggagtctagttaccgctacacgtagtaagaaattcaggaagtacagcaacgtaagagtgaccctgattatgcttctcaaggacaggatggctgaacagcaatcttgccagtgtggaagaactagagaggacaattgatgtggaagctgacggaaggagcattcgaggatcgctgacgccagtttgcctcggccgatcctgagccacctttggaagagcgtgggctcaccgactatctgactccagcgacccaccttttgaagttcgtggtgccagatcagtggatcaagtttaagtcagtcacgttaaggggagcggagcaatggagaggttataccttcagggggctaccagacagtgttctcaccttggttaaggaggaagaaaacccagtcaatgatattcaatgaattcttggaaacttccattaagtgtgtagactgagcaggtagttaccgcatgcagtttgtacattagtgcattaaccatgatatgagtgctagaacc

SEQ ID NO: 705937 - DNA, 219 bp, Homo sapiens
cccaaattttttttggggaagaaggggggggggaaaaccctatcccccctggttttttggtttggggccccccggccacacaaaatttggggcaaaaagcaaaaaatttttttttttccccctttttttttaaatgggaaggggggggggcggcccctttttttagacctttggcctttggaaaaagcccctcccccgtaaagggttttttgggcccta

SEQ ID NO: 705938 - DNA, 201 bp, Homo sapiens
tttcccgggggggggggcacctttttccggggggaaccttaagaaaaaaaaagggtttaaaaacccccggggcctttttgggttttttgggggggggaaccgcccgggttaagggggggtttccggggggttggggttggaaaaagggggggttatttttggggggttttagggggaattaaaaaaagggggcttttggga

SEQ ID NO: 705939 - DNA, 204 bp, Homo sapiens
gcggtcacacgcacggagagggcgagtggctggcgttgtggtcatgctgtcgggcgtgttcgatcgaatggttttattgtgccgaattccgggcggggtgtcgcctatgctgcggataggtgcgtatgtctgacatggggttgtatgaattggtttgaaaggggcacggtgtgaccgacaaggcgccttctccggtggcgtggt

SEQ ID NO: 705940 - DNA, 912 bp, Homo sapiens
ggcctctcggagctggaaatgcagctattgaggtcttcgaatgctgcggagctggaggcggaggcagctggggaggtaccgagcgatgtgaccaggccgacatacgctcgtactacttcctctactcctgaccgcctcctgtctacgaaaaataactattaactaggtctaacaggacaagcaaaggaccaaaaagtagtcgtccgacccttcaggccctctcttccatctcagcctttccgcccggtgagggaagccacggggttggacatggaaccagaacaaaacaggaagaccagagaccaggacgaaagacaccggaacacggacacacaggacaagacacaacaagaagagcaccagaccacacaaaaaagccaataccaaatcgtaagaaacccaccggggagccacagggcgcaccccagaaggaacatgagcggccgaggcaatcacagaccggacagaggccggatcgctaacgatataacaaatgctgcgcaaagggtgggagaagacgaggcgcaaaaccacaaagggggggacatctgacaggaacgaaaccgagaaatcgcgctatacgcgtcggtacgcagaggcagcccccgattgccggcgtccccccaggaaggaacacccatggccctaagcgccgcaccaccatacgtctatgtgggagacgaggaaaaggacagacatggatgactagatgcagcgcatttcacgacacacgaggggactgaacccccaagaagcaaaccgacatcaggccccacacagcggtcccaaaacgaggcaaaactcgtgggggcgtatcttagcaccgggaacgctgatagaagatgacgcgggacactattctagaaccacgccgatagagagaagacgacaagtgggactaagagaccacca

SEQ ID NO: 705941 - DNA, 495 bp, Homo sapiens
  misc_feature (402)..(402): n is a, c, g, or t
  misc_feature (428)..(428): n is a, c, g, or t
  misc_feature (475)..(475): n is a, c, g, or t
gctttgtaaacacagaggcagctgaagttgccctgccccagccccaatatcctcctgtgcactgattgatttagatgctggtaatgcttcctaccagtgacagggaacttccagtctatctgtcaatggatcatcttttgatttcccctatctaatttcccctgctcaggtaatctatgaacacatattgaatgacatacttaataaacattttatcaatatttttaaatagttttggcttttaaaagactgtggccaggcacagtggttcacgcctgtaatcccagcactttggggaggttgaggctgggcggatcgtttgagcccagggagttcgagaccagacttgacaacacagggagaccctgtctctaacaaaaattaggccgggtgtgggtggtnttgccactgggtaggttccagtttgntcaggaggtgaattgtgggaaggattcttttgagcctgggaggcagnggattgcagtgactagcctg

SEQ ID NO: 705942 - DNA, 1371 bp, Homo sapiens
gacttcgtgcatcgtgtccgttcttctgggactgcttgcaaaatgtctcccttgcatggagacggtgtgggagtagactaaggtccggtgcctgactatgcgatagcgaagatgaatagtggcgagagaattcaccaatcaacaattgactagagtcaacactgctatggcatgtgtgggacgttctaacgtagacgtcggtagcgatcccctgtcgacatgtcgacatgacagtaccaatggatgagccactgtagggcagagtggtaaccactccgatgaatgctgtcgcaatttgtaacaacgcaaggacttccaagaccaaagaaggcttagctcttagggagacgcaggaggggcaagtgtacgagaaagtagatggtcccgattaacacggaaggtcactgtcgttcgacggtgccagttagcgacgtaattcccgacttcatcggacgtgtattagtaaagagtagcaagcgaaaaacttaaaggacgtaaatgagtacaacatttagggttgaaatcgcattaagtgggtgacccacgtaggtgtaaacgcaaagcatatatgcgataggaacagacatccttgaacaaggaaaccgaagatgcaataaacttaggtttggtgcgactttggagcaggcaaacccttaaaaaagtccccgccatttgggaaatttccgggtcccaacagaatattcctagaagagagtttaacacgaagggctctaagattatgcagacacacgttttaggggcgaaacaagctggcaaacgctgctcacaacagcgggcaaccttacgaacgagccacacggcacaaacaagcaacacacaacacaagcactaaacagagccaacacagaggcaacctgcccacaagcgaggcacagggccaacacagactacaaaactttcgagaagcttgacaagtgaggcagacacggaaaaacccgattaaccagcacagcgaaagcgaaaaccaaccataaagggagcgcgcgacaacgcaatcgaggggcaacgccccaaaagagaacaaagaccaccccacccactaggaacctggggacgacccccataccgaagagcgctctcgaacaggcgtgacagcatgaacacagcgataacatataggggagaaagcgaacaaatattaaccgcatcagcaacaaggggcgaccgggaccactcactccgacaccacatatataaagaatggaaaacgcgattgggcgagacaaacaacgttcacacacacaacagacctactgggagaacacaagaggaaccacccaccatagtaccgagacatagctcatccaacagcatgcggcttaatgagaacataacgcagcgataacaagg

SEQ ID NO: 705943 - DNA, 177 bp, Homo sapiens
tctcggcgactctagagatccccacttgatgagcactgcattagcatttaggtatatacacagagatagagagacatcccgaaaaaagacattagaacgtatttccaaacttcactctatagttgtacatcttgatcaggaagctgtaccttttattttgaatacggatcccctagg

SEQ ID NO: 705944 - DNA, 451 bp, Homo sapiens
  misc_feature (157)..(157): n is a, c, g, or t
  misc_feature (337)..(337): n is a, c, g, or t
  misc_feature (415)..(415): n is a, c, g, or t
tccatagtctcttctgattcccctgcagacctggaattttgaggtctgacccaaataccgtttaattttacttcgtaatttaatagtggcatgcatttgatttctgtctttatttctaagctgagggaaaacattatttgaaataaatgtgaaaaangattctttagtggtctccaaataattttaaatttactgttttttttattagaatcccgctaggaacatttcagcattattttaataattgaaaccattgaaagaatcatttattaagaaattagatttgaacattttaggatttcttgaaatctcattactttttgtggatctgtgttantcatggggtcttcctgggtattaaggaagatggatccaaaaggggtggggtgccggtcagtgggctcacgtctgtaantcccagcacttaggggtgggccggagcagggcctgg

SEQ ID NO: 705945 - DNA, 863 bp, Homo sapiens
  misc_feature (863)..(863): n is a, c, g, or t
ggcagagccttggtacttggacctgaaccttgctccgagagggagtcctcgcggacgtcagccaagattccacgaatgactactatctggacttacccctttaaagaatcttcccactgcatcaaaagtgggccctcagattttccataagacctctgagctgtcctcccagatacgagctgccccagctgtccagaccaaagacgaagaacgacgttagccaaacccactatcaggaatgtagtggtggtggctggtgttcgcactccattttcgctagtctggcacttcagtataaagacctgatgccagcatgacttcggctagagcagcgctatacgggttagttgcatcggaccagtgtccctaaggaagtagcttgacttatatcatcttgggtacagctcattcaggaagtgacaaacaagccaactgtggctagcagcaggctgccctaggagctggcttctctgcacaagactcctgctgcacacctgtcacacatggcttgtatctctgccaaacaagccatgaccacaggtgttggcttgattgcttctggccagtgtgatgtgatcgtggcacggtggggtgagtttgatgtccgatgtccctattcgtcaactcaaggaaactgacacaatggatgcttgatctccataaggccagatctatgggccagcgactgtcctttactctctagattcccgaagaattccaagcacctgagctcccgacggaacactggagtactccaccagtgagacatcggccacaccagaagaccagacgggcgcgcaacacgcgcaaccggccgcgacaggacagcaaatccacgaggcccaacagactagacacacagn

SEQ ID NO: 705946 - DNA, 122 bp, Homo sapiens
gtttttttttaaaaggcttccaaaaaattttcttttttggggggtttttgttcccccccccaattttttgggttttttttggggggtttttttggggggtttttttttttacggggccccca

SEQ ID NO: 705947 - DNA, 1439 bp, Homo sapiens
gagctttcctcttctgtcaaccccacacgcctttggcacaatgaatgtgtgcgatagacctcttagtttccctgtctctctttgctctttgaggctcgcgcgttattccagggtgtgtgtctgctgtcgtagatgcacgactaagagtgaggttgcctcatcgtgtttgaaagactcttggtgcatgaacgatagaatattcaaacgccttgcgattgctgtggaattagcacttatgcatctatgctcaatctcttcaggcgaaggtgtccattgtatgacatggactccatgtagagagaatctcatgtggagacttgaccgtagagctcgaaaatttatagctagaatacacgattgttggttcgcctaggaatggaaggttctacgccttaagacacattcttgttgcagcaccaaagtcaacgtcttcatgagccctatgtttggggaagacacagatgtcatggccacaagtttgtcagagcgtcctttgccgttgaaaaagccttaatcgggctgacacatggtgtcttcgaactcgtctagttggccacatagaccaatatggaaacccttgaacgaaggaaaccattcgcacacttcgctttacctttcgtcacatccatccaagaggaattagacctatgagccaaataaacccgtcccccccccgggaagtgttgggttgaaggaaacacaaggaacggtgatatcgaccgtagtggaacttgatttgcatccgattgacattgtatattcaatttggaccacattttgacagggaatggcactaacttttttgcgtcgaatccgactaaattaaccttttacttattcgaacacaactttgtgcgccaaggaacagggaccacatcacatttaaccattttttagttgacaccccacgggaaaacccttcccctttttttatcctttttggcctcaacacacaggtgttaccttaacaacgactggtattatttttaaccaagggacaatggttttggcccaaagggctggccttggacttaaaaagggccttgccccttgtcctgtgttttggcccaaaagaggccttcgcaatagcacacgtcttcgcgggcacttgacacacggggcaaggagccttatccggtcttgggccagaagacaggaagaaacttcccacaggttggtttgccccaaggtcactcccacaacacaacaacttttgggtgacggaaacacagaaagtgcttgtgcaacaaacgccattggggccaagggtaagctctcggcttgacgcgcacgaagggatttttccccacaaacgcgggctggaggtttggcgacaaggaacaggtttccccacaagctttagatctgaccagcaaccctgttaacccaggagggcttccacacaacgggaatggcgatgcaccatggaaaaattctcg

SEQ ID NO: 705948 - DNA, 649 bp, Homo sapiens
  misc_feature (614)..(614): n is a, c, g, or t
aactcttcttgattctgaatagtatttggtcacaccagatgtattacatgtgtggcttcctatttctggagcttatcattttggttattacctgatctgaagcaactatacttctttgctgattccacctatgtgcagaggattatcattgtcaacggcgttcattccttacgagtggctttactgcagtttatttcttaatctatgcagcacactacttcttttcaaaactgcagatcacgggaacagcatgcacaattctgtactttggttataccatgataatggttttgatcttctttctttttacaggaacaattggcttctttgcatgcttttgatttgctaccaaaatatacagagtggtgaaggttggctgaagaagtccagtgtgtccagttcagaaataaattaaactcttcatcaacaaagacctgatattgtgactgccttgagctttatcagaattattgagctagtaatccttcagaaacactcgaattctaaataaacctcttcccatacaccttttccacatgagatggtgtttaacactatgcattagcattgtgatctgacaacgtatatcattgggtgctctcaatgaagagcanatttagatattatgtgcatttgtctacagtagctt

SEQ ID NO: 705949 - DNA, 165 bp, Homo sapiens
gactctagacgatccccagttgagggcgggcgacttcaccccctccgccgacgtggagatcatgaaccccgacctccacatcgccaccctcgaggagggcgggaagctctacatggaggtgcgggtggaccggggggtggggtacgtgcccgccgagcgccacgg

SEQ ID NO: 705950 - DNA, 1015 bp, Homo sapiens
ggcaggctccggggcgctactccattggcggcgggatggagactatgcagagcgcagcggatgcagcctggtgtgggcaccagctgggaggggcacctctccgagacctgctgtggcctggagtgactggttgcgcctgtgtgtgccatctggcaaccacggtggcaggcgccgcgagtagagcccacaagcgaatccacaaggcgagctgccacatgacacaggggagcagcggacacgcggaccggggagggggcgccgagcacgccgtgcacacagccaacggcgagcggaggcgagaagcaagggaagagacgggaccacacagccagcgcagcagagaacacacgcccaaagggcgagagacgacgcgcacacgcagcgaaagctaacgcgagcgcaaccctgacaggacaaccaacgacgaacgaaaacgcaggcgacaacagaacaagagcgacacagacccgagcgcggcgagtcgacgagcacggaggaacgaacagcgaacaccggagacagagggagtccacagctaacggagcaccacgagggaacagagaacgaacacggcgaccgcagcagaacgagcaaagcgcggccggcacacagccggccacggggcgccccagaccgaacgaggggcacacagcagaccgggacgagaagagacagcgccaaaggacgggagcgcaaacgacagggcaggagccgcagcacgccaacggcgcaccagcgagggcgccagcaagcagacgccagcgcaacgcggcagaaggacagcacacgagaagaaaagagagaggagacgagaagcgcgagaagagagacagacggaagagagagcaagcaactagcacggcagacgacagagacgaagaagcggagaacaggcgagaggacccggcggaagcggcgcggagaggaagcagaaccgagagaagaaaaacaggggaagacagaaggaagagagaggccgcacgcgggggcaaagggaagagcagacgcggcggag

SEQ ID NO: 705951 - DNA, 788 bp, Homo sapiens
  misc_feature (47)..(47): n is a, c, g, or t
  misc_feature (82)..(82): n is a, c, g, or t
  misc_feature (107)..(107): n is a, c, g, or t
  misc_feature (150)..(150): n is a, c, g, or t
  misc_feature (153)..(153): n is a, c, g, or t
  misc_feature (159)..(159): n is a, c, g, or t
  misc_feature (255)..(255): n is a, c, g, or t
  misc_feature (281)..(281): n is a, c, g, or t
  misc_feature (284)..(284): n is a, c, g, or t
  misc_feature (297)..(297): n is a, c, g, or t
  misc_feature (320)..(320): n is a, c, g, or t
  misc_feature (326)..(326): n is a, c, g, or t
  misc_feature (370)..(370): n is a, c, g, or t
  misc_feature (395)..(395): n is a, c, g, or t
  misc_feature (400)..(400): n is a, c, g, or t
  misc_feature (414)..(414): n is a, c, g, or t
  misc_feature (423)..(424): n is a, c, g, or t
  misc_feature (439)..(439): n is a, c, g, or t
  misc_feature (445)..(445): n is a, c, g, or t
  misc_feature (453)..(453): n is a, c, g, or t
  misc_feature (456)..(456): n is a, c, g, or t
  misc_feature (506)..(506): n is a, c, g, or t
  misc_feature (567)..(567): n is a, c, g, or t
  misc_feature (570)..(570): n is a, c, g, or t
  misc_feature (573)..(573): n is a, c, g, or t
  misc_feature (584)..(584): n is a, c, g, or t
  misc_feature (590)..(590): n is a, c, g, or t
  misc_feature (648)..(649): n is a, c, g, or t
  misc_feature (688)..(688): n is a, c, g, or t
  misc_feature (693)..(693): n is a, c, g, or t
  misc_feature (747)..(747): n is a, c, g, or t
cgaaggggaagagggaaggaagaggtgacagctcagggcaccaagangtggagacagagatggagacaccccagccccaccnctctggaacaggaaagatgaaaagngagggagcacaggtcagcgtgggaagagggtcatggtggacanggnggtggngtggcctccccaccccctcacattaggcctacacgaacacagacacatgcaggagcctttgcagaaacaaagtcagggttcttcaagtcacaaaangaagggcaggaacaactctagcctcncantgccacacaaggnagctgtcacacactttacaagcngggagncacacatcagacccctgggcactgtcactgcttgccgcctgagngtaaccccctccttttcaaactganctctnccccctccacatcncgcgcagcnnccacagccccagctnatcacngctcttanggngaaccaggccagcaatgaggcccacgatggggatggtgggccgggaaganagctgcccatctcagggtgaggggcttgggcagaccctcatgctgcacatggcaggggtancgnggngccgcgccagngggcgnccaccacagccgcccacttctgggaggttccatcccctgcaggcctggtctccacganntccgtgtcctgggtctggtcctccccatcccgctgccangtcantgtgatctccgcagggtagaagcccagggcccagcacctcagggtgggctcatngtcagagatggggtggtgggtcatatgtgttttgggggggt

SEQ ID NO: 705952 - DNA, 297 bp, Homo sapiens
  misc_feature (39)..(39): n is a, c, g, or t
agctttggtaaaaataatagcttgtaagtaacactaccntgctttatgtctatataagtgaaaaacatttttttgttgttgttagagacagggtctcgctgtgttgtccaggctgaagtgtagtggcacagtctcagctcactgcagccttgtcctcccaggctcaagtgatcctcccagctactcaggaggctgaggccagaggatcccacaagactgggaggttgatgctgcagtgagctatgattgcgtcactgcactccagcctgggtgacagagcaaggtcctgtctcaaga

SEQ ID NO: 705953 - DNA, 1289 bp, Homo sapiens
gtgtatatacacattggaactattattcagccgtacaaaacagaatgaaatcctgtcatttgcagcaacatggatggaactggaggtcattactcattacggtgacatgagccaggaacctgaaccgacaaacaaaccatcaacatactggtcaatcctcacaatggggacgccaaaaacaaacaggggattcccatgtggatggcacgaaaagcgtggacagtggcaggttcgcaacgcgccaagcaccaaggggacaaggacaacggacggaggcgaaatggccacacaaactgtgcatccacatgcggtcaccaacacaatacccgtacaagcacacacggtgcaacgacgcttgctacccaatttcgcaatcaatccaccaagtacacggtgcaaaaatacttacgtttcatataccatcctaatcggttaatgcatattccaagaaaattaagccctcagcaccaggacggaaacgcaaggtttggcccgtggctaattcccccaatcaacacagcctgcaattaaaagcggacgctggacaagtggcaatgagaaacaagaaaccgacgccaaaccccacaaaaaacggggatgaacataacaacaccaagtaggggacacataaccggtccgtgagccaacaacagaactaccccaactggtcaccgcacacccgacgaagaacgacaatgccaacaacaaaaacgactaggaagtacaaacaggcgcacagatgttacagcatacacgcacacggaaaccactagggaacattggaagatggccagagcaagcacacccaacgcaaacgggggcaacgagagtgcaacagtgcaaccacacgagatacagaacaacagcccctgaccacgaccagggaggcaccagaagcaaaacccccaaacacgcgaataaagaaagcagactaataaacagcacagaccaactatgccaaaacagacacacggatagcaaccactaggacgtgggcaggacattgctcacgagaacacacgcacagcgagcaacaagcggaggggacacaaaggcaaagctgacacaccacgaacattatgagagtagaaaatgggagagtccaaaacgtgctcagaaacaagacaggaaaaagcaaggcggcgcaacagacaccgcgcgggagaaacgagatcgagaccaagatggagaggaggacgcagataaagcaagcaaccccaccgcgacgcaacgaagaaaaaagaaacaagacacgaaaacgatcgagacagacaagcggcacaacagaa

SEQ ID NO: 705954 - DNA, 456 bp, Homo sapiens
ggcacgagggaacctgtctctacaaaaaatagaaaaattagccgggcatggtggcacatgcctgtagtcccagcgacttgggaggctgaggtgagaggatcccttgagcccggagttcaaggctgcagagaaccaagatctcgccatcgcactccagcctgggcgacagagcgagaccctgtctcaaaaaaaaaacaaaacaaagtgtatattgtatatatatatacacacacacacacacacatacacacacgcacacacacatatatatatatagttcttaaaatttattccataaagtacacatttccctgtaaactctctacatatacacaagaggtaaaaagtgaaacaaaaaaattttttggggcacagccttgctcttgtcgcccaggctggagtgcagcggcaccatcttacctcactgcaacctctgcctcccgggttcgagcgatt

SEQ ID NO: 705955 - DNA, 345 bp, Homo sapiens
gcagattaatcccaattgttccactagtattctagttttgatgagacccagatttttggtgttgtttatttttgtttttttgaggggtggagtcttgctctgtcacccaggctggagtagagtggcgtgtctcggcttctcccacctccgcctcctgggttcgggcgattctcctgcctcggtgtcccgggtggctgggactacaggcatggtggcgtgtgcctgtaatcccagctactggggaggctgaggcaagagaatcactggagcccggaggcagaggttgcgatgagcctagattgcgccactggactccagcctggcaacagagtgagactctgtctc

SEQ ID NO: 705956 - DNA, 332 bp, Homo sapiens
  misc_feature (174)..(174): n is a, c, g, or t
  misc_feature (197)..(197): n is a, c, g, or t
tgataacgaagatcgaggatcgagtaaactgcagtcaagaaatcgccggtcaaagaagtcgcggtcggggttcttgcggctgccatctgggctccggatgttctcgatctgctggctcaggctcttagagggtggtgtccacaatggaggtcacaggtcacgaaccacattggnatcatcagcccggtagtagcggncaccatcgtgagccttctcttgaggtggctggggcaggaagctgaagtcgaaaccagcgctgggaggaccagggggaccaggaggtccaggagggccggggggaccaacaggaccagcatcaccagtgcgacacg

SEQ ID NO: 705957 - DNA, 446 bp, Homo sapiens
tttgctgtctctagagtatcccgcgtcggctgcggcacggagagatgtcaccgccgtaaggagggctcacggcagtgggctgctgtgctgtccttgcctgggggatgtgtagaggcccggtgaggtgcgcgagggccgaggcagtgcaggagatggagggagagcccccttggccaggttgtgcacccggtccaaggagctgtgcttggtgggcgaggcagttcttggtgagaccttggcagtgctccttgataggtgagaggacgacagagcgaggggcgcagctcgtatgccggctgcttgcgtgggctctggtgcgcgggacccccttctcaggcaggtagccgtggtacagggaggcacgccgggcccgggctgggcttcggtatgccactcggaaagccccagggccgttagtaggggtatttccaggcacgaaggccggg

SEQ ID NO: 705958 - DNA, 126 bp, Homo sapiens
cgataacatacaagcgatactatctgttctcacacctacagcctttaagtagcactatgtacacaaatcaaggtctagtagcatatacatttagcactttctattatatttacttatattccatta

SEQ ID NO: 705959 - DNA, 130 bp, Homo sapiens
actcggactaccccgatgcatacaccacatgagacatcctatcatctgtaggctcattcattctctaccaccagtaattattaatgatttcggatgatttgagaagccttcgcttcgaggcgaaaagtcc

SEQ ID NO: 705960 - DNA, 478 bp, Homo sapiens
tacaaccacatggccgatgttgacgtactgatagctcactacctatcagaatgtgactgtatctagaaacagggcattatcaagtagacaaattaatgtgaaatgaggtcatataggtcgactctaatccaacagtatctatataagaggagatttacaagacacatagcacacagggaacatcatgtgaagacatcaaaggaagatggctaatatggttcggctgtatccccacccgaatctcatcttgacttcccacatgttgtgggagggagtgggtgggaggttaattgaatcatgaaggcaagtctttcccgtgctgttctcatgatggtgatttaagtgtcacgagatctgatggttttacaaacaggagtctccctgcacaaactcttttttggcctgctgccatccatgtaagatgtgacttggtcctccttgccttccaccatgattgtgaggcttcctcacccacatg

SEQ ID NO: 705961 - DNA, 216 bp, Homo sapiens
  misc_feature (23)..(23): n is a, c, g, or t
  misc_feature (29)..(29): n is a, c, g, or t
  misc_feature (41)..(41): n is a, c, g, or t
  misc_feature (128)..(128): n is a, c, g, or t
  misc_feature (170)..(170): n is a, c, g, or t
tgatcgtgctcggtaccagattnactggnagcacaatctanctccatctgctaaccactaaaacactcaccaatgacctcaacccctgacccccatgcctcagggatactcctcaatagccatctacntgttcctggggttgatctctagagtctgacctgcattgcatngcaatgcttgtgcacttggcctgtctcgttttaccaactgtctgtc

SEQ ID NO: 705962 - DNA, 1296 bp, Homo sapiens
ggacacaaggtacccaatgcctgtttattcaccaatcaacaaagcaagaccacacactgggaaacatcattaaatcacgttgcctgcttcgcccttcagccttcctgccagtgacttgtcagctttccgtgcagcgccctcgccccaggcccagcgcattccttgcttaccagtcccttgccaggaaacctcgtgaccccccagcaagaccacagtcacgcgcttaatgcttgacccccccaaggcggtccattcgagacagccgcaaccaacccgttgtgcggcccgagggcgcaacggggcctccgagccctcccgtggagattccccaaaccaccattaatccaatcccgcacccatggggcaaaaggtccgaaggcgcccccattcccttaacgcgggacctccgaacggcgctttatccgaacgggcgccgaaggcccgccccaaaccgaagcaagcccaaagttcccgttccgcttggccaaacccatttctggaaggcaaactttaaaaccccccaaagattttccactttgggcggagcccccatatggccgcccattggcagacactttgggcagggaccacccagcccgattcccgaaaggggaccccaaaaaaagccccaggacacagccccgagaaagaccgcgcccgcccccaaacgggacccgaaaaaagagcgcgccgcactttaataaccgcaagataacacccgcgaacgcgagagctccggcccgaccccgcgccgtgaaacccgcggagcggcaccccaaaaagcccccaaaacgaaaccggaatcgacgcccccacccaaaaataccccagtgggggcacaaaaacgccctaaaaaccctttttttcccaacacccacccccatctcttttgtggatgccccacgcgtgttaccccagcccccgatttgggggcgcccacccccccccgaaggatgaaagacgagacccgattttgcacgtatgccgcccgttaatttccggacctccagtccgcgaaagtgcggtcccaaaaaagggcgcgcggggcagggaaggcggggcaacccccggccgttttcagcaaaccacccccgatctttttaaaaaagcgctatatacccccatgtatatacccccgaaaaagacccccaaaaaaaatacccccaacaactattacgggccccacacacaggcgccgcagaggagcggcgggacccccaaccaccccgcagaaaaaaaagaccgccccactccccccccccgaggagtgaagcaccagcggggcccacatcttgc

SEQ ID NO: 705963 - DNA, 104 bp, Homo sapiens
ctgtgaagtaccagggtcctcgggacttccagacactcgaaaactggatgctgcagacactgaacgaggagccagtgacaccagagccggaagtggacccccca

SEQ ID NO: 705964 - DNA, 169 bp, Homo sapiens
tcttcagatggtagtacctgtacatcagttggtatttttttcacttagtttttttttttaacaggtcataaaattcacccatttaaagtacaattcaggggtttttagtatatttacagagtggtacatctatcaccataatctaatttggcaaccgcatcaccggttg

SEQ ID NO: 705965 - DNA, 168 bp, Homo sapiens
tgaaaaagatcagacagactgtcatgtggtgcaagcggggtggcaggtgaatatgatccagaagtgaagaacatagaaaaaaaaataaaagtttgaaatcgtttgaagtttgtttgaaattgtatgtttatgaaaaatctttcaaacatcaatttcaaacaaacttca

SEQ ID NO: 705966 - DNA, 574 bp, Homo sapiens
  misc_feature (358)..(358): n is a, c, g, or t
ctcggtacccgtcagacgctgaactatgtgcacttcaaatattatgccagaaattttgtccaaatattcatgttcggtaaacagagacacatagttttcttgatttgaaactgttctgaggacttgagaaactagagaaaacaagaaaatagcagccccacaaatttaaaagctatcatctctaccattagcatataaccatccaaaaatctgtggaatgtttagatttactcatgaatgatgctcattcgtagaaatattttgaacaccagtagtgctatcaaggcccagtaatgttccaagataagattgttctctaggatctagcatctgttcaggtcgaactgggtgaactatntttgcaggttgaggagtaagagtatatttttccagaaaagctaaatccgctgctcgtggataatcagttgactgtggctgtggtgacagaatctcatgagaagatggtgggagtgtggtagtatgacgcactaggtcactcggagtgtcaggcatctgaactggaaccagagttactggaacacatagttcagcgtctgacgggtacgagcatata

SEQ ID NO: 705967 - DNA, 880 bp, Homo sapiens
  misc_feature (70)..(70): n is a, c, g, or t
  misc_feature (384)..(384): n is a, c, g, or t
  misc_feature (728)..(728): n is a, c, g, or t
  misc_feature (755)..(755): n is a, c, g, or t
tattcccctatcatataatgtttctaaacaacctcttatttccgtttgttagtatggatttcctttgatnttgttaccactatacgtattcatatattttacttcattcctcgctcatctacgctgtctacacgctaacacctattcttgacattccacactatcgatccacgcgcctcccgaccacacgactggaagaggcgactcgcgcgtctacgcccacatcatagcacttataccgtcatttgtcacgcacgaacgatacagagtggatctaagtgtgcatctaacgtcgagcgcgggcgggcgcgcttgctagcgtagtgagtacccgcggctggaggcgttcgctgtcgcgcgtccggacgcgcccgcgcctcatgntacacacagagtcccatctatcagatacgctgcgtatcggatcgccccacaagcataccataccaaaccgatgacatatgctacaaatatacagtatttgagtcgccgcttgtcgtggtacgcgtggacatgggacatgagatcacccccgcatcgtctctccgcccactcttctttccgtcagtgctccatctcactttcttatccctctcatccatcacgtcatcaagagcggtcccacctactgcacttgagcgatcttgtcatagccatcgcactacgtcgcgcgtacgacgcgtaaggagtatacgagcgtctcgcgcggcactacggctcgccatcanacaatgctcacgtatgtggatgtttantaccccaactctgcagactcccgaacacgcctagccgcactgctcgcactactttgagcgacagccagggaatcctctgcacgcatggccagcggcacagccacatcttaactactactagcgat

SEQ ID NO: 705968 - DNA, 294 bp, Homo sapiens
cctctgtttcgtgtgctccttgccaagggctcagtgagtgcacagaggatacagagctgctctgtgctgttgggctgagaagatgctgcccgtaagcctcagagcagagcattgtgctcgtgtgtagtgtgtaagtgtgcagctgtaacccatggcatcagctgggcacattgcagcatcagtgtttcttgtaccaagaggttgtatgcacgaccttccctccgttcccagagggacaaatagaggtagctgttggggaacgaataggggagaaataaagaatgggaagctgga

SEQ ID NO: 705969 - DNA, 847 bp, Homo sapiens
  misc_feature (658)..(658): n is a, c, g, or t
atccttggtcttaaaaaaaaatcgccaaatattaggccaaactttaaaaccatttttaactatccagtatatccaagagagatgcccacacattggtatttggtttgccagaatggtccattggtgattaccaaactggaccaataacccattcaggttgaaggttgattggaaaaccttaaacactatttccggtctcatgggccatacccaacctggaacgcggcctggatctcggtctggatctcgggaagcctaagcaggggtcggggcctgggttactaacttggactgggaagacacttaaaacctaatttccctttttttatttcttttttgggaatggacgcccggggtgacaacgaagccagaactccggtctccaaactaaactaaactaaaaactaaaacaactaaagcctgaatgactcacagaatggccgtcacacttttcctgaggttcctaggcctctatggcacgtggcaacctagcctcacaaacacttggacccaggcactggtaagagtcggcaccggccataaaggagctgagcccaagacgggacaggctggggccccgtagccaaagggtaccgcagacgggagacctaaagatgccggtgacaaagactctggcaacctaaagcctatccatggnaccacccagaaccgcggccccggctgacactggggatacccggcgagtccccaggaacccccttcatgccagggatcctcactgggccccccgtggcccggaaagcgaacccagacgggcgcaaagacccggctccgcgcgacagagcccaccgcggacccactggggggcccgaggaccccacagggg

SEQ ID NO: 705970 - DNA, 160 bp, Homo sapiens
cttgtgtatggagatagcagacatgggtgcgtgggctctcccgcaggcgctggtgatgatggagtatagcagacatgggtgcggggccctcccgcagtgtgctggtgatgatggagatagcaggcatgggtgcgtgggctctcccgcaggtgctggtgat

SEQ ID NO: 705971 - DNA, 1054 bp, Homo sapiens
aagcagtggtatcaacgcagagtggcattacggccggggggggtcaaaaaaaaaaaaaaaaaaaaaaaaaaaaaaatggggggcggcgggccgaaaatttaaaccctgtgggcggggcgggggcgccaagttaggggttagttgaaaccgtggccaataagcggggtccataagggaaatccgtcgcaattgcactaagggcgtgggggtttcccaccaaattaaaaaaacgcccggtgggaaaccgagggcggttcgtgcacacaatccaagggggagggtccggagggccacaatagcgggacttcaaccaaacaggggggtacaacgaagagcgaaattattaaaatttaacgccccgggcacgagggaagcacactggacaacagtgggtgggcaacaacaataaccaacaccgtcgtcctgaacgacagtggaaagcacccaacaagccaacaagcgggccaagatgcgaataccatgaagtggcgccacaggagacaatcacaacccacattggtcgagactcgggggatacaacaaatagtgaagcacaggagggaagacaaaggcagacacagcaaacagagtggcggtcaatgtggagccagcacagataagcacacaaaaggaggggtcacacctcaccaacaagagatggaaggcaaaacaacaaaaactggatcggcacgaaacccttgagacaaatcggcagggtccacggagtaaacaccaaccagatgagcagagttttgtgtaaacacgacagcagaatcgcgagatatgcactcccaaaggagaaacggtcgaaaagtataggagaacggtgaagggggcactaatacaaataacgacacagctaacggccaagcaaccgccaaaagctcaagcagaaagcaacaagggcaaacgctgaattcttcaggtcacggcgagaccgacgcacgtatgcaagaaaagagcaaggctcaacggatacgagactacaacgctactcgagaacacagaaaacggcaccgcatgagaataccaaaagcacatatagtatattatg

SEQ ID NO: 705972 - DNA, 442 bp, Homo sapiens
  misc_feature (11)..(11): n is a, c, g, or t
cccccaccagncctgcagctgcccactgagccagcccctctgcccaaggcccctccctggggcgatggcagccaagggggcaagtcacatggctgccagctggagcccaggcggccgatccacacaggagccctgtccgtgatgtcagcaccaccaaagcatcctcattaaccgccccctgggtgacgcagcccagcttttctgcgtgggatgggtgggggactcactgagacccaggtgttcgcaagaagccaggatggaaagtatgactcgctccttcccaaacatgggatggcttttccattgctaatatccgaggaatccggtgaagtagtggaaagaccgagaaggcgggagactggttctcaccctggcccatcctggctttagaccagaagcccagagcctcagtctccccttctgtccaccagaaaccacagcc

SEQ ID NO: 705973 - DNA, 204 bp, Homo sapiens
  misc_feature (94)..(94): n is a, c, g, or t
  misc_feature (104)..(104): n is a, c, g, or t
ctttcctagaaacatgaaataagcagggcaaaaattttatttaactcattgatgtggatgaactgtaagtccaaagacatgtgtatttaaaagntacacacagnggagaagaccatgtagagacagagtcagggactgatgtgatacagacacaagccaaggaggagtcaccagaagccaaaagaagcaaggaacaaaatttct

SEQ ID NO: 705974 - DNA, 121 bp, Homo sapiens
cacgaggatcatgctcacttctaaacacctgaaatatcaagacttagacattatcgctcctgactgggtgctgagtcacactcctgtaatcctagcacatttcaacagccaacgaacgcag

SEQ ID NO: 705975 - DNA, 206 bp, Homo sapiens
ctagaggttccgttcgacggaagcagatagtgaggtttagttgagccaataatgacgtgaagtcctgtgggaagcctgtggttacaaaaaatgttgagccgtagatgccgtcggaaatggtgaagggagactcgaagtactctgaggcttgtaggagggtaaaatagagacccagtaaaattgtaataagcagtgcttgaattatt

SEQ ID NO: 705976 - DNA, 272 bp, Homo sapiens
gaatctggcttcagttaagtctgggacggaacgagaataaggtggagtcgaccagcagcgccaacgaggacgatgcctggtggagaggatcctggatggctgagctggacgtggagcccaatgaccgagacctacgtggagtgctactgcaagcacaatgtacccagagcagccgggaaggttcgctaagctcttgctccctgcctgccggctctgcgctccatcggggctcaaatgcctggaacatctcttcttcttcaagctcatcgggc

SEQ ID NO: 705977 - DNA, 847 bp, Homo sapiens
ggatcttgcgcagggtcggtgtgggcgcaggctgagcgccggaatcgtgcgggtaggcgtctgcggctcggttgagggctcgggcgggttcctgtccttcttcttcgcggtgcagctcgggacttcggcctgacccagcccccatggttcagaagagctacagaaagatctagaagaggtaaagtgtgtggctggaaaaggctactaggaaaagagtacgtgatgcccttacagtgaaaaatccaagatttgagacagaaatcaagaacaagatgcaaagaaatcacagaagaaagcagaacttctgtgataatgaaaaaccagctgttgtggttgctcccattacaagggctatacggtgaaaatcagtaattatggatgggatcagtcagataagttgtgtgaaaatctacattaccttaactgagttcatcaaagttcccactgagaatgtgcaggtgcttttcacagagaggtcatttgatcttttggtaaagaatctaaatgggaagagttaatccatgatggtgaacaatctcttgaaacccatttctgtggaaggagtcaaaaaaaagtcacgactgatacagtcttatatgtgtgaagaagtggaaacacagtgtggatactgaccagttgaaaggggtgcaagaaaaggaggctctatggatgaaagatctatgaggatgggaaggtctaggaatttgaatgggcgtgtgaggcacataaaagtggggaagagacagcaggaagattgggataggtggaaggggagggaaaggtccagaagggggatatggagaaaaccaggaactgggtgaatacgttttgttgcttttctttgttc

SEQ ID NO: 705978 - DNA, 944 bp, Homo sapiens
cacatgccggctgatccgatgaccgtgttgtaagtgtctaagctagtcgcccgttggtgtatttctctccgggcaaatgtgtcctctcccgggtgtccctttctgtgtcgcccctctaggcctcgtctgcctgtgtgtcaacctggaaatggtatactctctgccgtgtcctccctttaatagtgcgctttgttcggtaatatccgaaagtattcggtgctcctcggctatgtcgtctcgtgtgccctccagaagggctgttgtcctggcgtctccatgccctgtttccatcagacgtgtgttaatctggttcatccttacactgtcctggtgcgtggttggcgattcatgattagcatgcaatgcgttgtcagcatgcggcgtggtcagttatacatcatgggtttatgcgcaacaatgttctccttgttgtcgtcaatgaaccaccgtgtttccgcccccgggcgacgcacggctcctccccctttttatagaggactgattctcaagagcaaggagctgtaagaaatttcgttttttagccgtcccgaggtgcctttgtggtgtcataggaggacaccaccctctcgcgtagggtgtttgaaggaacacccgccctcgcgggtgttgtttccataaccgcgctcagcccgcctgggcgacatatggggggttgttccattctcttgagcatacacagccggttctgctgtgggggcccctcccattaatcttataatgagggggagtgtacattcttatctcctcggtcttttgctccgcgcgactaaggcaagacacgtggtaggcgatagtgatgacaaaacgccctctctggctgtccgctaggaaaacaaaaagagtccgaacggcgtgaggttagtgcgagcccttcctggcgagcttcttaaaaaaacaacaaccttttttctttcaacaagaca

SEQ ID NO: 705979 - DNA, 478 bp, Homo sapiens
  misc_feature (17)..(17): n is a, c, g, or t
  misc_feature (43)..(44): n is a, c, g, or t
  misc_feature (66)..(66): n is a, c, g, or t
  misc_feature (92)..(92): n is a, c, g, or t
  misc_feature (112)..(112): n is a, c, g, or t
gccaggctcgccaggancccactggaaacgcccaccacggggnntccttgttacacatgttctttntttatccgatcaacctgtgcactttngatattttgatattatattngcttccttaattcctcgcgtagagacggtctcaggtgccgtggtctatgctcgtgggcctgcagctgttcgcctcatctcccaccgtgtttgtatggtgtcagcacgaggcagagctgtgtgctccatatcgtgtagctttagactcggagatgagtgctttgacccagcgaggagctcagcttaatgtattcacgctgtgggttacatgctttagaacattcggctttgcgggtcatgtgtgaaattactgattttaaatgccttgttcatttataaaatccggggatttcaaaatctgggggtttacataatggaactaacagtattcttacggattagtttcatggtaacaaggagaaaacct

SEQ ID NO: 705980 - DNA, 978 bp, Homo sapiens
  misc_feature (777)..(777): n is a, c, g, or t
  misc_feature (978)..(978): n is a, c, g, or t
gcttagtgtgctgtggcatttgatgtcattatagacatctgtcgaagtgatatatctgcatataagacattcaacctggtagtcggatagaagatttatatctcatatttgtcgtcatttggacatcgattcctatcctgggctaagtctccacctacatacgtggacctttacttgattgtcagggtacgtcagagatttgaactctcccttaaaaggaaggactacgaaatcataaggaggaacagtaggcgcggctacagattacctgtaatttggatcccgcactacgcttaaccctcgtggatctgtgccatccaatggattgttcttggaacatttgtaactgtgtgttatttaccggtgtagaatagtcatccttgagggtaattccttgggacgtgtcatagatacgtgaattgtctacttgacagactagggcgcattaggaagtaaaaaggtattctcccaaacatagagggatcccgcgtcaccctaatccaaggtcgacatatgcatctcctcgtctatgtacgcccgctcgtttagttggcgaagaacccagacacgtctagtcatactacgatatcatggtgtgactggacgaccgcagtttgcttccactaatcatgtgctttaactattatggtgccgtttgtttgataaaactaatatctacactcaggatgcggttgctctatatcaaaaagctaggaactttctctaccttgtagagtcctaacgcgccgtacctaagaacctgtctgatagacaagnattactcgcacagagcacacattttgtttgcaatgcgaaagcttctaggacacccttctttgcacttacacgggagtgatactttgtgcattacccaaccacacactcagagcatcgtactcccccttggtgaatgcaccaaaatctagccgttgggtttggtgacacttgagtgaccgcgggctttcttggttgtgccan

SEQ ID NO: 705981 - DNA, 181 bp, Homo sapiens
gataattactttacaagcagcactgatatgactagccatataatctaagttataaaatagcttaccccagagtagccttcatagatcccttatattttaatagcttatttcaaaataccatcactcacttcacattttttaagactgcatcctttgcattacatgaactgaaactgagcca

SEQ ID NO: 705982 - DNA, 339 bp, Homo sapiens
tcatcaggctgagagagatttgaatactcccatgagatggagtgcccgggggaagagagtgggctgcatatttgatgttatataggcaactagggcattccaaccttagggctttaaggagtcccagctgacttagggtggatatagcccaccagcacagcacagatgctgtacaaaagcatagccagactgcttctttgggcgggtcccggattcattcctcctcgctgtttgggacttcccaactggggcctccagccgcccccactggtgttctcctgctgacggtgatttcagttttttcttggctggagctccctgatggaggggcagggcatc

SEQ ID NO: 705983 - DNA, 172 bp, Homo sapiens
  misc_feature (23)..(23): n is a, c, g, or t
  misc_feature (129)..(129): n is a, c, g, or t
  misc_feature (164)..(165): n is a, c, g, or t
ccaaaatgagtgccagcgacccnaactcctccatcttcctcaccgacacggccaagcagatcaaaaccaaggtcaataagcatgcgttttctggagggagagacaccatcgaggagcacaggcagtttnggggcaactgtgatgtggacgtgtctttcatgtanntggcctt

SEQ ID NO: 705984 - DNA, 155 bp, Homo sapiens
  misc_feature (1)..(2): n is a, c, g, or t
nntgctgcaggcaggacctgtggcggctcgaagaccgtgacgggcgagagattgctgtgcgggtgcggggccggatcgaggccaataccggcgaattgctgtcggacgcggcgctgggcggtctcggcatcgcgctgcattcgtactggcatgtc

SEQ ID NO: 705985 - DNA, 303 bp, Homo sapiens
  misc_feature (38)..(38): n is a, c, g, or t
  misc_feature (105)..(105): n is a, c, g, or t
  misc_feature (126)..(126): n is a, c, g, or t
ggggtggaggaggcgggggaggcgggggggtagcgccnggtattgacgtggggggagaactttgggtgttggaaaccaggtgtccgggatcagagatcattgtcntacttacaggactcgacatangagcgacagccctatactccctttacatatttaccacagcacaagggggctcactcacccaccacattaacaacataaaaccctcattcacacgagaaaacaccctcatgttcatacacctatcccccattctcctcctatccctcaaccccgacatcattaccgggttttcctctt

SEQ ID NO: 705986 - DNA, 148 bp, Homo sapiens
  misc_feature (73)..(73): n is a, c, g, or t
  misc_feature (110)..(110): n is a, c, g, or t
ccacaaggcattctctactgctatgtgaaattttctctgcacctctgaacagagaaaacacctgcccctgtanatcctttttcccctcccctccctcccagtggacttcnataaattgtgtcttgttttttatttttaaaaaactgac

SEQ ID NO: 705987 - DNA, 389 bp, Homo sapiens
caactgacatagaggagggggaatcacctgaacccaggagatggaggttgcagtgagccgagatcacaccactgcactccagccaggcgacagtccaagacttgtctcaaaaaaaaaaaaaaaaaaagaagggcaaacccaacttccaaggggaatttcctttttctccccaggaattctaaatttttttgggcccccaacctcttcttctcgggctttctcacaggggggatgtgtccctcttcgtatcaaagcccagtccctctaattggggcttggggcccctctctatgtctctcaaaggctgggcccttggggtggcctctcatggtctctgggcctctaatggtcagtttccgggggttcctctaagagtcgccttggcgggc

SEQ ID NO: 705988 - DNA, 407 bp, Homo sapiens
cgagcggaagacagaaccagccacaggtttcatcgacggtgacttgattgagagtttcctggatattagccgccccaagatgcaggaggtggtggcaaacctacagtatgacgatggcagcggtatgaagcgagaggccactgcagacgacctcatcaaggttgtggaggagctaactcggatccattagccaagggcagggggcccctttgttgacccttcccaaaggctttgccctgttgacttgcccctccttttcaccaatgttttttttgggcatgggagggcctttccctaacccagctgtccccagagccacagttcccctatttggaaaggggccggggtttataaaaactagggaatgacccgaagggggaacattattttcccggataatacccatt

SEQ ID NO: 705989 - DNA, 831 bp, Homo sapiens
  misc_feature (259)..(259): n is a, c, g, or t
  misc_feature (595)..(595): n is a, c, g, or t
tccataaaaaattttttggtttttctctttggggaaaaaaaaaatggggggaaacccccttctctttacccccccgagatggattgccacgctcccgtagaagaagtataaaagttctcccaacatataagagaggggatgctccccctcaggtgtgggttataatcatccgtccactattatataaaacacgttttgtgccccttttatcaccgagagaagtctccctctctactctcaaacaaaacacggtgcgccncacgccagcagaaagtctgtgtggagagagagaggagagccactaatagatcacgagagagtgtgtgcagagggggcggagacagctctccacaaaacaccagagactccacacataaattccgcgggggggatatatatctctctctcactctctctcagagagggcggagaccccagtgtgggccgcccagcgcggcgcacccagagaggagaccacccctgttgtggggcggcggacaaggagaaggaaggactcctcccccccagaggcggcggggaagaggcgccgcaaaccacaaaacaccacaggcgcgttgcctcgccgtggcggacnacaccagtcgtggtgcgcgcgcgtatcacacacgaggtgtgcgcccacaaagagccacccccacagagagaccttaccaccacgagcgccccccgcgagaggagtggggagaggaagcgcccttccagcggcgcgctcatcacacacaaaacacactcaacccgagggggggcggccatcccaaagaggagaaaagagaagacgcctctcaccccaggtggggcgtgcttcccact

SEQ ID NO: 705990 - DNA, 204 bp, Homo sapiens
  misc_feature (124)..(124): n is a, c, g, or t
gacccttatgagaactaccgccgcaacaagagctactccttcattgcccgcatgaaagcccgagatgagttttccacatttgggactcgaaaagaagagaaggaagactgaccacaggcttcanttcgcagtgtggagggcttgtcctgcatttgccctagaggaggtgctgcagatactactcgcagtgcccagatagcaaaa

SEQ ID NO: 705991 - DNA, 352 bp, Homo sapiens
aaaaggaattttgtttgtattttttatttacattttatatttttgtacatagtgttatggtcatgctatgtgtaattattctcgtatgtccaaaccagccttctgatcgttttctgtcctacttctgactttacttgttgtgtgaccatgttcattatatatctcatagtgtttaataatccttgtaataaaagcaaaattgtctactgttaaactaatcttattccgagcattctagtaacttttttgtgtatgtacttagctgtactataatgagttggtttgtatgatatggttaaaaaggtcaaagataaaaggtttcttttgtgttccttttttgtctattgagttg

SEQ ID NO: 705992 - DNA, 366 bp, Homo sapiens
agttgtcttaccggtgctagtactataatggtgatggatacctgtggtccaagaggtatggactattggaggggatcaaggcctggagcgcggatacaggaccgtgcgaaagatgagcaccacaatgatgcatgttgacaacacgacttcgcgcagattgtatgacgcactaatctattatagcacagatagggctgcatgctagcctgtgtgtacttatacctgagctaactgtacgacagtcagcttacatcggagtaacctttatcacggacatcggtgtgagaagcgattatcagaatgcatatgcacgactaggacagaatattgtgccatgctaccgtgactcttgatcctataggatcc

SEQ ID NO: 705993 - DNA, 742 bp, Homo sapiens
  misc_feature (12)..(12): n is a, c, g, or t
  misc_feature (69)..(69): n is a, c, g, or t
  misc_feature (76)..(76): n is a, c, g, or t
  misc_feature (115)..(115): n is a, c, g, or t
  misc_feature (132)..(132): n is a, c, g, or t
  misc_feature (141)..(141): n is a, c, g, or t
  misc_feature (150)..(150): n is a, c, g, or t
  misc_feature (192)..(195): n is a, c, g, or t
  misc_feature (207)..(208): n is a, c, g, or t
  misc_feature (294)..(295): n is a, c, g, or t
  misc_feature (309)..(309): n is a, c, g, or t
  misc_feature (317)..(317): n is a, c, g, or t
  misc_feature (328)..(329): n is a, c, g, or t
  misc_feature (379)..(379): n is a, c, g, or t
  misc_feature (401)..(401): n is a, c, g, or t
  misc_feature (412)..(412): n is a, c, g, or t
  misc_feature (426)..(426): n is a, c, g, or t
  misc_feature (441)..(441): n is a, c, g, or t
  misc_feature (456)..(456): n is a, c, g, or t
  misc_feature (463)..(463): n is a, c, g, or t
  misc_feature (466)..(466): n is a, c, g, or t
  misc_feature (474)..(474): n is a, c, g, or t
  misc_feature (482)..(482): n is a, c, g, or t
  misc_feature (498)..(498): n is a, c, g, or t
  misc_feature (502)..(502): n is a, c, g, or t
  misc_feature (510)..(510): n is a, c, g, or t
  misc_feature (519)..(519): n is a, c, g, or t
  misc_feature (534)..(534): n is a, c, g, or t
  misc_feature (561)..(561): n is a, c, g, or t
  misc_feature (587)..(587): n is a, c, g, or t
  misc_feature (652)..(652): n is a, c, g, or t
  misc_feature (659)..(659): n is a, c, g, or t
  misc_feature (676)..(676): n is a, c, g, or t
  misc_feature (694)..(694): n is a, c, g, or t
aaaaaccatcantctggacggatagttacaatccaaaaatagtataaaccttaacaaaccctctctganccaggtnatattcacatctccccccaagtcttgtcagttagaatanaatatactgaactagtnagcccagtntttctttanaataggcttgactttggaacatgaaccttggatagatttttnnnnatgggagggacnnacaggaaaaccattctatctatccacttaattagtactaattaacggaacaaagttattaaatagctctcagtgctaagtcaagcnnttattcagaggccnttttgttnttctgctgggnncggggtgagtactttaacaagcttcttatcctgaggtacattccagtagnttctgccatattctcaaattcnaatggcgtganttcagtagcaaatntgctcatgtgagggntagggctatgaattngaggggncgnggaaggantggggtgngcagggaagagcgtcnggcngcccccantgctgacgntacagtatggtacgncacttccattatcaagaagggcacctncagtgtgtaccggagccaactctgcnttttccttctgacaaagtgatgtcacctcagagtctggactggaggcatgttcagcttctgattnctttgtnaaaatctctggtacctnaggctcatccagcgtctncttttcagatgtctttccctccgggacagggaggtctagctcatttgg

SEQ ID NO: 705994 - DNA, 485 bp, Homo sapiens
acgtcgaacatctgatcgctcaataccgtcagtgacatattcagccggttattaaggcggatggcctacgagaaaaataaaagagtcggtatccaccatccgggtatcgtaggtatagcggtaatagctcttactggttagcgagatgtaataggcgctgtagatgttgaacagataggcgttggtgttattgacctgcgaaagctgcaggttgtcattatccagcagctgttccatcaggctgatcatcgacagcgcggcgattttttgccgaaccccgagctgtctggcgacctcatcgtccagatgttcgcggatgcgggtaattctttcgcgcgccgcccaatcggcgggcaaacattgcgctcgggtgatttgcggatcgatcaggctcatgcgtttgaggcggtgcgcctgcaagtgagcctgcacggcttcggagatatctttggcgcgctcacttttgtccagggggatccctccta

SEQ ID NO: 705995 - DNA, 424 bp, Homo sapiens
  misc_feature (1)..(1): n is a, c, g, or t
  misc_feature (12)..(12): n is a, c, g, or t
  misc_feature (32)..(32): n is a, c, g, or t
  misc_feature (41)..(41): n is a, c, g, or t
  misc_feature (90)..(91): n is a, c, g, or t
  misc_feature (103)..(103): n is a, c, g, or t
  misc_feature (107)..(107): n is a, c, g, or t
  misc_feature (144)..(144): n is a, c, g, or t
  misc_feature (242)..(242): n is a, c, g, or t
  misc_feature (245)..(245): n is a, c, g, or t
  misc_feature (277)..(277): n is a, c, g, or t
  misc_feature (281)..(282): n is a, c, g, or t
  misc_feature (293)..(293): n is a, c, g, or t
  misc_feature (331)..(332): n is a, c, g, or t
  misc_feature (343)..(344): n is a, c, g, or t
  misc_feature (350)..(350): n is a, c, g, or t
  misc_feature (371)..(371): n is a, c, g, or t
ncatgttgggantgagaaatgaccgggccccncagggctgncggtgtgctgtcagcctcccacaggtggtacagccgtgcacacccagtnncgtgtctgctgntgtnggaccgttgttaacacgtgacactgtgggtctgactntctcttctacacgtcctttcctgaagtgtcgagtccagtcctttgttgctgttgctgttgctgttgctgttgctgttggcatcttgctgctaaccctnagnctggtagcagatatgcacattggaagctcccncccnntattgttcttnaaagtggaggtctcccctgatccagagcaagtgggagnncccgtgggggnnaggggncctggagctgccagcaccaancgtgattcctgctgcctgtattctctattccaataaagcagagtttgacaccg

SEQ ID NO: 705996 - DNA, 887 bp, Homo sapiens
gtgggtcggacgcgtgggtcgatccacgcgtacggtatgaagtcttgctctgtcttggcccaggctggaggtacagatagtcggtagagtcgtcagctcgtctgcagagcctcgtacacgtacgcctgagttcaatgatgacttctgcttggtagatcaatggctctcctgtagtgagctacgtgattagcaggctacagtgcacagcaatacctgagcttattgtcgtgtcattgtatgcgttaggatggacgatgggtagctcgacttgtattgtgttgtgccgatgtgccttggcctggtgtcatcgcgcaacctaccatgggccatcggaacgttgtatcacacacaacgcgttagtagcttcaccgaaaagtagcttggtgattcccagggtgtagaagtccacccgttgtcctgagctcttgacgattttctctctattttgattactatagcacttgcgtaccacatcattgcttgctacacttgcgcttagatgattctggtgtttgactacttgatcatcttgatatagtggatcgacgttgggacattttaaagcaggtattttcggcaggtcttcgctggtgtgctgctgctagagtgctgtccctatcccaggacacgcaaatttcacactcgcgttcggcggccctgtcccctaaagcttctttaaactaaggggtggacatcccaactacttcttctgaagcccgggggtcctatttgtgcttgcacaccgtttggaagtcctattgtattggcgaccagcaccggcgtagtaatacatattcaaccttggggggacagcttggctactccttacaactaatttactctaacgtgtggagcatggttaaactaccgtgtacactctggacggc

SEQ ID NO: 705997 - DNA, 377 bp, Homo sapiens
  misc_feature (2)..(2): n is a, c, g, or t
anagcatggtcttgcaagtgtggcctggagaggagagaactgacagcttgttagaaatacagattctcagacttcgtcctgtaactactgaatcaggaattctggtggggaggggcccagatacctgttttgagacagagacttgctctgcactccagcctgagcaatggagtgagaccttatcttaaaaaaaaaaaaaaggccatttgttataacgaacttacaatgtgaggttcattaacaaagagttcagattgtccctcacctcctatgaggccttggcatgtgttctttcctattatatctcaggaactatgcagtattgaaccatgttgctaactcatagtgggttaaatacaaatcgttcttctgttcta

SEQ ID NO: 705998 - DNA, 1066 bp, Homo sapiens
aactccacgtctggttccaggtctctgtatctcgactgcaacgtgggtcaggacagggatcgatgatccgtcgcgtgcaactcattccagaactgccgcatggcgcacatacgaatattcctattctcggtggttgcctgacctcaggtgtaatgcatgttgttcgtcgtggacaatcatacgtgcatttatggtgaccatgagctcacacacagattgctggtgcgagtaagtctctcgtgtctgtagcagagcgaaacaatgtgatgtcttcaccgagtactgggtcgatcgaatgatatcaatacgattgctcgagaaggaacgttcagattgcatgagacacctgttcacccttttgctatgcctaggcatagtacttgccataacattcttcatcgcatgcatacgtgcatgaggactatcatctaagagaaacacagagaggactgttggcgacggttcgtgagtgaagacgacctctaaatggccggccgaaaatatgagcccgaagtgagaaagacctgctggtaggggcatgcagtatgtcgttctctcttgtaggtaatgacgaaaggatgcatgcgagtgggcgtgcacgcagtcattcggtatacccatgggtttagtcccaggagagaagggggtcatgaacagacattgtggttgcgtgcttaagattcacaaggcatggccgctctaggggctatagtttaggcaatcaggactctttgggaaaggagcatccctgcatggaccttcacacagtgcacgatattaggggaatgataccgaagagcacttgagaggaattcctaggacacgcggttactggcactcctgctattttttcctgtttggactggtgccgtggtgtaaacatgcccatatcacctacgtagtctagagaaaggcgcattgcatttttccttttaactgcatttggtgtgacctcttttgactcatgtggttctccaagtggattgagatgggacgggagaggaaatctgaatgggacgtaggtatcatcgactggaaaggggttacatctattggtgtggctata

SEQ ID NO: 705999 - DNA, 113 bp, Homo sapiens
cataccctgaccttctctgagtcctcctccggcttcagcaagagcatggtaataccaagcccgagaagacggagcgaggactcagagaaggtccgggagaaggtccaggtatg

SEQ ID NO: 706000 - DNA, 190 bp, Homo sapiens
tatcgctaggggagctcctgctggggatgggtctgctggagcccagagatgcccatggatgaagcgtgaagagcccaggagggtgagtgcgacatagagcgccacgatttgatcatgctttatccacttccagtgtgtgatgctattcgttcaccgatgtgtgccggttgacgttgtgatgatccgggtc

SEQ ID NO: 706001 - DNA, 227 bp, Homo sapiens
aacgttgtccatgagcacatcttgtatatgcaaaccaagccagtcctggagtatctacacccaacctccgttatcaaactttcacacaccaacccaaaatttcccctgccctaaaatcgtctcagggccaggtaccaggcaactagataccatccctataccctgaagccccctggaattatctaaactagcctccctaagcttgccaagtctgcaaggaacccacg

SEQ ID NO: 706002 - DNA, 248 bp, Homo sapiens
tgatttgaatctggggcagctgagattctgcatatttgtttctttttaatatttttttgtagagtcggggtctcgccatgtagcccaggctggtctcaaacttctgggctcaagcggtcctcctgcctcggcccctcaaagtgctgggattataggcatgagccacagtgcccggccggcatttttttttttttttttttggaaacagagcctcacggtgtcaccgggcggacgttgcaggggtgcat

SEQ ID NO: 706003 - DNA, 940 bp, Homo sapiens
tctcattaaactttttaaaggggtccaaaaatctctgggacaaattttgggtcaagtggtttccattaaaaagtatggattttaaaaaacttaatgggccaatggaaacaaccagtttctgaaaccgttctcccaccactggattaagagtggggtgggaggtataagggataatatccattaaagccttctgagctttttggggcagattggtttgaccttgccagctccagcagccttctggtccacggctttgatgacacccaccgaaactgttctgtctcatatcacgaacagaaagcgacccaagggtggatcagtctgagaagtctctcacacacttgggtttgccaggaacccatatcaacaagggcagcatcaccagactccacaagaattagggcgccatctctccagcttttcaccaagaagggggatacaatcttttccttaagctcacgcaaacttgcatgcacatgtagacgcccgtgtgggacacccaaatacaggcgatacgcgcggcgctaatatgcgctggatggtccagaataatccccttgacgcaggagaagccagctgctcccctggggggcattcttagctggccccgcatgtgtggccggaagaacttctttggacggacacttctctggctttgacgccccttggcccgggaagcgtcatgccgggttcggggcgatttcgcgccgatttactcccgttgtacggtggctgcgctaggtgcccctacgggttgggagcccgctcctcggccaggacgctccccattgactccggacagcgcgcggttctctggcaggtgtgtgtgcacgcccgcgtgcccgccgctccgactctctccgttgtctgcgtcgccccatgtcgtgtcgtggctgtgggtggttcgggagctgcgggggcgtctctctcatgtatttga

SEQ ID NO: 706004 - DNA, 145 bp, Homo sapiens
aggagtgtgcagattttcatggtaagtggactattagaatcaggtttaagttatgattgatcagaggattggaatcacttagcatagttttaagtacaagtgccccttttgtctcttttaatgaacagcttgacaaaaataaagt

SEQ ID NO: 706005 - DNA, 83 bp, Homo sapiens
cgagcggccgcccgggcaggtacaagctggacgagctgtttgagcaggagcgcaatgtgcgcacagccatgacaaaccgcgcg

SEQ ID NO: 706006 - DNA, 439 bp, Homo sapiens
agagaacagactgtccaacatggagaaactccctctttaataaataatctgcattacctccttcaactccagaaataatcgtcataaaatataactgtaatgcctagcagcttatgtccacgcgaacgtgattttataactgcttggctgtctactgacacttgtgcgaatagctccctctatagttgcctaaccaataaaaagcatgacaaacatgctgttgatatcttttactcacaaaactgctaaataaatgtcattagcaagataaaatcagcagtgcttaaaagcatgcaattaagaatacgtaagatcaaacaattcttcttcttcgatgaacacccacaaaaactgcaaggcaaggcagcatattcacaatagcaaaaagtggaagcaatctcaagtaccccacttgacaacacggaccagatcacccaac

SEQ ID NO: 706007 - DNA, 1097 bp, Homo sapiens
  misc_feature (438)..(438): n is a, c, g, or t
  misc_feature (953)..(953): n is a, c, g, or t
tcctcattggaagtgacatcgtctttaaaccctagtcgcgtggcagatccctgaacgcaccgccgtgatgcccagggcaagacagggcgacctggaagtccaacttacttccttaagatcactccaactagttggatgatatatccgaacagtgtattccttgtgtgtgatgcagacgaaattgtggcgacgtccataggcacggatgctagccaggagtcctgcactgtaccctgtcgactggtgacaggcatgtgagtgcctgcatgtgtgcatatgaaacacccaagtgtatcgcgcgaggcccataccggagggccgcacttgggaaaaaactagctccagactactgggagagagagcgtgcgtagccatcattatccggggggcacagtggtggggcctttgttgtctgccacccaaatgacgggaacactnctacatgcacgtactccaggaggcaacaagttggttcgtctggggacccgacattcaatgggtgccccaagtcgttgacattgcacaccggttgtcctcgggttgacccgactttggtctgcacaaatgattgcgaaagggttcaaccattgcttgtcaccaatacacacagaaaaaacaaccctgagtttccttccgagtgacactaccaccaatcaaaaatgtgaaccgtatccgcgtgatctatagtcagccagcgatgaccgtaatatagggcgtgtaaattcctaaccagctgttaaacacaatatcgttaccgcaagacggtgtggactaatcagcaattttatgtaaatacaactttccgttttggaatgcttgcacatggttggccaatggcgattgcacttcaaaacaggtaaccatgaggaataagctacaataacgtggtcgagcacgacccagcacgacggaaacaacaccagatcggacgattggacgttggacagcccaangtagacgttccaataaccaagttcagatactcccgacactattcacatcgcgcatttaggggtgcgcagtggagatcaaactaccgcaaggcacacagtgatggatccctcggaccatgacactttgttccattagtcaagtca

SEQ ID NO: 706008 - DNA, 987 bp, Homo sapiens
  misc_feature (383)..(383): n is a, c, g, or t
  misc_feature (444)..(444): n is a, c, g, or t
  misc_feature (615)..(615): n is a, c, g, or t
  misc_feature (660)..(660): n is a, c, g, or t
  misc_feature (690)..(690): n is a, c, g, or t
  misc_feature (766)..(766): n is a, c, g, or t
  misc_feature (856)..(856): n is a, c, g, or t
  misc_feature (887)..(887): n is a, c, g, or t
tggccgcatagtctcaccgctgtaggccaacgaggccaggtttttatttgtttatatcatgccttttactttaggcggaacgagttactggctctagctcaaggctgtcaccaacaggagctgcatggcatatatcttagtgcctagtgacgttgagtcctgcccatctgggacctgaataaccgtcattgcacggcctgaagcaagtatgtaatagaccctctgagacgctatgcagatacgattccactacgtgatggctcaaggatacttgccgtgagagctatttacgtgggatactcgtttgacctgttaggtagctcttgagtgtcttgcctgtcgtcggactgctgcatctgctgtgggatgcacatgtcgtgctnaagacggatggtaccactcgacattgtgcgagcaaagcgtggtcgggacgactagaactcncggagcgctcttgggcatatgggcgtggggtggttgacctcttggcacggatgctccgagattaaaacagactttctacgttgtttcttttatttattcacactgatcaagagatgcgaggtgtgagttgcagtgaagcctgggtgagaggtgtctaagatctcaccaacncaacctattaaggttatatacgattatcgggttgatgctacttgncagtatggggcttgtacgccgcgactgtcnttgtgcggggcagcgatctcttcagtagcatgctattcgatgacgttttatagtctgatggtagcgttttatatangatgggaggttattgatacaccgtacgtatttggaggcacagacagcgtcggttgggcagttgtcttgttccagttgcggacggttggantgatttgttggatggcgagtgtggttatatntgcaccgtactagcttatgtattgttgcggacgatagccgagtgcaagatgcctgaatgagatgcaagttctctttgtagaatctatactatttgactta

SEQ ID NO: 706009 - DNA, 202 bp, Homo sapiens
ctgaacagaatgcgcttctgttgatgagttcggaattatttgcgatcagcttcaactttcaaaattccgagcagcttgttcctgcttgaacaggagcttgctcctcgtcctgtcctatttgtatatcgagaatgaaacgtttcaacggcaaatttggatatttgcttgggagatttgatgtgggcttggcgcctgctacggg

SEQ ID NO: 706010 - DNA, 1723 bp, Homo sapiens
  misc_feature (589)..(589): n is a, c, g, or t
gtcatctaatggtcaaattaccaatctcacttggcgttaaccacaacttacatacgctcagggacatgacatgacactaggctttgcacagttacgtacatatgtctagagcttatgaaaacactttagtcacaagtgatcacgttctattgacaggcaaccttacctttatgctaatgacagagacgagaggcttcctactctttctctgcttgaatcctaataaattgtgagttgtcatcacttcttactcagtattttatactgactctcgtacacatttgacaactatattccaatacgtgtctgaatcacctacttttaacataaattactactatttagaacatctgtggtcacactgtttgctggtctagcaaatcctttttccacaaatattacagacggtgaagttgacctcaagttgtttctgatcggttacaaattttaaattagtgataatatgaattcaaacttaattatatttcaacgtgtaggtatgaatggtatgatccattcagagttttccccaaaatggttattaacatgccaaagcaagatagcctaaatcacaactattgtgggtccnccttcggggataaaaggtatattacatctgctcttcccagactaggcacttcaaccttaacaactttcacttcatcacgagacggcccaatagatctctcagcaggatgggtgctgggcgtccaccagggacaatggcggcgggcacacatatcaacggggaactgactcgtacggggtgatggcggccttcttctaagaagagccccttactaggccgctgcgcgccgggcagcaagcacagctgaggaagtaaaacaaaatgggccctcttcctgaggcacgtccgaccggtcgtgggcgactccacacacacaccactgcacaccagcaccacaacgacacaacaccacacacgccacaaaaccgaacgcacacaacgacacagccgaaggcggcgtgggagggacgggagagcggacgccagagacgagggaagggaggagggagaggaaggaagcaggaacggggagagcagcaggaggagaagaggacgagggcgcaagagagggcgaagcgggcgcgaggcgccagaggaggcagagggaaggaggagagagcgaggacgcaggcgcaagggggtgagagggacgaagcgagagagcacgacaggaagggaaggagcgcggagcagaggacgcgaaggggggaaggggagggcgggggggaggacaggagaagggcagcgcggagcgagggagaggcgacaagagcaggcgcgagcaggccgggggacggatgagggcgggaggacgaggcaagcggggcgaagaagggcggggagggcggcacgggccagcgggaggacgagggggagagaccggaagaagggagagcggagcggcggacgagcgaggggacaggagcgagacaggagagggccggaaagaaggggaaagagggaggaaagaagagaaggaagagagagagaagagcatacaaaggagggagagggaagaacaaagacggcgaagaggaacaggagagggccacgcgaaaagggagagagggcggacgaagaaacgcgcggacaagcaggagaggcgcggcagggaagagacgaggcgcgcagagggagcgcagaagagcgcacagcaggacagaagcgacgcgagacaccagcagagaccacgag

SEQ ID NO: 706011 - DNA, 112 bp, Homo sapiens
gagaatacgaacagcctggtggtgtcgggtgttggtggttagagttagttctcttgaacactgcactcggaagggtagagaataggtccctgtcccgaatatatttcctacc

SEQ ID NO: 706012 - DNA, 514 bp, Homo sapiens
  misc_feature (485)..(485): n is a, c, g, or t
gagctgatgctggggtgatctagaggatccctatgtggatggggatgataataagtctctataaggtactgtaacttcaatatttaactggtaacctaggttctgaacaatggtcttgcaaataaatggtcttaaggatggataatacacccatttggatcatttaagtaaagaaagcctagtcattcattcagtcaagaaaaaattttggaagtacccagttaccttactttgctagattaaaacaggcttagttactaaaaaggcagtcctcatctgtgaacaggatagtttcgtgagaagtataaaactcctttaggggccccagttaaaacacacataccctctcggcggctttcaaattccctagcaggggggccaatcaacatagtcactatgtggatggggaagaaaaaataccaggcaaatgcgaataacaaagcaggaaagaattactcggtgaatacccagcaaaatgacatgtnaagagcactgaataagatagagttgctat

SEQ ID NO: 706013 - DNA, 107 bp, Homo sapiens
ttattgagatagggtcttcctctattgcacaggctaaagtgcagttagccatggttaggccactgcactttagcctgtgcaatagaggaagacctatctcaataaaa

SEQ ID NO: 706014 - DNA, 235 bp, Homo sapiens
gtccatgatgaagatgcttttggacccaatgggaggcattgtgatgaccaatgatggcaatgcattcttcgagagattcaagtccagcatccagcggccaagtccagttctcgtgctcagccagaacacaaagcgtgaatccggaagaaaagttcattctggaaacatcattgctgccaagactattgcagatatcatccgacatgtttggcacacatcagtattattctcgcag

SEQ ID NO: 706015 - DNA, 124 bp, Homo sapiens
actctagagtgatcccccaggcgctagttggcgaggggcagagttcagcccacatctccgtctcgggcaatctccgcacgttcgtgtgtctccacgaagaagattcctgtagactcgtggcgcc

SEQ ID NO: 706016 - DNA, 858 bp, Homo sapiens
aggaataaccttctttcataagtgtacatcacccagcacctttttttctttctatcaggaaaacatgggttccaaatgatccttcggttgaccccccgtcgacccacataaataggttcctatcaagttactaccctggtaatgaacaccgctcgttttgttcttcaaacacaaacacacagcgatgtgttcgattcttctatacccaatagagaggcaacaacacaagcactcttccgcccgctacccggaagtaaataatcaccccccacacagggatggcggtttcttcctaaaacacataggaatatatctgtaccacaaaataagagtgacccacttcccacgggcaagtgtttttttcttaaacccacaccaaagtctggtatggccggacagatagagaagaaactattaaccccgggtttgccaaacccacgcctctcttatccaggcactcctcttccaccgcttctaaatcgggcgccctcgtgaataggatgtttcatctaccgccccatttagaaaacaagagtccactctttttccactcgtatctaaacaagacaaccccccacacgccttgatagatcacgcctctggcctctattacctccgtggagcaacttacacaagtatgttatcatttctttgttcgaaaaatagacagaccgcgagttcatgttaggccgcgcccacccgcgtggcgtgggcaccccagtcatgttgccacgcaccttcttcgggcggaggccacacagtcggcgtagtgattcactcttaaccgatgacggcgggttgtacggccccacccctcgccgcacctcaggtgtaacccccttcttcgccaacaaaaca

SEQ ID NO: 706017 - DNA, 371 bp, Homo sapiens
cacgttacaagttgaactgccttgatggtgcaagcttgaagtctcaccggagtcattgtagacgatggacacaagtcggtggccaaggtgtggctcttgtcgcagcggtgcttgtccacgtccttggtgtgcatcagggtggcgatgtggaagacggctttgcatgatgtcatcgtgccagcagtaggtgaacatggcgtcctcaacacacacgtccaggcctcccaggtacaccttgtccggctggcagtccttcagctcgatgagccggcccaggcccgtcaggaactccgtgtacctgtaggagccatgctcattggacaggatggcgagctcgctgttgctctggccttctcccgctgggtattccg

SEQ ID NO: 706018 - DNA, 190 bp, Homo sapiens
cgctctcgcggctcccgtgccactagtgctggctggcacttggtccatttgcagcctgttcatacacatgtcactgcttcaaccacccccccaaaaaaaaacaacaaccaacacaaccacaaacacccccccttttttttttttggggggggggggggggggggtggggacccaggggggccccgggggc

SEQ ID NO: 706019 - DNA, 130 bp, Homo sapiens
ctggtgattattaccataaacatgcatgttaaaataatgtaacacacatacaattatgtgctgtgattttaaaatctacttaattgtcatgatattaagatgtgttagtattttttttttttacttggcg

SEQ ID NO: 706020 - DNA, 302 bp, Homo sapiens
  misc_feature (33)..(33): n is a, c, g, or t
atggtgaagtgaccaatgactttgtcatgatgnacttctgtggttcctcctccccttcctcgggaggctcctcagcccatggcatgggatgggctgggatcttctctgtgaatccacccctggctaccccctccctggctaccccatcggcatttcaaggtcaggtgggccctcacatgaaggaaggtacaaccttcctggtggagcctgggacccatggcacaggccaggcagcccgaaggctgggtcgggcctcagttgggcattttgcctggcccccagcacaattataatgcaacgtg

SEQ ID NO: 706021 - DNA, 391 bp, Homo sapiens
  misc_feature (316)..(316): n is a, c, g, or t
  misc_feature (330)..(330): n is a, c, g, or t
  misc_feature (361)..(361): n is a, c, g, or t
cttttcttaaaaaccaagtcctctttgacacatgttcaaaggtcttccttttttttcttctcctgagctgctctttctcacctctggggcacttccctcctacacttggcccgcatgcgtggtttaggcaggcccactgttatttttgtggtaacctgacactgggcccagcgcagcccctggctcttgtgggaggtgaactggctgagagccaggctgcgttctcccaggatgagctgctgctgaagcaggctgggctgagggctgtgggcaggctgcagcaggggctggggatgccacagaccagggcgggctnggggttcaccagtnaagaccttcagactgtgcggctcagcaggtngcaggtcctgccttgaggtttaaagaaagg

SEQ ID NO: 706022 - DNA, 379 bp, Homo sapiens
ttttttttttttgagatggagtctcgctctgtctcttaggctggagtgcagtggcgccatctcagctcactgcaacctccacttcccgggttcaagcgattctcctgcctcagactcctgagtagctggcatcagaggcatgcaccaccgcgcccagctaatttttgtatttttagtagagatggggtttcaccacattgcccaggatgatcttgaacatgtgacctcaggtaatccggccacctcggcctcccaaagtgctgggattacgggcgtgagccaccacacttggcccggaacttggttttataaacagaggggccggcttggagctgctgtagacgcgcccgcgaatttagtagtagtagtaggcggccgc

SEQ ID NO: 706023 - DNA, 2235 bp, Homo sapiens
ggaaatattggaaaaaaaaattgcgtctgtactgaacatgtacagacttttttcttgtccttattccttacacaatatagtacaataactatttgcatgacatttacatcggatattatgagtgatctagagttgatatgaagtatatgggaggatgtgcaaaggtgatgtgcaaatactatgtcattttatatcagggacttgagtatcctttgttaccctcaggagatcctgaaaccagtcccccatggatactgagggctgactgtatagtcctatcctcacggaactttcattctaatgggggaagactgactataaacaaaatatatgtaataggtggtggtaagtaccgtggagaagtaacaaatggggcaaagtgagttatacagctccattcttagaaaccttggagtacttttcttagtttatactcgtggtggtttccttttgtctcctttattacatgggactctgacatgtgcccatagctagggtgacagtaggatctacccgatagtagggtggcagtaggatctacccaaaaagcgtcctgctgatacaggaccaaagcatcctgttgttctcgagcctataaaaagagctaatggtcttgcttctcttaactgtggcctcctacactgtgttttggatgattggtgatgtcttggatattctgtttctttggaactttgaatatacaacactttactagggaattagcaatggaagcagagcaaagatgtacagaggaaacaatgcgtaactctgatggaattgaagtcatgaggcagcagagagcttaaattacagctttaaaaatttttattttttagagggaatttacttgggagtaacagcagtaatagttaacggagccagaatgcttgagtcatataattgcaaagcagagttgggagcaacagatgctaaagagtagttgctgtagttcctctttgggtcgtaggagcagttgtcatattactatatagctactgcatgaagaagagttcttagtgaggcctgggtgaacagctcttcttagtattctgtgtgaccccatttgaccttttaacaaatccctaagtaaataaatagcccctcaggtaaactaagtttttctctgctgtttttttgcttgagagagctataactgtaatagacttatatttctgaacattttagtgcttgccaatatttggtaatatttatgtttcctatatttgtaatgaacattcttcttccggtacattttttgttaaattattgtttgatggataaaagttcaccttttattgtataaaattgactgagattaatttatacacattgacaatgggtaaatagaatttttcagattattaaaagctgaaggatgcccacgtaagcaaaaaaaaaaaagaaaaaaccaacaaaaataaacccaaacccctcaaacaatttcgaacacgaaacattcttctgatgccggcatccctgcttgcaggtgtgaagggggcaggaatcagcgaggtgtcctgggctgagtccccggagtgggaagaggtggcaggaaggggatctgaggaggagaacaggggtcctggtggtctgtgcttcttcccagacacgggagctgtagaggagacctctgcagcagatgctaggggggccactaggcccaggcagtcttgggacttgggtctgtcctgctgtgcatccatagtgggtgctttagaaacgggaggcccacccgaagcccctgttgcaagtgaggacaaagtgtgggaaggccgtgagggtctgcagtccgagatggccttgtcctcaacgtgcagtgcactgttgatgcggggcctagaggcctgggatctgggggagccacccctgggggcgagtgtctgccctggtgctgtatctgccttcttttcacagcgggtgacccgaagagacagcctgaggtccgtcctcactcactgtgtttgaggaactgtgggccagctggcagtgggatgaggctggccccctcctccgctttagttcctggaggccttccgtagagctgtgggagctggagctggcatttcgtttgaggcaggatctggtccgggaggtctgggatctcgaaaaattcaacatttaggctgggcctcctctggctcacacctgtaatgccagcactttgggaggccaaggcgggcagataacttgaagccaggagttcgagaccagcctggctaacatagcaaaaccttg

SEQ ID NO: 706024 - DNA, 2094 bp, Homo sapiens
ggaaatattggaaaaaaaaattgcgtctgtactgaacatgtacagacttttttcttgtccttattccttacacaatatagtacaataactatttgcatgacatttacatcggatattatgagtgatctagagttgatatgaagtatatgggaggatgtgcaaaggtgatgtgcaaatactatgtcattttatatcagggacttgagtatcctttgttaccctcaggagatcctgaaaccagtcccccatggatactgagggctgactgtatagtcctatcctcacggaactttcattctaatgggggaagactgactataaacaaaatatatgtaataggtggtggtaagtaccgtggagaagtaacaaatggggcaaagtgagttatacagctccattcttagaaaccttggagtacttttcttagtttatactcgtggtggtttccttttgtctcctttattacatgggactctgacatgtgcccatagctagggtgacagtaggatctacccgatagtagggtggcagtaggatctacccaaaaagcgtcctgctgatacaggaccaaagcatcctgttgttctcgagcctataaaaagagctaatggtcttgcttctcttaactgtggcctcctacactgtgttttggatgattggtgatgtcttggatattctgtttctttggaactttgaatatacaacactttactagggaattagcaatggaagcagagcaaagatgtacagaggaaacaatgcgtaactctgatggaattgaagtcatgaggcagcagagagcttaaattacagctttaaaaatttttattttttagagggaatttacttgggagtaacagcagtaatagttaacggagccagaatgcttgagtcatataattgcaaagcagagttgggagcaacagatgctaaagagtagttgctgtagttcctctttgggtcgtaggagcagttgtcatattactatatagctactgcatgaagaagagttcttagtgaggcctgggtgaacagctcttcttagtattctgtgtgaccccatttgaccttttaacaaatccctaagtaaataaatagcccctcaggtaaactaagtttttctctgctgtttttttgcttgagagagctataactgtaatagacttatatttctgaacattttagtgcttgccaatatttggtaatatttatgtttcctatatttgtaatgaacattcttcttccggtacattttttgttaaattattgtttgatggataaaagttcaccttttattgtataaaattgactgagattaatttatacacattgacaatgggtaaatagaatttttcagattattaaaagctgaaggatgcccacgtaagcaaaaaaaaaaaagaaaaaaccaacaaaaataaacccaaacccctcaaacaatttcgaacacgaaacattcttctgatgccggcatccctgcttgcaggtgtgaagggggcaggaatcagcgaggtgtcctgggctgagtccccggagtgggaagaggtggcaggaaggggatctgaggaggagaacaggggtcctggtggtctgtgcttcttcccagacacgggagctgtagaggagacctctgcagcagatgctaggggggccactaggcccaggcagtcttgggacttgggtctgtcctgctgtgcatccatagtgggtgctttagaaacgggaggcccacccgaagcccctgttgcaagtgaggacaaagtgtgggaaggccgtgagggtctgcagtccgagatggccttgtcctcaacgtgcagtgcactgttgatgcggggcctagaggcctgggatctgggggagccacccctgggggcgagtgtctgccctggtgctgtatctgccttcttttcacagcgggtgacccgaagagacagcctgaggtccgtcctcactcactgtgtttgaggaactgtgggccagctggcagtgggatgaggctggccccctcctccgctttagttcctggaggccttccgtagagctgtgggagctggagctggagctggcatttcgttgagatcaggcataaccgga

SEQ ID NO: 706025 - DNA, 735 bp, Homo sapiens
  misc_feature (475)..(475): n is a, c, g, or t
  misc_feature (497)..(497): n is a, c, g, or t
  misc_feature (505)..(505): n is a, c, g, or t
  misc_feature (515)..(515): n is a, c, g, or t
  misc_feature (520)..(520): n is a, c, g, or t
  misc_feature (538)..(538): n is a, c, g, or t
  misc_feature (552)..(552): n is a, c, g, or t
  misc_feature (568)..(568): n is a, c, g, or t
  misc_feature (572)..(572): n is a, c, g, or t
gagacaggccagatgcaatggacgatctcagctcattgtaacctccgcctcccaggttcaagcgattctcctgcctcagcctcccaagtagttgggattacaggcataccaccatgcccggctaattttgtatttttagtagagacaggctttcaccatgtcggccagactggtctcgaattcctaacctcaggcgattcacccactttggcctcccaaagtgccgggattacaggcatgagccaccatgtccagcccccagtgctgaaatatagaaaatggatggacaagtaaatcccactcagcacccatagtccaggcatggggacctcaacacacctgagccccagacatcacctttcattctggacctaccatgaaagacttctgaatccaggaagagagactgactgggaaacatgttattcagaaacaggaccttgccctgtcactcaggatggagttcagtggtccnattatggctcattgtagcctcnaactcccnggctcaagcngtccnaccatgtcagccttcccngtagctgggacacnggtaagcatcgtgacnctcngtgaattttgtttttatttttttgtagagatggggcctccagtatgttgccccggctgaccttgaactcctgcactcaagggattttcctgcctggcctccccaagtattggtattaccggcctgagcccttgtgcccccgtctctggttaggatgctgtcgg

SEQ ID NO: 706026 - DNA, 446 bp, Homo sapiens
gctctggcctcgcgtgttgctcttcggggactccatcacgcagttttctttccagcagggtggatggggctcgttgctggctgacagactagtcagaaagtgtgatgttctgaatcgtggattttcaggttataacaccagatgggccaagattatcctcccaagacttatcaggaaagggcctgggatggaaaacccagtggccgttacaatcttctttggtgccaatgactcttcactcaaagatgagaaccccaagcagcacgtccccttggatgagtacaagcggcaaacctgagggacatggtgcagtacctgaggtctgtggacgtccccagggagcgggtcatccttatcacgccacccccgctctgcgaaccgcctgggagaaggagtgcgtcctgaagggttgcaaattaaaccgcctgaactcagttgttggtgaa

SEQ ID NO: 706027 - DNA, 1545 bp, Homo sapiens
  misc_feature (1272)..(1272): n is a, c, g, or t
  misc_feature (1276)..(1276): n is a, c, g, or t
  misc_feature (1313)..(1313): n is a, c, g, or t
  misc_feature (1348)..(1348): n is a, c, g, or t
  misc_feature (1350)..(1350): n is a, c, g, or t
  misc_feature (1354)..(1354): n is a, c, g, or t
  misc_feature (1368)..(1368): n is a, c, g, or t
  misc_feature (1372)..(1372): n is a, c, g, or t
  misc_feature (1375)..(1375): n is a, c, g, or t
  misc_feature (1379)..(1379): n is a, c, g, or t
  misc_feature (1385)..(1385): n is a, c, g, or t
tgaggagggtatacaggcagggggatgagagtagggggctccgtccgttataagcagcggaaagcttcaaagggagctgtaggagctggagatggcatttcgtttggtgctcgagctcgtccaggatgtctgggatgtctggttatatctgatttctgagctctgggcatggaggtctgtctgcagaggcccgggcctgggcacaaagggagagaggcctccattgtcccgcaggggccaaaatgcagaccgtgcatccccggtgacctcggggaccgttctctgatcatcaggattttcttggactctggggtccttgtcctgctcaggcatccctgccccgctctccttgagggccctcaacactatcttccctggacacaagtctggggacagccgggtgttgtggaccccaaaggggtgactacctgctcctgggccccacagagtccttgtgctcagtgtagtggctgagctgggggatgccctggaactcggagcacacagcactggcttactgtggtacctgtgcagtgaaattgaagacagaatcaccaggatggaacacaggtcttgcaggatcacggaaaaccttcttagagttgtcttgacaccactgatgtcgagtgtgcgggtgtttgtaggatggcctgccactcagtccaggggcaggagcaacggggagatcccacaagcaaagtgaactgggggatgggctgaaggggctccaggcaactgagccctactcgcaggtcctcggccttggcccaaacaggaatgaggggcacagagtgcccgggtaaccgctcctgggagcagtggggaactgtcggatacttgaactctcaagagctgggctctgagcgtcctcgtccagctgccaacttggccaaaggctaagccagcagattgttctgttgccgggcaacgcgacttctaaacctgagggagtgggcatgtgagcacataatggcaccagtgacagagcgaccataatggatgaataagcgcagccaggtacccgcgcaaggcacctgctggcaatggcaggaggcggacgtggggggtcgtgcagtaggtactggagggagagacgtgggcacaaaggtcgcgggaggaacaggtgcccacaatggctgcatatttgcccgtggatcactgaagattcctgctctcctgctgaggtggagactgcagtgagctgagatcgcaccattgcactccagcctgggcaacgagtgcaaaactcagtctccagataaaaaaaagaanaaanaaaaaaaagaggccgggtgtggtggcttatgcctatnatcctagcactttgggaggtcggggtggacggatnangagntcaggagttggagnccanccnggcnaacatngtgaaaccccgtctctagtaaaaatacaaaatttagtcagacatggtgggcaggagagagcatgtgcaggggaacatccatttataaaaccatcagacctcatgagacttattcactaccatgagaacagcatgggggaaactggctccatgattcagtt

SEQ ID NO: 706028 - DNA, 925 bp, Homo sapiens
  misc_feature (451)..(451): n is a, c, g, or t
  misc_feature (489)..(489): n is a, c, g, or t
  misc_feature (565)..(565): n is a, c, g, or t
  misc_feature (665)..(665): n is a, c, g, or t
  misc_feature (687)..(687): n is a, c, g, or t
  misc_feature (695)..(695): n is a, c, g, or t
  misc_feature (705)..(705): n is a, c, g, or t
  misc_feature (710)..(710): n is a, c, g, or t
  misc_feature (728)..(728): n is a, c, g, or t
  misc_feature (742)..(742): n is a, c, g, or t
  misc_feature (758)..(758): n is a, c, g, or t
  misc_feature (762)..(762): n is a, c, g, or t
gagacaggccagatgcaatggacgatctcagctcattgtaacctccgcctcccaggttcaagcgattctcctgcctcagcctcccaagtagttgggattacaggcataccaccatgcccggctaattttgtatttttagtagagacaggctttcaccatgtcggccagactggtctcgaattcctaacctcaggcgattcacccactttggcctcccaaagtgccgggattacaggcatgagccaccatgtccagcccccagtgctgaaatatagaaaatggatggacaagtaaatcccactcagcacccatagtccaggcatggggacctcaacacacctgagccccagacatcacctttcattctggacctaccatgaaagacttctgaatccaggaagagagactgactgggaaacatgttattcagatggggtcttcttatgttgcncaggttggtctcaaattcctaggctcaagtgattccgnccacctctgcctcccaaagtgctgggattacgggcatgagccagcgcatctggccaccttattttctattactggntcaatgtaatggctccatctcaggaacagccaatgaaagagatgcacaggacaagaaacaggaccttgccctgtcactcaggatggagttcagtggtccnattatggctcattgtagcctcnaactcccnggctcaagcngtccnaccatgtcagccttcccngtagctgggacacnggtaagcatcgtgacnctcngtgaattttgtttttatttttttgtagagatggggcctccagtatgttgccccggctgaccttgaactcctgcactcaagggattttcctgcctggcctccccaagtattggtattaccggcctgagcccttgtgcccccgtctctggttaggatgctgtcgg

SEQ ID NO: 706029 - DNA, 946 bp, Homo sapiens
  misc_feature (48)..(48): n is a, c, g, or t
  misc_feature (78)..(79): n is a, c, g, or t
  misc_feature (85)..(85): n is a, c, g, or t
  misc_feature (92)..(93): n is a, c, g, or t
  misc_feature (96)..(96): n is a, c, g, or t
  misc_feature (105)..(105): n is a, c, g, or t
  misc_feature (108)..(108): n is a, c, g, or t
  misc_feature (110)..(110): n is a, c, g, or t
  misc_feature (131)..(131): n is a, c, g, or t
  misc_feature (146)..(146): n is a, c, g, or t
  misc_feature (191)..(191): n is a, c, g, or t
  misc_feature (252)..(252): n is a, c, g, or t
  misc_feature (276)..(277): n is a, c, g, or t
  misc_feature (279)..(279): n is a, c, g, or t
  misc_feature (339)..(339): n is a, c, g, or t
  misc_feature (725)..(725): n is a, c, g, or t
  misc_feature (729)..(729): n is a, c, g, or t
  misc_feature (746)..(747): n is a, c, g, or t
  misc_feature (752)..(752): n is a, c, g, or t
  misc_feature (755)..(755): n is a, c, g, or t
  misc_feature (758)..(759): n is a, c, g, or t
  misc_feature (764)..(764): n is a, c, g, or t
  misc_feature (768)..(768): n is a, c, g, or t
  misc_feature (773)..(773): n is a, c, g, or t
  misc_feature (775)..(775): n is a, c, g, or t
  misc_feature (788)..(789): n is a, c, g, or t
  misc_feature (794)..(795): n is a, c, g, or t
  misc_feature (799)..(799): n is a, c, g, or t
  misc_feature (805)..(805): n is a, c, g, or t
  misc_feature (831)..(831): n is a, c, g, or t
  misc_feature (834)..(834): n is a, c, g, or t
  misc_feature (851)..(851): n is a, c, g, or t
  misc_feature (866)..(866): n is a, c, g, or t
tgaccctgtcaacttgaaataatcgaaagaattagaacctagcttganagaagttatttaagctttgaaaagctgagnntatccntctgggnnacncagactccngananatgagctctttcctctcagcnggctccggctatggncgtgtgtctgagctccgcgcacagcctgggcgccggcgggaaggnctcagctccccgggtggctggttagaggctgagaagaagggggctccgcagaaagacagcnccgggggagtcctagaagaatccnncnagatagaacgcatgctgcttcatagcctccagaaatttgttcctacagattacgccagcnacactcaggagcattatgcggtttgcaggaacacggacgattgtcactccacggaatccactacgacgacgttacggagcggtggtgtggccaggggctatggctttgtgtcaatacttggaggaacatgccgaggaattgaatttccaagatgcaaaaatacttgaaattggtgccggaccaggccttgtttccattgtggccagtattttaggagctcaagtcacagcaacagatttgcctgatgtcctgggaaaccttcaatacaatcttttaaaaaacacactacaatgtacagcacatctgcctgaagtgaaagaactggtatgggggggaagacctggacaaaaactttcccaagtcagctttttactatgattacgtcntagnctcagatgtgggtctannatcantanttnntgganaagntgctnancaacatggtgtanntttannaganaggganggtgatgatttgggaaaaaaaattanggnttatgaaagaatatganttttagataattaangaagtgtttgaaaaaaaatgttggatgatataagagtataagtaaaatttttaagggatataaatgggataataaaaaaa

SEQ ID NO: 706030 - DNA, 923 bp, Homo sapiens
  misc_feature (285)..(285): n is a, c, g, or t
  misc_feature (418)..(418): n is a, c, g, or t
  misc_feature (486)..(486): n is a, c, g, or t
  misc_feature (890)..(890): n is a, c, g, or t
  misc_feature (907)..(907): n is a, c, g, or t
  misc_feature (915)..(915): n is a, c, g, or t
tacggctaggttgatggctggtcgtttaattcggacgagggaaactgggagcaagatgagaaggaggcccagacatgtgagtggcatggatggtgagagaagatgactgcagaaggatgagctgagcgagagagaaatgggttctggattggagtgggatgagcaatgggatgtggatggaatgtgctgtgtgatgatgagtgcgtgggtgcctctggtgatgtggttgaaagtgagtggatggagaatgggctgtgtggcacggaggtgcccgagcgagggacnagactccgactccagctctgactttttcgcggctctcggcttccactgcagccatgtcactcctcttgctggtggtctcagcccttcacatcctcattcttatactgcgttttcgtggccactttggacaagntcctggtggactctccctgggcaaagagtccctgaatctctggtacgactgcacgtggaaccaacgancaccgaaaacatgggcctgcagtaatgtcagcgagaatggctggctgaaggcggtgcaggtcctcatggtgctctccctcattctctgctgtctctccttcatcctgttcatgttccagctctacaccatgcgacgaggaggtctcttctatgccacccggcctctgccagctttgcaccaggcgtggcggtgtttactggcgccttgatctatgccattcacgccgaggaggatcctggagaagcacccgcgagggggcagcttcggatactgcttcgccctggcctgggtggccttccccctcgccctggtcagcggcatcatttacatccacctacggaagcgggagtgagcgccccgcctcgctcggctgcccccgcccctttccggcccccctcgccgngcgtcctccaaaaaatnaaactttnacggcgga

SEQ ID NO: 706031 - DNA, 224 bp, Homo sapiens
atagtaaatctgcctgtatcacatatattaagggatatctctagtagctcatagtgttggatttaattctttgttactgagaacatctagtctatttacattttattttttatatttccaggtatatatcaactatattactatttgtatactacttctcagaactattttatgttgcttattttatcttttcttgtcttatttttgattaatcgagtatcaga

SEQ ID NO: 706032 - DNA, 202 bp, Homo sapiens
gttgagggccggctgagcacgctgatcagggggatttgaactacgccgaagagaacaccaggcgccacgaagaggacaatgataaggtgagagctgcgacggaggactgaggactcgaaatcctgcgcgacaggctggatgtagacttggatgggtgagaggacgagcggctgccatccggagaattggtcccggagaagtt

SEQ ID NO: 706033 - DNA, 557 bp, Homo sapiens
ggacggtgctgcgccgcggctcccagtgcccgagtgcccgcgggcccgcgagcggagtgggaccagccctaggcagaaccaggcgccggccggacgcccgggaagagccactcccgccacgtccatttcgcccctcgcgtcggagtccccgtggcagatctaaccatgagctaccctggctatcccccgcccccaggtggctacccaccagctgcaccaggtggtggtccctgtgggaggtgctgcctaccctcctccgaccagatgccaccatcgggctggatacgtgggcacctatgcggggcagttcaaccaggactatctctcgggaatggcggcaacatgtctgggaccatttggaggagccaacatgaccaacctgtaccctggggccccctggggctgaatacccaagacaggtgcccacctggctcgctttgggcaagcccccacatctgcccaacagcctgtccctccctaatggggatgtatcccacaccccaggaaggaaaccacaagcctccagaatgaccttcactatttggcaaataacacca

SEQ ID NO: 706034 - DNA, 640 bp, Homo sapiens
cctagtggctcccgcctgcaatcccagcactttgggaggccgaggcaggcagatcatgaggtcaggagatcaagaccatcctggcaaatacggtgaaactgcgtctccaccaaaaataacaaaaaaattagccgggccctgtggcaggcgcctgtagtcccagctactggggaggctgaggcaggagaatggcgtgaaccagggaggcagagcttgcagtgagccgagatcacgccactgcactccagcctgggcgacagagggagacctccgtctcaaaaaaaaaccaaaacaaaaacaccagctgggcgtgatggctcacgcctgtaatcctagcactttgggaggctgaggcggcagatctcgaggtcaggtgttcgagactagcctgcccaacacggtgaagccccatctctactaaagatacacacacaaaaaaagagcccggcgtggtgatgcatggcctgtaatcccagctactccggaagccgagccagaagaatcacttgaaaccaggaggcagaggccgcactgagccaagatctcgccatggcaatccagcctgggaaacagggcgagactccatctcacacaagaaaagcaacaccaaggaggctaacaaaatctacctgacgaatgc

SEQ ID NO: 706035 - DNA, 290 bp, Homo sapiens
accccaactctgacctcttccgttccagtttttaaatcctgagtcaagccaaaaaaaaaaaaaacccaaaccaaaccaaaaaaaccaattaaggccgggccaatctaattttgttttctgcgcaggttaggttttgtcaaaaaggggtgtaccgcacctaagtcatagcccgcctaaaagcatttgcgggggacaatggagggcccggcctcgccgaactcctgcttggggatccacatttgctgaaaggtggacagcgagcccaggatggacccgccgatccacaccga

SEQ ID NO: 706036 - DNA, 391 bp, Homo sapiens
gacttgcacaatagaaaggctgtatgtccagagaaagcaagcgagtatgtcggcgagttcagatcaaagggaggtgttcttgctgatgagatgggcctgggcaagacggtggaaggtacgtatacgtaccaaattgaactgatctgctgtgctcattgtttggcctttagttatcggacttattgctagcaatcccgcgccaaaagacttgcctgaattgcgcgatgattacgagcctaaattgtacaactcccgtgctactctcgtgacgtgcccgaatcacgtcgcgcaacaatggatcgatgagattgccaagtacagcgacaagaagatgaaaacggtccttctatcaacttccaatgacttacgcagcacatcttatcaagaagta

SEQ ID NO: 706037 - DNA, 113 bp, Homo sapiens
tcaatgagctcctccatttagcggagcatagtacggagcatagtagcgtagtaagcggagcatcagtaagcgagcatcagtaagggagttcagtaagcggagcaacacaaaca

SEQ ID NO: 706038 - DNA, 252 bp, Homo sapiens
atggaaacaaggatttcacgagcacgaatacctgaagagctcacccacttatttttggcactatagaaatgttggctccaagaatgtgactggcagagcttattctatgaacccaggtcacctgtctcatctgatgtcatcttctcaattttggtctataccctagtacagtagttcttaataactgaacccttgaatcccttaataagcccatcagaatcccttgagggtttattaaaacaccccatggtt

SEQ ID NO: 706039 - DNA, 887 bp, Homo sapiens
ttctcttgtctgcggcagagtccgcatccgggtgaggcccatctcagaattagcgctttgatggcatcaccgcgatccggaatccctggtgatggtgttctccaccgtcaagacctttgagccgcctgaactgactaactcctgcgcccctgatggtcacagctagcattggacagtgctgaacgatgtgcacaggacgtacattgatgctcatgcaagttccatctgcactgccagcctgggttacagacgggaaaccttgtctctaaacaaaagaagaaagaatgatagaacatgacaacatagtgacgattatgtacttacatgaaattaacagtcattcagagtttccaacattgtcaggggtgtcactcgggactctgtccaccgtactagtaggcctagcattgtcaccaatggaggccatggagcggagcctcggacccaaagctggggcctcttcattgtcgacacgaaggcctttttgtcgcagaccaggctctgtgtggctgctgtcatggctggtatggcatcctagggctggtggcgagtggtcacgtgatagccctttggcgcccatgatagggtagacagttctgctggaagaactcgatctggatactcagacatgagcgtggagcagaaatgcccattcggcaattgtctacaacggagaaagcctggagtcagttcgcttgacttagcgagggacaaacttccaggcctagtaaatcttctgtattggcccatgccatgtgcccagttcttcggccattataggcacaaagagccaaggaagctgtagaagacgacgctgaaactgcctataaaccgggggtagggccaacacctgtgctctattttggcgggggatctctctcggcccc

SEQ ID NO: 706040 - DNA, 693 bp, Homo sapiens
acaaaagtagaggtagggatgaggttgtcaaagagaatcgaggcgcttaatactatcagctgagacataccaatatgtctgtgcttgagaaatcagaaaagcagccactcacaatacaattaaggaatgggctttgctaacccttctgaggtaactagactgcagctaaccaccaccaacagccatgtcatcatctgatctctgcgtggatctacagagcaccgactgcagaccactgccgactttcatgaccggccctattgcagcctatggaagttaaagtgtcacgactgctctatgcatataggatttaggggaatttgcattgtaacataaatgtgtgaactacgtttcatgctagtgttctttcagtatttactctgcgaagatagcaaaaaagccaaaacctgcgagccagtggtcatttcaataatctttttatgtgcatgatactgagccttcataagggttgactacctcagatttgctggactcatagtggccttcatgtggagtcacaactgtgctggataagaagattacaactgattgaagtgtcgatgtgaaccgttgcaatcagcctctactggattcttatcagaaatcctgcgataacaagtcagccatctgggttctgatctgtgtgaaaagatgaagatttaagtgaccttcaattaacctgtcctgtgccta

SEQ ID NO: 706041 - DNA, 827 bp, Homo sapiens
  misc_feature (70)..(70): n is a, c, g, or t
  misc_feature (86)..(86): n is a, c, g, or t
  misc_feature (158)..(158): n is a, c, g, or t
  misc_feature (165)..(165): n is a, c, g, or t
  misc_feature (172)..(172): n is a, c, g, or t
  misc_feature (239)..(239): n is a, c, g, or t
  misc_feature (334)..(334): n is a, c, g, or t
  misc_feature (404)..(404): n is a, c, g, or t
  misc_feature (446)..(446): n is a, c, g, or t
  misc_feature (479)..(479): n is a, c, g, or t
  misc_feature (543)..(543): n is a, c, g, or t
  misc_feature (545)..(545): n is a, c, g, or t
  misc_feature (548)..(548): n is a, c, g, or t
ggggaccggcggttgtctgtggccggaggctgatcagtgttctagaacagatcagacattttcgtaatgnatgcctgaaataaacnactaaccacctcgacaagcaagcaggttcaactcctggcagagatgtgtatccttattgatgaaaagtgacnaataaanattggangctgagaccaagaagaatggtcacctgaacgagaacattgagaaaggattatggcatcgagcttatnagtgtcttcttattcaacaccgaaaataagcttctgctacagcaaagatcagatgctaagattacctttccaggttgtatttacgaatacgtgtngtagtcatccattaagcaatccagaccgagcttgaaggaacagtgacgcccttggagtgaggcgagcagncacagagacggctgaaagctgagctaggaattcccttggaangaggttccatccagaagaaattaattatttaancacgaattcactacaaagctcagtctgatggtatctggggtgaacatgaaccttgattacactntngtnggtgaggaagaattgtacctttgagatccatgatctcatagtgagattaaaatgctaattgttatgtgtcaaaggaagaactaaaagaacttctgaaaaaagcagcagtggtgaaattaagataaggccatggtttaaaattatttggcagcgacttttcttctttacatggtggggataacttacatcatttgaatcagtttgttgaccatgagaaaattttccgaatgtgatatgttggtaaatgattccgaaaaattaatctggttaaaaatttga

SEQ ID NO: 706042 - DNA, 372 bp, Homo sapiens
tcgcgagagttcagctcccttcttagccgtggctgcctcagcacctcgaggatcgacatggacgctctcgaggactacgtttgccgcgggcaacctcggagcttatactcctcccagtgacgggtctggagtgcgtgggggaccggctgttggcgggtgaggcttggcttgaggcacgcctggtggaaagggggaaagaaacagcgcctcccagggcggtgccacagggacaaaaggggtgccctgaggagaaggacgggcagcaggttgaggccgatcggaggtgggaagggagccccggagatggcggggacgagggccaacctgaagagcggggcccgagagacaaagctgatgtggcccgcggcgctt

SEQ ID NO: 706043 - DNA, 147 bp, Homo sapiens
acatgatggctccacctgccccgggcccacctgactatttttaatggtattttccttttatttgggggggaaacgggtctcatttggttccccaggttggtctcaaaacttcggggagcatttcatttttcagggattgtctttcta

SEQ ID NO: 706044 - DNA, 871 bp, Homo sapiens
gagaacaagggtggagacaaacagttgggaacacccaaccaatggccgccccccccgaaatgggggccctgccccgaaaaccctaagcactggcacgagacagtggtccacaccgaaaagccccacaggcaggagcggcacaaaaaaaagaggcagcaacaggagacgagggaaagcccgccgtacttgtctcgggctattatagcgccgttctgctcaagtactagcaaggcagcctatgaggatccgacaacgaggcgctacttaggttccggtaagaccgacgactatcgtccggtcccacccgagtggggcgccaagggacccgatgaggtcaccggtctgagagtcaaacgctcccgggggcgaaaaaacaaacgctgctgccctcgaacctccccaaaaatcgggggcagatcggggatggccccacgcaccgcggcgcgtaaaacggtcattggggcttagcgatgttacctgttgtttggcctaagaggacagcgcgcgtatttactgcgtggcgccacccagacgggggcaccccaacacctggggcaacacgaagagaggtccggccaccccgcccgcaaccccgggaggtcattgcgacccaccccccaccccgccgcgcgagaaacgcagtgcagaagtcctgattacaccactaaaggcacgagggggagacacaggcaccaatagctgaaaaaaaggggaataataaaacgcacggccatattaggaatagggacaaaagcagacattttgcatagtgaaacaggaagaaatcaaaacatggagcaagagtggagagtggtgttcatcaaaaattatacgaggggtcttacaattatgaaaagcgttaacaaaaaca

SEQ ID NO: 706045 - DNA, 280 bp, Homo sapiens
taccggacaagccatgcttatcctatcaatacctgatcgatgaaatgtcaacaggcgttggacagtgtcggtaccgtcctcaccggctggagaagcacactctctgcggcatatggccaaagccctggagcgatactgggccgggacggatcgtcagcgtctatggcccgacagagagcacaacattcgcgacgtactatccgctctgcgagctgcgcgacgaggatacctgccctccccatcggcttcccgatccagaacacccatccgcaatcttctt

SEQ ID NO: 706046 - DNA, 90 bp, Homo sapiens
gtggacacagccacatatttctgtgcacacagggggaataattactatgataatagtgcttatggggactttgactactggggccaggga

SEQ ID NO: 706047 - DNA, 904 bp, Homo sapiens
  misc_feature (1)..(1): n is a, c, g, or t
  misc_feature (25)..(25): n is a, c, g, or t
  misc_feature (31)..(31): n is a, c, g, or t
  misc_feature (36)..(36): n is a, c, g, or t
  misc_feature (242)..(243): n is a, c, g, or t
ntctgttgtaattcgtgggcaacanctgaanagatntatcaaaggatacagatgtaaagacatgtggaggatgatgcatggagacagctgtgcaaaacttccatgcccttcctgagtgcaccaccctccagagtcttccacatcttcaggcttccagaagctctggaacccattcctcttgagtttttatggaagctttgtgaaatcagcattacttctcccgggggtattgcctgggaccnnggctggagaaggccttacacaaatggacccaaatgtcagcttgaaataaagaaagccattggccttgtcatcctaagatcaggttttgaatccatcttggccatgtagctaccgtaatcctgaacaagttaaactaaaaacttcaattgttcatctgagcatggtggtgggcacctgtagtctcagctactcatgagtctgaggcaggagaatcactttgaccccacgaggtggagatttcattgagccaagatcactccactggactccagcctgtgacacaaagggggatctttgcagggccgtgagcatattatcaggcatactctattcttccctgaagggttggcctctctctgctggggacacctcttaatattaaaaaactgctcgatacggtccaaaccatttccgactccacactccaaataatctttttattgcaagttttttttttatacagcctctgaccttcctctgaagtttcagtagatttgttaagttgcttcccataatggtcttgcccgcctctccctcttaaggactgtctcatgttctgcctagtgtgattttatttccgtgcggtgtgggctatttgtacttggtcctctcctcttacttccttgtaacctctcaagcgtgttcttaactgggactcctt

SEQ ID NO: 706048 - DNA, 188 bp, Homo sapiens
ttgaggatcccggatggcgacatttcaatcaggtatcacgctgaagagaaagcctcctttactagctgcatctgagccctctttgaggtggacggcgaagaagccatcatttagtgagctcattgataccttggtcacatccaccagtggaacctctgacttgatttgtccagacttttggtccgcca

SEQ ID NO: 706049 - DNA, 566 bp, Homo sapiens
gcggcagataaggatatcgcctgagcaagaaaaaggcaggatgcagcgtgtgcatcacacaaagatcgagccaggaaacatggtgcgatgacgatcagtgccgagccgccacggtagccgcgacgggatcacggacatgccagcatcgacggagcacatcgacaacaagcgccgcgaccagcggcgagtcaggcgctcacgccgactcaggactggagaaagggaactggcagtgcacaggtcaactataccgtggcactcaggtgaagcaaagatatcggaaaagatgccagacgatcatgccaaaactgtgagatatccagagcggatatcgctcatcatatatcgtcgctggatctggaaccgggtccgttcgcagtaatcgccggatccggatagtcatgcatatgcgtgacaggtggatcgcatcaggcaggccgcgccgggtgtgagtgctgccgctcgctgtactgcagggccgtcgaataacgtcgacaatggccagtcaaccagcgtgcagcctcagcagcggcgcgagagtttcgaggatccgctagaggcgacct

SEQ ID NO: 706050 - DNA, 186 bp, Homo sapiens
tcagcagacaacacgctagcacggtgtgtttcggggtcctgcctgtgcatcttcccctgcctctacagcctgaccagagagagagcagttagctcggttaggctgcctttagctccaggcctcggttctagtgactatgcccttagcccttaagggccacctactctttatcagtagatagtagat

SEQ ID NO: 706051 - DNA, 93 bp, Homo sapiens
atggctgcctgcgacccccgccatggccgctacctgacggttgccgccgtgttcaaggggccgcatgttcattaaggaggttggttaggaaaa

SEQ ID NO: 706052 - DNA, 334 bp, Homo sapiens
tcgtgctctgtcgactagcacacctgtaccgacagctggtacgaggtccacactagtgcgctgcccctgggccgcgagaagggaggcaagctgactcctgaggaagaagagatctcaacatcgacacacatgacgatctaaaataattcacaagaaatatgatcacaggaaacatatcgccagattcagctctctcctgaagcagcagttccaccagggtcgagctccttgcgtgcatcgccttcagggccgcgacagtgtggccgagcacatcggtatttgctaaagggcaacagagttggagtgctatcttagtacaatcacggcccgctaa

SEQ ID NO: 706053 - DNA, 314 bp, Homo sapiens
tagatatctgacactcctattatgtgtagcactagtctactagtagctatgatttagaagcaaccttagtgtccatcgggatgaatggataagaaaatgtacctatacgcggccaggcacggtggcttgtgcctagcactttggaaagccgaggcgggtggatcacctgaggtcaggagttcgagaccagcctggccaagatagtgaaaccccgtctctagtaaaaatacaaaaattagccgggcttgtggtgtgggcctgtaatctcagccacccgggaggctgaggcaggagaatcgctggaacctgggagg

SEQ ID NO: 706054 - DNA, 222 bp, Homo sapiens
cacgaggcgttaaggcgcaaccgacggcctgggaggcctaaggcccaaatcccccgagagcctcacctcagtttcgtggacgagacgggtccttgtggagttcgagtcgaacccagaagaaacgagggaccccgggtctcctccgagtgtggaacgggctggtctggggtccccccaaaggccgccgaacacaagcccaggatcaccccgtccgcagcaggg

SEQ ID NO: 706055 - DNA, 831 bp, Homo sapiens
gcgtctaggtcgagccagacgtcggccagcgtctggcgcgcctcgtggcaacgggttcgaacggaccgatcaccgagaacatgccatctgcacatggagagcacggccattggacagacggcatgatggtttacgactgtatcgaagagaagtatcgacctgcgagcgaatagaacggcgtacgttaaacgaatacggaatggaaccgtagaatagatagccctcgatgggacaagaaggcaggttcaccatgagtagtttttctagtgaagacaactcgaaaagatacgacgccatcctgtgcccttgctgagaacaacaaataagtcgacaaggacccgtagaggagccaagttggctaagatgactggcgagaggagtggggacgttccaggtaggcgtatcattgtccgctagagttgcagggccatcatccaattgcagtgcgaagggacctaattttgctaggtacaccaatgcaatgcacgaaagggcgacagagaatgtaagggcaagacaaatgacgcaagtgtcggatccctcccgtgagtacagagtctatgtgccccaagacgggggttcgcctataaggcgaaatcatgccccacgaggcattgccccccgataggaaggagtttgcatgaaggcagtagtcaaggagcacgttagacaaatgttaaacaactacgaatctaaactgctcaattttgaccaagggcagaagaaataggaacacagttacaaatacgcagaataaagccttttgtgattctttctgctattgtctgggggagtcccccttgaccctcaattaaatacaagtgcttgttt

SEQ ID NO: 706056 - DNA, 105 bp, Homo sapiens
ggatacaggctaaacactgacccgctcggtttgagactagaagaagaaccatctccaactctgtgacccaattttcagtattcaaacgtgtgcctaaaatgtaga

SEQ ID NO: 706057 - DNA, 250 bp, Homo sapiens
acctcttcagcacaccctgcatgccggctacttcgtaagcgcaagtacccacgtaacagacgtcaggtcacggtgtagcccatgaggtggccagaaatgggctccatattctaccccggaaaactacgatagcccttataaaactaaagggtcgaaaggtggataacagcagtaaactgagagtcgagtgcttagaagaacagggccctgaagcgcgtacacaccgaccgtcaatacctcccctagcgat

SEQ ID NO: 706058 - DNA, 783 bp, Homo sapiens
ggtcacaagggtgcgaggaaagtcagtgagcaaatcgcggaccgccggggctgccagctcgcctgactcccggcctcttgcgctcctaggggcggagaagggtgcgggctcttcgccctttgtgtcctccttcttttcactcaacttgctggactttccagctcttccagaagttctgttcttgctgcaaagcccgaaaggctgggaaaaccggtccaggagagggaccaagctttggattcagagcctctggaggggaggggataaagggccatgaccaagggttcgcaaattttggagagaggtagtgggaaagattactcttgtctctgctgctcctgggaaagtgaatttgtgacaattggaaggttcgaaaggaagaagcattacacaatgcaaataggaacatctccacgggggtttgacagccacgttagatagaataaacatatcaacaaatgactctgctatgcacggaaaggggagcacccggagtcagtgtcgatatgacacataacgtacgatgtcaccgtggcaacattagtgagaagatataagtgatacagggagatgttctgaaggaaaggaaaaaagctttgtcatttagctctggtggagtctgaccaacaacggccatgaggaacacatttatagcacaggggaaggaaaaaaaaagactggggaaaattgagagcacagtagaatgacctaaagagaacaaccaatgaatatgcaggactagattgagtaaagcccttggtcttgtgagataatagcatgaga

SEQ ID NO: 706059 - DNA, 352 bp, Homo sapiens
ggcccacacggcgttccccgcgaacgccgctggagttttgcgccccacaatggcgccacttattcgcgagagaattcacccacaaaaccccactatgccctcatgtcattccccacccacttcaatagcgcacccactcacccctctcttaaccttctaactttctaacctatcgcctaaatttaactccaccctcacatcaccacctatctccccactattttaaccacaccgtataaaaataaaatgaccacgtttgaaccacaaccaaacccccccccttcctccccacactcatcgcccttacccccctactcctacctatttccccttttatactaataatcttata

SEQ ID NO: 706060 - DNA, 238 bp, Homo sapiens
cgagggcccttaaaatcccgcccaggaagcatctctaccctggagacaagaggcttggaaaggggccgggactccttagtagctgactcttaaggtcctttccctgacagagtggaccagaatcagagatagccctttaccctttgccagtggcagacgggcagagaggagcatccagaggccagactgccaacagaccagcgggagtgttcctaaaccaaggaaaatgcccggactt

SEQ ID NO: 706061 - DNA, 151 bp, Homo sapiens
ttatcaccctaattagttatgcaccgtgcatttcattaactattatgcttttaaatgtgttggccaccaatttcttagtgcttctgaattgtatatggtcctcaagcagcagttgtcaccttggtctttgaattaatgctgtgacgcttgc

SEQ ID NO: 706062 - DNA, 282 bp, Homo sapiens
  misc_feature (265)..(265): n is a, c, g, or t
  misc_feature (268)..(268): n is a, c, g, or t
taggtgcggaagtagctgtactgctgctccagtgagctggcaaaggaatctcagttattaaggcggtactaattacaagtgcctcccacagatagtccggttcaggggaatccttccccccgccgccccgccccaatttctacattttttactgataggaagcagaagactggtctcagatccaaaaagataagctctcctcccaacttcaaataccctcctttcatctggagcatggaaccccccccccaaagcaccaccctcnagnaacagtttaccttg

SEQ ID NO: 706063 - DNA, 267 bp, Homo sapiens
  misc_feature (212)..(212): n is a, c, g, or t
  misc_feature (247)..(247): n is a, c, g, or t
  misc_feature (266)..(266): n is a, c, g, or t
acagaggctgatgggaatgtaagttagttcagccactgtggaaagcagtttggagatttctcaaagaactccagccaatcccatcagggagtgtatatcaaaaagaaataaattattctaccaaaaagacacatgcactcatatgttcattgcagcactattcacaatagcaaagacttagaatcaacctaggtgtccatcaatggggtacntggatagaagtaaatatggtacatatacaccatgngaataccattgcagccggnt

SEQ ID NO: 706064 - DNA, 425 bp, Homo sapiens
agctcggtcccccccggtgttgcgctcagtgaacagtgttgtgtgagttgaggctggccggctgtggaaggttgtaggctcttcaccaccaactgaagttgtggtgctgcgagggaacactgtggtttcagttgagcctgggctgctgctgtaaacgggggtagattcctcactgaagcctggcgtggtggtgctggcaggtgacactgttgagtgagtagaacctggttggctacgggaggtggtggattcttcaccgacgcctaggcttgtcatgctggcaggtgaaagtgaagaggttggtgatctggcgctgctgtagaaggtggtagatgcctcactgaggcctggtgttgtggtactgccacgtaacgttgttatttcatttgagcctggactgatgtgtgaggttgtagattctccac

SEQ ID NO: 706065 - DNA, 815 bp, Homo sapiens
  misc_feature (148)..(148): n is a, c, g, or t
  misc_feature (176)..(176): n is a, c, g, or t
  misc_feature (259)..(259): n is a, c, g, or t
  misc_feature (334)..(334): n is a, c, g, or t
  misc_feature (381)..(381): n is a, c, g, or t
  misc_feature (390)..(391): n is a, c, g, or t
  misc_feature (462)..(462): n is a, c, g, or t
  misc_feature (472)..(472): n is a, c, g, or t
  misc_feature (508)..(508): n is a, c, g, or t
  misc_feature (510)..(511): n is a, c, g, or t
  misc_feature (593)..(593): n is a, c, g, or t
  misc_feature (623)..(623): n is a, c, g, or t
  misc_feature (698)..(698): n is a, c, g, or t
  misc_feature (765)..(765): n is a, c, g, or t
  misc_feature (793)..(793): n is a, c, g, or t
actttatcccacaggcatggggcgaccataaacctacaccaaactgttatcccggctgacaactctgtcctccactgattgaatgcacgccatctatacttattccacccacctggatcgcaaataaatctgcaactgactcacttgngaaatgtatacaaagcttatttctaggngggcgagggttaataaccacaaccacattatattcaccagcaagcttcaatgagggtgtagaggtgtttacaatctctcacgngccataacctttctgccttcatagacttcatttacagtttctgtctcaaagagtacccaacttaccccatcttcntatatacttagctggtccaatgtacgttattgatggagtcctcctancgatagggnntgccctctaagaacagccatttgacccatttacttgatttatacaaatagtacttcatcgttgctcggaantactggcggnctcctccacgcacgatctttgccaaaaacgaacttntnntaaaaactcctcttatcttggaaatacgcggccttaaccgctagcttctgtattaacaaaaggatatttgcctaaagccttntaataatcgttaaacatgcttcaggccttnaaaaatataaacactcttctgcaagctgatatttaaataattgcgcctttgtgcaagtggttaacaacccttctntattatttttgaaaaaaaggatagaaccttgaccggtgtggcctttcctactattccaggcgaattnccctgctttataaactgggaaaatctcnaaatagaaacacctgctctctc

SEQ ID NO: 706066 - DNA, 263 bp, Homo sapiens
ctggctgcaagatgactcccaccatgttggctttgctgctgtccaatggcagtaaccgaaggctgagagtatggagtatgtgggtgcagggtagcgtaagggtgcgcatactgctgagcaagggagcccgtggaaatggcaaagtagaaagaagggcttgtctccttgttgtatggaaatttgggacatgcatacatcacatggccactcaataccttctcataatactccttttattgaagtcctttttatgttaatatatc

SEQ ID NO: 706067 - DNA, 334 bp, Homo sapiens
  misc_feature (188)..(188): n is a, c, g, or t
taaggctacctaggatcctcgtacgagcgcggtggtgtgggaagaaaggcacaaggacaagacccaaaccatgcagatgaaaacatgctgtgcagcacagcaaagcggatgggcccagcaggaggcagggtcacctggggacaacagcacttggatcctgcaggagacatgggctggattccatcccncagctggtagctcctgggcagacatctctaccttacagatagggaaaggagcaacctacgaggtcggggcagggaggtcatattggaaaactcgcctggtgagcatagtgacattatacttccccagggtctacgcttttagaaac

SEQ ID NO: 706068 - DNA, 466 bp, Homo sapiens
gggggagggaagggagtgagtgatgctcaggggctgtccaagtgactgcgttcatcagttttacactggggctgctacctaatattttcctttgaacgaaggacttccaaaagcaccgggctagatgatctctgttccttttggctctaatatgctaccactgtaggcccattatcccttttcccatttagagttaggcccgattagtgaaattttactttagggccccccgctaataagtaataggccttaactgggtttccttattcccaatcctgtcttttcccccctattcccttagaccccccaaatggtagttttgtggggggggggggggtgtgtttttaatccccggaaccggatgcctttttttaaggcaaaatttttcccttatttactgtgatgacttcaaaaaaaaccatggtccccggggccaagtaaaaagcatttttaaaaattaatttta

SEQ ID NO: 706069 - DNA, 547 bp, Homo sapiens
  misc_feature (44)..(44): n is a, c, g, or t
  misc_feature (129)..(130): n is a, c, g, or t
  misc_feature (134)..(135): n is a, c, g, or t
  misc_feature (139)..(139): n is a, c, g, or t
  misc_feature (148)..(148): n is a, c, g, or t
  misc_feature (153)..(154): n is a, c, g, or t
  misc_feature (203)..(203): n is a, c, g, or t
  misc_feature (301)..(301): n is a, c, g, or t
  misc_feature (359)..(359): n is a, c, g, or t
  misc_feature (361)..(361): n is a, c, g, or t
  misc_feature (368)..(368): n is a, c, g, or t
  misc_feature (371)..(371): n is a, c, g, or t
  misc_feature (379)..(379): n is a, c, g, or t
  misc_feature (381)..(381): n is a, c, g, or t
  misc_feature (391)..(392): n is a, c, g, or t
  misc_feature (397)..(397): n is a, c, g, or t
  misc_feature (399)..(399): n is a, c, g, or t
  misc_feature (406)..(406): n is a, c, g, or t
  misc_feature (408)..(408): n is a, c, g, or t
  misc_feature (411)..(411): n is a, c, g, or t
  misc_feature (487)..(487): n is a, c, g, or t
  misc_feature (528)..(528): n is a, c, g, or t
ctactgtcattcataggcattctgttccacagcgggccagctancgtggtatttacaaagctccctcctcttatacaacaatccgagtgtttcttttgtgagtggtctgtgccccgggggatccctctnngccnntgcnttgccctcngcgtnngggggccagcacctcatagtcagtgagggcctggggtgcttaagagggntttcttccagctctcttgccctggtcttcagtgtattagatgtattacctccatgctctcagtagaggccccataggaagagtaggtaggttatgccngctcacacgcatcctttaaaaatgcgtttagaagtttagctggtttcttattactccngnctatggntgnttccttcngncactctaccnnggggngnaacagcnantcntgttcaatagttacatttagattggtttttaaaaactatgattgtattagttcgtttccatgctgctgataaaganatatctgagactggaaacaaaaagggtttaattggacttanagttccacatggctgggga

SEQ ID NO: 706070 - DNA, 116 bp, Homo sapiens
cgatccccacgaaacgtgctgtatccaagttgtcagcatccattactcttgtgcttctgaggccattattaattacaaataagcggctaactttgacacatgaacacatgtggata

SEQ ID NO: 706071 - DNA, 356 bp, Homo sapiens
  misc_feature (8)..(8): n is a, c, g, or t
  misc_feature (17)..(17): n is a, c, g, or t
  misc_feature (36)..(37): n is a, c, g, or t
  misc_feature (46)..(46): n is a, c, g, or t
  misc_feature (61)..(61): n is a, c, g, or t
  misc_feature (71)..(71): n is a, c, g, or t
  misc_feature (82)..(82): n is a, c, g, or t
  misc_feature (96)..(96): n is a, c, g, or t
  misc_feature (108)..(108): n is a, c, g, or t
  misc_feature (157)..(158): n is a, c, g, or t
  misc_feature (187)..(188): n is a, c, g, or t
  misc_feature (217)..(217): n is a, c, g, or t
  misc_feature (235)..(235): n is a, c, g, or t
  misc_feature (237)..(237): n is a, c, g, or t
  misc_feature (251)..(251): n is a, c, g, or t
  misc_feature (266)..(266): n is a, c, g, or t
  misc_feature (292)..(292): n is a, c, g, or t
  misc_feature (332)..(333): n is a, c, g, or t
  misc_feature (339)..(339): n is a, c, g, or t
  misc_feature (352)..(352): n is a, c, g, or t
  misc_feature (354)..(356): n is a, c, g, or t
tcaaggcnatctgtacngaagctggtctgatggccnnaagagacgnagaatgaaagtaacnaatgaagacntcgaaaaatcnaaagaaaatgttcnttataagaaacnggaaggcacccctgaggggctgtatctctaatgaaccatggctgtcatnnggaaaatggttgggagatttctcaatccnngaaagggatgaggttgggggagttgcccngaggaatccctgttcccncngatttttattagcnaaacatcctgtgtcntttggagtacgatgtgtaagtgcccnttgggtggcctgttggtcactgtgcagcagtctgcttccnnataaancgtgctcttcacnannn

SEQ ID NO: 706072 - DNA, 934 bp, Homo sapiens
  misc_feature (253)..(253): n is a, c, g, or t
  misc_feature (269)..(269): n is a, c, g, or t
  misc_feature (275)..(275): n is a, c, g, or t
  misc_feature (277)..(277): n is a, c, g, or t
  misc_feature (292)..(292): n is a, c, g, or t
  misc_feature (305)..(305): n is a, c, g, or t
  misc_feature (309)..(309): n is a, c, g, or t
  misc_feature (320)..(321): n is a, c, g, or t
  misc_feature (324)..(324): n is a, c, g, or t
  misc_feature (327)..(327): n is a, c, g, or t
  misc_feature (337)..(337): n is a, c, g, or t
  misc_feature (347)..(348): n is a, c, g, or t
  misc_feature (396)..(396): n is a, c, g, or t
  misc_feature (400)..(400): n is a, c, g, or t
  misc_feature (403)..(404): n is a, c, g, or t
  misc_feature (406)..(407): n is a, c, g, or t
  misc_feature (409)..(409): n is a, c, g, or t
  misc_feature (421)..(421): n is a, c, g, or t
  misc_feature (436)..(436): n is a, c, g, or t
  misc_feature (438)..(438): n is a, c, g, or t
ggtgggagcagtgtacaccaactcttcctgtatattgcctttttgctggaaaatgttgtatgttgaataaaattttctataaaaattataattcagtgagttacgtggaagtggaggaagatttctactctccctggaaacaggcctgggaaaccttggcatttgtaacaaggtttcactgagatgtacttttccttctaattccgtttgcgggggcagggtctcttgtttcttttttttttttttttttttnagcctctaactagtcncatttncntcttaaaaaaggaanggtttcccagganaaancggtgtccaanntanggntgacgggaantgtgacctgnntggtgtcacgaggcccttcggggcggaaggcgcaatcgggggcgtggncctntgnncnngncccatgggcctngccttcacagttccngnggcacggttcccgggtcttggggccagtgtgtacctgggagtgacttcctttctcaacttccacggcaggggggtgtgccttcggctctgagaagctgccttgtgacccgtgtgatcgaacgccgggattgagggtccccgggacctggcctttccctccttccctcccccagaaagaggggttaggagccgggggtgcaagaagccgttcgagtgggggttggtctttgaaccacccataaggttgcttggttaggacggggaaggaggaaggaggacgactacaggaaccgggaagttcaaagtccccctagggggttaaatgagctctttttccaaaaacaaagaaaacaaccggggtctcatcggtggcgaacagggtagaatcgcattggcacgttccgaacacattttgaagggacatgggcccaaagggaatcgaccgtgcgtgtagcagacaaaagagcagtggagggcaattgaagacacatctaaa

SEQ ID NO: 706073 - DNA, 638 bp, Homo sapiens
gaatgccaatccgaaggcttcccaaatccgcccgcacatccactcggcctcttaaaaccccatagtaaaagaagagaaacgtaatacaaaagaactctaaccttccttaataccccaccctttatttacgctgttaagcttgaagataccagaaataaaagagtaagactacccatctcgatatatagatatatatatacatacgtatatatatatatatatatatatatatatatctatctacctatctctctcctcctaagcccgaaacgaccggaaacgaaagtgaacacgataatcgagtaggacgacaccgagagaaaagcctcccgactcttgtttacgccctccccgcctcgccggctttaatccctctctaaaaacgtaggtaattggcgggcgccgagacgatgctccggtgttaagagatcactaaaaacgcgaaactttaggtcgaaatgatgtcctaccttccctcccctagccccgcgtaatctcgaaacccccttaaaaccccctgccccgctagtgacttcctccttctctaacgcggaaaagaccccgaaacttaaaaagaaacatggaataaaaaagggtaccgctacttttgacgggggacctccctcccggggttgacc

SEQ ID NO: 706074 - DNA, 209 bp, Homo sapiens
tcgcgctgtctccatcgcgacgagtacaagccactggatctgtcctgattccacactgtcttacaccttgaaacggaggctaccaactccctcatcactgctccgggtgaattctcagacgccagcatgtctccggacgccaccaagccgagccactggtgcagcgtggcgtactgggagcaccggacgcgcgtgggccgcctctatgc

SEQ ID NO: 706075 - DNA, 115 bp, Homo sapiens
tcttccgctgagtagatgggtctctatgtggatcaggaaaacgtttatagttcagacagtttttagttcaggcggtttgcagttctggtatctcctcgtgcaaaacacagaggta

SEQ ID NO: 706076 - DNA, 405 bp, Homo sapiens
cacagccattgccatccattggatcccaccgacaggatgttggtcctaatgatttggactcacctcggagggatttgggctggccccagtccctggacaatgattcaaacaactgggcgcccccccaagggtttgttccctttaacgaggcctattttctcccccccccccaaaaccttttggggttttgcctagggcccgggggttctggcaacccaaaagagtttttcctttttttttgggggccaggtagttttggcccaaaccccggattttgaggttgccaccgtttttttgaagggggccctttgttcaaccccggaacccccgccttttggtttggttttaaaccccacctggagaaagttttttcccttttttccataaaagtccggccctttttga

SEQ ID NO: 706077 - DNA, 100 bp, Homo sapiens
taaaacagatgaaatgcacactgctctgatggaggcttgcatggatggccatgttgaagtagctaggttacttcttgacagcggtgcccaagtgaacatg

SEQ ID NO: 706078 - DNA, 226 bp, Homo sapiens
cgggaagtgggtggcggcacttgacgagcgggggccccctctgtacgtcccggcggcgcgggtgtgaggctgtgggcctcagcttggctgctgattcctgttgtctggtgccacgttgctggagtagccggagacgtggactgcgcgaggagtcctaggggctcgggatgcgaggctgcgccgcttgcctggtgggattggcagtgtcagcaagctccggatgacc

SEQ ID NO: 706079 - DNA, 252 bp, Homo sapiens
  misc_feature (27)..(27): n is a, c, g, or t
tccttcgtccctaattacaaaaaacanaccaccttcagatagagctcattccaagtttctctgttttatttctgtctttagcaatcgttggcctagctttgctgccataaatgagggaattgcggctaatagagcaatcgtgctcggaagcatcctcctcatccatctggtggacactaaccacagctataaccgggacaactagagacactgtccaagtcctctgtcaaattcacaacttagcttgccctt

SEQ ID NO: 706080 - DNA, 608 bp, Homo sapiens
tgtatctagtgtaaaacgcctggcagctaccggtctctgacttgaaaaccccttccgcgtccatgtcctattactagctataacaaattactacaaatatagtggcttaaaactgaaaacagatactgatcgagctcattaattattaaaaataaagggtaactaggtggaaatggggagtaggtataagtttaatgggtacagagtaacagtttgggaagacgacaacattctggagacggatggtggtgatggcagcacaacaatgaatgtacttaatgccactaaactatatatattttaaattgttaaaattgtatttctaatgctgcttattttaccacaatttaactatgattttatattatatatatatatttttttcagagagggttatgctctgtcatccaggctaaagtacagtgcagccttgacttcctgggctctagtgatcctacttgcctcagcctcttgagtagctcgtgtccatttttcaatatggtttcctttcctttctttgctagtgaggttcctcgtatattttctatattatcccctatactgatgtatagtttgcaaatagattttccattctgtaggtagtttct

SEQ ID NO: 706081 - DNA, 425 bp, Homo sapiens
gtggagacggggtctcaggtagatgactctggaagatcttctcttttggaactgcagcatcccttcgtcttccccaatgggactttagtccaggaaataccagatcctcacctctctaattctcttctcaaatcccaaggcaaaacaatggagacttaatgtggttctggtaattgggctctttgttcttctggagcttccgactgcataagcagtgaatcggtgattttgttctcagcatggagaaggcagaaaccagcagtagggctccacagcgcgggcctaggaaagacgctgttcaagaggctggacattggggcttgatgctggtcatcacagcattttgggaggccgaggggggcagatcgctagaggccagaagttcgagatcggactggccaacattgtgagaccccgtctccaca

SEQ ID NO: 706082 - DNA, 343 bp, Homo sapiens
  misc_feature (93)..(93): n is a, c, g, or t
  misc_feature (148)..(148): n is a, c, g, or t
  misc_feature (256)..(256): n is a, c, g, or t
  misc_feature (276)..(276): n is a, c, g, or t
  misc_feature (311)..(311): n is a, c, g, or t
  misc_feature (339)..(339): n is a, c, g, or t
caacctctgcctcctgggtttaagcggttctcctgcctcagcctcccgagtagctgggattacaggtgtgcaccatcatgccgagccaatttntgtatttttagtagagacaggatttccccatgttggccagactggtttcaaactnctgacctcaggtgatctacctgccttggcctcccaaagtgctgggattacaggtatgagccactgtgcccagcctcaagtcacccttgttagtttggcttaccaactntaaagtctttggatttgctnttgtcaagccactgggtttgcaagttcagatttgnctttcttggtttttcttagctaaattgntaag

SEQ ID NO: 706083 - DNA, 172 bp, Homo sapiens
  misc_feature (27)..(27): n is a, c, g, or t
  misc_feature (51)..(51): n is a, c, g, or t
  misc_feature (116)..(116): n is a, c, g, or t
  misc_feature (137)..(137): n is a, c, g, or t
ctgctagggagtcactgtacacacaanctctactggaattcctgccaacanctgtcaccctgcagctcctttacagttcaatccaatgagagaaaccatcccttccctttctcccntggctgttcacccagccattncctgaagggctgaccaacaggaatatccaaggaag

SEQ ID NO: 706084 - DNA, 566 bp, Homo sapiens
  misc_feature (8)..(8): n is a, c, g, or t
  misc_feature (12)..(12): n is a, c, g, or t
  misc_feature (37)..(37): n is a, c, g, or t
  misc_feature (146)..(146): n is a, c, g, or t
  misc_feature (169)..(170): n is a, c, g, or t
  misc_feature (172)..(172): n is a, c, g, or t
  misc_feature (176)..(176): n is a, c, g, or t
  misc_feature (181)..(181): n is a, c, g, or t
  misc_feature (214)..(214): n is a, c, g, or t
  misc_feature (217)..(218): n is a, c, g, or t
  misc_feature (258)..(258): n is a, c, g, or t
  misc_feature (325)..(325): n is a, c, g, or t
  misc_feature (353)..(353): n is a, c, g, or t
  misc_feature (385)..(386): n is a, c, g, or t
atcccagnagancagcctgcacatcgcgactcacgcncaccttcatgcagctgaaagtgatgaatcttaccttctggaaatcagacttttacacctgcatgtgtgactagtgccgacgtgtttcttgtccctctgtatactgagtntttactcatcagctgccggtgtnntngtcngtcanttataccatgagtgtgccactttcattgcaccntgnntccccacacaatccaagccagtgcaatatttagctgctancaagactggctcttttaccagtatcaatgacaatttatggggggtaggcgtgggcaactttcttttntgtttttcttcaatctgcaccctcttgncccaccatcacgaaaggcagacgttacgcttnntcttgaaggaaccattagatatggaaaatagtcatgaaccagagttttttggttgctttttcaaaaatttgtttttatttggttctgttcctgataaacagagtaactgaccttcatttctaggttcttcaagaatggtgtttgcaagtgccagatggaacaataaaagacgttgcctat

SEQ ID NO: 706085 - DNA, 924 bp, Homo sapiens
  misc_feature (485)..(485): n is a, c, g, or t
ggacaagaatatataaacaatattcatttaactcattcacctgaggcaggagaatcgcttgaacccaggaggcggaggttgtggtgagcgaagatcgtgccattgcactccagcctgggcaacaagagcaaaactctgtctcaaaaaaaaaaaaggatataattcacaataaattaattgggtcaattacaattgttagccaggcgttgggggcacattgcccgtagtcgcagctactctggaggcagaggcaaggaggatcacttggagcccattgaatttggaggcagcagtgagctatgattggtgccacttgtactccagttctggggtgacagagtgagaccccaattctctaaataaattgggtcaaaacccttaaaaattattaactttcttaaaaattggaaaggatatattctctctcaaatttaagtggagctttctaggagaagcaatgggttttttcccacttcaataatcantttcccagtgggactcatacaggttaacacagtgtgaattttcttcctcagccataacagagtattagaatgccagggctgaagtgaccttagagagtaccccagtccttcattttacgcgtggaggcactgagactcaagggtggtgtacttggtgccaaagattatacgctaattaagtaagcagaagacctgatggacatagtgtgaaggtgaaacttcacaagctaccttcttggaggtccaatgtttgtttccactaactcttacatgtcctacttcctactttaatggctgtactatataatgggacatccaggttttgccgcccatgtgggtgggctgttcccaggatggaccggaaaaacacgaaaaaaaaaaagggggcgaaaaatgggggaaggttcgcttgtcaccgctggctccgaccttcccggca

SEQ ID NO: 706086 - DNA, 353 bp, Homo sapiens
tgtgtagcccggcataccagaaacaaagaaatttaagccccctgtccggtagggataggacctgtgcgccacccacttagaatttgatcaataatagattctattgagactagtgagatctatatatctgtgatggaaagagctctctcaagtgctgttcagtagagctttattcataaggcatgagcggtggtgttccttgggacacgccccatccatagggcatcgccaatgtaggttggtatggccggccaaggccatatccagagattctggcggtattccctcagccctgtgtcttctaaaggtggcctcaagaatcccctttgtgtgccccgcccctaagacattcc

SEQ ID NO: 706087 - DNA, 777 bp, Homo sapiens
tgagacggagtctcgctctgatacgcccaggctgggagtgcacgtgggcgcgatctcggctcactgcaagctccgcctctcgggttacacgccattctccgtgacctccagcctcccaagtagctcggactacaggcgtccaccaccaggccgggctaatatttggttatcgtgaagtaaaagacgggggtttacaccggtgtaagccaggagggtctcgatctcctaaccgggggatccgcccgccatcggcactcccaaagaataggggataacccgcgtagagccaccagagcccggagagcaaataagaaatatcataatagaacacatcttactacacgtgcagaacagaagatactcgagtccgagaaggccacacggacgagaaaaaagaagggagggagacagaaactacgagacaaaacagagaaagaagcacgcacgccacaccgcgaataaatcggaccagaaactaccgagacaaccaaataccccgacaataccagggaaaaccatcacaacgagggggcgcccagcgcaggcacaacgaccaccgagaatacacagaacacggaatggcatcacaacaagagcaaaaaaaaaaaacgagggcaagaacaaacccagaaggcataagaccaaaggaatggggataccacgaaaaaacgacagttgcaacaaggagcgtagacatcaggccacgacacaacggaacacaccccaaaagcaggcggggggactaacaagggatggagaacgcacaccagacacccg

SEQ ID NO: 706088 - DNA, 825 bp, Homo sapiens
tataactggaaacacaaacgcttatattataagggagcatctcagttacgtgggggggacaaaaaaaaggagcagacgggtgacagaccattcccatcggccaaggggtcgaacccgacttccaagacccagggagcagccaagctcagcgcaacctcggggcttctcgctctgactccaaaggggtgagcacgtcgccctcgcgcagggggcctttaacatggcggatgatggatcggctcgtgtcgtccatgaattccagcgcgcacctgggtgcactggtccctgaaaaccgggtcctgcccaggacctgtggtgaccctggccagtttgataggctgcacacggctggtgtccatgatggggggcggcggcggccgggctgagaggagcgtggtgtctcctctctccgccaggggggtgtgctcgcccattgatatcggtgtactccgaaaggggggagtcatctgggcaaaaatgtcacttggcctggcggtattcaaggtcctattcgaccagatgtggtgacctttgggtcacacccatattgcgcaaaaacaacagaccagccctatgctggtcgagtgaattaggcagcgtcatcagacatagtggccggagtcttggggggaactggcagaagctgggggtcgaaattcccagagttcgaaggggggggggccccaccgtcttgggccagggtggtgttctggcaaccatgtggtcgtggggggccgattgttgtgcgccaacccaaaacttggtgccggtggctttcgtgagtggtaaaccaacacaaacaagaatagccctctgttttggccg

SEQ ID NO: 706089 - DNA, 174 bp, Homo sapiens
atttgattaaacactacaatacagtatatatccattagttttattttgattaaacactacaatacagtatatatccattaaaaaagaaaactctataatgtatataaattattgtagtgtttaatcaaaataaaactatttgaccttatggaggaaggtcatgtttttaccacc

SEQ ID NO: 706090 - DNA, 169 bp, Homo sapiens
agtgtggtcgcggcgaggctacatgatccaagcgtagtcttatgtttcttttatccaacaatatctaggcatctgagcactttgaaccaaaatctcaattgtatactgtgatttttatcttgttgcaatatgttaaatttcataggtacctgcccgggcggacgctcga

SEQ ID NO: 706091 - DNA, 329 bp, Homo sapiens
  misc_feature (1)..(1): n is a, c, g, or t
  misc_feature (63)..(63): n is a, c, g, or t
naaatgaggcaaggtttccctcagtccccccgggtggggggcagggttatgttttcaggttantgcaccctttgcctcctggggtcgggcaatttttaatgcctcagtttccccaggagggggaattacagggggccaccccccctccccggtaatttggatattttttctaaaaacgatttccctgggttgtcccggggggttttgaactcccacccccaagtgatcccccccccttggccccccaaaggggtaggattacaggcatgggcccccccccccccccctggatggctattttttaaaaaaatttcctttgggggccctga

SEQ ID NO: 706092 - DNA, 173 bp, Homo sapiens
  misc_feature (85)..(86): n is a, c, g, or t
  misc_feature (94)..(94): n is a, c, g, or t
  misc_feature (96)..(96): n is a, c, g, or t
  misc_feature (145)..(145): n is a, c, g, or t
ttaggatagcaatgtgtgatcatcacttggaggcatggggtggtcccctatggtgatgtgaacgtgagtacaatccagtcacctnngcctacanangtttggggtgtgtacctggaagtggcatcgccatgttaatatggtaatnctgttttaaactttccccgggaacccgc

SEQ ID NO: 706093 - DNA, 381 bp, Homo sapiens
  misc_feature (145)..(145): n is a, c, g, or t
ctaaaaaatttggtggtgtcccaaaattctttcccggggtgggcaggggggcgggcccccaggccccttggccctttttttaccccaaaaaaagcaaaacctggggccgggccggccccgaaattcttttgggaccccaaggggnttccccccccccccccccccggggtttttttggggggggggccgttttttcctggcttccccctggccccctcctggcctttgggaaagggaaactccccccgtttttatcccccccgggggtccccccccccccccccccgaaaggaaaatttggggccctttttttttaatttgggcccccggggggtttttttacccggggggtttttttggggaaaaaaaatttctttttta

SEQ ID NO: 706094 - DNA, 1074 bp, Homo sapiens
gcgggaatgcgtgtatctacttaatcactggttcttctcgccaccgtgattctgtctgactattcgcctactacagtaacccctagaggctgcttctcctttgcatcctcctactgcacacaaggctcctcacaacgtatcatatcacacatctcatctgctcgtgtcagagccacttgtagaataaacgtggattacggttatacacaggttcgcctgtggtttcgatcatgaatatattccaggggatattcatgtcgtctatcgagtgcttcgacattccactatcgccattaaataggcaactagagtcgcgtctggttcctactcgtagtcgcaggaccacatagttctgtagatcacttgaagaatcctttctttcacttactggcagtctcgtgttgctcgtgggcctacttttgctccactgttgggaccactggcttggaactcaatgtagctagattgggttacgccagtgttttccccattgcttgccactttgcgcaacctaatttgcacggttgagtttgtgcactgatccagacaccattggttgtggtgtttcttgccgaccagacagcttggaacatggcacaggaggcaataggacatcactttggtgcggaactggtcccactgaagaacgtcgtcttgtaatgcgaagcgtcctccccagcaatagtgggtccacacgggaacccccatcccaaggggaccatgagtgctacccctaattgtggcacttgtcaccttgttgtgactcaaacgcgtcggaatttaaaaggcttctcgccccttgcgtccggaatttacaattcgctttaagaccctaagctcaacgaatacattcccccatatccttgcgttaggacagttccagcagatcggaaaggcgaggtctcctctgtcaccattccccgagtataatagccctacagctataagataaattctcgttagcgcacaattcgttagttggtgtggcctgcctcgcgatcctatagcaaaggatctcccccccgttgtgatggggtgcataacccactttggttttctccggcgcatttggtg

SEQ ID NO: 706095 - DNA, 478 bp, Homo sapiens
  misc_feature (268)..(268): n is a, c, g, or t
  misc_feature (273)..(273): n is a, c, g, or t
  misc_feature (315)..(315): n is a, c, g, or t
  misc_feature (368)..(368): n is a, c, g, or t
  misc_feature (436)..(436): n is a, c, g, or t
  misc_feature (441)..(441): n is a, c, g, or t
  misc_feature (475)..(475): n is a, c, g, or t
acagagtcttgctctgtcgtccaggctggagtgcagtggcagaatcttggctcactgcaaccttcacctcctaggttcaagcgattctcctgcctcagcctcctgagcagctgggattgcaggtgcccgccaccacgtgcagctaatttttatatttttagtagagacaggatttcaccatgttggccaggctggtcttgaactcctgaactcaagcaatccacctgcctcagcctcccaaaatgctgggattacacggcgtgacacntcgtngcccggccttcatctttattgctcaaaagcaaagaatgcccntttatacccgagtgactgtgcagaaacccaaaatgcatcttgaaaatcaaagnagcaaaagctgttggcttgggcagggaggacgggaggccaaaagccccagccccaggtctgggggctnccagngtcgggtccagggagggccagcccagcttgtccnaga

SEQ ID NO: 706096 - DNA, 524 bp, Homo sapiens
aaaaaaaaaaaaaaaaactatgtgtgcgggcgcggcctgcgggcccccggaaaaagctttctaaaacacaatccgtgttggggcgcgcggcgggcgcccaagtagggtaagtgggacactggggccaaaacgcgtggtgtccctaagagagaacccggggcgcaagagagaccaaggtggcgcggggattctctctccacacaaatataaaaaaccgccggggcgggaacaccgagaggcggtctcgtgagacaaaattctcccagagagtgggagtgtctcaagagagcggtccatacacgggggagctctatatctacaaagagcggaggctcacacagcgagagagcgccctcgagagatatcataaacataatatcgcgccccgcggcgccgtgggggggcagcaaagagagagaagcgaagaagcaaaagacagaagaaaacaaaaagaagaaaaaaaaggagaaaaaaaacagaacagaacgaaacaaaaaaaaagaggcagaaagagaaggggggct

SEQ ID NO: 706097 - DNA, 940 bp, Homo sapiens
  misc_feature (22)..(22): n is a, c, g, or t
  misc_feature (70)..(70): n is a, c, g, or t
  misc_feature (125)..(125): n is a, c, g, or t
  misc_feature (132)..(133): n is a, c, g, or t
  misc_feature (142)..(142): n is a, c, g, or t
  misc_feature (145)..(145): n is a, c, g, or t
  misc_feature (150)..(151): n is a, c, g, or t
  misc_feature (180)..(180): n is a, c, g, or t
  misc_feature (182)..(182): n is a, c, g, or t
  misc_feature (185)..(185): n is a, c, g, or t
  misc_feature (207)..(207): n is a, c, g, or t
  misc_feature (228)..(228): n is a, c, g, or t
  misc_feature (236)..(236): n is a, c, g, or t
  misc_feature (255)..(255): n is a, c, g, or t
  misc_feature (286)..(286): n is a, c, g, or t
  misc_feature (289)..(289): n is a, c, g, or t
  misc_feature (313)..(313): n is a, c, g, or t
  misc_feature (369)..(369): n is a, c, g, or t
  misc_feature (384)..(384): n is a, c, g, or t
  misc_feature (402)..(402): n is a, c, g, or t
  misc_feature (426)..(426): n is a, c, g, or t
  misc_feature (440)..(440): n is a, c, g, or t
  misc_feature (484)..(484): n is a, c, g, or t
  misc_feature (516)..(516): n is a, c, g, or t
  misc_feature (532)..(532): n is a, c, g, or t
  misc_feature (537)..(537): n is a, c, g, or t
  misc_feature (569)..(569): n is a, c, g, or t
  misc_feature (599)..(599): n is a, c, g, or t
  misc_feature (697)..(697): n is a, c, g, or t
  misc_feature (854)..(854): n is a, c, g, or t
  misc_feature (871)..(871): n is a, c, g, or t
  misc_feature (903)..(903): n is a, c, g, or t
gggtgctcctgtgcaccatggngttattttgaagggcctgctaacgtctgcgggcagtttataggatgcnattattttctccacaacttaggtacatgagaataaaactgatatttatgaataangtatttnnctcgaaagnggnggggnngcttttgtggggtgcgatcggggtgggtncnctngcgacgccttgggctgtactgngagagggacggacggcgagangcccatgntcatgctgagacctgcaanatccctccatacgtgttgaggagttccaagncanaggggagggtaaaacactatacanaactgttcatcgtcttacattaacagaacacaccgggtaactttacataacaaggnagcaaatccccttcnctgcttttagtctaggtncgttgtatctgtggtgggggatgngagtggggcgagcntggttggggtaaagcttaagtctacatctcatgcagagttggcnttggtctgtcctctaatatttctcagacatcngagttagaactgaggntcgtnaatctggggtccgcattgatttcatatctgtnatgatacccttcgatgtgatccctgcaggnatctctgatgttatgcatccacttttttatccccttgcggttcaaatacaaaaccaggaggaaaatagcgcctatcagggctaaaacaatacccaggnagacataagaggtttgcagggatgggggaagaatcgggtcacagtccaggtcagcactgttgagttccaagaggacccgattcctcattttttccggatatgcacaggtgagccggtctttgccctgcactacctctgtttccttgagccaggtcancatgtctgccatgtggnagtcgcagaccagggattgttgtccaggaaancctaatgtggggtagacttgcaactcagccagggtgc

SEQ ID NO: 706098 - DNA, 1373 bp, Homo sapiens
ggtttgggaacaaaaggtgcgtcccttattgttaaacacaatgggtgggccctggttaatattgaaagacccccaacagagggttttcaagagcaccctggacacataccaccgcacacccctcccttgaggggagaaattttacctctcaggcaactttttgtgccgctgggaaattttgcgcccgacaagagaaggttttctcaggcagtctcttctgccgcccccacttgccggatatacttggagagagtgtgcgccctttttgggtggttgtggggaggaaacaacccacaagtctgttgtgccgcgaagtgtagtgcaccacacaccgggagcccaattgtgacccccaccagaacatctctttgtgtttgaattgcccgcgcgaagtttgtttttggttgcgcccgcaacgtttattaaggaaacgtgggtccccaggacacaaaattgcccaggagaaattgtggacgtccccttccttcccgaggtgttttcgtgcgcgcatgtgggtgtcgacgaggacgcctggttggttggtagtgcaaagagggaaaggaggttttacaacccctggtggctcacccaaaggcgcccatgtctcttggaaagagtatcacagcaaaatgtggctgaagaaaagattggttgtcctctttccacgcccagtttggtttccccacgaacacaaagtatcgccagaagagagcgttatctccacacaggcgtggacaccagagcgtttttgagacacccctgggccggggatagaatagcttctttctcccgagaatttcccgcgccccgctttatgcacacatagggcgctccagacatttctcggttttataaaaaagagtgcacaggaggtgctttattctgggaaaatatttctacactggagaagagtgtatgggacaccccgaaagattttacattctttgtccacacaccagagagagaacatggacacaccggttttctcacccacatgtctgtgacctgtggaaaaggattctcagaaacacctggggtgggatctccccccactgtccaggtgtaacccgagagaaaacccaacatgcaccatgtacccggtttggattccaggtgccaaatacgtgcagaacccccttttgtccagcacccagctggagaggccaccttgcgttcgccaacacggatgcaagccccattgtggtttcccgggcgtttttttaaacaaaaaaattgtagccactgggcgtggtgacagccctgtatatccccgcccctcaggaggctgtaggcggggaggatcccttgagccccccagtcccacctgggccaaatagtgagagaccccgttattttgaaagtaataatataaa

SEQ ID NO: 706099 - DNA, 105 bp, Homo sapiens
aagccagttcaataggatcctcccgaatcaaccctgacccctctccttcataaattattcagcatcctacctccatcgctaaccccactaaaacactcaccaaga

SEQ ID NO: 706100 - DNA, 409 bp, Homo sapiens
tcggagggcacctcttttaaataaaggtctgtcgctgccaccaccaagcccgggggggggccctatttattgggtggtaaaagggacaccccccctctcccccttttaaaaaaaagggggccccctgggggggtttttttcccccagggaaaaaaaaaaaaggggggccgggccctcccccccccggggggttttttttttttttcgggggttttttttttttttcccccccacgggggggcgtggggggttttttttccccccccttccccccggaaaaaaaatcccgggttttttttgttttttaggggggaccccaaaaaaggggggcaccccggtttggggggggggggggggtaaccaaaaaggacccccccaaaaatgggcgggggggtttggggtttcccca

SEQ ID NO: 706101 - DNA, 143 bp, Homo sapiens
gtgagtatacggattcactgtgcaatactcaatgattgttactgagtgctgagaacaacctgcttagatatatttacaggatagtacagtactcaaaaacaaaaattgaggtgtttgccaagttaaatcccgacgttccaata

SEQ ID NO: 706102 - DNA, 544 bp, Homo sapiens
  misc_feature (517)..(517): n is a, c, g, or t
  misc_feature (524)..(524): n is a, c, g, or t
cctgcagaatcaccgcaagcccagccgccacgatgaagtggggccgcgctctgagtccctggaccagcggcagacccatcacccatgacgcctgctccctgcagctgggctctcagttcataggaacgccctgcagaggggccgccacgcagctttccagggagcaccgtccaaaaggggctgtgctgtgtacctgggggggccagtgctcgagctgggacactgctctccacccagtcctatcagccccaacgaggcccttctggaaaacctgccctctgatacctctaatcacgttatgtctggagtccccttctggggctcttccagcaaaaggccatcctctggggcgtctgagagcagaacctcagccaagggggccacagtaccctcaaaaaccactaaaccactgatacaggctctctggagcagggacactgtgcccccaggtgccagaggacagagacaggatccaccctgggccagccataaacatgcccaactcaacggtggcgcntgactcnccaggccacacagactggca

SEQ ID NO: 706103 - DNA, 193 bp, Homo sapiens
taatatcaccaaagtaccccagactaacacagtaattattttggtctctgggtttcctttcagtctgtcaaatgcattgtttcttggttggtaggtttttctgtgagatggagtctcactccgtcgcccaggctggggtgcggtggcataatctcggctcactgtaacctccttctgcctcccagtgcttcag

SEQ ID NO: 706104 - DNA, 807 bp, Homo sapiens
cggggaggcgaggcctcgggaagctgaattattccttgacgtccaagagtttgagagacgaaagtgcttcggcccaggcggggtgtcgtgagcgctcgattccctcgacacctccgtcctgactctcgccgtcttcgccctttccgcgcgcccttggcttccgcaccctcctctccagtccttatccgagatgacggtgagacaagggtccaatcttcttccgtggacttacgcgctcgcgcatgcggactgtgagcgttccactagtcggctgcagagacgcgagcaaccgtctatctcatacggcatacttatgcaagttgtgggcctaggatagggtgaggcgtgtgctcctcaagaggaagaaacctgagaggcccgtgcgcccaccgaggaagccccgccccggtgccttcgctggggagcaggcgtctcgtccgtcagtcggcttgtgcggctgtctcgcccgtgtcccgagtggatcctcgtccagagactgctgcttgtggagctggccgggcgccccgcgtccaccgtgaggttcctcgcgctgggacagggtgccggagcgagcgggagccgaactctagtgcacttaggcggacggcacccgaactgcagagggccccaatatccctggccgggtgtatggggccgcgtcgcccccggttaccgcagtctggggctgctctcaccggtgctccggcttgtgctggaggccatggccgccttacctgccgtgttcctggacggcctagcgcgctcgctggctttccgcagggtgttgtcttagcttcgctgttctcg

SEQ ID NO: 706105 - DNA, 279 bp, Homo sapiens
attgattactgatttgaagaggaagaaaaaccatgaatggtctgaagcaaaagcttagtgtctgaagaagtcagtagggtgaaaacaagagctggccagaatatccacagatggtgacaagttggcaaagctttactagactactcgtgaggctaactagaggccaaggagccaacactgctcctgtccttacagagagaccctacacaggattcctagatatacatggagggacaacatcttatcaggtctctctgtgcagatgtggttatcattcca

SEQ ID NO: 706106 - DNA, 1322 bp, Homo sapiens
cgtgagaccgtcaggtggcggcgagcatgtgagcgaggaaccagagatcggaccagagtatcccccgggaccggcagcgatcgctggagctgtggctcaacaaagccacagaaccaagcatgtcggaacaggattggtcagcatatccagaatttctgtgagcaggtgcaacactgagcccaatggcccctacacatgcgccctggcatactggcctcacaaagatccagtcatccgcgacagagaaggaagctctttatgccttaacggtgctggagatgtgcaatgaaccacgtgtggggagaagttccacagcgcaggtggccaacatttcgtaatcctgaacgaactgatcaaagtgtagtccccaacagtacctggagagtcctgggccacaggaacaagttacacggcacagcgtcataagacatactctatcagtaggacagtctggtattccggaagacatcacagatacgagacgcttatcagatgctgaagaaaccaaggaattatacaacacggaccctacattaccaggtggatacaagtctataccccagcatcgtccctggcccaagagctccatcatattgatgctgatgaagaacagtccaaggcttctgacaagggcttctaaagagcaagcaccccgaggaccttcaggcctgcaaaccgggttacatccacagaaattcgagcacggaggcacacacacacacactcggagcagggtgatccacgacgggacacgagcgagggcaggaagcagcgaaagaccatgatacacggacaccgcaacgaccagagcagaagcatgcacccgcaggaccacagacagcgacccagacccaaccaaaaaacccgacagagcgagatagacacacagcgcaaacgagagaccacgccagacacgcacggcacacgaacacccccggacggcccacgccagcaccgccgcaactccgacgggtagggtcgacaatacaacaggcgcagggagggagaacgagcgcgaccgccagcacacaaccgcgaacagagggaggggcagagggaagacacgagacacaaagaacaaacggcgcaagaggcggctcccaccgccaaagcacgaaggcaacagaaagaaaggagggcaggcagaacaaaagcagcagacaggagaagacagagagaacacggccaacacggcgaaggcgagacagggcgcgtgcagtagctcgacgaggcgacaagagaacagcaacgcgcgcacagcagcacgcggaaccgcaaccaggccagggcgcacagggccgaagagcgggcagacgacacag

SEQ ID NO: 706107 - DNA, 852 bp, Homo sapiens
gggctttggcatggcgactttttctggcccggctggcaaatcctgtcgcttaatccgcaggaagatgtcgagttccacaaaggaggtggcgcaggttcgcaagcgcataacccatggaaaaaaaaagaacaagttattcgtggagtagtctatgtgcgccacccaaattaacctattttgaggaaaacccaagatcttttcatatttctcccagttgtgccatctgtgacacggtttcagtgctgtccaggatgtaacagtggacttgggaaaataggcaaagggttatgcatttgggtggaggttgtgagtctgaggatgttgccaaaaatagttgctgaaacattgaacaattaacttgtttgttgaaagaatcttggagtgtcatttaatgccactgaaaaaagtaccataaagaattctttaaagagtgaaatattccatttaagcaggcatcatatccatcagtgaaagggtatatcggaatcggacattaacaaaaaagctagggatgggaggagccgatttaaaacagaaagaagattactcaggaggaattagtaaaaaaggattggtattgaatttccttctttgatttacagaacagggaagttttcaaaaaataattgctaacgttaaaaaaaggccggtttacgtaggagaaggacaagttcgggtctcttacctcttaagatatgtggttttggcccaacagtttgctaccaatttgggaggaaatactgggtgtgatgtggaagggtgagttaagcattttgtaagataaggataatttggaaaaaggagatagtattggaaatagggatagagagaagtggtggttaatgtgcatat

SEQ ID NO: 706108 - DNA, 723 bp, Homo sapiens
  misc_feature (50)..(50): n is a, c, g, or t
cttttaaaaaaaaaaaaaaaaaaaagcacttcaaatagaatattccccanacgtgattttactgtgatcatatctctttcccctcataactggtcttcttccaatgtgccgtatgttagtgattgcgataaaagacctataggtgtcatctctgacattcctcatccaggtgtacacattgaatctactaacagttaccttctcaactggttttgaatctatccacttcactcagtgaaattcatcaccgtcatactaccactatagcctaaactggggctgctggaataacctcctgactggtcttgcattaaccattttgtaccttttccaaaccctctatctttcctcgctttagccagtgtgatcttttaaaatacaaatgaaattgtctttcccttgcgtaaaacattttaatgggtttatttggctcttggaataaagacagcattccttctatatagcctataaggcccacatgacccacctttatttctagccttctattaaactctgctttccttaatttttatactccactcacaatgccttcctttagtttcctctgtttccactgctcttttctaggggtctttgtgtggcctgttccttttgcttggaagtgtttttcttctgttccagcataggctcccataacatcatgtatacctccttcataaaacttgttatgattgcagtttagcatttgtgtatgtgtgatta

SEQ ID NO: 706109 - DNA, 312 bp, Homo sapiens
tagctgcatcgaggtgctggtggacagcgcggaggaggggtcctcgctgcggcggcggactggccgctcagaaggccgaacagagacttcgcaaattccgggagctgcaccttatgcggaatgaagctcgtaaattaaatcaccaggaagtgttggaagaagataaaagactaaaattacctgcaaattgggaaggccaaaaaagctcgtttggggttgggacttaaggaggggggaaggaaaaggattgcggcaagaggagaagactattgaaagtgaaggttccgggatcagtgcagaagatgcagaaag

SEQ ID NO: 706110 - DNA, 255 bp, Homo sapiens
  misc_feature (135)..(135): n is a, c, g, or t
  misc_feature (162)..(162): n is a, c, g, or t
ctccttggcagcttaatggccttcccctcggcctcgtaaagcatccctgtgacgctctcaacttcattctgcagcttgtggactttgtcattgagctccgcccgggccccgctcccctatcgctgcacttggacntgcagctcctgcaccctgcgcctccanggcttcttcttcttatgttccaccctcctgcttggccttagccctaggaggtggaacatacagaagaagaagcaagggaggctcacagtggct

SEQ ID NO: 706111 - DNA, 315 bp, Homo sapiens
  misc_feature (245)..(245): n is a, c, g, or t
tctgtgagcctggcttcagaggggtgattctctttactcagcctgggggtctggttcgctgtagagggtggcattcggaagtcttcgcatggccttgctgcctggctgtaagcagcgcgtatgtcgtagtcggtctcaacactgacaggagtatgtgctgcccaggtgggactccggtagctgtaggagccgagggacccctggggtctgcagcaggcatggttcggggtctcacacgtggtttnttcgtgagggaaggtggaagtcagtgttgaggccaccatccgtggcagggggcaccaacagtcttcgcct

SEQ ID NO: 706112 - DNA, 581 bp, Homo sapiens
aattccaatttaatgatattcaaatctattaatatttgttgcatcctcagggttgtagatgtgtgctgaaaaaatgatatggtgcaatctcttcagttttagaagaacctgggtatacagaacagagctaaaaatattagaaccacctgtcctttagtgtgacagaataaactagcctttttggtttacttaattacaggcttaccatcaaaaatatattctctaacttaaaaaagtactttgttggtaatatctgatgacatttctggtgtgagcacacttaagtgacacattacttaaagatgtggatgtaagatgctcaaggaaccatcatttgaaacagacggttccctcattgtatctgtacatgtcaaaaagcaaggttgtttttttacacgtgtctgaagcttctggagttgcacttatccggcagctattggactgagggctgaggcactctgcttttggagtgctgcggcaacttcctcaaaagactttcttttgttccttgaactttagaaaatgtgaacagggtcaaggccatgtgcactccattaaagagtgaaagcacattaggtccc

SEQ ID NO: 706113 - DNA, 1303 bp, Homo sapiens
  misc_feature (201)..(201): n is a, c, g, or t
ggacaggcgtctgtgaaaacctacccctaaaagccagaacagtgggaaacggaaaatgatctcatatcaacatgtgtcgtcatcggacaacgtagatgctgtgcaacgtccacgcatcttactggccagtctgactcatactaatagtgcggggtggcagtcgatcaataaaagaagccagtcgaaaatacttcgacgaanggaggacatgctgagactgggacataagggcgtccttcagaggtatgctctggtgtctttggattataagcctgggagagagctcgaggtcggctgaaaaacgttgggtctaatcagcgctacttttgaattaatcctaccttgtgttggcgcataacaattttggcacgtagctcgaggaccaaatgttgaaccctaagtggatcgcaccgtaaatttccacctatggaaattcgactcgccggaagaagtaagcaatctaggaatggagcgtatattactccgagaaaaataaccaataggaatatcagcgacggggtgagcaactgcttccaatggtcctcgaaacatggtttggcttggctgccgtaggagtatgggtgtcgtcctcgtcttcgaggtcgctttggtggtggaaacctgtggtcgtatacgactaagaggtaataccttacactagacggcaagtggggtggggaatgcacacccggaaagaaaacgctattgcgtcccgcatcatctctgcgatcttgtttagctatcgaactgaggggcgaatcgaattggcaaatcacaaaagagcctccattagtatcggtagccgcgagtgatttctataccccatacaaagtgtgtgggattttgcccaaaggtcgggagaaccccgaggcgcatgtacccagcaaacttagccggacagctaggcactagcttggaaacgggtaaataagttcccgaatacaaaagggggggaccaacgttacgaaaggcagaggctctttagccgtagtttttacgatagaacattagaccctctccgtggggtaaaccaccacttcccccttccagttaagctaaactaatagttgtcacggccttatttcacctaagcttagggcacggataggttggttttccgttcggtgtttctccgtgccatagttcggggggttgacagacacaggggcaatctttgttcggtggttggccttgggctctagcatgtgaatcggccctgcaccgtttgagttttgcccccattgtcgctgtttggtgccccacccgggggcgtactccggtggacccctttggcatatctccc

SEQ ID NO: 706114 - DNA, 219 bp, Homo sapiens
attgagattgttgtgatgacattgatggcccctaagatacgaggcgacacctgctaggtgtaaaggagaagctggttaggtctacggaggctccaggatgggagtagttccctgctaagggagggtagactgtccacacctgttcctgctccggcctccactcatagccaaatgcgagcaggagtaggacagcagggaggtaagagtccagaagcttat

SEQ ID NO: 706115 - DNA, 328 bp, Homo sapiens
cctgattgttcggatcacctgtggactgctaaaagcccacagtcctagccccatctgcagagttcgttggcttctgaaggctgggagcacgcgctagaacctgcatttctaaagctgctcaaatccaggcctttggaggcttaagactaagcctgcaccatttcaaactaagtatagtcagagagaaagatcccagcacgccccctcgttcgcacacttctggtacctcagcactctcacagcaggttcccaaaggtgatggttctggaagagttctggcctcatccttttgttaaaacctgctttcagaggtggcttagacaatggc

SEQ ID NO: 706116 - DNA, 362 bp, Homo sapiens
ttgggaatgaaacccccccccctcggagctatactcgagaccataaaaaggggaaatgaagccccaaaaagggtaagggggaaagaaaatgtaccgtttgcccaacgttgaaagactggggggcccaaatcatgttgaaccccccaacccatgggggattaagccaataaagatatttttttccccttgggccgaaaggggtggcccctgggccaaattttgtaagtaaaaaccttagggcttgaaaataattttttaaaaattccaatttgggttccagaaattgattggtttgccccttaacccttctcccccacccctgttttggccggtgaataaagggatttttgtttggcccaata

SEQ ID NO: 706117 - DNA, 161 bp, Homo sapiens
gagtatctgcacaccatcatgccgcaggtgcgcttgccgaacctgcagactggctatctcactttcctcgatgacgaatcttcctgatccagcagccaattcaacctcgcgcagaaaggggatcgacacctcgtcaatcattaacggggggtgtcgtacgt

SEQ ID NO: 706118 - DNA, 299 bp, Homo sapiens
  misc_feature (175)..(175): n is a, c, g, or t
  misc_feature (279)..(279): n is a, c, g, or t
  misc_feature (288)..(288): n is a, c, g, or t
gttccatcaccctgattgaaatgcagtggcacaaacatggctcactgcagcctcgactttctgggctgaagtgatcctcctgcctccgcctctcatgtagctgggaccacaggtgcacaccactgtgaccagttaatttttgatttttttttttttgggggggtagagatggggnctcactttgttgcccaggctggtctcgaactccaggctcaagcaatcctttcacctcgggctcctaaagtcctggaagtacaggcctgagccactgtgcctggnatggcacgnacttcatgatg

SEQ ID NO: 706119 - DNA, 211 bp, Homo sapiens
ctttcgtgatagctgattcctagaggtatcccctcctcagtcgcaacatgcttaggggtcggggcctgggctgctgctgctggccgtccagtgcctggggacagctggtgccctccacgggagcctcgcaagagcaagcaggcaggctcagctaaatggttcagccccatgtccccggatggcgtgtcgagtcaaaggtacctgagactct

SEQ ID NO: 706120 - DNA, 240 bp, Homo sapiens
ctgaggagggttgctccggccaggcgctcctccaccagcaggctctggagctcccgctggcagtcctgcatgcgctggctggtctgcgctgtccactacccaggatgaggccatcgtgtgctctcaacagtagttcacgccagctattgaccgcagggcacttctgtgccacccatcatcccacgatgttcatgcttgaactcctctggatctcctccgggtaccgagtctcgcaattcg

SEQ ID NO: 706121 - DNA, 111 bp, Homo sapiens
acatatgccttttgcagttagattcggggatccagcatggaactctcaaggtggctcttggaccccagagatgttgtctaattccactaaccggcatcctaacccttccac

SEQ ID NO: 706122 - DNA, 206 bp, Homo sapiens
gtggctgttctcgaggataccctgataggtgcgcaggccaggtagtgcagatacctcgggtggctcgaacagcgggacaactctcagaatggtcaaactgaacccttaggggagtgtcacccagaaaagcccacataggaagtcgacacccacaaacataaatattgcaaacaaaagttctcacatacactcctgcgaacctatga

SEQ ID NO: 706123 - DNA, 614 bp, Homo sapiens
ccattgaggccccgtaaagaaaaaaataaacgagcccaagggcggaagtccacatgtcccacacagtaattaacatctattagcgaaaacttgtgacataatagacattgtgctttatataaagctgttagagcacatgtgcataggacatattatcaagattcataagtgcgcaaatatgaaaggcattacatgtcttatcacatgttacacagctgtcataactctcaaagaagtgttgctagtattttataagctgctaactgtctaggattgtcaagtgtttagctaatccatataaccttaccgacagcgaatcttcaatgtcgtaggtctgggtcagtatatactccagcttccagatggactctcacctttagattcgcctctgtcagattcaagtaatcttgcgacatatcctgcagttaacaacagtaacaaaccctggttctctttatggcacataaggcattgtacaacaatgagcgttcatgtctccatttctgtgacattttagtcttggcgctgtggctcacgtctgtgagagcaccgatttgacaggccaatgtggcaggatcacatcagcacaagagttcaagcccagtgtgggcaac

SEQ ID NO: 706124 - DNA, 155 bp, Homo sapiens
tggaccatcgaacatcgatacgcatcagacattgtctcatgaggaaccatgatactctgagctatactgcataccatcactggcgcgactatgagccagtggaattagacgttactcgatgcgatgaacccttccggcactgggaagtggaggac

SEQ ID NO: 706125 - DNA, 103 bp, Homo sapiens
gagcttaagtttattatgcaaacagtacctaacaaacccacaggtcctaaactaccaaacctgcattaaacaattcaagctccatctcgtctcttctcttgga

SEQ ID NO: 706126 - DNA, 120 bp, Homo sapiens
gaggacattttcttcacctctaacactgggtctgctgttggcttccaggccatctgagaatcgcgctgagatcttccaggtccctggtctctgagatgtctgggatcaccatagtcatcc

SEQ ID NO: 706127 - DNA, 130 bp, Homo sapiens
gaggctacattcctttattgataacacagatccagagcagacggaggaaggggcgcggcaggcaggcagttgccgtgcgcaggttctggtcctgtgcccttcctgctcctgaggccccttcctataggtg

SEQ ID NO: 706128 - DNA, 206 bp, Homo sapiens
ggtcatatattacactaggcctagatctgcactggctgcggggcagtgcagggacacacacctgttgggtgcctgttggttccacccaggaggacagcagcagcctcatgcctcctgcccctggcagtcgggtgacgtgggcaggtggccttgcttggcagggttccagggtccccttggaggccccaatggacctttgcctttgg

SEQ ID NO: 706129 - DNA, 317 bp, Homo sapiens
agtctgcctgtgcaagtaatgcggtgggtgatcttggtcacataactcaacttccaggtcagccatcttctattttaagctcgaaatatcttgggactacaggcaacaacaacacgcccggtaatttttggattttcagtagagatggggtttaccatgttggtcatgctgctcttgaaatactgaactcaggtgatgcatctggcttgggctcccaaagtgctaggattacaggtatgagccaacatgtccgggccactctggatttaaggacagttcttccttcaatcagcaggcaaagagtactgattcctgat

SEQ ID NO: 706130 - DNA, 2641 bp, Homo sapiens
gaaaatgtatacctggcagcaggcactgtgtatggactggagacccagctgactgagctagaagatgccgcccgctgcatccacagcggcactgatgagacccatctggcggatctggaggaccaggtggccacggctgcagcccaagtccaccatgctgaactccagatttcagatattgagagccggatttcagccctgaccattgcaggattaaacatagcaccatgtgtgcgcttcacaagaagacgggatcagaagcaaaggacccaggtacaaaccatagatacatcaaggcagcaaaggaggaaactgcctgctccaccggtgaaagctgaaaaaattgagacatcttcagtgactaccattaaaacatttaaccacaacttcattctccaaggctcctcaacaaacaggactaaggaaaggaaaggcaccaccaaggatttgatggagcctgctctggagtcagctgtgatgtactgacaccatggaattccactgccagtgacccactgcctccggccgtacacgacagtgccttgacccaacagccatcgagtactgtatgtatttccacctgaggagaaggcctggggaggccacagtgcaccattgcacagggctgtcctgatacctcatccagaaagccgtctcagacttcagcactgcggtcttgcccactctctgccttaggctcccaggggaatccaagacagaaaatgaagacactggcttccaacagcagcgctccatgtttaagatacatattttccctgtttgctttgctactgtatgttgactttaagatctttttttaaatacatttgattcagctagtattccatgtcaacaatttgtccaaaggaaaactgctggagggaggtggagggaggaaggtgggaattattatttaatacatcattaatgcttattaatctctcacaagcatctttgtcttgcaaatcctaagggaaaagcaagtccctgcagtgagcactagggacagtctaatttggggattgctcaaccatcaagactgcaggtctcccttcagccacctccttcctgctaaaagcttagcctaccacactaccagtcattcccatcgctttgcaatcacaagccacaggatgagaagttctgactcactcatgccatgcccagggctatctgaaacaatgtctcattaagaatttagggttcttccatgggcttactgacagttgcccagatctgaaggggaaagggtcttgagaaagaccatcactggctcaactttagggcactgtccagagtcaacatgatgtggtttagcagtgatcacatctaaacaaagtttaggtaaatgaattatcgcagagaaaaaccacatgagaaaatttttgtactccaaatttacttcccaataaatattcagcaaagtagtaaaatgaccttaaagataaaaatgattagggaatagccttagaaaatttataggtataaaaaattcaaggacaaactgtgcatttaatggacacaagaattgactctaactccatgtctgtggtttctttgaacccatatcaaatgtatgactatttagagtgtttataagagataatggaactgaactttcactcaattaattgggcattaacaaccttcttttatgtttgttcctgatatagtctgaatcttaggaagaaggtaaaagaaaggaggcaagagaatagttatgatgaatatgtgttaagtgcctgctctgaaggaggcaatgttcttctcatttgaatccttatggcaaccttattcaataggttttcccatatttcagatttaataactgaaggccagagagattaatttgccaaagccacacctttatgctaattatgattggaatgcatcacaaaagcctaactctgttgttttcaacctctacgttattttgctgctatgtgcatttccagatctgattttctgctaacttgtgtgctatgatccactcctgatgggggtctacattaatcttccagtactccttgctgatgctgtgttatgtgtcatctaacagaaatgactcctttgaaataagtaaatctttggctttttgttctgttggtgtgattcaaagcaaaacaaacaaacaaaaacaaattttaagaacacaacaaaaaagatttgacttccgaatagaatgttttctttaagaggcatgaaaagcaactattgttgtgttacagtgttaaaaatattcagttttctttgacaaaaatgtgtactgtgtaagccttgcaaacaaaaaacaacaaaaaagaagcagcagcagcagcctgctgtgtggcatctgaacttttataaaggtttccttgtgccaaataagtgcaaagatttaatttactattaaaaaccataagcatatgttatagttccagaagaattattttgtcatcaagtgattttgatctttagtgtcaatatttatatttagattaatttttataaatgaaaatattttaatggtttaagaaaatgaggacaacaggataatatctttgatgacttctgaaagttatgcttcccttcatgttatatgcacattgccaagaattactgtcaagagaaatgataagtaaaagtcatttatgaaaataaa

SEQ ID NO: 706131 - DNA, 652 bp, Homo sapiens
  misc_feature (54)..(54): n is a, c, g, or t
  misc_feature (73)..(73): n is a, c, g, or t
  misc_feature (77)..(77): n is a, c, g, or t
  misc_feature (120)..(120): n is a, c, g, or t
  misc_feature (126)..(126): n is a, c, g, or t
  misc_feature (133)..(133): n is a, c, g, or t
  misc_feature (137)..(137): n is a, c, g, or t
  misc_feature (140)..(140): n is a, c, g, or t
  misc_feature (152)..(152): n is a, c, g, or t
  misc_feature (154)..(154): n is a, c, g, or t
  misc_feature (163)..(163): n is a, c, g, or t
  misc_feature (185)..(185): n is a, c, g, or t
  misc_feature (210)..(210): n is a, c, g, or t
  misc_feature (217)..(217): n is a, c, g, or t
  misc_feature (221)..(221): n is a, c, g, or t
  misc_feature (229)..(229): n is a, c, g, or t
  misc_feature (296)..(296): n is a, c, g, or t
  misc_feature (301)..(301): n is a, c, g, or t
  misc_feature (305)..(305): n is a, c, g, or t
  misc_feature (330)..(330): n is a, c, g, or t
  misc_feature (355)..(355): n is a, c, g, or t
  misc_feature (372)..(372): n is a, c, g, or t
  misc_feature (403)..(403): n is a, c, g, or t
  misc_feature (652)..(652): n is a, c, g, or t
tttgctagatcagaagcagccacacacacacctcatctatgcaaactaaaaatntatataaacagcacaatantgtnatactggatcatgatacattacctgtacacataactactactnttattnataaacntttngtncattcagttttntncccaataanatatcattaagtttttaaaatnattctcttcctctttaaagggagantatttcnaganactaattnacccatctaatattcaaatacaggaaacacattccacaaggcgctttacctgacgagacctcaagtnctgtnttcnctcttgaacttttggggagtaaacngtccatagggaccacacacaatgcnatgacagaagagttgtnacattaagtcttttcatgggacttgattggngaagctttatgacatgcttgagcaacgcactgaaggggatcccatctgagttaatactttgtccaaccactgtagaggtccattcagatgaagttcaatccagcaaggagtacttgttaccgtctgccttcggtattctgctccccaccctttcacaaaactcattcttatggtgcacattctagttagctgatagacggcttcaaaaccctgattaacagactgagccagaagagcagcaaattcctn

SEQ ID NO: 706132 - DNA, 280 bp, Homo sapiens
  misc_feature (13)..(13): n is a, c, g, or t
  misc_feature (229)..(229): n is a, c, g, or t
  misc_feature (237)..(237): n is a, c, g, or t
ctcaaagtgagtntcattgtttgctgatgtctgctccacaaagccctgctccaggggccttcaccaagtcccagccttggtttgctcacctataaataaggataattgaccctggtctatgcacattacaggacagttgtatgaatcagaggatacagcggaagaaaaaatgtttggaaatttaggtctctgcaaactaagggccaatgtactggtatttgtgacagtnaccggatngggtgggatgggggtgataataagagtgcaaggaaggggggat

SEQ ID NO: 706133 - DNA, 503 bp, Homo sapiens
gcggccgcctactactactaaattcgcggccgcgtcgacatcttaacaaagtaaaagtatgattctatcatatgttaggatctctacaccagttctctgccttgaattagtatccagtcacgaacattggcttcatcctctagcattctccagagactaaacaaaccaaaacatctcagacagtagccaagcacgattttgaacatcagaagttggcatacaaccaaagcacagcaaaacacataaagagaagaacactgtcagtcgtgttccttcataaacccaccatctataagattccctacctttccgttggtacacgggtgtagcacaagggcatttagcaaaataacaaaacggtaaacattacaggcatccagttttctaaggcctaaacagtgaggcatggttgatttcgcaaaagtttccagcagcattctcgtacttcctttcgagacgtcgacgcggccgcgaatttagtagtagtaggcggccgctctaga

SEQ ID NO: 706134 - DNA, 239 bp, Homo sapiens
ataaactgtactgaactatcctactctattcttaaccaaatactagttagagaccccctgtacagattgcatagactcctcctatggatacgtcaacaccacagttaaacgctctgctcataatagccttcacaactggcctgtgaggcacgtactagtccctaggaccactgctgggcataagcgacgtggcgtgactcgccctaacgcctcccagctaggtacaaggtacagccagc

SEQ ID NO: 706135 - DNA, 992 bp, Homo sapiens
ggcgacacgcagggagagtcaggccagaaagataaagatggacctccagaaggcggctagccatcccagtgagccaaatctctaccattgcaaggctcaaatctgacaggagatctttgacacagtatccatctaggccatgtctcctctgggaacagaccgtgtcacaaatactggatgggcgctctgttagttctgtctacactatagacctcacatggaggctggcactttgttctacactaacaaatcgggcggagaaatttgtgaagcgaggcgaggaggacgtggcctctcagcatgaaagcaggattccccgattgcgatgccgttggcatccgggtatctgggtagctccgatcgccgatgagtgggggacctcattacttgctcatctacataagacagtgtccttactactgttcctttctatcccactttcaaggagggaatggctttggaagactatcagaggatgcttggttaccaagtaaaggattccaaagtggagcagcaagacaactttctaaaacgcatgtcagggatgatccgtctctacgctgctatcatccagctccggtggccatatggaaaccgacaggagattcaccctcatggcttaaatcatggatggcgctggtatggcacagatcttaaacatggagcccttgtcagatgtgacaggcaccctcctctttgacgttcctggaggtgtgtgggaatgcctcatgaagcaataccaggttcagttctggcaagatgctaattctcatcaaagaggactacttttcccagaattgaagctatcacaagctcaggacagatggggctccttccatacgcctcaagcagttcttggagaaatgtttggcacacaaggacatcctgtgcccaagggctttctgaatttcctccttcttgggctcctgaatgtatccatcaccaacaattcacgctgttgcaagagggcacataattaagggaacgaagac

SEQ ID NO: 706136 - DNA, 369 bp, Homo sapiens
tttttttgtaaattgcccagtcttgggtatgtctctatcagcagcttgaaaatgaattaatacacaacgatgctcaatgacagtgatgcgttctcagaaacacatcattaggggattttgtcattgtgtgaacatcatagagtgtacttacacaaacctaaatggtacagcccattacatacctgggctctatggcatagcctgttgctcctaggctaccaatctgtgcagcatgtgactgtactgaatactgcaggcaactgtaacatggtaatatttgtatatccaaacatagctaaacataggaagggtagagtgaaaatacagcatagaagacaaaaagtagtgcacctctgtggggcatctacc

SEQ ID NO: 706137 - DNA, 156 bp, Homo sapiens
accagtcatgttttatttggaggttaattcctattaggatatgaaaggatccagcgtcgacttagattgtgttcctctcgtaggggctcgggccaaggttgtggggtgggggggtgcagagtgtgtccccttttgtcgtcttctagcagcagaata

SEQ ID NO: 706138 - DNA, 204 bp, Homo sapiens
gtggacaattaaagttacccaaaatatagtaccttatcattaaaaagataccagttattagaccaggtgcagtggctcacgcgtaatctcagcacttcgaggaggcagaagggaggcggattacttgaggtcaaggagtttggcagaccagcctggccaacatggtgaaaccctgtctgtacttggacaaaatacaaaaaatta

SEQ ID NO: 706139 - DNA, 305 bp, Homo sapiens
cccccgcccaaaaggggccccccccgggggggggaaaaaaaaaaccccccgggggcgcccttcccccccccccccttgggttttggggcccccccctttttggttcccccaaaccaaaccccgttttcccccgggggggggggcccccccccccccccttttttttccggttttttggggccccccccccccggacccctttagaaaatccctttttttaaacccccttttcccctttttttccctttttttttttttttttttttttgggtttttttttttaaggggcttttttttccttttta

SEQ ID NO: 706140 - DNA, 402 bp, Homo sapiens
tcttcccctgacaggattaagagattaaagcaaagacaggcataggaaatcacaaggatattgattggggaagtgataagtgtccatgaaatctttacaatttatgtttagagattgcagtaaaggcaggcataagaaattacaaaagtattaatttggggaactaataaatgtccataaaatcttcacaatccacgttcttctgccatggcttcagccggtccctccgtttggggtccctgacttcccgcaagaaatgggctgtaccttgtagcattccaaagacaggccggaattctgagaagggaaagtggtaaaagtattgtccagtcctttttaagttggtggctgagcttggtaaggtgtgtttttaaaagagcatcagtctgttctacctttcct

SEQ ID NO: 706141 - DNA, 145 bp, Homo sapiens
aaaatgctggtttacattactctgagcaggttgttttacacggcagagtggatgtggatgcttctgagaaatgaagttgggcttacccacccatcttgagagttcttcactgtgtgtgccaatatgcataggaatccccggtcga

SEQ ID NO: 706142 - DNA, 250 bp, Homo sapiens
  misc_feature (103)..(103): n is a, c, g, or t
  misc_feature (161)..(161): n is a, c, g, or t
  misc_feature (173)..(173): n is a, c, g, or t
  misc_feature (185)..(185): n is a, c, g, or t
ccgcctggggtttggtcctcgcccatcctgcagggattgcccaccgttttccagacacccccactgaggggggcaccaggtttagtgctgctgctttcaatgntgcacccgggccctgggccggccccccgagcagcctttgtattttgcttggggagggntgggagaccctncaggacattccncaccctcccccatggtgccaagttgtagctatagctacaaataaaaaaaacccttgttttccaga

SEQ ID NO: 706143 - DNA, 129 bp, Homo sapiens
aggacttatacaccctatacaccaggctataccctaggctataccaccaggtagtgcttttcttatactgtataatggcacaggggagagtgttagtgatcagaattccgtggtatagggtggtatcag

SEQ ID NO: 706144 - DNA, 309 bp, Homo sapiens
cacgtctggaacgcggaggctctcttcagcaaatactgcgcgctgactcttaaggactagtttcgcgccctttctcaaatttaagcgcgaaaactacgtcatctccagcggccacacccggcgccagcacctgtcgtcagcgccattatgagcaaggaaattcccacgccctacatgtggagttaccagccacaaatgggacttgcggctggagctgcccaagactactcaacccgaataaactacatgagcgcgggaccccacatgatatcccgggtcaacggaatccgcgcccaccgaaaccgaatt

SEQ ID NO: 706145 - DNA, 176 bp, Homo sapiens
  misc_feature (83)..(83): n is a, c, g, or t
  misc_feature (116)..(116): n is a, c, g, or t
  misc_feature (138)..(138): n is a, c, g, or t
cacagaacatacgcctcagcttaggcccacacagtacgtcgggatcattcactatcactagtcgtccacctccacatcatctnccactggaagatctttggggacaatatcatgcntggagctgtcatttcatataanaatgtcttcttctggaatacctcttgaaggacctatct

SEQ ID NO: 706146 - DNA, 830 bp, Homo sapiens
  misc_feature (36)..(36): n is a, c, g, or t
  misc_feature (62)..(62): n is a, c, g, or t
  misc_feature (64)..(64): n is a, c, g, or t
  misc_feature (68)..(68): n is a, c, g, or t
  misc_feature (77)..(77): n is a, c, g, or t
  misc_feature (82)..(85): n is a, c, g, or t
  misc_feature (87)..(87): n is a, c, g, or t
  misc_feature (89)..(89): n is a, c, g, or t
  misc_feature (91)..(91): n is a, c, g, or t
  misc_feature (132)..(132): n is a, c, g, or t
  misc_feature (139)..(139): n is a, c, g, or t
  misc_feature (151)..(151): n is a, c, g, or t
  misc_feature (171)..(171): n is a, c, g, or t
  misc_feature (174)..(174): n is a, c, g, or t
  misc_feature (189)..(189): n is a, c, g, or t
  misc_feature (213)..(213): n is a, c, g, or t
  misc_feature (220)..(220): n is a, c, g, or t
  misc_feature (237)..(237): n is a, c, g, or t
  misc_feature (240)..(241): n is a, c, g, or t
  misc_feature (245)..(245): n is a, c, g, or t
  misc_feature (250)..(250): n is a, c, g, or t
  misc_feature (275)..(275): n is a, c, g, or t
  misc_feature (280)..(280): n is a, c, g, or t
  misc_feature (285)..(285): n is a, c, g, or t
  misc_feature (299)..(299): n is a, c, g, or t
  misc_feature (314)..(314): n is a, c, g, or t
  misc_feature (349)..(349): n is a, c, g, or t
  misc_feature (417)..(417): n is a, c, g, or t
  misc_feature (423)..(423): n is a, c, g, or t
  misc_feature (429)..(429): n is a, c, g, or t
  misc_feature (431)..(431): n is a, c, g, or t
  misc_feature (434)..(434): n is a, c, g, or t
  misc_feature (441)..(441): n is a, c, g, or t
  misc_feature (443)..(443): n is a, c, g, or t
  misc_feature (494)..(494): n is a, c, g, or t
  misc_feature (498)..(499): n is a, c, g, or t
  misc_feature (503)..(503): n is a, c, g, or t
  misc_feature (508)..(508): n is a, c, g, or t
  misc_feature (516)..(516): n is a, c, g, or t
  misc_feature (554)..(554): n is a, c, g, or t
  misc_feature (556)..(556): n is a, c, g, or t
  misc_feature (566)..(567): n is a, c, g, or t
  misc_feature (569)..(569): n is a, c, g, or t
  misc_feature (571)..(575): n is a, c, g, or t
  misc_feature (580)..(580): n is a, c, g, or t
  misc_feature (593)..(596): n is a, c, g, or t
  misc_feature (599)..(599): n is a, c, g, or t
gctgttgcgatgcgcgagacattgagagattttttntttttttttgaatttgcctttttgancncctnctgcctttnacatnnnngngngncattttttattgaatttttttctttttttgagccttttttncttttgncttttctgctgngcgcctggctgctctttctnctnccccctccccccatntgttccccctgctttcacctatcnactcctnagcttccccaacaggancanntttnagggnccaggcctcttggaggcccctcctncttcnttggnttctgcttccttcncttcttagctggctnaggggcttctatgggatcctggaagttccttaggnacttgcccagggtcccagggccacccacacttcatctgctccctcataggccccacctccacgtcccngctggnccccananccnagcttcntnccctccaccgggagtctgcatggttgggagtcctgggtggaggggcctttntgannctgnacccngctcaggncaggtggaggagctgggcctcccacagggtgcccgggnantgccatcctnntngnnnnnggcanccttcaaacgttnnnntcnacagtcctcaggtctaggcagggctgccggttctccacctccccatccgccccaggccccctgcctgtgcctgccttgcaccccctctgcttgggccacggtgtctctgcattgcctgcctttttgccttcacctcttttcttccccgccccctgcacattcggggtcttacccccaggctgtgagctccttggggcaggccctcaataaatgtgaacgtcgctgccgcaa

SEQ ID NO: 706147 - DNA, 164 bp, Homo sapiens
tctcgaggatcgcggcatacaggctcttttaaacaatcagcttccaggggggaaaaatagagcaagaactcattactgcaagacaacgcctagacactcataagagagatccgctccatgctcaaaacacctccagcaatgggtgatcaaagtttcaatcatga

SEQ ID NO: 706148 - DNA, 246 bp, Homo sapiens
gtgagtctacttgccagttgacaccaaatagactacgaaagtgtgtttaacatacctgaacacacaatagctaagacccaaactgtgattagataccccactatgcttagccttaaaactcaacagtttaatcaacaaaaattggtcgccagaaaacttacggagcccaaaggtttaaaattcaaagggacctgggcgggtgcttccataattccccctaagagggaagccctgttccttgtaatc

SEQ ID NO: 706149 - DNA, 978 bp, Homo sapiens
ggaatttttataggcgtaggataaattttcacagactaagtttatttcagacaaagtagagaattcttttagaaagtttcttgttttctctcccttttgtggattgtaatggtaaaacacatggtgcgaaaatggacatggccgggggcatatgggcgaatctggcgagagtatagtaagcccgtacccgggctcgttaaatcaggcggtgattcaggagaacgccgtataaaagaggtgggttcgcaaggtttcggtctatctaaagccaaggcgctatatgtcttagcagggtaaggccaggtgttgggcctttagcattagttgtcgcaagtggtgtgcctttgtccagagacaggaaatctccctgtcttgatccacagaagtaccttgctacatgtcgaagcttcaaagttttgtcagggacggggggtggcatgtggggacttgtgggaagccctcatatggcccacgcataccgggggaggacgagaggcagacaaatcgctctgaccccccagtgagagtcgcgtgctgacgttgagcttcagatagtggtgccatggagtaccatgctgtaactaggaggaaatgcccgggcaagacagaattgaacctctcacaacgtagctgatttgtggatgaagcgaacgtgtatgcgtgtgacgcaggtgggatctatggagagtgatgtcctcataggagcataggtgttgtggtataacgctacgttgtgtctgtgtgactacggacagttgctatgggaacctgcaatggccagacttggtgttgagaattaggggcagtgggtacgtgtcctgtccaggaagagtttttgcgcccctatcggttcagaacaaacacatgtaggggggtgttcgccagaaaaacacacaggagagggtgacacatagcacatagcatcttactacatttatgccaacaaaagataacattttattattgtcggaagacggt

SEQ ID NO: 706150 - DNA, 861 bp, Homo sapiens
  misc_feature (8)..(8): n is a, c, g, or t
  misc_feature (80)..(80): n is a, c, g, or t
  misc_feature (108)..(108): n is a, c, g, or t
  misc_feature (127)..(128): n is a, c, g, or t
  misc_feature (132)..(133): n is a, c, g, or t
  misc_feature (153)..(153): n is a, c, g, or t
  misc_feature (178)..(178): n is a, c, g, or t
  misc_feature (202)..(202): n is a, c, g, or t
  misc_feature (205)..(205): n is a, c, g, or t
  misc_feature (220)..(220): n is a, c, g, or t
  misc_feature (244)..(244): n is a, c, g, or t
  misc_feature (251)..(251): n is a, c, g, or t
  misc_feature (268)..(268): n is a, c, g, or t
  misc_feature (271)..(272): n is a, c, g, or t
  misc_feature (276)..(276): n is a, c, g, or t
  misc_feature (281)..(281): n is a, c, g, or t
  misc_feature (306)..(306): n is a, c, g, or t
  misc_feature (311)..(311): n is a, c, g, or t
  misc_feature (316)..(316): n is a, c, g, or t
  misc_feature (330)..(330): n is a, c, g, or t
  misc_feature (345)..(345): n is a, c, g, or t
  misc_feature (380)..(380): n is a, c, g, or t
  misc_feature (448)..(448): n is a, c, g, or t
  misc_feature (454)..(454): n is a, c, g, or t
  misc_feature (460)..(460): n is a, c, g, or t
  misc_feature (462)..(462): n is a, c, g, or t
  misc_feature (465)..(465): n is a, c, g, or t
  misc_feature (472)..(472): n is a, c, g, or t
  misc_feature (474)..(474): n is a, c, g, or t
  misc_feature (525)..(525): n is a, c, g, or t
  misc_feature (529)..(530): n is a, c, g, or t
  misc_feature (534)..(534): n is a, c, g, or t
  misc_feature (539)..(539): n is a, c, g, or t
  misc_feature (547)..(547): n is a, c, g, or t
  misc_feature (585)..(585): n is a, c, g, or t
  misc_feature (587)..(587): n is a, c, g, or t
  misc_feature (597)..(598): n is a, c, g, or t
  misc_feature (600)..(600): n is a, c, g, or t
  misc_feature (602)..(606): n is a, c, g, or t
  misc_feature (611)..(611): n is a, c, g, or t
  misc_feature (624)..(627): n is a, c, g, or t
  misc_feature (630)..(630): n is a, c, g, or t
tggctccngcccgctgctgccctgctgcccccctctgccaggcgctagacatgtacagaggtttttctgtggttgtaaanggtcctatttcacccccttcttcctgtnacatgacccccacccatgnnttannaaagggggtgctggtggtgngccgtgtgtgcgtgtccctcctctnctccccccctggctgctctttctnctnccccctccccccatntgttccccctgctttcacctatcnactcctnagcttccccaacaggancanntttnagggnccaggcctcttggaggcccctcctncttcnttggnttctgcttccttcncttcttagctggctnaggggcttctatgggatcctggaagttccttaggnacttgcccagggtcccagggccacccacacttcatctgctccctcataggccccacctccacgtcccngctggnccccananccnagcttcntnccctccaccgggagtctgcatggttgggagtcctgggtggaggggcctttntgannctgnacccngctcaggncaggtggaggagctgggcctcccacagggtgcccgggnantgccatcctnntngnnnnnggcanccttcaaacgttnnnntcnacagtcctcaggtctaggcagggctgccggttctccacctccccatccgccccaggccccctgcctgtgcctgccttgcaccccctctgcttgggccacggtgtctctgcattgcctgcctttttgccttcacctcttttcttccccgccccctgcacattcggggtcttacccccaggctgtgagctccttggggcaggccctcaataaatgtgaacgtcgctgccgcaa

SEQ ID NO: 706151 - DNA, 304 bp, Homo sapiens
cggtgacctggagggagccgagggcttcggatgctgcaggtgacatgagctctccagatgggcgcagcttcccgtaccgggccgctctcaggaggcacctctaccagtggtgacgaggggctacttcccctttgtgctggagcgtgggggactcatacctgggagggggcccagggcctgaggagcccgagggaccatagcctgtgcaggctgcagcgaggaagcgagcaagagagctgcatggtagagacgcgcgcagcgtcggtccaagatgcattcgggagcggaccaatgagacgagcgt

SEQ ID NO: 706152 - DNA, 116 bp, Homo sapiens
ggactacattgtgctggccttgcgccatgaatggggtgaaaaggacacgtgcagtgccgggtgtggtgtctcactgcctgtaatcccagcactttgggaggcctgaggtggacagg

SEQ ID NO: 706153 - DNA, 193 bp, Homo sapiens
ggcactggtgcggaagcactgcctttctatatgcgcaatcagaccccagtcagaagatacttgtgtcctgaagtgatgcctggagcattttaaaggagcatactctgtcagagaactatagagcgtctctgaagtattcctcttttttaaggaaacgcaaaagcggaatactccaatactatggcctaaaatg

SEQ ID NO: 706154 - DNA, 296 bp, Homo sapiens
aatttgttcctatgagaaaagtttagtctacttgtgcacatctcatcaaaacagaaaacaagtcacagaaacaaaaccctgttcattccttcacagttctttagtgagaatcaaatacactgtatggatgtagaattattgtaaaaaagttaattttttacatggtggtcttaaggacgataatagttctattaggtgtacttcaagggtaagatcagtaattatagagcacagaatttagtgtgtaagaactgttcatcgcacttgctgggtccgagtcggtaccgggctaccga

SEQ ID NO: 706155 - DNA, 305 bp, Homo sapiens
  misc_feature (54)..(54): n is a, c, g, or t
  misc_feature (56)..(56): n is a, c, g, or t
gctcgacacaaaatcgtgggcttgctcaattactgtgggagctggcttgccggntngaggccagcaaaagcaccgcacatctgtcatgaacgccacttgtctgcgacatgatgtcgtttcatatgccatccaaaacccgttgggttagaatgcccccttttctgcccccgatccttgaggaccgccatgttcagccgtgatttgactattgccaagtacgacgccgatctttttgccgccatggagcaagaagcccagcgccaggaagaacacatcgagctgatcgcttcggagaactgtcgacg

SEQ ID NO: 706156 - DNA, 111 bp, Homo sapiens
tgcatgtaatacattccatgggatacattaaaactgagacgaacccattctgtgttagctaccatctggaatatccactataattcagtggtgaatcctaacaaggccacc

SEQ ID NO: 706157 - DNA, 255 bp, Homo sapiens
agcactttgggaggccgtgatgagcagatcgcctggggtcaggggttcaagaccagcctggccaacatggtgaaacccggtctctactaaaaatacaaaaattagctgggcatggtgacgggcacctataatcctagctactcaggaagctgaggcaggagaatcacttgacccaggaggtggaggttgcagtagccaggtttagttgaactagctaagaggcagcggcaataaatgtattcagtaccctcttat

SEQ ID NO: 706158 - DNA, 112 bp, Homo sapiens
tctagaggatcccttgaattgtgccaggaaggtcttcgtgggcatttcagtcaagccggtgaccccaagattcagaaggacttgaaaatcaaagcccatgtcactgtctcca

SEQ ID NO: 706159 - DNA, 121 bp, Homo sapiens
cgtgatatggcatctgcggctatgagaggtggcccgattgtctgaacagagctcgctggctggataagtggatcgccgctggttgatcatgccgctgcgagaagcggtggtcgaagtatac

SEQ ID NO: 706160 - DNA, 108 bp, Homo sapiens
tgtgctgtgttggtgttgggcgcatccccttcttcacactttggtgttcttctcctcttgacggtggtggctaaagccgccgctttcctccttccctctctttagtgt

SEQ ID NO: 706161 - DNA, 527 bp, Homo sapiens
cgtctacattgaatatacttggtcttattcgccctggatgcaacttattgttgcggaaagggaaagggagcttcaactgcacccaaggtttgttggggggcattaattggccatttcaagcataactggctggggaaaaacaaacccccccacctaaaaccctgggggcattgggactcccaaagaaggccaccaacccccattttttgtttttgttgaggagaaacagtttctacaaagaaacacaccgggatttgaatttatggcctaaagaaaaacacatgacttggcctaaaaatacaccgggggaaaccgccccaaaatagggcgcaaccagccccaaaatggtaaacgggacgaaacaagtttttaagatcatggggaaccagacccacaatttaaaaaatttttttattagaccccttgggccccaagggatggttgtgtgttcaccccacaaaaaccccccgttaaaaaacgctttccagggccattaaaaaaaaaaggggtttatttgtcaaacttta

SEQ ID NO: 706162 - DNA, 456 bp, Homo sapiens
  misc_feature (80)..(80): n is a, c, g, or t
cagtgagtcgctgcaggcgcaccttagaggatggagcttaaaacacacacccattccatcctggctaacacggtgaaacnccgtctctactaaaaatacaaaaaattagccgggcgtggtggtgggcgcctgtagtcccagctactcgggagcctgaggcaggagaatggcgtgaccccggcaggtggagctcacagtgagccgagatcgcgacactgcactccagcctgggcaacagagtaagactccatctcaaaacaaacaaacaaacaaaaaaacaaaaaaaacctaaggaaaaaaatagcaaaaagtagccaggcgtggtggcacatgcctgtagtcacagctactcagaaggctgaggtgggaggttcacttgaggccaggtgatgatgctgcagacggctatgattatgccactgccctcaagcctggggaacagagtgagactgtttc

SEQ ID NO: 706163 - DNA, 117 bp, Homo sapiens
ggaactgaagccgtctacttggcacaaacaggtgtggtacatggtccctgggataagaagggttgccagctgggagacctatttatgggagcagaggtgggacaggagcttgctcag

SEQ ID NO: 706164 - DNA, 403 bp, Homo sapiens
ctagatagcaccccgtggcattacataacacgtcatgagtggcatgtgtcttgtaattttggggacaggtatctctcgttggtcgcctctcgtttttataagatacaaaatcaacaagaagaacataacaaggccgggcgtggtggcatcacgcctgtaatcccagcactttgggaggccgacggcgggtggatcacgagctcaggagatcgagaccatcctggcgtaacacggtgaaaccccgtcgtctactgaaaatactaaagaattagccgggcgtggtggcgggcgctctgtagtcccagctatcttgggaggctgaggcacggagaatggcgtgaacccgggagacggagctgcagtgtgccgagtggccaatcacctccagctggcgacagacatc

SEQ ID NO: 706165 - DNA, 731 bp, Homo sapiens
gggtcccttcccccttgcggcgcgcggtcccaaattgaccctgggtctcttgaaaaaatttctgcttgccagctcccacttcaccgacttttagactaaataatcaagtatttacagtgtatggagtatttgtctattagcacctatattagtttcacagggctatttagacaaatgtgaatgcataaaaagcataaaactacaaagcaaaacccaagtttagaaggaaaattagctactaaagtatatgcaaaagattattttaggaaagaatttccccaatgaagtgagaaacaagacaataagaaatagaaagttgaagaagatggcataaataggcaatcacagtagagtagaaaagatggatgagaaacgtgaacacaatggaagtaagtcaagaaaacgctattttcagcacatcaagtagccaaaatgttaagataaggtcttgctattcggatggaatgtgtaactatgtagattggcatgggtaattttgcacataaactttgatcatcatgtgtacttctaggaatctatttcagagaaattgtgcacaagcaccccgaaatatatatgggtacatagtagtgtagcgtgtagttcattcatgcgaataaatatttgtgtgaacagtcctatatgtcaggtattatactaattctagggtataacacaattgtgcttgacaattgttattgcgtagaagttgttataaacagcaaatatgg

SEQ ID NO: 706166 - DNA, 670 bp, Homo sapiens
  misc_feature (528)..(528): n is a, c, g, or t
  misc_feature (619)..(619): n is a, c, g, or t
gccatgacccccgtgcccaggggcccctgtgaaatactgtaaaggtgggaatgtaaaaaaggaggtcctagaatttgtagaatgtaaggaagggaggaaaaattcaatctgataagtgttcattgatcttctaatgggttagaagcactcagccacataacaacaacaacattgataactaactgagtagttaatatggtcaggcgctattctgagggtttacattcattaactcactttattctcacaaatatgtcttgaggtaggtactatcatgttcaccatttcacatgagagatacttacatctttttacatacacagagatcttaagcactttgatccagttcccacagctatgaagtagtagggctaccttccaatccagaaagtctggatccaagactgtttattcactgtcctattcaccctattttgtgaaggaaaagaccaagttgaaattcttcaagagttcggtgtctaataacggagccagatctatatttctatacattattacaacacaagngtggtgggagcccggaactacttactgtctctacttggactcaatcgatggcaatgcttacacaatgcccccttctgagaaccttataggnttctatattaatgtcacatacacacgctttatatttttatttggtttgggg

SEQ ID NO: 706167 - DNA, 713 bp, Homo sapiens
atggctttgtccacccagacccactctggatcccattcaaagaggtggcagtgaccctcatttaccaactggcagagtggcccctgaagtgatcttgtgcccagatattgcagtggctgtgcaaaacatgtgccctggagaatgctagaagagaagagaaccatgtcatggatgtgaccctgaagtgagtcccccgcaatgctccccactttcctgttgatgaacctgctgtcccttggctggtgtgatgtgtgctctgcaagcatgctggtccacttgtgagcatgtgcatgtgatgtgtgatgatgctcttgcctgtgctgcctgatgttctcctgtgtgaatgaacatgtgatgcacaatgaccaaatgatcccaatggtgatgaagaatactgtgctctgagacacaccatgtgatgtgagtgatgctcggtgttgcttggtttgtgtgtgcaagcatgcaagattgacacatgatgtgcatgaactaatcctgtggcatacttgctgatgatggaacttgtttggattggcaaacatgacactggctgcctttgttccactcttgcttaagagtcttgtaacaacccagtgcctctatagcaacccatgacctctctgcagctgcttcacttgcccttggcaagtactgcatgatcagttgcacctttcttgcgactcccagcttcggctactgttcaccatgctgga

SEQ ID NO: 706168 - DNA, 1615 bp, Homo sapiens
  misc_feature (1602)..(1602): n is a, c, g, or t
  misc_feature (1605)..(1605): n is a, c, g, or t
cagtagtccttggggcggaactggccccccgtggcccggcccggctcggccccacctccgcccgcaggcggtcccggcccacgcgggaaggtccttaagcccgggcggccggcgggaccggcggagacccgtggaggccgccgacgatggcggggccgacggaggccgagacggggttggccgagccccgggccctgtgcgcgcagcggggccaccgcacctacgcgcgccgctgggtgttcctgctcgcgatcagcctgctcaactgctccaacgccacgatcaactggctgtcactggtctacctcgtggtatccaccccatttggcgtggcggccatctggatcctggactccgtcgggctccgtgcggcgctcggtgtctataccatccctgctggcgtcgtctgcctgctgtccaccatctgcctgtgggagagtgtgccccccaccccgccctctgccggggctgccagctccacctcagagaagttcctggatgggctcaagccgctgctcatgtggaacaaggcctatgtcatcctggctgtgtgcttggggggaatgatcgggatctctgccagcttctcagccctcctggagcagatcctctgtgcaagcggccactccagtgggttttccggcctctgtggcgctctcttcatcacgtttgggatcctgggggcactggctctcggcccctatgtggaccggaccaagcacttcactgaggccaccaagattggcctgtgcctgttctctctggcctgcgtgccctttgccctggtgtcccagctgcagggacagacccttgccctggctgccacctgctcgctgctcgggctgtttggcttctcggtgggccccgtggccatggagttggcggtcgagtgttccttccccgtgggggagggggctgccacaggcatgatctttgtgctggggcaggccgagggaatactcatcatgctggcaatgacggcactgactgtgcgacgctcggagccgtccttgtccacctgccagcagggggaggatccacttgactggacagtgtctctgctgctgatggccggcctgtgcaccttcttcagctgcatcctggcggtcttcttccacaccccataccggcgcctgcaggccgagtctggggagcccccctccacccgtaacgccgtgggcggcgcagactcagggccgggtgtggaccgagggggagcaggaagggctggggtcctggggcccagcacggcgactccggagtgcacggcgaggggggcctcgctagaggaccccagagggcccgggagcccccacccagcctgccaccgagcgactccccgtgcgcaaggcccagcagccaccgacgcgccctcccgccccggcagactcgcaggcagggtccaagcgtccaggtttattgacccggctgggtctcactcctccttctcctccccgtgggtgatcacgtagctgagcgccttgtagtccaggttgcccgccacatcgatggaggcgaactggaacatctggtccacctgcgggcgggggcgaaagggctccttgcgggctccgggagcgaattacaagcgcgcacctgcancgncaaaaaaaaa

SEQ ID NO: 706169 - DNA, 2773 bp, Homo sapiens
  misc_feature (715)..(715): n is a, c, g, or t
cagtagtccttggggcggaactggccccccgtggcccggcccggctcggccccacctccgcccgcaggcggtcccggcccacgcgggaaggtccttaagcccgggcggccggcgggaccggcggagacccgtggaggccgccgacgatggcggggccgacggaggccgagacggggttggccgagccccgggccctgtgcgcgcagcggggccaccgcacctacgcgcgccgctgggtgttcctgctcgcgatcagcctgctcaactgctccaacgccacgctgtggctcagctttgcacctgtggctgacgtcattgctgaggacttggtcctgtccatggagcagatcaactggctgtcactggtctacctcgtggtatccaccccatttggcgtggcggccatctggatcctggactccgtcgggctccgtgcggcgaccatcctgggtgcgtggctgaactttgccgggagtgtgctacgcatggtgccctgcatggttgttgggacccaaaacccatttgccttcctcatgggtggccagagcctctgtgcccttgcccagagcctggtcatcttctctccagccaagctggctgccttgtggttcccagagcaccagcgagccacggcaacatgctcgccaccatgtcgaaccctctgggcgtccttgtggccaatgtgctgtcccctgtgctggtcaagaagggtgangacattccgttaatgctcggtgtctataccatccctgctggcgtcgtctgcctgctgtccaccatctgcctgtgggagagtgtgccccccaccccgccctctgccggggctgccagctccacctcagagaagttcctggatgggctcaagccgctgctcatgtggaacaaggcctatgtcatcctggctgtgtgcttggggggaatgatcgggatctctgccagcttctcagccctcctggagcagatcctctgtgcaagcggccactccagtgggttttccggcctctgtggcgctctcttcatcacgtttgggatcctgggggcactggctctcggcccctatgtggaccggaccaagcacttcactgaggccaccaagattggcctgtgcctgttctctctggcctgcgtgccctttgccctggtgtcccagctgcagggacagacccttgccctggctgccacctgctcgctgctcgggctgtttggcttctcggtgggccccgtggccatggagttggcggtcgagtgttccttccccgtgggggagggggctgccacaggcatgatctttgtgctggggcaggccgagggaatactcatcatgctggcaatgacggcactgactgtgcgacgctcggagccgtccttgtccacctgccagcagggggaggatccacttgactggacagtgtctctgctgctgatggccggcctgtgcaccttcttcagctgcatcctggcggtcttcttccacaccccataccggcgcctgcaggccgagtctggggagcccccctccacccgtaacgccgtgggcggcgcagactcagggccgggtgtggaccgagggggagcaggaagggctggggtcctggggcccagcacggcgactccggagtgcacggcgaggggggcctcgctagaggaccccagagggcccgggagcccccacccagcctgccaccgagcgactccccgtgcgcaaggcccagcagccaccgacgcgccctcccgccccggcagactcgcaggcagggtccaagcgtccaggtttattgacccggctgggtctcactcctccttctcctccccgtgggtgatcacgtagctgagcgccttgtagtccaggttgcccgccacatcgatggaggcgaactggaacatctggtccaccccttctgtcgtcttcttgtcagcctgggacatcagcagacgcttgatgtactccttgttgattttccctttcccgtccgggtccagcatcttgaaggcgttaagaatggtctcctcggcgtcggtaccgctcagcttctccccaaacaggttcagaaacatggtgaagttgatgggccccgaggcctctttgagcatggcgtccagctcgtcgtccttgacgttggtcttgcccagggaggcataggtgtccttcaggtcctccttgtcaatgaagccatctcggttctgatccatgagtgtgaatgcctccttgaactcctggatctgagtctgctcaaagttggagaagacattggatgaggctctctgggcccggagggcacccccttccttcttcttggtcttcctgctggccatgcctgcttctgcctgctttgatgcgtctgcccagggccccaggtcttgcccatcttaagctcctgcttggtcccccaggacagttcagactccggctgccactccctacaaggacaggcttggggctaccccaggggactggacagctgcagagtgagctttggcagcctggcagtgactcacacccttgccctgcctcaccccgcaaggcccccagcctccccagatacctctggccaggactacctcccatccacctgtccccgaaccccggggaggctttgttctcccaaggattctgtgtgtcagcagggccacctgtacacgctcttggctgggggcctgggcaccctggaactgcaggagccagaggaaggggcactttttctagatttgcacaacgctgctgtgggtgactgcagctggtcaccgggcttctgccaagcacactctgtctgtc

SEQ ID NO: 706170 - DNA, 2433 bp, Homo sapiens
  misc_feature (2)..(2): n is a, c, g, or t
gngacacaaaagaacaagatgaaaaaaagaggcaggaaccggaccggaaaacccgggaacggcgggaccggcggagacccgtggaggccgccgacgatggcggggccgacggaggccgagacggggttggccgagccccgggccctgtgcgcgcagcggggccaccgcacctacgcgcgccgctgggtgttcctgctcgcgatcagcctgctcaactgctccaacgccacgctgtggctcagctttgcacctgtggctgacgtcattgctgaggacttggtcctgtccatggagcagatcaactggctgtcactggtctacctcgtggtatccaccccatttggcgtggcggccatctggatcctggactccgtcgggctccgtgcggcgctcggtgtctataccatccctgctggcgtcgtctgcctgctgtccaccatctgcctgtgggagagtgtgccccccaccccgccctctgccggggctgccagctccacctcagagaagttcctggatgggctcaagccgctgctcatgtggaacaaggcctatgtcatcctggctgtgtgcttggggggaatgatcgggatctctgccagcttctcagccctcctggagcagatcctctgtgcaagcggccactccagtgggttttccggcctctgtggcgctctcttcatcacgtttgggatcctgggggcactggctctcggcccctatgtggaccggaccaagcacttcactgaggccaccaagattggcctgtgcctgttctctctggcctgcgtgccctttgccctggtgtcccagctgcagggacagacccttgccctggctgccacctgctcgctgctcgggctgtttggcttctcggtgggccccgtggccatggagttggcggtcgagtgttccttccccgtgggggagggggctgccacaggcatgatctttgtgctggggcaggccgagggaatactcatcatgctggcaatgacggcactgactgtgcgacgctcggagccgtccttgtccacctgccagcagggggaggatccacttgactggacagtgtctctgctgctgatggccggcctgtgcaccttcttcagctgcatcctggcggtcttcttccacaccccataccggcgcctgcaggccgagtctggggagcccccctccacccgtaacgccgtgggcggcgcagactcagggccgggtgtggaccgagggggagcaggaagggctggggtcctggggcccagcacggcgactccggagtgcacggcgaggggggcctcgctagaggaccccagagggcccgggagcccccacccagcctgccaccgagcgactccccgtgcgcaaggcccagcagccaccgacgcgccctcccgccccggcagactcgcaggcagggtccaagcgtccaggtttattgacccggctgggtctcactcctccttctcctccccgtgggtgatcacgtagctgagcgccttgtagtccaggttgcccgccacatcgatggaggcgaactggaacatctggtccaccccttctgtcgtcttcttgtcagcctgggacatcagcagacgcttgatgtactccttgttgattttccctttcccgtccgggtccagcatcttgaaggcgttaagaatggtctcctcggcgtcggtaccgctcagcttctccccaaacaggttcagaaacatggtgaagttgatgggccccgaggcctctttgagcatggcgtccagctcgtcgtccttgacgttggtcttgcccagggaggcataggtgtccttcaggtcctccttgtcaatgaagccatctcggttctgatccatgagtgtgaatgcctccttgaactcctggatctgagtctgctcaaagttggagaagacattggatgaggctctctgggcccggagggcacccccttccttcttcttggtcttcctgctggccatgcctgcttctgcctgctttgatgcgtctgcccagggccccaggtcttgcccatcttaagctcctgcttggtcccccaggacagttcagactccggctgccactccctacaaggacaggcttggggctaccccaggggactggacagctgcagagtgagctttggcagcctggcagtgactcacacccttgccctgcctcaccccgcaaggcccccagcctccccagatacctctggccaggactacctcccatccacctgtccccgaaccccggggaggctttgttctcccaaggattctgtgtgtcagcagggccacctgtacacgctcttggctgggggcctgggcaccctggaactgcaggagccagaggaaggggcactttttctagatttgcacaacgctgctgtgggtgactgcagctggtcaccgggcttctgccaagcacactctgtctgtc

SEQ ID NO: 706171 - DNA, 353 bp, Homo sapiens
ggttaacccaaaacctcccgcattggggaggcaccccctgaagtacttccttcagggtttcccctttgtgagggggtggagaaacccccccggcctgtttggaggaacaactggctttgcttttaaaaaatttggcaagggggccccatttttttgcccttaggattccccgctctttcctacaacccccagggctggggtcctaaaaagaccttgggtggtaaaactgtacttggtgggagtgagggggtggggaggaaccatgcaaatccccttccatggtttttaaaagcagtaaaaaacatttttggatgagacttgtttccaaaaaaaaccagctaaatttgttttta

SEQ ID NO: 706172 - DNA, 2483 bp, Homo sapiens
cagtagtccttggggcggaactggccccccgtggcccggcccggctcggccccacctccgcccgcaggcggtcccggcccacgcgggaaggtccttaagcccgggcggccggcgggaccggcggagacccgtggaggccgccgacgatggcggggccgacggaggccgagacggggttggccgagccccgggccctgtgcgcgcagcggggccaccgcacctacgcgcgccgctgggtgttcctgctcgcgatcagcctgctcaactgctccaacgccacgctgtggctcagctttgcacctgtggctgacgtcattgctgaggacttggtcctgtccatggagcagatcaactggctgtcactggtctacctcgtggtatccaccccatttggcgtggcggccatctggatcctggactccgtcgggctccgtgcggcgctcggtgtctataccatccctgctggcgtcgtctgcctgctgtccaccatctgcctgtgggagagtgtgccccccaccccgccctctgccggggctgccagctccacctcagagaagttcctggatgggctcaagccgctgctcatgtggaacaaggcctatgtcatcctggctgtgtgcttggggggaatgatcgggatctctgccagcttctcagccctcctggagcagatcctctgtgcaagcggccactccagtgggttttccggcctctgtggcgctctcttcatcacgtttgggatcctgggggcactggctctcggcccctatgtggaccggaccaagcacttcactgaggccaccaagattggcctgtgcctgttctctctggcctgcgtgccctttgccctggtgtcccagctgcagggacagacccttgccctggctgccacctgctcgctgctcgggctgtttggcttctcggtgggccccgtggccatggagttggcggtcgagtgttccttccccgtgggggagggggctgccacaggcatgatctttgtgctggggcaggccgagggaatactcatcatgctggcaatgacggcactgactgtgcgacgctcggagccgtccttgtccacctgccagcagggggaggatccacttgactggacagtgtctctgctgctgatggccggcctgtgcaccttcttcagctgcatcctggcggtcttcttccacaccccataccggcgcctgcaggccgagtctggggagcccccctccacccgtaacgccgtgggcggcgcagactcagggccgggtgtggaccgagggggagcaggaagggctggggtcctggggcccagcacggcgactccggagtgcacggcgaggggggcctcgctagaggaccccagagggcccgggagcccccacccagcctgccaccgagcgactccccgtgcgcaaggcccagcagccaccgacgcgccctcccgccccggcagactcgcaggcagggtccaagcgtccaggtttattgacccggctgggtctcactcctccttctcctccccgtgggtgatcacgtagctgagcgccttgtagtccaggttgcccgccacatcgatggaggcgaactggaacatctggtccaccccttctgtcgtcttcttgtcagcctgggacatcagcagacgcttgatgtactccttgttgattttccctttcccgtccgggtccagcatcttgaaggcgttaagaatggtctcctcggcgtcggtaccgctcagcttctccccaaacaggttcagaaacatggtgaagttgatgggccccgaggcctctttgagcatggcgtccagctcgtcgtccttgacgttggtcttgcccagggaggcataggtgtccttcaggtcctccttgtcaatgaagccatctcggttctgatccatgagtgtgaatgcctccttgaactcctggatctgagtctgctcaaagttggagaagacattggatgaggctctctgggcccggagggcacccccttccttcttcttggtcttcctgctggccatgcctgcttctgcctgctttgatgcgtctgcccagggccccaggtcttgcccatcttaagctcctgcttggtcccccaggacagttcagactccggctgccactccctacaaggacaggcttggggctaccccaggggactggacagctgcagagtgagctttggcagcctggcagtgactcacacccttgccctgcctcaccccgcaaggcccccagcctccccagatacctctggccaggactacctcccatccacctgtccccgaaccccggggaggctttgttctcccaaggattctgtgtgtcagcagggccacctgtacacgctcttggctgggggcctgggcaccctggaactgcaggagccagaggaaggggcactttttctagatttgcacaacgctgctgtgggtgactgcagctggtcaccgggcttctgccaagcacactctgtctgtc

SEQ ID NO: 706173 - DNA, 170 bp, Homo sapiens
ccctatagtatactgccttcaacacagacaggagagggaaaaaaacactagacaccagcaggggagcaggtgagacaggggcactcgaggctgcagtgggagccatgggaacactatacaagggcacaagttttccaactaatgaactcctaaacctaaatcgacttctt

SEQ ID NO: 706174 - DNA, 2275 bp, Homo sapiens
cggggacaggtggctccgggaccctcagtccctcggaccagccgggtttgttttcctgtggccacagcccgagctgtggctcagctttgcacctgtggctgacgtcattgctgaggacttggtcctgtccatggagcagatcaactggctgtcactggtctacctcgtggtatccaccccatttggcgtggcggccatctggatcctggactccgtcgggctccgtgcggcgctcggtgtctataccatccctgctggcgtcgtctgcctgctgtccaccatctgcctgtgggagagtgtgccccccaccccgccctctgccggggctgccagctccacctcagagaagttcctggatgggctcaagccgctgctcatgtggaacaaggcctatgtcatcctggctgtgtgcttggggggaatgatcgggatctctgccagcttctcagccctcctggagcagatcctctgtgcaagcggccactccagtgggttttccggcctctgtggcgctctcttcatcacgtttgggatcctgggggcactggctctcggcccctatgtggaccggaccaagcacttcactgaggccaccaagattggcctgtgcctgttctctctggcctgcgtgccctttgccctggtgtcccagctgcagggacagacccttgccctggctgccacctgctcgctgctcgggctgtttggcttctcggtgggccccgtggccatggagttggcggtcgagtgttccttccccgtgggggagggggctgccacaggcatgatctttgtgctggggcaggccgagggaatactcatcatgctggcaatgacggcactgactgtgcgacgctcggagccgtccttgtccacctgccagcagggggaggatccacttgactggacagtgtctctgctgctgatggccggcctgtgcaccttcttcagctgcatcctggcggtcttcttccacaccccataccggcgcctgcaggccgagtctggggagcccccctccacccgtaacgccgtgggcggcgcagactcagggccgggtgtggaccgagggggagcaggaagggctggggtcctggggcccagcacggcgactccggagtgcacggcgaggggggcctcgctagaggaccccagagggcccgggagcccccacccagcctgccaccgagcgactccccgtgcgcaaggcccagcagccaccgacgcgccctcccgccccggcagactcgcaggcagggtccaagcgtccaggtttattgacccggctgggtctcactcctccttctcctccccgtgggtgatcacgtagctgagcgccttgtagtccaggttgcccgccacatcgatggaggcgaactggaacatctggtccaccccttctgtcgtcttcttgtcagcctgggacatcagcagacgcttgatgtactccttgttgattttccctttcccgtccgggtccagcatcttgaaggcgttaagaatggtctcctcggcgtcggtaccgctcagcttctccccaaacaggttcagaaacatggtgaagttgatgggccccgaggcctctttgagcatggcgtccagctcgtcgtccttgacgttggtcttgcccagggaggcataggtgtccttcaggtcctccttgtcaatgaagccatctcggttctgatccatgagtgtgaatgcctccttgaactcctggatctgagtctgctcaaagttggagaagacattggatgaggctctctgggcccggagggcacccccttccttcttcttggtcttcctgctggccatgcctgcttctgcctgctttgatgcgtctgcccagggccccaggtcttgcccatcttaagctcctgcttggtcccccaggacagttcagactccggctgccactccctacaaggacaggcttggggctaccccaggggactggacagctgcagagtgagctttggcagcctggcagtgactcacacccttgccctgcctcaccccgcaaggcccccagcctccccagatacctctggccaggactacctcccatccacctgtccccgaaccccggggaggctttgttctcccaaggattctgtgtgtcagcagggccacctgtacacgctcttggctgggggcctgggcaccctggaactgcaggagccagaggaaggggcactttttctagatttgcacaacgctgctgtgggtgactgcagctggtcaccgggcttctgccaagcacactctgtctgtc

SEQ ID NO: 706175 - DNA, 80 bp, Homo sapiens
ctcagggagccttatcaagctggaccatgtccatgtcgtgtgagtgacatgtcacaacctggtctgggcacaaaaggcag

SEQ ID NO: 706176 - DNA, 1940 bp, Homo sapiens
  misc_feature (715)..(715): n is a, c, g, or t
cagtagtccttggggcggaactggccccccgtggcccggcccggctcggccccacctccgcccgcaggcggtcccggcccacgcgggaaggtccttaagcccgggcggccggcgggaccggcggagacccgtggaggccgccgacgatggcggggccgacggaggccgagacggggttggccgagccccgggccctgtgcgcgcagcggggccaccgcacctacgcgcgccgctgggtgttcctgctcgcgatcagcctgctcaactgctccaacgccacgctgtggctcagctttgcacctgtggctgacgtcattgctgaggacttggtcctgtccatggagcagatcaactggctgtcactggtctacctcgtggtatccaccccatttggcgtggcggccatctggatcctggactccgtcgggctccgtgcggcgaccatcctgggtgcgtggctgaactttgccgggagtgtgctacgcatggtgccctgcatggttgttgggacccaaaacccatttgccttcctcatgggtggccagagcctctgtgcccttgcccagagcctggtcatcttctctccagccaagctggctgccttgtggttcccagagcaccagcgagccacggcaacatgctcgccaccatgtcgaaccctctgggcgtccttgtggccaatgtgctgtcccctgtgctggtcaagaagggtgangacattccgttaatgctcggtgtctataccatccctgctggcgtcgtctgcctgctgtccaccatctgcctgtgggagagtgtgccccccaccccgccctctgccggggctgccagctccacctcagagaagttcctggatgggctcaagccgctgctcatgtggaacaaggcctatgtcatcctggctgtgtgcttggggggaatgatcgggatctctgccagcttctcagccctcctggagcagatcctctgtgcaagcggccactccagtgggttttccggcctctgtggcgctctcttcatcacgtttgggatcctgggggcactggctctcggcccctatgtggaccggaccaagcacttcactgaggccaccaagattggcctgtgcctgttctctctggcctgcgtgccctttgccctggtgtcccagctgcagggacagacccttgccctggctgccacctgctcgctgctcgggctgtttggcttctcggtgggccccgtggccatggagttggcggtcgagtgttccttccccgtgggggagggggctgccacaggcatgatctttgtgctggggcaggccgagggaatactcatcatgctggcaatgacggcactgactgtgcgacgctcggagccgtccttgtccacctgccagcagggggaggatccacttgactggacagtgtctctgctgctgatggccggcctgtgcaccttcttcagctgcatcctggcggtcttcttccacaccccataccggcgcctgcaggccgagtctggggagcccccctccacccgtaacgccgtgggcggcgcagactcagggccgggtgtggaccgagggggagcaggaagggctggggtcctggggcccagcacggcgactccggagtgcacggcgaggggggcctcgctagaggaccccagagggcccgggagcccccacccagcctgccaccgagcgactccccgtgcgcaaggcccagcagccaccgacgcgccctcccgccccggcagactcgcaggcagggtccaagcgtccaggtttattgacccggctgggtctcactcctccttctcctccccgtgggtgatcacgtagctgagcgccttgtagtccaggttgcccgccacatcgatggaggcgaactggaacatctggtccaccccttctgtcgtcttctaacagccgtatagtagtagtaggcggccgc

SEQ ID NO: 706177 - DNA, 2288 bp, Homo sapiens
  misc_feature (715)..(715): n is a, c, g, or t
cagtagtccttggggcggaactggccccccgtggcccggcccggctcggccccacctccgcccgcaggcggtcccggcccacgcgggaaggtccttaagcccgggcggccggcgggaccggcggagacccgtggaggccgccgacgatggcggggccgacggaggccgagacggggttggccgagccccgggccctgtgcgcgcagcggggccaccgcacctacgcgcgccgctgggtgttcctgctcgcgatcagcctgctcaactgctccaacgccacgctgtggctcagctttgcacctgtggctgacgtcattgctgaggacttggtcctgtccatggagcagatcaactggctgtcactggtctacctcgtggtatccaccccatttggcgtggcggccatctggatcctggactccgtcgggctccgtgcggcgaccatcctgggtgcgtggctgaactttgccgggagtgtgctacgcatggtgccctgcatggttgttgggacccaaaacccatttgccttcctcatgggtggccagagcctctgtgcccttgcccagagcctggtcatcttctctccagccaagctggctgccttgtggttcccagagcaccagcgagccacggcaacatgctcgccaccatgtcgaaccctctgggcgtccttgtggccaatgtgctgtcccctgtgctggtcaagaagggtgangacattccgttaatgctcggtgtctataccatccctgctggcgtcgtctgcctgctgtccaccatctgcctgtgggagagtgtgccccccaccccgccctctgccggggctgccagctccacctcagagaagttcctggatgggctcaagccgctgctcatgtggaacaaggcctatgtcatcctggctgtgtgcttggggggaatgatcgggatctctgccagcttctcagccctcctggagcagatcctctgtgcaagcggccactccagtgggttttccggcctctgtggcgctctcttcatcacgtttgggatcctgggggcactggctctcggcccctatgtggaccggaccaagcacttcactgaggccaccaagattggcctgtgcctgttctctctggcctgcgtgccctttgccctggtgtcccagctgcagggacagacccttgccctggctgccacctgctcgctgctcgggctgtttggcttctcggtgggccccgtggccatggagttggcggtcgagtgttccttccccgtgggggagggggctgccacaggcatgatctttgtgctggggcaggccgagggaatactcatcatgctggcaatgacggcactgactgtgcgacgctcggagccgtccttgtccacctgccagcagggggaggatccacttgactggacagtgtctctgctgctgatggccggcctgtgcaccttcttcagctgcatcctggcggtcttcttccacaccccataccggcgcctgcaggccgagtctggggagcccccctccacccgtaacgccgtgggcggcgcagactcagggccgggtgtggaccgagggggagcaggaagggctggggtcctggggcccagcacggcgactccggagtgcacggcgaggggggcctcgctagaggaccccagagggcccgggagcccccacccagcctgccaccgagcgactccccgtgcgcaaggcccagcagccaccgacgcgccctcccgccccggcagactcgcaggcagggtccaagcgtccaggtttattgacccggctgggtctcactcctccttctcctccccgtgggtgatcacgtagctgagcgccttgtagtccaggttgcccgccacatcgatggaggcgaactggaacatctggtccaccccttctgtcgtcttcttgtcagcctgggacatcagcagacgcttgatgctgaggacgaggaaaggggtcagcgcgggctgatgcgggggtgcaggagccttctcggtggggctcaggtgctccaggggccccaggttgtactcgctcactgcactcccgcccttcccgctggagtgtggccctggggcaggtcccttcccaacacacactcaggggccatcacttctgggggagccgctgatggggacagagccggaaggaggttacaggccagcgcctggtactttccccggcgcctagcaggagctgaagatggaggagtgggctgaggggaagccgccccacccccaccgggcacaggcgctggtccctgtgtgagcagggctggcctccc

SEQ ID NO: 706178 - DNA, 112 bp, Homo sapiens
tttacctagatcccataacaaagcccgctactgatgtgagaccaacatcaaagaggccccgcttggagggtgttggtatgggatctaggtattaaccacctgtggaaaagta

SEQ ID NO: 706179 - DNA, 2757 bp, Homo sapiens
  misc_feature (715)..(715): n is a, c, g, or t
cagtagtccttggggcggaactggccccccgtggcccggcccggctcggccccacctccgcccgcaggcggtcccggcccacgcgggaaggtccttaagcccgggcggccggcgggaccggcggagacccgtggaggccgccgacgatggcggggccgacggaggccgagacggggttggccgagccccgggccctgtgcgcgcagcggggccaccgcacctacgcgcgccgctgggtgttcctgctcgcgatcagcctgctcaactgctccaacgccacgctgtggctcagctttgcacctgtggctgacgtcattgctgaggacttggtcctgtccatggagcagatcaactggctgtcactggtctacctcgtggtatccaccccatttggcgtggcggccatctggatcctggactccgtcgggctccgtgcggcgaccatcctgggtgcgtggctgaactttgccgggagtgtgctacgcatggtgccctgcatggttgttgggacccaaaacccatttgccttcctcatgggtggccagagcctctgtgcccttgcccagagcctggtcatcttctctccagccaagctggctgccttgtggttcccagagcaccagcgagccacggcaacatgctcgccaccatgtcgaaccctctgggcgtccttgtggccaatgtgctgtcccctgtgctggtcaagaagggtgangacattccgttaatgctcggtgtctataccatccctgctggcgtcgtctgcctgctgtccaccatctgcctgtgggagagtgtgccccccaccccgccctctgccggggctgccagctccacctcagagaagttcctggatgggctcaagccgctgctcatgtggaacaaggcctatgtcatcctggctgtgtgcttggggggaatgatcgggatctctgccagcttctcagccctcctggagcagatcctctgtgcaagcggccactccagtgggttttccggcctctgtggcgctctcttcatcacgtttgggatcctgggggcactggctctcggcccctatgtggaccggaccaagcacttcactgaggccaccaagattggcctgtgcctgttctctctggcctgcgtgccctttgccctggtgtcccagctgcagggacagacccttgccctggctgccacctgctcgctgctcgggctgtttggcttctcggtgggccccgtggccatggagttggcggtcgagtgttccttccccgtgggggagggggctgccacaggcatgatctttgtgctggggcaggccgagggaatactcatcatgctggcaatgacggcactgactgtgcgacgctcggagccgtccttgtccacctgccagcagggggaggatccacttgactggacagtgtctctgctgctgatggccggcctgtgcaccttcttcagctgcatcctggcggtcttcttccacaccccataccggcgcctgcaggccgagtctggggagcccccctccacccgtaacgccgtgggcggcgcagactcagggccgggtgtggaccgagggggagcaggaagggctggggtcctggggcccagcacggcgactccggagtgcacggcgaggggggcctcgctagaggaccccagagggcccgggagcccccacccagcctgccaccgagcgactccccgtgcgcaaggcccagcagccaccgacgcgccctcccgccccggcagactcgcaggcagggtccaagcgtccaggtttattgacccggctgggtctcactcctccttctcctccccgtgggtgatcacgtagctgagcgccttgtagtccaggttgcccgccacatcgatggaggcgaactggaacatctggtccacctgtcagcctgggacatcagcagacgcttgatgtactccttgttgattttccctttcccgtccgggtccagcatcttgaaggcgttaagaatggtctcctcggcgtcggtaccgctcagcttctccccaaacaggttcagaaacatggtgaagttgatgggccccgaggcctctttgagcatggcgtccagctcgtcgtccttgacgttggtcttgcccagggaggcataggtgtccttcaggtcctccttgtcaatgaagccatctcggttctgatccatgagtgtgaatgcctccttgaactcctggatctgagtctgctcaaagttggagaagacattggatgaggctctctgggcccggagggcacccccttccttcttcttggtcttcctgctggccatgcctgcttctgcctgctttgatgcgtctgcccagggccccaggtcttgcccatcttaagctcctgcttggtcccccaggacagttcagactccggctgccactccctacaaggacaggcttggggctaccccaggggactggacagctgcagagtgagctttggcagcctggcagtgactcacacccttgccctgcctcaccccgcaaggcccccagcctccccagatacctctggccaggactacctcccatccacctgtccccgaaccccggggaggctttgttctcccaaggattctgtgtgtcagcagggccacctgtacacgctcttggctgggggcctgggcaccctggaactgcaggagccagaggaaggggcactttttctagatttgcacaacgctgctgtgggtgactgcagctggtcaccgggcttctgccaagcacactctgtctgtc

SEQ ID NO: 706180 - DNA, 983 bp, Homo sapiens
tcaccttgcagcttcagggccgttggtgggcctctgaggcgcgggccctggctccattcgaggaggggccgcggcgtctggagctggaggacctctgtgttcgcctcctccaagggctctgaggcgttctgcctgggtacctacccagggaggcataggtgtccttcaggtcctccttgtcaatgaagccatctcggttctgatccatgagtgtgaatgcctggggaccaaggtcagggctgctgtgctgccaacccggctgggctctgccccgccccctgctcccggttcctcagcacccctgactgaggataggcttccactcctgctggccctggagccagcccacatggggtcttcccagcacaggctcctgggggtgggggctcccagtgaagcaggaaagtctcacctccttgaactcctggatctgagtctgctcaaagttggagaagacattggatgaggctctctgggcccggagggcacccccttccttcttcttggtcttcctgctggccatgcctgcttctgcctgctttgatgcgtctgcccagggccccaggtcttgcccatcttaagctcctgcttggtcccccaggacagttcagactccggctgccactccctacaaggacaggcttggggctaccccaggggactggacagctgcagagtgagctttggcagcctggcagtgactcacacccttgccctgcctcaccccgcaaggcccccagcctccccagatacctctggccaggactacctcccatccacctgtccccgaaccccggggaggctttgttctcccaaggattctgtgtgtcagcagggccacctgtacacgctcttggctgggggcctgggcaccctggaactgcaggagccagaggaaggggcactttttctagatttgcacaacgctgctgtgggtgactgcagctggtcaccgggcttctgccaagcacactctgtctgtc

SEQ ID NO: 706181 - DNA, 135 bp, Homo sapiens
ccaaaaccagacaactatgtgactgagcggctgatcagcatggcctatgggcagatcggaatgatccaggccctgggaggcttcttatactataacttatgtagatatctggctagagaacaggcttcctaccca

SEQ ID NO: 706182 - DNA, 107 bp, Homo sapiens
ctccagtttatacccgaaatacgtggaactcatcaaccaggcgtgcccggctcaatggctatgtaggatagcaggcgactcgttggcggtctatgtacgagacacca

SEQ ID NO: 706183 - DNA, 110 bp, Homo sapiens
aaataaatgttacgtaatcgcaaattaggaggggtaccatttctgttggtgtatttgccaaggctgttcaggcgtccctatcgtagcgatcttcagtgactactgagcaa

SEQ ID NO: 706184 - DNA, 118 bp, Homo sapiens
caagttcataaaagttcttgagccctaaatttcttcccaaaaaaagaaaagttcttaagtcatccattttaattgtgtagaggttgttcacctgaaggaataaatgtctattaaccta

SEQ ID NO: 706185 - DNA, 296 bp, Homo sapiens
gtgcctgtagaggccctaacaatcacaaactatgctcaactcactctctacatttctcataacttccaaaatctattttcttcctcatacctgatgcatatactttctgctccctgcctccttcagctgtactcactctttaagtcctacaattaccattgctcctgacccgtacttcaataagtgctcttgcaaagccagatctcaggagatccacaatcatgccacctctacgaggcccaaaagggtctaagtcttctcccccgacaacaaacggtcccaggtatatcacacca

SEQ ID NO: 706186 - DNA, 440 bp, Homo sapiens
  misc_feature (2)..(2): n is a, c, g, or t
  misc_feature (13)..(13): n is a, c, g, or t
gncaaaaccgggnaaataactacttattattttttattgagacgggtctcactttgtcacccaggctggagtgcagtggtacatctcagctcactccaacttccgcttcctgggctcagtgttaatttttgtatttttactacagacagggtttcactatgttggccggcaggtctccaactcctaacctcagtgatccgcccattcgcctctcaaagtcagggattacaggtgtgagccactgtgcccggcctcctcagtccatttttaatactgaaggtataaattgtataaagatgtttagaaagttctaattcattttatgcatttttgcaaatttgactccatgaaagtgcattatcacgaagctgaatttgtgtaagcattgtgcatgtatgtaaaaacattgcaacttcctcaataaaatatcttctttttat

SEQ ID NO: 706187 - DNA, 384 bp, Homo sapiens
atctctagacggatccccccctcgaaacccagtctcttacatttcatctgttaaatagtgacggtgtattagtctgttcttgcactactacaaatgattagtttagactgggttatccattatcgataagaggtttatttcactcttgattccgctggctgcacagtgaagcactgcagcatctactctgcttctgaggccgttctctggaaacctacaatcaacgtggaaggcgacagggtgaagcagacatgttttatgtggctggaggaatagtaagagaagtggggggaggtgccacacactttaacaaccaggtctctttataactccatcacaacagccccacgaggatggtgctaatccattcatgaaggatccaac

SEQ ID NO: 706188 - DNA, 710 bp, Homo sapiens
ggaattgatgatcaggattagcagaattccgtgacgcacaccgaccctggctgtcactgtagatgggggtcgctgtgcgtcgttgacattcctggctatatccgtgcatcagtcatagcgagtgaccctagcgcagggtcggtgtggcgacgcgttccttcgaccacctacggaccgggcttggtcatcaggactgtgtccagcgaggacgtgtgggagatgcgcaatcatcttaacagaaatagcacccagtttgatagctggtaggtgtcagtggacaacagcgtcgtttctgtccatcagattacctggtgcagtgtagcccgccgcgtgacccgtggtatggttgtgtgagagagcgctacactgtgctgtgtatagctcacgtgcacacggtgcttcaagcacaatcggggctcaactagtgcatcggctagagtcatgatcctcacacgtgggtgtctactcgcggtatgccgagattagaagcgacgcagagaacggcataccgtgccagagtcaccttgtgccaactgttctctagaccttctgacatttcgctcgaattgagagggagcacatggcgtgcagttggtcggtcaagacggcatgagtccatggcagagtgtcacgagcctcaaccaggtatcgtgccgagtctggcagaggtggtaagggtgaagagtcatgggagtactccctgggtggat

SEQ ID NO: 706189 - DNA, 298 bp, Homo sapiens
cccacagcaagagtacaaggggccttgccccaacccagagcgggggcaatcattaagccagccaagcaagtgtggcgtatgagacccacagaaggaacagggaatattctgggggttcaagtcccggcgtggtaacccatgtgcctctgggcaagtttattccaatgggaattctgaggcacagaaagtttaattgacttgccacaggtatatgaacatagacagtgtcaggtctggtatttgaacacagacagtgtgggtagtaactgtatatagtgtccacacttgattgcttgtt

SEQ ID NO: 706190 - DNA, 128 bp, Homo sapiens
gtctacatagtgttcatatctgaggggacacagtaattacaaacttactatggccccggaaaaactctcccctaccctctccccagctcttccaagctcttccttctctccttaatgacattaacact

SEQ ID NO: 706191 - DNA, 1108 bp, Homo sapiens
acaaagagacttgcaacgctaatatcgcatattagtcctgtggatgatctggagtcctatgcagcaactctcaggattctcttttccatcctgctctgggtcactctagcgaactactaagtaataacgatatgtctgcagacgtccttctcaccgcctagtgctttccgtaactagagtgtcccgttcataggctatatgtactgcattcatagattctgtcaggcatcttgtgtgaactgacttagctctgcccataaataatcgaggagcgcaccacagggtatgacacgttgtaacccagcaaatatcacaaacaataaggatatcatggacatcatgtaccatccccctcgtgttccatcactcctggcctcgtgatcatggtaatcaagtgggcagagccggagcttcgcgaggcaagagtttgagataaggactaccactcaccataagttcaaggggtagagctattcgcgcacgcttggagaaacagtttgcgtgagcatcctaagccattgttgcatacggtataactgggctcagaacaggttgctactgcgtacgaatactatagctggcgccatacaagtttgcatgcgatgaatgaatgtatgctaatcataagggaaacccctgaactaatctatccccaagcaatcaaaaggaccccacttcttttccgtacatgaatccgcctactaaattcccaagtgcaggtggcttactgtcatcagaaatttaacctcctctaggtcactagggatgtattagctagtacaactgatatggtacatagagctagacacggtaaacccatacgaaacaggtgagtgtatacgtggagaaagcccggtcgtgcagggaggggacggatcacccaattcatataccaaatcagcgttgtgcctgagtttggcaggaaacaatcgctggaagttgtgatcattcttgaatctgaagaaagggcttccggacaatagaatctacccatgagaaattactcggagtcccgaacccgagaaaggtgctattggtaacctagaggaagtgggaaaaatattggaagaggcacggaggagaaaaacattataaaaagaccacagag

SEQ ID NO: 706192 - DNA, 120 bp, Homo sapiens
  misc_feature (25)..(25): n is a, c, g, or t
  misc_feature (31)..(31): n is a, c, g, or t
ggtttcatggtttggtctaactttnaacgcntactaaatccgcgattggtttcgctgaatcaggttattaaagagattatttgtctccagccacctaaaggaggtgatttatgtttggtg

SEQ ID NO: 706193 - DNA, 1020 bp, Homo sapiens
agcggctctcttgttgctcaagccccttagtgtgatctcctcatctccatcatcccagatggcaaaaatgcagggaaggagaagctcaccatgttaaaacgggaacttgtgaggtggtggcactccacagatgctgtaataagaacaagatagaagaacggtcacaaacagtcaagtgctcctgcttccctgggcaggtggcaggcaccacgcgagctgctccatcatgtgtggatgcttcaatagtggaacagaaatggtggtgccatatgcagccatgtctagagggagaagaatgtaaagttcttccggatcggaaaggatggagctgttcctctgggaataaagtcaaaacaactagggtaacccattaacccaggagaaatcaagtgatcctcaaggctgatgacattgaacatgcgcatagaaacttaactcaactcctgaggtgatcttgaagatttttataccacttgaaagaggcgctcaatagtctatttccaagggatttcatggcctcttcttgaaatcaagactttttaaaagtcagacatgaacttgcatgtcatgaagatttcagcagatttgaactgtgttcaacttgtaaatgttaaaagaatttgaagtcactgtctgaggagctggtgaagagttgttttttcagggtgatgttagagacagtcaccttttgagttattggctccagatgtgactacttttcttgtttctgcagctgtatcccaagtgcactgtccttctgtcctggatgtgttcctgggtcctatgttcatttgctagtgggactacacatggctttaatgacatttcctttgagaacttttcctctggcatggtgtagactgagacaattttatttatatcctaatcttggagctcagaaagcctacatgttttaacatcttaaagttgcttttgttaaaggaatggaaatatatatccattggtaataatgttggcaagtaatagttatctgaataaatcaatcatataagaatgaaa

SEQ ID NO: 706194 - DNA, 137 bp, Homo sapiens
gtgaagagtcacttttcagccccaggaagggcaaaagaagagagaaaatcagcctgtctgctctctccttgagctcaacaaggcctctaacagtcttactgtcctctattctgcacacggcatatttgggcacgaga

SEQ ID NO: 706195 - DNA, 447 bp, Homo sapiens
aacctattattttgagagggagaacctcttggtagtttctacgagcactgtatagttatttcagtgcgctgaacagccggggcaggtctacataccacaccacttacatcatgtccatggaaaaagtgcggggatccaggtcacctaccaagcaattccaacgtgcagccaagtaagagaaccagtaagttagaggagcaatcctcagcccaggtcacctatttaaatcatactgcgtgcttgggagaaataccagtagccaaaaaacagcaaaacaatgccagggccccactcccagacgttctcatttaattggcttggagtaaggcctgagcattgggatttttgaaagtcccccaggtaggattttaataagcagccagggtcgagaagctctgagctggaaggcaatgactgatcatagccaggtggtggtcacatttgcca

SEQ ID NO: 706196 - DNA, 401 bp, Homo sapiens
  misc_feature (1)..(1): n is a, c, g, or t
ngcattctttccatttttttcttctttctggatgttaaatctgagtaaatatatatcatttttaaagtggaattatgacccaggcatggtgcctcttgcctataatcctagcacttttggcaagccaaggcaggaagattgcttgagcccaggagttcaacaccagcctgggcaacatggcaaaactccatctctacaaaaagtacaaaaatgagccaggtgttgtggggtgcgcctgtagtcccagctaaggaggctgagattgggaggatcacttgaacccaaaaggtggaggctgcagtgagctgagatcgtaccactacactccagcctgagtgacacagtgacagcctgtctcaaaaatataaaaataaataaataaataaagtggaattatgttg

SEQ ID NO: 706197 - DNA, 241 bp, Homo sapiens
aagactgtacgctaagacagtgctgtaggcggcaccaacatgtaccctggcatagccgacaggatgcaaaaggagatcactgccctggcacccagcacaatgaagatcaagatcatatgctcctccatgagcgcaagtactccgcagtggatacggcggctccatccgaggcctcgactgtccacctatccagacagatgtggatcagccaagcagtgagtatgcacgagtcctggcccct

SEQ ID NO: 706198 - DNA, 152 bp, Homo sapiens
agatgtgtcatccagatgaccccgtctaggagacagactcaccgtcacttgccaggcgactatttgaattcttaccagtgagaaccggggacagccccttacctcctcatctgcgctgcatccaattacagaacaggggtcccttctacctt

SEQ ID NO: 706199 - DNA, 317 bp, Homo sapiens
  misc_feature (51)..(51): n is a, c, g, or t
  misc_feature (96)..(96): n is a, c, g, or t
gcccatgatcctacagacagcccatttataaaggtggatcagggcccgganacggtggctcaacgtctgtaatcccggcactgtgggaggccaaancgggaggatcgcttgagccccaggagttcgagaccaacctggccaacatggtgagaccccatctttacaaaaaaatatatatatcccaggcatagtggtgtgcacctgtggtcctgtggtcccagctactcaggaagctgaggcagttgaggctgcagtgagccacgttctggccactacactccagcctgggcatacaaagtgacaagtaccaaaaaaaa

SEQ ID NO: 706200 - DNA, 874 bp, Homo sapiens
gatagcattaggaaaaatacctaatgtaaatgacgagtgatgggtgcagcaaactaacacggcacatgtatacctatgtaacaaacctgcacgtgtgcacatgtaccctagaacttaaagtataataataaaaaatatgtatatataaaagaaatgtggctagcataaatttagatatgctataagtataaattacacaccacatttcgaagactcagtatgagaaaatatatacaatatctcatcaataatttttacatcaattatagggtgaaataatatttcacatacatggggttaaatgaaatatatgacaattaaatttacttttttttctttttacttttttaatatggctaccataaaatcttaaattacatatgtggctcacatcatatttatactggagagagtgtgtactagagcatgttgtatgctaatataatgatctagtagagaatcaggaatggatgatgtcgaacagagaagagtagggaaaaagagaaaagacctttagagcttaagcagataaggggtgatggcattcattacattagatcaacaaaacaagttagagaaagggcatgtacatagataatattggggtttcctttataccagaaagactcactcttttaaacaggcatgaagcagtattaaacctttatcaggctagtccgaataaattcaatttctaagtacgatcaatggtatcaacaaggaattgttgaaagaggataatctatatggttaaacggttcaacatctgttaaggggtcgttgacagggtggtcagggaacctcagttggaagagtaaggaaaggcggtcaataggaggggaccgagaaaaaaaagggcgatagggaaaaaata

SEQ ID NO: 706201 - DNA, 855 bp, Homo sapiens
catacccatggccaactcctactcctcatggtacccattctaatcgcaatggatcctaatgcttaccgaacgaaaaattctaggctatatacaatacgcaaaggccccaacgttgtaggcccctacggctactacaacccttcgtgacgcataaaattcttcacaaagagcccctaaaacggcaatctaccatcaccctctaatcaccgccgaccttagctctcaccatcgctcttctactatgaacctcccctcccataccaacccctgttcaacctcaaacctaggcctcctatttattctagccaactctagcctagcgtgtttactcaatcctctgatcagggtgagcatcaaatcaaataacgccgtgatcggcgcactggagcaggtagcccaaacaatctcatatgaggtcaccctagccatcattctactatcagcatactaataagggtccttaaactctcaacccttatcaagaagagaaaactctggtaatctgcataatgaccttgcataataatgtttatctccacatttagaagagaccaacggaaccccttcgaacctgggcgagggggagtccgacctagtctaaggttgcagaatcgatacgcgaggccttcgctatttaaagggatacaaacttttataatagcctcacataatctctaggacacttgggtctcctgattacaatatttgccagccattaccccgttgagtgaagaccggtggagcaacacccttagagtcaccaccagatttaggccagattcgccaaaaaaaaagggggaatgggggattcgcggcacccccgcccgcaacgaaacaaccacaggagagggaacg

SEQ ID NO: 706202 - DNA, 160 bp, Homo sapiens
taaaaaaaaaaaaaaaaaaaaaaaaaaaaaaaaaaaattttttttttccaaacccggggggctgttttcccccgaaaaccccaaaattaaattcaaaaggggttcccatttggaaagctttaaaaattcccaagggaggtgggatccttttgggccccca

SEQ ID NO: 706203 - DNA, 327 bp, Homo sapiens
  misc_feature (264)..(264): n is a, c, g, or t
  misc_feature (304)..(304): n is a, c, g, or t
  misc_feature (320)..(320): n is a, c, g, or t
taattaaaaattcctatgtcaaaaaacgtggttaaagcaaatgttaaaccttcccccacaaattgaaaaaattggcttggaaagttcccaaattggcggggggggcaacgaaaaacaatttcccaaatttcaaaattgctaattttttgtaaaaaaaaaattgggaaaaatttaaaaaaaaaaaaaaaaaaaaagggcggccccctttttttttttttttttttttttaatatttttttttttttttttttttttttttaagtnaccagcttcagacccttgtaaagtctccctcagcccttcnaaaaaataataaattncctgtga

SEQ ID NO: 706204 - DNA, 141 bp, Homo sapiens
gaccgaccaatcataatacgtatcggtatagaatggggtctcctcctccggcggtgtcgaacaatgtggtgttgaggttgcagtctgttagtaatatagtgatgcctgcagctcggactgttagagatcggagaagtaaga

SEQ ID NO: 706205 - DNA, 357 bp, Homo sapiens
actagttctagatcgcgagcggctgcccttttttttttgttgtttcagtctggatgtagctttaatggagtaaaggaaaaagggaattcagccgcatgatacagaggtcccaggtggactcagagggggcaaacacccttccgggtcgtgcggtgaggggaaccgcaccagcacagggggcacgcggaagccacgtgccgcagggagagtggttcccactctcacgcacagtgagcagcctccgggctcagttcccaagaaggccaagggcagagggcagtgggtggcctctcacagagctactttacaaattaaagcgggggtgtctctcctcgaggagtctcttacaacactttt

SEQ ID NO: 706206 - DNA, 233 bp, Homo sapiens
gcaggagaattgcttgaactcgggagggggaggttgcagtgagctgagatcatgccactgcactccagcctgggtgacagggcaagactctgtctcaaaaaaaaaaaaaaaaattttctggcccggccccagataacctttgaaaacatgtggctagtttaaagccggcaataaaaaaccccgattgatcccttccatataaaatttccaggggggctcacatttgaaacccc

SEQ ID NO: 706207 - DNA, 577 bp, Homo sapiens
  misc_feature (18)..(18): n is a, c, g, or t
  misc_feature (73)..(73): n is a, c, g, or t
  misc_feature (82)..(82): n is a, c, g, or t
  misc_feature (108)..(108): n is a, c, g, or t
  misc_feature (132)..(132): n is a, c, g, or t
  misc_feature (141)..(141): n is a, c, g, or t
  misc_feature (169)..(170): n is a, c, g, or t
  misc_feature (179)..(179): n is a, c, g, or t
  misc_feature (241)..(241): n is a, c, g, or t
  misc_feature (257)..(257): n is a, c, g, or t
  misc_feature (285)..(285): n is a, c, g, or t
  misc_feature (292)..(292): n is a, c, g, or t
  misc_feature (348)..(348): n is a, c, g, or t
  misc_feature (364)..(364): n is a, c, g, or t
  misc_feature (370)..(370): n is a, c, g, or t
  misc_feature (389)..(389): n is a, c, g, or t
  misc_feature (392)..(392): n is a, c, g, or t
  misc_feature (456)..(456): n is a, c, g, or t
  misc_feature (539)..(539): n is a, c, g, or t
gggggggttcctaaacantcatgttcattacttcctcacattctaacttgttagaattagaaaaatggttttnatgtaaacngtgttgttctaatcactgacaacatnttaattttaaacacttttgatccnaaccccccnccttgccgggcgggggggactggggggnnggggggggncgggggtccttgccgccacagtcagctgtttatcctcctcatgtcccctccccacccaagtnccagcttgcctggggnttgttctgggaccctaagaaccccaggntgcccanacgggcaggccagcagggccaatggtcatgcagggactgcgggagaggttcccatnatctcctgtgttaggncattcnacctgggaaaccaagggantgnggtggctggcttatttctccctctgccaacccccatctacaatgttctggggaaaacaatgagnggtggaaaaggtaacatacaaccaccttccacccacatcacttccagtgaggcagctaagtccaccaacagagcgtgggagantctttcatccaaaaatcccaacgggtcgcatgcagcga

SEQ ID NO: 706208 - DNA, 613 bp, Homo sapiens
  misc_feature (353)..(353): n is a, c, g, or t
  misc_feature (434)..(434): n is a, c, g, or t
  misc_feature (436)..(436): n is a, c, g, or t
aagttcagtgtcccctgtccaagagtaattatacctgtcacacttcttggggatgttctcctcctctgaattatatatgtataataacatgacatgtaattacctataaatgacatgacataacataacataatatctatatgttatgttatattaatgcctacctgtggtatagtggtcacaggtcaaagcagcctgtctttaaaccccacttcttctgcttaattactctggtctgaaaagtgcaattactgcatagctttgggcaagttcccaaacctctattgtgaaaacccccgtgtgctgtaacacatatgcacacacacacacacacacacacatacacaaaaacncacacacactttttggaagaacattaaagtcatctagcgtaaatattgttcttggctttcttcttctactagagtggaacncnatgttaaaagaaaggaatttgaaaaaaagaaaaaaagcaagctgggcacagtggcacaagcctgtagtcccagcaaatcaggaagctgagatggaaggatctcttgagcccaggagtttgagtttgagcctaacctgggcaacatagcaaccccttgcctctaaaaagcaaaacaaa

SEQ ID NO: 706209 - DNA, 756 bp, Homo sapiens
  misc_feature (99)..(99): n is a, c, g, or t
  misc_feature (135)..(135): n is a, c, g, or t
gctgatggccatggagaagagcaaggccacgcctggcctgcgcgcgccagcaagaagatactgctgccctgagcccagcatcctgcagtgtcatgcagnaagtacctgtgaggaccggggctgaggtgacctttngagaagatcttttcccagaagctgggtgtacctgctttactgagtcgggcagcctgaaccacctggagcgaggccacggcccttggtggaattctatgaggagatcaagaagtacgagaagctggagacggagagaggagcgtgtggcccgcagccgggagatcttctgactcatacatcatgaccgtgagctgctggcctgctcgcatcccttctcgaagagtgccactgaggcatgtccaaggccacctgtggggaacgaagcaggtgcctccggatctcttccagccatacatcgaagagactttgtcaaaacctccgaggggcacgtgttccagacaattcatcgcagagcgcataagttccacacggcttttgccagtgcgaagaaatgtggagctcaaccatccacctgaccatgaatgacttcagcgctgcatcgcaatccattgacgcgcgtcggtgcttttggccgagggtctattgagggtgcccgggacacggcttgatccacagtgacaagcgatgttaccgccaatgcaagtggcctgtgaactcaaaagcggcctccaagcatgatagccaggcggaagaaccttggccctgaaccgaagcgcatca

SEQ ID NO: 706210 - DNA, 99 bp, Homo sapiens
ctacaagcccgtttttgtaaccgaaatcactgatgacctgcacttctacgtgcaggatgtggagaccggcacccagttggagaagctgatggagaacat

SEQ ID NO: 706211 - DNA, 358 bp, Homo sapiens
gtaacacgcagtgggcattgcggaacggggtagttgaaggaataaccaaacgcagccttaaggctcatacagaaacagattcaccaaaacacctgcagtgcccgccactgggtgtggggttatgggtgattttagcattcttcctacagtaatccaagtaattcctgtgaaactgaggccccatcctaagaggatcacattctcagaaaacctgacacacaaacaaaaccatccctgagaatacctcgttttccaaagggcttctccacctgcagcctctctccacacttcacccttccctgaacacatcttccatgaactctgagttctcctgccatttggagttaggtctacctgg

SEQ ID NO: 706212 - DNA, 439 bp, Homo sapiens
gacacgctgaggaaccaaacggctccatatggtatctcagaacagtctctaacaggaaagcagaatttcatgtttcatgttgtacaagagtagaacacttaaaaaatctgtgactacttgggagtaatttaagatattcattgtcaccagttttttagttcattaatgtttggctctggagtgggggaaaaaaagtgaaggcacagtatgactgtgttgtattttcatctgtaccttttacccagcctgagcagttgtgaatagaaagtggagtgtaggctatcataggatttatcagagaaataacatgcatttttaaaacccagaactttaatcacaaaattatatatcatttagtagcaaaactttatgaataatatattaaggatacttttgatcatttcaacataggtatagcaagctggagattcggcgtgtg

SEQ ID NO: 706213 - DNA, 286 bp, Homo sapiens
gcgataaagctggcgctcgtagttggccgggtagcccaacaggtgggcaataccgaagtacatgccgccgcgccgagtgaacacctcctggcgaatcgtaccgccatggctgtagggataatccgttgcatgcttttcggcaaagtcgatgctgacctgcatcggcccgccggtgtgcaccgggttcagcccgcccaacaagtttttgcccaacggcacgcgggcaatgacctcgtcgtacagttcgctcaactgcttctcgctgcgcactgcctgcaaacgctgc

SEQ ID NO: 706214 - DNA, 109 bp, Homo sapiens
tacaatgcttaggaaaacaatttgattggtaattcatctaaaaagttgaaatcgttagcatacgacctatcaagttcactcctaggtatatccccaagataattgaaaa

SEQ ID NO: 706215 - DNA, 270 bp, Homo sapiens
tgtgctatagaggatcccacaacattggctcgacacttaggtgggtttcgatgtagcgctgcatcgagcggttgatgtgtggaaagatgtgcgggctggcgtcatgcagggtatgtcgaggtcgaagagccagatcggatgagaggcgggcatgtaagctctttcctatgcgctgcttgccaaggctgtaaaggtacggccagctgccccaccccacaacccgactttagtaatagtgcgccccaagtccctgaaagggtaccgagctcg

SEQ ID NO: 706216 - DNA, 607 bp, Homo sapiens
  misc_feature (242)..(242): n is a, c, g, or t
  misc_feature (329)..(329): n is a, c, g, or t
  misc_feature (396)..(396): n is a, c, g, or t
  misc_feature (452)..(452): n is a, c, g, or t
  misc_feature (455)..(455): n is a, c, g, or t
  misc_feature (525)..(525): n is a, c, g, or t
  misc_feature (530)..(530): n is a, c, g, or t
  misc_feature (533)..(533): n is a, c, g, or t
  misc_feature (537)..(537): n is a, c, g, or t
  misc_feature (559)..(559): n is a, c, g, or t
  misc_feature (585)..(585): n is a, c, g, or t
  misc_feature (589)..(589): n is a, c, g, or t
tgggcttggattgcccgggaaaattctcatgccccaacggaaagcaccttggcgcatacatttcttcaacgcttaaagttttctccgaaggccttcccgcggctggtaacttctctggttgaaaatctctccccacgcgcttccccgcagccaaagtggtcgctcccaggctggcgacgtcggcttcaagcttcagagttaagtaggaactggacgctgttgggtctacgcagcggcctccnacttcctcctcccaggaggcctgcgtcagagcaaggacctgagggctgcagggcaattcggtcaggtccgctgcggcctcccccggnccaggggcgcttgcgggcccgtggctgcaaccgcggcgacggctcgttggagtctacgcacggcttncttgatgaggtttcccgagagcacgagctgctggaggagccgatgcgggtcgtcgntcncggcgcgtgccccggcttaggtccatcggcgctgctgcaagcggcgggaggtgaccgcgtccctgagccnatccntcncgcnacgccccggcagcgcgctggcntgcgcgacctccgccacgcagtagtngcgncaggtggcacgcggtcgc

SEQ ID NO: 706217 - DNA, 351 bp, Homo sapiens
gcaagtccacgacgaccggcgtctctgtcgcctggctggagtgcagcggcaccatatcagctcaccgcaacctccgcctcctgtgttcaagtgattcttctgcctcagcctcccgagtagaagaacagtttcttcaacctccagaaacatggcttactgctcacttagtagtcagagccttccccttcctttctctctgcccctcacatagtctgttctctatcacatcatttcgtcttttccagaatggaaactccatagaaatggattcagtgtatcgccttcgggtctagcttctttcgcttagctcgatgcatcggacattcgtccatgttgtcacacagtttgtcg

SEQ ID NO: 706218 - DNA, 1923 bp, Homo sapiens
  misc_feature (402)..(402): n is a, c, g, or t
  misc_feature (1142)..(1142): n is a, c, g, or t
  misc_feature (1306)..(1306): n is a, c, g, or t
  misc_feature (1450)..(1450): n is a, c, g, or t
ggcgtgaatttatgtgacgcgagtacgtgtgtgctctgtgagcgtgctaggcgacagttgcatcatcattgtcactgctgtgttctgaacctggatgtgccgtgcataaaccatgagatggtgactgagacctcatcacttcactcgcattgtcaaacctccaagagacactccaatgcgcgtacgctgtgactgcatgaaaggcgtagacgaatctggtctactctcttccttaacgagcccacgaggctcgggaatgccctagagtcccttcgtacctttgacctagttccgtctacacaatagcgaatcgattgagctagctgtcgcggtagtatatcgaacacccacatattcagattagctcaagctcaacctcgatagaagctaacatgtgcatgnagagtctagatagcactcaaatggggactaactagtggcaaatggagggatctggagccagatgaaggcgcgcccctcgtttgttcaagcgtgtctatggaatggttaacaccggacagagggggaattttacctaacgcaatattgtgcaacattttacacgaccattaccattgaaaggacaatatacccagaggatacataggaccattattacattatatcattacaaacaaagtgggaagccgacggagacaagaagcttaacgatactgcccgcagcaaatttacctcccaaaggcgtcagagtgagttagcgcccaaaaagagttacttatacataacggcacgttaaccacccctacaacaaggagtcatggtaacgtagtggcggcttaatcaccatatcacgcgttgcggaagctacacctcatcattaatcaaagagttgccgtaattgatattaccgctcaattaacagaataaaaaggcccatactgagacggagggtattaggaggagcgtcgaggagacttgtgtaaaaaatcccccacaaggatcgcacccagtggcgtaacactcggggccggagaaaacaaataaccttgtagacgtccaaatacatacatgtcgcacggtaacaacaatttgttagtcgtccccagaacggagtgaaagcggccattgtcaaacatttaaacagtgaagagacgcagtaggatgtgcctaacacctctgantatagctggagaaccccccataaaaattaaatttactaaacacgattaaagcctaattaagataaaagagcaccctcaataagagggattaactaacacttatatcattagaaagctttaagttaagagcccggggtgaattatacccatgagacgagtgaacnatacccaacacacagttaaagcgagctacccaaattgggccaaccgagacgggaaaacaccggataaaaagaaacataggggcgtacggcccagccgcgtaggaaatagacgcaactaggccataacagacagaatatgagacnttaaattaagccacttgatgacacagagatgagagcagaaagagacacacgcatcacatgtatacgaccaaaagagggagagaggacacttaggcgcccccacggcgataaagcccggaggattcatatagggccccgacgaattagggtggcccaatgtagatatgggaagagaacgatttaagcaaaaagacgaaacaagaaaagacgcatgtttaatatgacgcccgaacaaaatgattagagacaacacgtaaaagacaccatgccattatatgcagcatctatatattctatagcttaaggcctagagtgaagatgcaaactcgatcgtatgatcagatcaataacatctcgcccaccagatatataatagaggtgatgaaataaacaacgacaggaggtgatgacgatataaaagacacagcgaattacttcgaacgacatgtgtgaatcgagcgatggcacagcta

SEQ ID NO: 706219 - DNA, 143 bp, Homo sapiens
acccaccacattaacaacataaaaccctcattcacacgagaaaacaccctcatgtacatacaccatatcccccattctcctcctatccctacaaccccgacatcattaccgggctatagtagccagagaatatagtagcggga

SEQ ID NO: 706220 - DNA, 520 bp, Homo sapiens
tattgggggattcttaagttggattcaaaagcccattttctcccatgttggtaaatgggatatttttttttaccaatacgcccattaaccacagttaaatttttgttggttttcctgtttgaagccgtctatttgcaatgagggtgagtcatttgaacaaaagggatactcccaaagctttctcgggtccaggtatttttaataaaaatttttccccggggctatttttaaaactggggacataaagggcccggattttggaaaacttcatttgttttttttggttcaaaaaagttcatttatgttcaaagacgtttatttatgttcaacaggaaaaacaaaggggacgggaaagctcgctgtttgaaagggttcccgccccaaaaaaaaaaaaaaatcgggggggggatgggatggagtgagccccctccagttagttgggctagttttaaaaaaaggttttccgggttgggtttttttgaaccaaactgtttagtaaaaaaaaaacaataaatgttga

SEQ ID NO: 706221 - DNA, 2249 bp, Homo sapiens
tgtgatgcactccagcctgggagacagagcgagactgtctccaaaacaaacaaacaaacaaacaaacaaaaaaaccctgtagcttgggatcagccttctcttctgttgtttttctttaaaaaataaaaattaaaaataggcttcaagtgatcctcccgccatgacctccaaaactgctgggattgtaggtgtgagcactgcacccagccgtatgtttttttctacataaaaaacagcacaggattatcttccaaagctaacaaatatgttcaaataaccacaaccccacccctgctccttggaggacaacgtgatcactgtattcagctctgtcaagaatggtccaggttcttcataaattccccagtttccagtagttctttatagcagtgtgaaaacagactaatggacccttctggttgaaggaatgtagccattctgcttgtttaagtatttcctttctattcatctctatttcccgggaggtgtttatccaagtgcaataggagatattggtgactgcagagtcccctcagtgttctgctagtaaatagttgaaggttgatcagtgatctccagcattttcagtctggcatggaaaagcccccatgtaactggtaaaggtatcagtaagcaccaggaggtatctaaatccaccaggagccataggcatcatgttgatgtccatttaccagtcttccctggcaagattctctgaattgtactgccttggccaaaagaggtatgggaggggctgggcacagtggctcacgcctgtaatcccagcattttgggagaccaattcgggtagatcattagaggtcaggggttcaagaccatcctggccaacatggtgacattccatctctactaaaaatacaaaaagtcagcggggtttggtgttgggtgcctgtaatctcagctactcagaagtctgaggcaggagaattgcttaaacccgggagggagaggttgcagtgagccgagattgcaccactgcactctagcctgggcgacagagcaagactccgtctcgaaagaaagaaagaaagaaaggaaattccccagggaagtacctcggcttatttcataaacaggtactgaaggaagcagaggcatgtggaggacttccccacctcatgcagctatttgggccgtggcgtctgaaatttcttatttcagagtcacccctttgatgaccttggcagtgaactgcagtcatctgtttaggcctttccatggcccacgtcaatgccgttatttctgtttgttgcacatttgatttccttgttgttggcatttagaaggccccctgtttcccagatcacaccacgggcatggaccacagagattgcatcttgtgagtctgtagaaatggtcaaggccttgtcctctcttaggtccagagctcaggtgaatgcagattttcccggccatctgtgctgaagtccctgtggggaggctcctggctggtttcctgtaggtagacagctacacgtcctgcccttcattggcttcttttcatgaagctcctgccatctacaaaacatgtctcccttcttgaatcacatctctgttattgaaactctagaagtcaaccgggcatggtggctatgcctataatcccagcattttgggatgccaaggcgggtggatcacctgaggtcaggagttcaagaccagcctggccaacatggcgaaaccccgtctctaatacaaatacaaaaattagccaagcatggtggccactgtactccagcctgggtgacagagcaagactccgtctcaaataaagaaagagaaagtatcatgcttttcagagttctgtgggttgttatggtgaattatcaaacctgaggacgtggtgggaacctccaaatttgcagccagttggtgagaagtacatgcggtctgtggacacccaagcttgcagctgcatctgaagcgagggcagcctagcgggggctggtggccttaacctgtggcatttgatgtaacatcagggagttgacatcagaattacgtcacacaggccaggtgcagtggctcatgcttataatcccagcaattagaaaggcaagataagaagattgcttgagcttgagtctgagcccacagtgagctatgaccgcaccactgcactccagcctgggagacagagcgagactgtctccaaaacaaacaaacaaacaaacaaacaaaaaaaccctgtagcttgggatcagccttctcttctgttgtttttcttt

SEQ ID NO: 706222 - DNA, 1466 bp, Homo sapiens
ggcgtgcctgtaatccaacagggaaaccaatcagggatcccagtccagagttcaagacaagctggcctagatgttgaaacctgtctctcttaaactacaaatattagctgggcatggtggcatgcacctgtaatctcagctactcagaagtctgaggcaggagaattgcttaaacccgggagggagaggttgcagtgagccgagattgcaccactgcactctagcctgggcgacagagcaagactccgtctcgaaagaaagaaagaaagaaaggaaattccccagggaagtacctcggcttatttcataaacaggtactgaaggaagcagaggcatgtggaggacttccccacctcatgcagctatttgggccgtggcgtctgaaatttcttatttcagagtcacccctttgatgaccttggcagtgaactgcagtcatctgtttaggcctttccatggcccacgtcaatgccgttatttctgtttgttgcacatttgatttccttgttgttggcatttagaaggccccctgtttcccagatcacaccacgggcatggaccacagagattgcatcttgtgagtctgtagaaatggtcaaggccttgtcctctcttaggtccagagctcaggtgaatgcagattttcccggccatctgtgctgaagtccctgtggggaggctcctggctggtttcctgtaggtagacagctacacgtcctgcccttcattggcttcttttcatgaagctcctgccatctacaaaacatgtctcccttcttgaatcacatctctgttattgaaactctagaagtcaaccgggcatggtggctatgcctataatcccagcattttgggatgccaaggcgggtggatcacctgaggtcaggagttcaagaccagcctggccaacatggcgaaaccccgtctctaatacaaatacaaaaattagccaagcatggtggccactgtactccagcctgggtgacagagcaagactccgtctcaaataaagaaagagaaagtatcatgcttttcagagttctgtgggttgttatggtgaattatcaaacctgaggacgtggtgggaacctccaaatttgcagccagttggtgagaagtacatgcggtctgtggacacccaagcttgcagctgcatctgaagcgagggcagcctagcgggggctggtggccttaacctgtggcatttgatgtaacatcagggagttgacatcagaattacgtcacacaggccaggtgcagtggctcatgcttataatcccagcaattagaaaggcaagataagaagattgcttgagcttgagtctgagcccacagtgagctatgaccgcaccactgcactccagcctgggagacagagcgagactgtctccaaaacaaacaaacaaacaaacaaacaaaaaaaccctgtagcttgggatcagccttctcttctgttgtttttcttt

SEQ ID NO: 706223 - DNA, 1165 bp, Homo sapiens
ggcgtgcctgtaatccaacagggaaaccaatcagggatcccagtccagagttcaagacaagctggcctagatgttgaaacctgtctctcttaaactacaaatattagctgggcatggtggcatgcacctgtaatctcagctactcagaagtctgaggcaggagaattgcttaaacccgggagggagaggttgcagtgagccgagattgcaccactgcactctagcctgggcgacagagcaagactccgtctcgaaagaaagaaagaaagaaaggaaattccccagggaagtacctcggcttatttcataaacaggtactgaaggaagcagaggcatgtggaggacttccccacctcatgcagctatttgggccgtggcgtctgaaatttcttatttcagagtcacccctttgatgaccttggcagtgaactgcagtcatctgtttaggcctttccatggcccacgtcaatgccgttatttctgtttgttgcacatttgatttccttgttgttggcatttagaaggccccctgtttcccagatcacaccacgggcatggaccacagagattgcatcttgtgagtctgtagaaatggtcaaggccttgtcctctcttaggtccagagctcaggtgaatgcagattttcccggccatctgtgctgaagtccctgtggggaggctcctggctggtttcctgtaggtagacagctacacgtcctgcccttcattggcttcttttcatgaagctcctgccatctacaaaacatgtctcccttcttgaatcacatctctgttattgaaactctagaagtcaaccgggcatggtggctatgcctataatcccagcattttgggatgccaaggcgggtggatcacctgaggtcaggagttcaagaccagcctggccaacatggcgaaaccccgtctctaatacaaatacaaaaattagccaggtgcagtggctcatgcttataatcccagcaattagaaaggcaagataagaagattgcttgagcttgagtctgagcccacagtgagctatgaccgcaccactgcactccagcctgggagacagagcgagactgtctccaaaacaaacaaacaaacaaacaaacaaaaaaaccctgtagcttgggatcagccttctcttctgttgtttttcttt

SEQ ID NO: 706224 - DNA, 769 bp, Homo sapiens
gagggaggacacaggcgaagaacgtgcagtgtagtgactgtataataaggaaatacaccaaacagataaataacctaaattaccagcatgcaggttgcacaaggtccaactgatagcatgaaagaatgtcatgagtcagagattgcgattaagcctaagcacttaatattcagtgataaatggaaaatcgacggccggaggcgcggtgagcttcacgctgtgtgatcccagcaattagggaagacgtgaggcgggcatatcagcctgagtgtcaaggatgttcgggagcagacccagaccagtcgctgtcgtagagaccctgtatctactaaaaaaatacaaaattagtggagtgtggtggtgcgtgcctgtagttccggctgctcgaggaggctgggggaggagaatcgcttgggcccgggaggcagaggtttcagtgagccaagatcacaccattgcactccagcctgggcgacagaggaagactccatcgcaagagggaaaaaaaaaaattaaaaacaaactcggggggggccccggaggaccctcgaaaaaggggttccacaacccaaacggcgtttgggggccgggggcccacattaagaattagacacaccggggcacgaaacgggtcccggggagaacccggggcaagacaaggcgcgtggaatcccaccaaaaaaaacacgcccgggggaccggggtttctagacacaccgaagggatctggagcaacaacggactacaaagggccaggggccgattaatc

SEQ ID NO: 706225 - DNA, 818 bp, Homo sapiens
ggcgtgcctgtaatccaacagggaaaccaatcagggatcccagtccagagttcaagacaagctggcctagatgttgaaacctgtctctcttaaactacaaatattagctgggcatggtggcatgcacctgtaatctcagctactcagaagtctgaggcaggagaattgcttaaacccgggagggagaggttgcagtgagccgagattgcaccactgcactctagcctgggcgacagagcaagactccgtctcgaaagaaagaaagaaagaaaggaaattccccagggaagtacctcggcttatttcataaacaggtactgaaggaagcagaggcatgtggaggacttccccacctcatgcagctatttgggccgtggcgtctgaaatttcttatttcagagtcacccctttgatgaccttggcagtgaactgcagtcatctgtttaggcctttccatggcccacgtcaatgccgttatttctgtttgttgcacatttgatttccttgttgttggcatttagaaggccccctgtttcccagatcacaccacgggcatggaccacagagattgcatcttgtgagtctgtagaaatggtcaaggccttgtcctctcttaggtccagagctcaggtgaatgcagattttcccggccatctgtgctgaagtccctgtggggaggctcctggctggtttcctgtaggtagacagctacacgtcctgcccttcattggcttcttttcatgaagctcctgccattcaacgcctccgggccattcaacgcctccggccattcaacgcctccgggccattcaacgcct

SEQ ID NO: 706226 - DNA, 1058 bp, Homo sapiens
ccttccagaccctgccactggatggcagccaactgttttggccaccccatggacggggcaattccgaaatatatgtttgggggacataaaatttcctccctggtggcgttaaaaaggccccctgtttcccagatcacaccacgggcatggaccacagagattgcatcttgtgagtctgtagaaatggtcaaggccttgtcctctcttaggtccagagctcaggtgaatgcagattttcccggccatctgtgctgaagtccctgtggggaggctcctggctggtttcctgtaggtagacagctacacgtcctgcccttcattggcttcttttcatgaagctcctgccatctacaaaacatgtctcccttcttgaatcacatctctgttattgaaactctagaagtcaaccgggcatggtggctatgcctataatcccagcattttgggatgccaaggcgggtggatcacctgaggtcaggagttcaagaccagcctggccaacatggcgaaaccccgtctctaatacaaatacaaaaattagccaagcatggtggccactgtactccagcctgggtgacagagcaagactccgtctcaaataaagaaagagaaagtatcatgcttttcagagttctgtgggttgttatggtgaattatcaaacctgaggacgtggtgggaacctccaaatttgcagccagttggtgagaagtacatgcggtctgtggacacccaagcttgcagctgcatctgaagcgagggcagcctagcgggggctggtggccttaacctgtggcatttgatgtaacatcagggagttgacatcagaattacgtcacacaggccaggtgcagtggctcatgcttataatcccagcaattagaaaggcaagataagaagattgcttgagcttgagtctgagcccacagtgagctatgaccgcaccactgcactccagcctgggagacagagcgagactgtctccaaaacaaacaaacaaacaaacaaacaaaaaaaccctgtagcttgggatcagccttctcttctgttgtttttcttt

SEQ ID NO: 706227 - DNA, 376 bp, Homo sapiens
ctggaccttctggaaactactcacgtaaactcaatgcacaaataattcttccaacattcattattgcttgcgttttcatcagatatcgctgctgagacacggaagactacgagtacatggagctggcatcaggagcgtaggtcatggagggcctccctgaagcacgaattcatgggccagaacgagagatgggagaccagagaacagcagacctacaaagggccattgcagggcataaggaaggtacatcagtgtgctatggcttgatcagagcttggggactttacacaggatgaagctggaaaggaatagaagggtaatatcagtcgggcgcggtggctcacacctgtaatctgagcactttggcaggatcagt

SEQ ID NO: 706228 - DNA, 151 bp, Homo sapiens
ctttacgcgctttcagtttttccccattgaggattatatttgctgtgggtttatcataaatggctttgattatattcaggaatgttccctctatacccactttggcgagggtcttgatcatgaatggatgttgaacttgcggtaaaagctt

SEQ ID NO: 706229 - DNA, 864 bp, Homo sapiens
  misc_feature (25)..(25): n is a, c, g, or t
  misc_feature (102)..(102): n is a, c, g, or t
  misc_feature (117)..(117): n is a, c, g, or t
  misc_feature (181)..(181): n is a, c, g, or t
  misc_feature (304)..(304): n is a, c, g, or t
  misc_feature (368)..(368): n is a, c, g, or t
  misc_feature (469)..(469): n is a, c, g, or t
  misc_feature (556)..(556): n is a, c, g, or t
  misc_feature (637)..(637): n is a, c, g, or t
  misc_feature (640)..(640): n is a, c, g, or t
  misc_feature (650)..(650): n is a, c, g, or t
  misc_feature (663)..(663): n is a, c, g, or t
  misc_feature (686)..(686): n is a, c, g, or t
  misc_feature (730)..(730): n is a, c, g, or t
  misc_feature (760)..(760): n is a, c, g, or t
  misc_feature (802)..(802): n is a, c, g, or t
taagttactgatgcacaaacaaaanctaaacccaacttactaactatgcagatctctcctgatctccccaggttgggcagttattagttccttacaggtgtnatcaatggtccaganaaggcagctactgttagttacagttggtctgcggcatcaaagtggaggcagcagagtggaaganccacagagggctgtgatacagccagaaaagacaatggagagtgaaggctagaaacattgaggaaggggtcaagaagcactggtacttcctgtgatcttttccaatagaatattcctgcaagtnacccatcagaaaaaggtgtgcagagggtttgaaaaagaagtggttagcccatgccagtgaaggngacaaaaaacaaaacaacttgatttttggtcaaatcagaaaggatggagggaaacacccaagttcatgcatggacacaagtgccccagccaaaggagtgcngtgttcaccagcgaaaaattttctaacagcaacaacaaaaacccacagaagtgagtcacagggaagtggatcagtcctaagccaaanaaggattcccacctggggcaaaagccgactccctaggacatgaactgaacacatcacagttaaagcccagttgaggctgcngcnagttccagcnattagtaattatnagggggacaggatgacacctcanacggaccacccctagcaagagggtttgtttcagttctagctgtnagaggaatgtttgcagttcccacaggtgtnctaagctgtgaagcccatggcccctgctcctctctttgcctnccacacacttaacagttcacacagactttgctggcaagtgctgtttgttcctgcactgccat

SEQ ID NO: 706230 - DNA, 287 bp, Homo sapiens
ggggaaattttttaccctgtcccccccccccccggtttcccttttggccctggaaaatttattttggccggcaaagtgggggggttgggggggtggggctcccccccccccccagcccgggtggggttttttcccggccccccgttttggggtgggggaaggggggcggaaaattcctccgcccgggcccccgggtggggtgggggggttccttttttggcgggttttgggggaagggggtgggaatgggggtggttcctcctcccgtgggggggcccattgggccc

SEQ ID NO: 706231 - DNA, 282 bp, Homo sapiens
gggggggggggggcccccccctttattccccccccttggggggttggggcggccgattcccctggggccggggttttaaaaccccctgggcccccaggggaaaccccttttttttttaaaattccaaaaattacttgggggggggggggggccccggttattcccccccctttggggggtttggccgggaaattttttggatccccgggggggggggttccggttttttttttaggcccccttcccccccggggggggggccgccccgggccccttttccca

SEQ ID NO: 706232 - DNA, 490 bp, Homo sapiens
tcacctaaactcctacacaagttcaatgatgttgtgtggcacgtgagctggtccatcacagccaacatcctggctgtgtcaggtggagacaataaggtgaccctgtggaaagagtcggtggacggacagtgggtgtgcatcagtgacgtcaacaagggccagggttctgtgtcagcctccatcacagagggccaacagaacgagcagtgacagcacaggcagcctggccttcctgttacctattctggaacaacctccaaacaactgggaagaagagtcccagtgctaccaagattccacacccgagtgcccacacatgcaacactgggtgttcacctgccttactgggatcccatgtgtttagtaatttaacgtccagctgaaagtattcatgtaaggaacaaatgactattatttttaaatatttttggccatttttaactatcttttggttaaaagctatccaagctaataaaatcatattgcatag

SEQ ID NO: 706233 - DNA, 722 bp, Homo sapiens
  misc_feature (573)..(573): n is a, c, g, or t
cgggctgcaggaattcggaacgggacagcagggacatgaggttacgcgcttagatccagtggctacggctactaatggtctataggtgccggatgtaacatgcatatgacccagaatccaatggccctgtctgaaggatgtgaagacagagtcgccgtctttagcggtacaggtcagaccattagagattatggcaattgctatcaacagaagccagtgactgacggtaaactccggagcacagctgcatgcactaggtaaactgactgcccatcaaactatagaggccctggatctgggacggatttcactctcagtatcagtagcttgaaggctgacgattgtggaagtaatttctgccaacagtgtgacatgatgccgtggacgtccgttcagtgtaccaggagtggaaatcaagcgagctgagactacaccatgtgactcgatgttcctgccatcagatgagcagtagaaatctgaaactgactatgatcgttgcctgctgaataactaggatagcagagtggctaaagtacaatgtgaggtggatcacgcactccaatcgagtaactnccaggagagtgtcacacgatcatgacacgatggacaggacctacagacttagtagcactcctgacgcttacagaagtagactacgagaaacacacagactacgtgtgtgacgtgacctatcaaggactgagcttagccggtactgcttc

SEQ ID NO: 706234 - DNA, 98 bp, Homo sapiens
gcggccgcctaactactactactgctcgaattcaagcttctaacgatgtacggggacatggaaatacagttgttggcctccggcctcccctcaaaaaa

SEQ ID NO: 706235 - DNA, 1085 bp, Homo sapiens
  misc_feature (60)..(60): n is a, c, g, or t
  misc_feature (67)..(69): n is a, c, g, or t
  misc_feature (78)..(80): n is a, c, g, or t
  misc_feature (85)..(85): n is a, c, g, or t
  misc_feature (91)..(92): n is a, c, g, or t
  misc_feature (94)..(94): n is a, c, g, or t
tggaatttcattaactttattgaaaggtatatcccttagtactaaaacataatggtagtnggttagnnnacctctgcnnnctcanaattannantgatggattcaaaatattgaaatttatcagcctttggggaaaactaaaaatgttacccataaaacatgggtttcacaaaagtgttaaagaataaagatatcactgggggtccttggggttttccattggtggtactggatccataacggtgatggtcaatttgggatatacgccatcatgggataagactcagggcttataactattggcgactggatgtaaactggtgttcacaaccatctttaaacactggtgacttcttacactattccactaaactggccaaggggaggatcctaaaacaactaacttcagcgagcttcaattcataagttagtgaaagggtgtctacgtgggcttttctataagaatttgtgggtttggggcccagttagaggggcatcgaggggagagttatattctctatttataaaattggcgcaatcatttttaatttaaaaacggttcgtgtcgctaaaaacattcggggaggtgttcaattctagtcgtggaattaccttaggggggggaaagccaagttttccgaaagggggataattatatgggagcttactaataccaatgcaaactaagttccgtgaagggaatacacgtttgacggcaagcgagttcctggacttcacacacttttatcgtggaaatacacatggttcaccgggtttctataacaaaaaaaaaaaacacaacagaaaaaaagagggggcgcgcacataaaattccccacgaggggcaccagataacgacgagacccgcagaattatgaacaagaggggccccaaggagggagcaaaataaaaacgagacgggcagcaactaaaaagcagcgagcgaacaacgacacgggaatcagggagcagccacaacacggggggggaaataggccacacaacacaagatcagcgcggcgcaacaaaaacagcagcatgcaaaccacgcacgcgcaggaagaatgatactataagcagaagca

SEQ ID NO: 706236 - DNA, 522 bp, Homo sapiens
tacaagtgaggtaggtaggacaaagaaagtatgatatactatatgatgagtaactagattatttcacatgtgataggacatcagaatgaaggcatgaccagagtgatcacgaatccgaaaagatctctcagctcataattgtttcaagtgttgaataaaaaataaaaattctatcatattgacattacagctactatttgcagcttataggtataatattcttatcaagttgtagcaaacctattcacattagtatgttcaatatggtcaccatctatggcctatatattgatatagaacatgttttgggcaccttcaagtcaggatacatcgttcgggaaaaaatctctttcctgaagctactttagtgtagaatgagtcctttccactgtcatttctaccttatgaaaaaaacaaaatcacctcctcctatattctcattctcagctaatgaccttatcatttacacaatctcaaagcagaagaaccttatagtaccctggatcctactttactctctat

SEQ ID NO: 706237 - DNA, 209 bp, Homo sapiens
tagggccagaaattgtgtaccctcctctagaaagaaattccagtaatgatctgtaaagtgtcagggagcagaagagaggacggtgaatgtacttcaactattttagcacatttttagaaataggaattcttgagtctcttttctttcttcagatcttttccatttctttttcttttctttttcactgtaatttctgtgcccatttcaga

SEQ ID NO: 706238 - DNA, 612 bp, Homo sapiens
ggtggaaagaatgtcattcagagaatataatggtttttgtacttcaaagtgtgtctacttaaaagggacaaatcatcatcttcaacatcttttttgttgtttgtttttgagacggagtcttgctctgtcacctaggctggagtgcaatggtgcgatctgggctcactgcaacctccgcatcccaggttcaagcaattctcctgcctcaggctcccaagtagctaagataaattacaggcacccgccaccatgcccagctaatttttgtatttttaatagagacagggtttcaccatgttggccaggctggttttgaactcctgaccttgtgatccacctgcctcggcctcccaaagtgctgggattacaggcgtgagccactgcgcccagcctcagctaactttcaacttttgtcttttgtagagatagggtttcaccatgttacccaagctggaggaattttttttttttttttttttgagagggagtctcgctctgtcacccaagctggagtgcagtggcgcaatcttggctccttgcaacctccgcctcctgggttcaagcaattctcctgcctcagcctcccgagtacctgagattatagacgtaagc

SEQ ID NO: 706239 - DNA, 1045 bp, Homo sapiens
gaagaagctgccgttgttctggagtactacaagcagaagggctatgcggaagcgagcaccccacgatctgagatgcgctccatgccgcgtgtgacgcctgagggccaccactccatctgcctcctgagcctagggcctggcctaggctagcaagcgtagaccagagagtgtactatacaacacccatatcacacacatacagataactcccacaactcgacgacagtacctgtagcacccaccactagaccccacacgcgcccaaacatacacccagccaacaacccctcacacaccacaccccccacccctttcccattacccctcgcctctccacaactccacacacaccccaacaacacaaacttcacccccctcaccccccaatataaccacacccgccccccaacacccccacacccccctcctccacctaccctacacacacacaacacaaacacaccccaccactcccaccacaacaacaccacccccacgcccaccacacaccccccacacacaaaacacataaacacacacacccacccccaccaaccacccccaatcaccacccctccccaccaaccccacacctccacacctctacacctccccccatccccacctcgcccacacccccaccccaccacaccccaccacaaaccacacacccaccacatacaccaccccctacaccccacctatcccccattcacactccctcatcacctacaccaacaacacacatccaccacctcctcccaacacacctcactcaccatcacctccacacacctactccaactcacaaacaaaaacaacgcccacctacccaccccaccccccaccccctccaacacacacccacaccacctctcacacacatacaacccacacccttcccccctacccctctcaccatctcccctccactctcccccccatcactgtcacctatcctctactactcccctacccactgtcaccattacaccccacctcacccaccacacaccccccccctcaccccccacacccccacacc

SEQ ID NO: 706240 - DNA, 243 bp, Homo sapiens
cgggtgtgtcgtaaggtactctacaggatttatgtggtactgctgagatggccgattatgaaggagagtgaggctgtggagtggcagcagaaggtccactgattggccagcagagcctggggcaaatgtctgggaaggggagggaaagagagagggactgggtcccaaatggcaagagtgaaggcagggggacgggtccagaggtcagtaccttgaaagacaattttgttggccatagaggac

SEQ ID NO: 706241 - DNA, 1535 bp, Homo sapiens
aaccactgtgtagtcagttgccccagcatgggttttcgtcgcgccggcatcaacattacaccactctgtggtggggcgcccttcctagatatggtgaagtccaccctcgtatgctccagattggtgtggttgttgtctcctctgacagtgatcccctggagtgcccctgtgtgatgtatgttctcctccatcagatgatgattgcgtcttgtgtggttgtggatcaccacagagctagctccttgcgacaataaggagcatttttctttttggtggtggggtgctcgttgtgtagtaggcacactatggtgtttcgatcttgccacccccaccgcataataatagtgtcgtatagttcttcttattgaattaaaatcgtcctcctcctctccatcatgtttgttatactaaaaaatcctatcttttcctctgtgttaataaatgagaagaaccaacattgtttctcctccctacaactcctcatccacgccgtacactcattggtctcagttttatttatctacacaatcgtcatgtgtgttttgtagtagttttgtgtggtgatgaataatatagatctcttttcttccaccaccatcggctgtagtttcttcttcgtctttgtgctgcgccctactctttttattaggtgccgcgccgtcctttgttgtagtagttgagtaccacctcctcatcggtgttgattactaacgccttcatgattgtggtggggacgtggaggatgggtgggccccacacacctgcacaccatcctcctctcccgcgtggtcggcgtgattaggacaccgtcttcctctgctgtggagtagacctccttcggcgcttgaccacagtgttgttgtgatcacagagaagtgtgtttccacacaaactgtgttcgcgagcagcgcttctggtttgtgagtttgtgtgtcccccaccacttgtggatgaagaaagagagagtgtcacccacagctggtcccaacagagccactctactgtgtcacaacagagagagcttgtgagttctctctcacacacctctggtgtcagagttgtcaacataccccaccaagagcacacacgctctcacacacacacacacctcgtcactcggctctccacacagcgtgtctcccctcgccacagcgagactatcaccacacttttctccactctgtgagaagcacctctccacatcgatagaccccctctgcacaatattgttcacaaagcacagaatgttgtcacaccacacggtgaatcacatctcccacaaagaagctgtgagatgaacacatgtggagagagggaaggcggaatttgtaagagggctgtggttcacaggccccccacacttggggctctccaccctttccccagagctatctgttttcctcacctgccttttcctatttaaggaaggatggtgaaacccccccccgttttcccccgggccacaccccttaaaggtattctaataaagttctgaacttctcccctccccatacatcaaagaaaaaaaaaactca

SEQ ID NO: 706242 - DNA, 347 bp, Homo sapiens
tcagcagtttagtcagctcaagtgcaagacgggtgacaaaccggtgttacgggtagacacatcaaatgacgcttgggtaccacgtcacattcatccttgaagactcagccatttctcttggctgctacgttgccagagaggaaatggtggtccaccataagcacagaacagcagcagtacatcggaagcacagatgtgctttgggcggactgaattgtcacatctggtggcacagcatagctgcccaaaggatgaaaaatcaagactggtctccagcatgacggtaagcactgggaaaacacactggaagtgacagtagacgctccagcaatcaccaggagccagcc

SEQ ID NO: 706243 - DNA, 348 bp, Homo sapiens
  misc_feature (345)..(345): n is a, c, g, or t
ttttttttgagacagggtcttgctatgtcacaatcatggctcactaacagcctcaaactcctggactcaagtgatcctctcgccttagccacccaagtagctgggactacaggtgtgcatgcacactacacccagctaatttttttatttttcgtagagatggagtctccctgtgttgccaaggctggtctcaaactcctgggctcaagcaatcttcccacctcagcctctcaaactgctgggattacaggcatggagccaatgcgcccaactatgatcactttttataaaaagacaagctccagcactcgcacacataaacacagaatattaaattaattccancct

SEQ ID NO: 706244 - DNA, 521 bp, Homo sapiens
catatctgtgtgggccagtttctggtctcttacttctgctgtatttatctatgtgactttgttcccttattacaccaccactttaatagctattttgtaaaatgtcatcaacatcagataggacagtttttccctcgttcttcattttcatcatcaacttagaccttctcattctttcttttctttgagttttaaagccatattatcaagtttcataaaaactctgttgtcatttgttttaaattagatcaaagtacatctccccattaattcaggtcatctttgtatcctttaatacaatttgtgtgtgtgtgttttattttggagggactttggccctgtcacccagggctgggatttgtaatgggaatagatcatgggatcactggaagccttaatctcctggggctcaagtgggttctcactgtctccagcctcccaagtagctggggattaccattggcccaccaccaggcccaagttaatttgtggtcactttaaggtacagacggggtttcgca

SEQ ID NO: 706245 - DNA, 554 bp, Homo sapiens
  misc_feature (16)..(16): n is a, c, g, or t
  misc_feature (105)..(105): n is a, c, g, or t
  misc_feature (120)..(120): n is a, c, g, or t
  misc_feature (125)..(125): n is a, c, g, or t
  misc_feature (142)..(142): n is a, c, g, or t
  misc_feature (144)..(144): n is a, c, g, or t
  misc_feature (152)..(154): n is a, c, g, or t
  misc_feature (158)..(159): n is a, c, g, or t
  misc_feature (167)..(167): n is a, c, g, or t
  misc_feature (170)..(170): n is a, c, g, or t
  misc_feature (175)..(175): n is a, c, g, or t
  misc_feature (178)..(179): n is a, c, g, or t
  misc_feature (185)..(185): n is a, c, g, or t
  misc_feature (198)..(198): n is a, c, g, or t
  misc_feature (205)..(205): n is a, c, g, or t
  misc_feature (231)..(231): n is a, c, g, or t
  misc_feature (265)..(265): n is a, c, g, or t
  misc_feature (276)..(276): n is a, c, g, or t
  misc_feature (281)..(281): n is a, c, g, or t
  misc_feature (283)..(283): n is a, c, g, or t
  misc_feature (332)..(332): n is a, c, g, or t
  misc_feature (347)..(347): n is a, c, g, or t
  misc_feature (353)..(353): n is a, c, g, or t
  misc_feature (377)..(377): n is a, c, g, or t
  misc_feature (394)..(394): n is a, c, g, or t
  misc_feature (397)..(397): n is a, c, g, or t
  misc_feature (403)..(404): n is a, c, g, or t
  misc_feature (415)..(415): n is a, c, g, or t
  misc_feature (420)..(420): n is a, c, g, or t
  misc_feature (435)..(436): n is a, c, g, or t
  misc_feature (439)..(439): n is a, c, g, or t
  misc_feature (449)..(449): n is a, c, g, or t
  misc_feature (475)..(475): n is a, c, g, or t
  misc_feature (494)..(494): n is a, c, g, or t
  misc_feature (539)..(539): n is a, c, g, or t
atgcatttcacaatgngggcccggattcagggagtaggttagaaagcctatgatgagtcatgacaagctgactttgactaatagtcatcccattaaaaaaatganagccacaaacatggncaganaccagtcatagaatatntnagggtatnnngcanngggtgggngcntcggncanntcggtnctccagaggcacnggatganaaggatgtttgggaaatattttctgnaagggcaccatattaaaaattatcctatacctanctttatttttntcagncntcccaacaaagaatctgctatataatttccattaacagctctaaaagangggggaaatattttntcctcnggcgggcactttccgtctcacctntcctcgctttccgcccnggnggcagnnacacccccccngctgnctcgcacgtagtacnnacngggctgaaantgcagaatattgacaaaacacacagnacagacataaccaatttcnatgagatttcgatgacagaagcaagcagccctgtagtcaacatgnacggggggtgggagg

SEQ ID NO: 706246 - DNA, 1043 bp, Homo sapiens
ggtcttcttgctgcagcaacgctagtgggagcgccaggatctcgggctcggaaagagagtgcacggatcgtaaaagaaaatggagacaaacagacatgggggaaactctgccagcttcagaatagaggccaaggcttgagatgaaaacgggagtacgcaggtagagagtaacagccttgcctgtgcaaagcagactatgtgaagcacagcgatacagcggcacgttgagaatgtgccatagagattcctggatgggattttccgtaggcccacgacactcgtacgaagaatcgcccaggtcgatgctgttgggtagggacagaggccattctgacaaagaatggaccacagagccgacaacatgcgtcgctactggtgaatgccattgggccaccctctcggtgccgggaatagccatgcggggaccgtgtgagtgttctcgtggacaggggtaacgcaccacccacaagtctgagattgtgcaacgacttcctcgaggcttacagccccgggggaatagttagtagaggaagagttaaatacggcattgaatactctgacatttagaaacacaatccttgcgtggaaggaaactaaaacaagagacacatagcaagagacacatcacacttgagtgcgaacagcacggaaccacgccagcaaagaacgtgaatcaaggaaccaaaggacgagttgagtggcgcgggaggcccacttatgaggacaaacgacagcaagtgcgtgcacatgaatgtgatcctgacacaagagaagcctcgcacgggacaccagaagatacggcgcgaaggcacccacgactaattaaacaagaacgcgccgcgagaaacgcaggtagggtttcgaacaacacctaagagtggcaactagtcagcggaactacgagggaccatacagcacgcgatcacagggagcgacagaataatacacccgcgggagtataaaaggcaacagacacagacaagagtcgacaggtgacaaagcaaggaccacggaacaagcagcagaagaacaaagaacacagc

SEQ ID NO: 706247 - DNA, 351 bp, Homo sapiens
  misc_feature (164)..(165): n is a, c, g, or t
tttcccccttgggcctttttgggggcccctttaaaccaggtttggccaaaaaaggggggggggcgggggggggatttccggggattttgtcccccccgggggcccccccgggggcccctttttggggttttttagggggggggggggggccccggttttccccnngaccccctttgggggattttttgggtttagggggccccgaaatttttttttccccttagggggggccggggtcccctttcttttttttttgggggtttaaaacccccctttttggcccttttttggggggttttttgggggacccctttttttttttcccctttccggttttttttgggggcccca

SEQ ID NO: 706248 - DNA, 419 bp, Homo sapiens
  misc_feature (168)..(168): n is a, c, g, or t
  misc_feature (180)..(180): n is a, c, g, or t
  misc_feature (186)..(187): n is a, c, g, or t
  misc_feature (277)..(277): n is a, c, g, or t
ggcgggtctccccagccacaccaggctgatgggtgggatttatgtgccaggtactgtgctggctatcactggggcctggtggtctcttggagtcacaagcagccgcctgagatgaggtttatcattttgagctagaataggactgaagctcattcccgaggggcttgncgggccggctcntcgccnntgccggcatctccactgcctctgctgtcctgaagctcttatgagggttcacattactaggacgccaatgtgggttctcctctggcactgncccaaggcaccccaacctcagacatgtcacctcctgggcctactagaaatggagactgcagttctatgatgggaaaatctctacaccatcggtcatttgggctatagaagaaaaagaaattattttcagctgcaaaaaaaaa

SEQ ID NO: 706249 - DNA, 81 bp, Homo sapiens
gaggggagttactatggttcggggagttattatagaggccttgacttctggggccagggaaccctggtcaccgtctcctca

SEQ ID NO: 706250 - DNA, 727 bp, Homo sapiens
agcggaaagattgggcccaaagtcaaagagagctaaaaagaaaaataataaaataagaaagtaaagaataaaatagttgaacaaataaggttcatgaaaaaaaaagaaaagaaagaaaaggtaaagaaaagaaatccagtgataaaatatcaagactttgttaataaaaacaagtctggccctgttactgtggatgaccccaccttggcttgtctaaccctaatcccagccccagttttaataaagactgtatttacagaatataggcagctgggcacgtggaccgagagataccaagtttgatttttctttagaagtattacgaattaaaagtattacatcactgtgtcttcattcactgagtttcgggggtagcccgtttaaattttggtatgcaaggtgaattagctcacccctctctccgtggcctagaatctgggggatcctcctgtccctcccacagtgcctgatagcacggcctggggctggtggtgtgcctgttggcctagctttatctctccagatactatatggggtgtgctgttctaagaagtgattaggttagcgttttgcatattaacaaactacctcgtgaaacttagtggcgttaaagccaacaaatgtattaggctttataagtgattcggatcagtgatgggggctgggcacggacaggcgattcttctgctgggctgggctgaactcaatatgtctaatggtcagaggg

SEQ ID NO: 706251 - DNA, 435 bp, Homo sapiens
  misc_feature (1)..(1): n is a, c, g, or t
  misc_feature (57)..(57): n is a, c, g, or t
  misc_feature (85)..(85): n is a, c, g, or t
  misc_feature (88)..(88): n is a, c, g, or t
nttagaacagtctctgtacaccaattccctccctaaaaaccatccttttttaaaaanaagaattgttccagcccataaagaaagnacnagatccatgccctttgcagggacatggattgagctggaggccattatccttcataaactattgcaggaacagaagaccaaacactccatattctcacttgtaagtgggagctaaatgagaacacgtggacacatagagggaaacaacacacactggggcctatgagagggcggaaggtgggaggagggagagatcaggaaaaataactaatggatacttagggtgatgaaataatctgtgtaacaaacccccatgacacacctttatgtatgtaacaaaccagcacttcctgcgcatgtacccctgaacttaaaagttaaaaaaaagttgaacttaaaaataacaga

SEQ ID NO: 706252 - DNA, 170 bp, Homo sapiens
tgcctggccggtaaatctgtgtattctagactacatctggaattagatcacttaccacatcaatcctgtcagtcccactcacattatctcgttaatgtcctaattgatctacttatgtctgtcctcatccctctattcatcccagcctccagggcgagcctttgaacaca

SEQ ID NO: 706253 - DNA, 303 bp, Homo sapiens
  misc_feature (141)..(141): n is a, c, g, or t
ttggtctgtttggttaaattgtgttagaaagtctgaagggaaactatctcaaagcaaagttacaaacaaaaccagaacaactgtaacaaaaccaagaggtgttttccttcagctggccttgactcaccacctgcctgcggncatggtgtcaaactccagatcaagtgaaacctagtctctcaggctgggggtatggctcaacccgaggtgagtgaggccctgggttaaatctccagtatcagaaacaaatcaatacattgcaagaccaagggacatcgtattccatactgcaggagaccctgt

SEQ ID NO: 706254 - DNA, 261 bp, Homo sapiens
catcatgcccagcaaattagtgtctagtagagacggagtttcaccatgttggccaggctggtctcgaactcctgactcaggtgatccatccgccttggactcccaaagatgctgggattacaggcgggagccaccatgcctggccagaacaaatgcctttttaccacccttttccgaacattttacacactgtctttttctatgtcacatgtaacgtttatttttttacaccactaccaattgctttgccaaaaaaaacaa

SEQ ID NO: 706255 - DNA, 705 bp, Homo sapiens
agcgggcctagccgccccgcgggcgcgactctcggggcagtgacgaactgggtggagcccgccgccggccgccgccgccggcggggagagcgagccccgggggcggggtccccgaggccgggcccgcggacgggccgcggggcccgacgggccggagcgggtgaggaggtgagcgggagccgtggggcgaagagcccgccggcacccaggctcagcgatggtaccatttgttcgagctgggtggactaaggtgcctgaggatcatcagcgtcacatccgggtcaaggctggggaagatcggccgggaggaggagcttgcggactggcacctgttgcggagtacgggaggaaacaggtgttttccaagaagttctgaggtggctcattcgtgcgagccggaggtgacagggtggagcaactaaggatggctccagaggggcacctggatcggacagagatgaatccgaagacagattggagaatacaacaaggtctaggtaggcgcaaagccagggcggggatcgccgaggcaaggccccacgccaatcggggggacagagaaagccgacaagggggcccagggggccaatcactagcagcacggccccgcaagacacgggcgccagaaggcacgcatagcagacccagcaacccggaccacccaccagcccggggatgcacggcaagtggaaccaatccagaaat

SEQ ID NO: 706256 - DNA, 100 bp, Homo sapiens
tctagagatccgagccagatggtgctcatctctctctctctcaggctgcaggtgaccaggcgtccactcactctctctctcgggctgcaggtacacgagg

SEQ ID NO: 706257 - DNA, 212 bp, Homo sapiens
acatccgctattgtgtcatgcaggagcattctgttcttccataagcagcagagttgagtgttagagtgcaggatccagagcggtgagaggctgggcggagttgggggctggaggctgggcgctggttacttgtgttgacgtgcagagctctctctggtgggctgcagttcatcttggggggagctggactcagatgcccccgtagtgattac

SEQ ID NO: 706258 - DNA, 465 bp, Homo sapiens
aactgctggacttcaccctgagcgccgcggcgcgcggctcggccgaagccaccgagggcatggccaccatcgacatgaacaccaccttcctgtcgccgggcaccggcgacctggtgatcgaggcgcgctgcctgcgccggggcggctccatcgccttctgtgaaggcgacatccgccgcgccgacggcgaactggtggcccgcgccaccgccacgttcaagatcatccgccgccgcccgggcggcgactgaacggcgccgcgcgccccggcaaacggggcgcgaacaggcctatttcttgaaatcgcgcgacggcggcaccgtcggccgcggatccagcggcatgtagctggcgcacgagctcatgccgtagtagatcgcgtcctgcatggcgcgcatcgccgccgcgtcccaggtgcccttgccccacatcacgatgcgggtttcggtggtcttgggaccggcc

SEQ ID NO: 706259 - DNA, 104 bp, Homo sapiens
gctgatccgcttaaggggcgtcgggcgactcctccgagagcagccccggacaagcttcatccctctcccaaatgtaacattggcttgaaactgggtaccgagct

SEQ ID NO: 706260 - DNA, 1537 bp, Homo sapiens
  misc_feature (343)..(343): n is a, c, g, or t
  misc_feature (373)..(373): n is a, c, g, or t
tccattttctgttttccaggcccagtctgactctgtctgtaatacctgattgcattggagaactctagacacgcataaacatggacagtttttctaaatgtgagacttaagcctgtgatgtaaaataggaagttctacttggaataatataaaggaaccactagaatttacaattattttgaagttacagggattagattttgaatcttaaaatcctttaggtaatttttagaatttttaaattaagattaatgtgaagagaattaagtgagcagcaggtggttcacttgagcaaactgcccattaagtcagattaaaccatttgaatgatagtagagatgtnttaagtaatactggatttttacagtaagtntatggtgtactttgaatcgataggtgtccatgcatattttatgaattcgtggagaatgaatgcaatgaagacaagtaagtagtcttgaaaattatttaaataaagttgtagatttttttagtgccccctaggaatatattagtgaactttggaacttttaccaaagttatgtaacctcagtgtagataattttaaatatttctatttttatattttaaaatgttgaatatactctggaaacaacatttgaagatttgctctgatgtcaactttttctggttataaaacctattagtattgtgtataattctcagggtaggtatactctaataggtgttttgtcaattgctttatttttgtaaaggctagagttagtgcatattgaatatatttatgtacaaataattcctgttgtaacatttagtggacgcgattatctgtatacctcaaattttaatttaagaaagtatcacttaaagagcatctcattttctatagattgaggcttaattactgaaaagtgactcaaccaaaaagcacataaccttttaaaggagctacacctaccgcagaaagtcagatgccctgtaaataactttggtctttcaaaatagtggcaatgcttaagatacttaaaaatacacatacatataagctgaaagcatgtcaagcctatttccatagaaaatagttcttaaacagtattgttcattagaaattgctggggagcattttagagattccataggcctggtagccacctcagcttactaaatcaacatctctggagatggagtgtatatgtgttttgaaacagctgctcaagtggttctgttaaacactcctgcgttacaatcacttaaaatagagcaagcatccccttaggctcttaattgtagtttaaattccagtactgcctactcagacccaaaagttttgttttatgaaaaatttgtattgtgttcaatattgtttgaaatttggggttgttgcataaatgattatggaataacatttggttttaaaataatataaactgacatgttatgctacctgttacacaatttggttttcagttttaattatatgaagctggtaacaatcgtttttgttgtaaaagaattatttttcactaaacagtatgtttaaaactgaaaaaaaaaa

SEQ ID NO: 706261 - DNA, 1483 bp, Homo sapiens
  misc_feature (343)..(343): n is a, c, g, or t
  misc_feature (373)..(373): n is a, c, g, or t
tccattttctgttttccaggcccagtctgactctgtctgtaatacctgattgcattggagaactctagacacgcataaacatggacagtttttctaaatgtgagacttaagcctgtgatgtaaaataggaagttctacttggaataatataaaggaaccactagaatttacaattattttgaagttacagggattagattttgaatcttaaaatcctttaggtaatttttagaatttttaaattaagattaatgtgaagagaattaagtgagcagcaggtggttcacttgagcaaactgcccattaagtcagattaaaccatttgaatgatagtagagatgtnttaagtaatactggatttttacagtaagtntatggtgtactttgaatcgataggtgtccatgcatattttatgaattcgtggagaatgaatgcaatgaagacaagtaagtagtcttgaaaattatttaaataaagttgtagatttttttagtgccccctaggaatatattagtgaactttggaacttttaccaaagttatgtaacctcagtgtagataattttaaatatttctatttttatattttaaaatgttgaatatactctggaaacaacatttgaagatttgctctgatgtcaactttttctggttattttgtcaattgctttatttttgtaaaggctagagttagtgcatattgaatatatttatgtacaaataattcctgttgtaacatttagtggacgcgattatctgtatacctcaaattttaatttaagaaagtatcacttaaagagcatctcattttctatagattgaggcttaattactgaaaagtgactcaaccaaaaagcacataaccttttaaaggagctacacctaccgcagaaagtcagatgccctgtaaataactttggtctttcaaaatagtggcaatgcttaagatacttaaaaatacacatacatataagctgaaagcatgtcaagcctatttccatagaaaatagttcttaaacagtattgttcattagaaattgctggggagcattttagagattccataggcctggtagccacctcagcttactaaatcaacatctctggagatggagtgtatatgtgttttgaaacagctgctcaagtggttctgttaaacactcctgcgttacaatcacttaaaatagagcaagcatccccttaggctcttaattgtagtttaaattccagtactgcctactcagacccaaaagttttgttttatgaaaaatttgtattgtgttcaatattgtttgaaatttggggttgttgcataaatgattatggaataacatttggttttaaaataatataaactgacatgttatgctacctgttacacaatttggttttcagttttaattatatgaagctggtaacaatcgtttttgttgtaaaagaattatttttcactaaacagtatgtttaaaactgaaaaaaaaaa

SEQ ID NO: 706262 - DNA, 288 bp, Homo sapiens
  misc_feature (87)..(87): n is a, c, g, or t
  misc_feature (97)..(97): n is a, c, g, or t
  misc_feature (109)..(109): n is a, c, g, or t
  misc_feature (167)..(167): n is a, c, g, or t
  misc_feature (177)..(177): n is a, c, g, or t
tctacatgatctctgagagacgtgttgcatgtcattaaggagagaaggagagaagtaagccgagggcgtctttgattgtgtagatancgggtggaangtgattttatcngaatgggaggtgattcctagggggttgtttgcatccctgtttcgtgcaagaataggangtggagtgcngctagggctgcaataatgaagggcatcatcaagtgaaaggtaagagaatcgtgtgagggtgggactgtccgttgatttacatcctcagattcattgcaacacggtctctca

SEQ ID NO: 706263 - DNA, 474 bp, Homo sapiens
gaaaaggaaagatagccaggaaaagtacattaaataaaagtaaggtttgttatgtaaacttgcctttctcattgtaaaagtttctcatggtttagatacggagaggaaggtgcccttgcaaatggaggttttctttacagatagaaatttctttcacaaagagcttttaaagagccagtgaaatgccataaatatgtactttggagacggatttagttgaataggtggcttttaaaattagtttcaatttcttaactgggtcattgatttcagggcaacatccattaacgaatagggccaaatcaactcataactctcaggactccatgagaaagaaaggcggccccaaaagggggtcactggtgtcaggcctctgagcccaagccaagccattgcatcccctgtgacttgcacgtataagcccagatggcctgaagtaactgaagaatcacaaaagaagtgaatatgccctgc

SEQ ID NO: 706264 - DNA, 435 bp, Homo sapiens
cttgatgttggtgtcctttggttgaggccattgagtggatgtgctattcctttctgcttgttagttttccttctaacagtcaggcctctctgctgcaggtctgctggagtttgctggaggtccactcctgaccctgtttccctgggtatcaccagtggaggctgcaaaacagcaaagaatgctgcctgttctttcctctggaagctccgtccgagtagggcacctgccagatgcctgcaaaagctctcccatacgaggtgtctgtcagcccctactgggaggtgtctcccagtcaggatacatgggggtcagggaccacttgaggaggcagtcttacccttagcagagctcgaatgctgtgctaggaggtcagcttgtctcttcagagtggtcaggctgggacgtttaagtctactgaattgcacccacagctgc

SEQ ID NO: 706265 - DNA, 267 bp, Homo sapiens
gtcgctcccaatgggctgggtctgtgtttctccagatcctgcgtctccactcgctccttcccagagtctctgaggtctctgctcccggggcttgggaccatgcttgtccttggctgagacgaccacataaacgtgcctggcctactttcagggagcctccctgaattcccagcttcgagtataaaatatattaaacaaacatgatcatacatgagtggcggagcacgtgagggggcgcgccattcaaacgcctccggtccattcaac

SEQ ID NO: 706266 - DNA, 456 bp, Homo sapiens
cccttgcgagtctcatactcttatatgccaacggattaaaagggtcaacataaaaaaaaagacattaggataataaatagtgctacttggggctagtaataaataaaaagtatattaacaaggaatgcacttacccagccacaagtatcttcaaacattaatgacaaacaattatatatggccatagttcacagatacgcagccaaaagctgctccactaacagccttaaacaacatgggagcttcctacccttctccctccccttcaggaagtaatattcacagttccaaagtcctctggatgaaatgctctcaacagagagaattaaagaatcaatgcacctttctgcaaaatggtctgacaaacctttaaaaaaaggtatctcaaggaaaactgcatacaggaacactctatggatagtccaaagtccagaactgtatgccttagcctgttac

SEQ ID NO: 706267 - DNA, 329 bp, Homo sapiens
  misc_feature (68)..(68): n is a, c, g, or t
cacgagcaggcgctgctgctgtcggcagagtcttccaggtctgccagagaggcccccgtcactgtgcngaggctgctccaggcgccggagtaatgcaccttctactcccaccacccccaggcgctggcagcgctgacctccgcaggctccaaagcatcatcgtctgcagtgtctttgaacacactgtccgggtggatcgaggcctcctagggcggcggagcggtcctcggcctggccgatgtctgggtacttgtatgccgtgcacgggcacgcgtggagggtcgctgcacctggaaagtcccaccctctccgtcgtcagaaagatgctg

SEQ ID NO: 706268 - DNA, 429 bp, Homo sapiens
acctatgctgccctttatttctttttatgagagggagtcttgctctggagtgcaagctgggctggagtgcagtagcatgatctatggcccactgttaacctccacctcccgggttcaaacaattctcccgcttcagcctcctaaagcagctgagattacaggcacatgccaccatgcctggctaacttttgcatttttagtacagacggggtttccccatgttgaccaggctggtctcgaactcctggtctcaagtgatccgcctgccttggcctcccaaagtgccgggattatagccgtgagccactgcacgatgatgggaaatttctttatggcgagtttgtatatactcaggatgtagggaaagttagagtcctatttatagggtttctggctggccttgggggaaaggtgctttggttttcggga

SEQ ID NO: 706269 - DNA, 169 bp, Homo sapiens
gctcggtaccactaataatatgtgaagcttattcaagtgtccagtcttcagcacttcccatcctttggaaactcctatctgcctccctcccaaaagggctgtttcttttattaaaaaaaaaaagaaatagaattaaatttgagaaaaggagaaaccctggggaaaagta

SEQ ID NO: 706270 - DNA, 128 bp, Homo sapiens
agctctagaggaccccaagcagttacacagactctaacaaatcaacagatatactagtggaaaacacaatataaaactacaatgccattgtctcctttaattggttaaaagcaaaaatgtaacaggca

SEQ ID NO: 706271 - DNA, 294 bp, Homo sapiens
cttgtgaaacctgttcggactgtaacgtgacagtattacgttggcggactgaacgcagactagtgacggacacgttgacgccaataatgccgtgcagtccgtggaagcctgtggctacaaaacaatgttgagccgtcgactgccgtcggaaactggtgaccgggcgactcgaccgtcctctgacggcttgtaggacgggtaaacactacgacgacccccgtaaaacttgtaactacacgcacgtgcttgaccttacttttggtttccggtctgttctcctacttacgacctact

SEQ ID NO: 706272 - DNA, 371 bp, Homo sapiens
ggaaatttctccctggccctgcaaagactcccccacacccacccacatctccagcatctccttttttcatctcaagctatgccattaacactttggtctctttctgttccctaggagtaagatccctttcctttctgctacagagtctttgcacacactgccgtctcagcctggaaagcactcagcactgttctaatttgtcatttatttgtatgattattcaattaatatatgcttcctcacattatattgtaagagtttggagggcaggtgtatctctggtgcctagtacagcgcctggcacatagcagatggtcaatacatatttattgaattgatgactgaataaatgaatgaatgagtcacaaaaa

SEQ ID NO: 706273 - DNA, 325 bp, Homo sapiens
attcatggatcttcataattgctagcagaaatatctgatcgcctcttatctaggtctctatgcttaggtctcacacaatttaaatccagtcctcttaaatatgatgccatgggataaaaaaaaaaaacccttcctaacttttttttttggggtgccttacccttggctggaaaattaacgggaggcctcttggcatttggcttctaaaacccttaatttttcttttcccacaaccttgattttccaagccctaacttccatggccacaccccttttctctctcaaaaattatttatgcgcagtcttacaggtataacatgccctt

SEQ ID NO: 706274 - DNA, 392 bp, Homo sapiens
cagtgcgggggaaaccacggtagcgggagggaaagaggtaagggacaaaatcccatactagtacaaaggcacagtccgaatgctgcagtgatgacagtgatgatcacgtatgcagaacactacgcactgacacaggtacagttctagcagcttcgacatcattagctcgtatcagccccagaagccctatgggtaaggcatcatcatagcctccttctatcgatgaggctcagaggcccagaaccactaagcaagtttctatcagtgccttgcggcccagccacgggaacactcccctaaacactgcacccgctgtttaaccagatccaaactcacgcgcccgagtcagaccctgactcaccgctcttagctcactaggacacttatgcatc

SEQ ID NO: 706275 - DNA, 357 bp, Homo sapiens
aggcctaccccccaaaccccttggacatcctcctcccccccgggtgcaaaggccaaaggcccccagcccaggggtcctgcacttacttgtttttttgacaacgtttcaacgactccgttggcccctcccaaaggtgggccagtttgtggatcaaaaatgccccccccaaccaagggaacctgtgtccggtatttgatactgcgcctttttgcctggagggtatgactgcccattactcgggggtggggaaaggggtcggctgcccctgctctttttttggtccgtggggcggggccccaaccaaaggctgggttcttttttgtaacccccataaacgggccttgtcctttcgggcca

SEQ ID NO: 706276 - DNA, 125 bp, Homo sapiens
atcaggtggtagaaatcctttagtatatgttactttgtcattagaaaaaataaatcatttttcttccacaaaagactgtgtgtgtgaaacttgggatcctttgaaggaactgattctgaacttag

SEQ ID NO: 706277 - DNA, 1224 bp, Homo sapiens
cacgcgtccggtggagcagcctctaggacgagctggaggattgcgcctactgacccagcgtctcggagcctctgcgggccgccagtacaatccacgtccatccgcttggaaatggacttcgtcccggcccgcgaccgctcccggcggacagtgcagaccccatagaagcccccgaggctcccctttctcgggccccgcccagtcctcggtgtctgtccacccctctactccgccctcaagaggatttcaaagatggaggctggcggctctctgaaaccccttttgggtgctcatccgcctccatcggaggtctgacggggctctcgtgaccccccggcgaccgcggcgggaagaggggacccctgtccaccggcggcaggccgaattgacgacggtgtccagtatacggggactgccgggtttgcagactgcggttctccttgtggctcgccggccggcagaggccgccgccattttcctgctgtcgccgcctgcggagcgtgcaaagctgccgggagttgcggggagggacggcgcagggagacaggagatcccgccgggatcacgcaacgaggcatgacgcctgggaggggccaggggcagcggccataccccaccatatcacgggtgatgctgggaccaggacgatgaaggagaagccgaggctaccccggactttcaccgcagcttgagcggaaggcggatccctgagggtcaagatggctgcaaaacggtgactccccgaaaggctccctggtgtgaacacgacatggcagggtaacagggcgactggcacccaggagcacggagacacagtggcagacagtgcatcgagacagccatcaacacggcaggaacaggaaggacattagaaaaaccccacacaaggggctctgggacccagcattatgacgtggggcccgtgacagacacacacacccggaagcgtgtcaaatcacaaaataacgatgagtggggtaacaaaccagtggagaccgtccaagacggatgaaaaagatgtgtgaggaggaacgtagtggtagatagtaggacggtggctagaaagagacgagcaacatcacaatgaagcgcggagggcagctaacagagacaacgattgagtcagtcaggcggacgattcaccgacggaaggaaccgacgagtgcgcacgtcagccaatgcgctctcacgcccgcgctctctcccttctcgatcgcatcaaac

SEQ ID NO: 706278 - DNA, 377 bp, Homo sapiens
actaccaaaccataaaccattagaaaccacaaatcagccaaggctggatgtggtggctcacgcctgtaatttcagtacttgtgggaggctgaggcaggtggatcacctgaggtcaggagtttgaaaccagcctggccaacatgatgaaactccgtctctactaaaaatacaaaattagctggatgtggtggcacacgcctgtagtcccagctactcgggaggctgagacaggagaatcgcttgaacccggcaggcggaggttgcagtgagcctgagatcacccctttgcactccagcctgggcgacagaacgagactctgtctcaaaaaaccacaatgttgaacctcatacacctagggaagaaaatctcaaactga

SEQ ID NO: 706279 - DNA, 111 bp, Homo sapiens
ccaaacccatgccaccttaccaccagacaaccttgagccaaaccattcaccaaagaagtaaggcgttagaagtttgaaacctagcgcaattagtcataggaccccaaggga

SEQ ID NO: 706280 - DNA, 247 bp, Homo sapiens
  misc_feature (13)..(13): n is a, c, g, or t
ggggggggattcntgccccaccttaactgagtgattaaccctgtgaattgttctcctggctcagaagctccccaactgagcaccttgtgacccccacccctgcccaccagagaacaacccccttttactgtaattttcctttaccaacccaaatcctataaaatggccccaccccatctcccttcgctgactctctttttggactcagcccgcctgcacccaggtgaaataaacagccatgttgctc

SEQ ID NO: 706281 - DNA, 265 bp, Homo sapiens
tgtgtataccacacctggctaatttttattttgtagagatggaggtcttgctctgttgcccaggctggtatcgaactccctggctcaagaaattctcctgtctacggctccttcatgtgctgggattacaggtataagccaacacacccgggcctcaacctttgtgtatacagttgttgctcagtatgtgcaggatactgtttctaggatgctgtgaggataccaaaatctcagaagctcaaagtcccctaaccacgacacagtg

SEQ ID NO: 706282 - DNA, 982 bp, Homo sapiens
tgggacaaaaggtttttttccccaaaaccaaaccccctgtgtgggtttaaaaaaaagggggtttggcccccaagggtccctgtgtgtgtgtgtgtgtgtggcacaaaagagatttccccgcctcttctcatcacacaaggagggaggcgggggggcggcggtcatactatgggggaaaaaaatgagggattacaccaagaagctgcgccgctagacccttctaagaaggaggggggagacattcgcgcaagaaagtatagacagcgcggctgcttggagcgggagcacctcagtcggcccagcggtggcgaccacaaagggagtcgcacccagggagacacccctgctggtggagaatcgaggtgtacccacgagagagcatggcggggggacaaagagagagagggggtggtccgacaccctggcgggaagagtaaaggagagggtgttccacagtagtaaacccacagctcagtatgagagagggcgcacacatatctgtgtcgtgggaaacactactgtggcagtgtgtgctggcctcggagacaccggggggtgggcgaaacaaccccacggcaggatcaccacgaagtagtatgcgccgcggcggcaacacgacgagaaaagacacgacgacgtgggtgcgcaccaggggcgagcaaactataggtgcggagcagcacttcgggttggggatccaaccacacacaacaaagagcaccagtgggtggtgttcctccagagaggacaccgcctgtggaactatagaagaaaaaaaaggccgcgccaggagagaggaggttattaacggccccaaatgtaggcggcgatcaaataatacgtcgtaggagaaaaacagcggcggcggcacaacagggggaaattcctcgccgaggggacaaatggtccagccacgcaaatttattagggggggggggacaaagccacacatcttggcaaaacttatctccccgttgggtag

SEQ ID NO: 706283 - DNA, 265 bp, Homo sapiens
cagaggatcccccgacgtgtgcctgaaatctcctgctgaggcaggagaatcacttgaatccaggaggcagtatctcccacctcagcctcctgtagtagctggtattacaggcatgttccatcatgcctggctaattttttggttgtttgtagggacggggtctccctgtgttgtccaggcctgtctcaaactcttgggctgaggcagtcttcccatctcagcctcctgagtagctgggactataggcacacaccatcatgcccac

SEQ ID NO: 706284 - DNA, 207 bp, Homo sapiens
agaagcaagcatatgctgacggagaatgttttcatgttacttatactaacattagttctactatagggtggtcagtatagataggtcagtatagataggtcagtatagggtcagtatagataggtcagtatagataagtcagtatagatagcgtcagtatagataagtagtatagataggtcagtatagatggcgtcagtatagata

SEQ ID NO: 706285 - DNA, 569 bp, Homo sapiens
tgtgcatcgcaccgtgctgtacatgtgcagacgcagcctgcagccaggtttttatttaatgtaaatagtttctgtttccactgaggcagtttctggtagtcctatgcaatattacttagcttttttattgtaaaaagagaatcaactcaactgtcagtactgagaagggatttgggtgtaggggcacctggcctccgggagccattgggctgtagactggtgtcggtatccatttggtggttggtttttaacccaaactcagtgcattttttaaaaatagttaaaaatacaggacaagaacacttgaacacacagaacggagactatgcctagtgtaggttttgcagttaatggcctgaatgctagttatcagatcacctgtttcgctgtgggaacaggagagaaggtgatgaacaaaccaccatccgctgcatggtcacagtagagcccccgtgactcgcctgtctttgggtcacctgcattccatagcattgtgcttgtacttgtgctcacacggttacctagggtaggctgggagccattgtggggtgcagggcctggcttgtact

SEQ ID NO: 706286 - DNA, 104 bp, Homo sapiens
ttcaaatcaaaaataaaaattatttcccttttgttaaagaacttacagggtcagggttttccttgtcacttagaattggggccctgccaggcaatcctttccca

SEQ ID NO: 706287 - DNA, 323 bp, Homo sapiens
tttaagaccagccgggacaacagtgctgaaacccggtcttaacaaaaaaatacaaaaattattcaggcgtggtggcacatgttggtggtcccagctactggggaggctgacactaggggtgctgagctgacatacagaactattcagctttataaaaatgtgaaaaacataccgctaagtcacggacattccacagaacaaatcataatagaaatgaaaaaacagccgggcacaggggctcaggcctgtaatcccagcacttggagaggccgaggggggcagatcacgaggtcaggagatccagaccatccgggccaacacgg

SEQ ID NO: 706288 - DNA, 187 bp, Homo sapiens
  misc_feature (168)..(168): n is a, c, g, or t
ctgcatcggagtatatgaaaccatgaccgagcgtcgtttcggttatgaaaacttcaatgatgtaaggcgatctgggcgtgaaaggcgacgaacgccgtaacgtaaaagaacgtgatgtggaacctcgcatcccatatctgcaaaccacgttggaacctggacatcgcngctgagacgctgagatgcc

SEQ ID NO: 706289 - DNA, 520 bp, Homo sapiens
  misc_feature (1)..(1): n is a, c, g, or t
  misc_feature (74)..(74): n is a, c, g, or t
  misc_feature (94)..(94): n is a, c, g, or t
  misc_feature (120)..(120): n is a, c, g, or t
  misc_feature (132)..(132): n is a, c, g, or t
  misc_feature (150)..(150): n is a, c, g, or t
  misc_feature (175)..(175): n is a, c, g, or t
  misc_feature (182)..(182): n is a, c, g, or t
  misc_feature (216)..(216): n is a, c, g, or t
  misc_feature (219)..(219): n is a, c, g, or t
  misc_feature (306)..(306): n is a, c, g, or t
  misc_feature (354)..(354): n is a, c, g, or t
  misc_feature (369)..(369): n is a, c, g, or t
  misc_feature (371)..(371): n is a, c, g, or t
  misc_feature (394)..(394): n is a, c, g, or t
  misc_feature (397)..(398): n is a, c, g, or t
  misc_feature (439)..(439): n is a, c, g, or t
  misc_feature (455)..(455): n is a, c, g, or t
  misc_feature (470)..(470): n is a, c, g, or t
  misc_feature (485)..(485): n is a, c, g, or t
  misc_feature (491)..(491): n is a, c, g, or t
  misc_feature (514)..(514): n is a, c, g, or t
nagagggcagctctgaactgctggctgggaccagctcagtaggaacagatgaaaggaagttttctgaggtagtnggctcgacgccagtagcttnctcgggtacacagggccacgcagtanccactgcgggancagggctggtgagcagcntagtacgcaaagttccagcggctgntgttaantcactgaaagtgtgtgcagcgacctgagcttgtnatnttgctttcaatccagacttgaccttggttgagcgcgctgatagaacattggatttgataattaatattgaagttgtggatggaaacnaggttgctcttgtagtaccttcggtaagtaaactaagtttgattaaangtttgaagatttttnancaggaggtagtggcaggtttggnacnnagggatgctcaccacttttattgtgttttcttcctcagganacgtaaggtttttgtncaccatatttggcantgagatagatttaanagctcnattttttttggagggattttcanttccag

SEQ ID NO: 706290 - DNA, 494 bp, Homo sapiens
tgcattatacgtactgatgtgaatgtatgaagcataaaggtgtgacttcatatcgaaaggctttctgcatctattgagataatcaagtggttttgtctttggttctgtttatgtgatggattacatttattgatttgcatttgttgagtgcatcccaggaatgaagccgacttgatcgtggtggataagcatcttgatgtgctgctggattcagatagccagtgttgtattgaggattatcgcattgatagttcattagggatatgggcctgaaatattctttttttgttgtgtctctgtcagattttggtatcaggatgatgctggcctcataaaatgagctagggaggagtccctctttaactatggtttggaatagtatcagaagaaatggtactagctcctctttgtacctctggtagaaattaggttgtgtctccatctggtcctgggctatgttatggttggtaggctatacactactgcctcaattt

SEQ ID NO: 706291 - DNA, 212 bp, Homo sapiens
gatacagtccgcaattactagacaaggccattcacagtggctcacacctataatcccagcactttgggaggccaaggcgggcagatcacttgaggtgaggagtttgagaccagcctgggcaacatagtaagaccccatctctacaaaaaagagaaagaaaaaaattagtggggtgtgatggtgtgtgcctgtgatccctgctacccaggagg

SEQ ID NO: 706292 - DNA, 714 bp, Homo sapiens
tactgaggaggctgaggcaggagaatagcttgaacctgggaggcggagattgcagtgagctgatgttgctccaatgcactccagcctggccacagagtaaggctctgtctcaaaaaaaaaacacaaaaactagccaggtgaggtggtgggtgtctgtaatcccagcacttttgggagaccgaggtgggtggatcacttgaggtcaggagttcgagttcgagaccagcctgaccaacatggtgaccccgtctctactaaaaaatacaaaaagctgggtgcggtggctcatgcctgtgatcctagcactttgggaggccaaggcaggtggattgcttgagctcaggagttcgagaccagcctgggcaacatggtgaaaccccatctctactaaaatacaaaaaaaaaattggccgggcatgatggcacactcctaccttagcctcctgagtagctgggattacaggcgtgcgccaccattcccagctaatgtcgtattttcagtagacacaggtgtttctcccatgtctggtcaggcgtgatctcaaaactcctgacctcaggtgaatacaggccgcctagcctccccacagtgttgggaattactggcgtgagggatcggggcccagcaagcatactggacttagctttgacctataccagtttttgagattaaggcagggaataactctcttctgaacagtctcgataacacat

SEQ ID NO: 706293 - DNA, 317 bp, Homo sapiens
acgctgcaccgccgttcaaagttaagaacgggaagaatgggtggcaaggtggctcctggaagagctcccccagcacaggtgccctgagctcggagccttggttactagtccctggggagatttatatttaataaatttttatataaatacccagagacatagacaatataaaatctgaggggttggggcagaagcgtgagggactcaagcaggaagccagagcttggagaggtcccattcagggccaaacttgacctcctccttgaacccctttggcttctgggttctcctccttgggttttctcctcttcggtgac

SEQ ID NO: 706294 - DNA, 1004 bp, Homo sapiens
gcactgccaaatatcccaaggaggggaatttttcccttgagtggcatctttcaaaagtgtgacgtgtgatagagtgttctttactcgggggaactgcgctgaaaaaatgcctaactctcgggaatttggaaggtgtcggaagttaccaacccaaacccaggggccagcgaaatctccgttttctttagcccccccccgggaccaccagaaatgtgtccttgggggagaaaggcccggccgggatttccggggacttgcactgctggtgagttcccagaaagaaggttttgggcttttccccagagggcgccattgtagagcctttaatatctcgataaaaggtgggcccacataaagaaggttcttgttgtgcccatttgccccacaggcaaagttcttctgcggttacccaaactgcctaaggaagggcttttgctgtgtgcggaaggggcctcgcttattggttgttgcttccggtttcatacaatgggaagagattggggccccaaaggcttgcagaaggtttgttggtttttggggagaaactcccgagggaacacagagggctaaatagccctagaagttttttggattggcctcgatgagttccaccacccggaagaccccttgttaactactaacgttgagacacactgctgtgcgccacacgtgttggctcaagaacacgggtgttctgggcaattcaaaggtgaaagaatcaatgctggccctgggaacccacaactggtaaagaattggccctaagaagcccctgcctgagccaacgtgaggcacattgtggagaaccccaaagaatgacgagtactgcccacccacacccccactttcagaaacacagaaagggtgggaaagccacagagagccgcctgccaagccccacagccacgtccccacagcataacagggtttccttggcagctgtattttggagtttggatgttgctttttaaagaccctttcaatcaaattttgtacaaagacca

SEQ ID NO: 706295 - DNA, 842 bp, Homo sapiens
  misc_feature (53)..(53): n is a, c, g, or t
  misc_feature (262)..(262): n is a, c, g, or t
  misc_feature (363)..(363): n is a, c, g, or t
  misc_feature (675)..(676): n is a, c, g, or t
  misc_feature (776)..(776): n is a, c, g, or t
  misc_feature (801)..(801): n is a, c, g, or t
ccaaatagtaactgcttcatccatcacagccaggtttaaacttgccatgaccnatcatttaaatttttctgtttctatctagtctatataatggcagttatgctgtacatgtactccaagctgcaggatttcataactggggcaaatgtggttggatttcatcccttactggtctcaaccaaaatattcctgtaggaatcatgacgataatcatagcagcacttttcacagcatcagcactcatctcactacttatgttcanaaaagtacatggactatatcgcacaacaagtgctacttttgataaagcccaacaggagtttgcaacaggtgtgatgtccaacaaaactgtacagaccgcanctgcaaatgcaccttcaacttgcagcatctactgcccctcagaatgctttcaaggataaccacatttaagaatcttcatacaatacactgttaccttttgactgtacctttttctccagttactgtattctacaaatatttttatgttcaaaacacacagtacagacagcatgaatatttcctgttcacttttgcctggcctaaaacccagaaaacttgcttgtcttattactttacctaatagtttcttaatttttcagtgccctttgtgtaaaatattacatgctaaataaatttctccatattaaaaanncattaaacagaaacccctataattcaattatttctaagcctataaagaacccagaagtctcataaaacaccaatagcctatcagcctacattctatattncaaagtctcaagtataactatagtncattagtgatttcttctcttcgctaactcattctcacttgt

SEQ ID NO: 706296 - DNA, 250 bp, Homo sapiens
  misc_feature (212)..(212): n is a, c, g, or t
gacgtatgtaggatcaccatacattggatatgcacccaagtactgggtattctaggcacaccggaagcactaaaaagaaaaacccagaaggagctggtgaatgaatagtgaagcgaagtccatcaaagtgggaatggagtaaaggcttaagtgcagtggtgtgatcatagctcactgtaacctcaaactcccgagctcagacaatgctcctngcctcagacgtagcaccaccaatacgcgcaggtaggca

SEQ ID NO: 706297 - DNA, 946 bp, Homo sapiens
actaccatgactcctacccctcacaatcatggcaagccaacgccacattatccagtgaaccacatatcacgaaacaaactctacctcatctatactaatctccctacaaatctccgttaacttataaccattccaccgcccaccagcacactaatccatcatttccatatcattctatcgaacaaccaccactataatcccccacctctggctatccatcgacccgcatgcaggcaacccagcccagcacacagcctgaaacgccaggcacaatacattccgtattgtactcacacaccatagctaggcctcccattcacaccatacatcactcgcgactcgcattgtaacagcgtcaccacacccaccacctagcgactcacataacaccatgccctcactcactcacactactacaaatagccgcgacagcaacctcaatccaacaatccttcgcagccccaaccacaactctccctccatgcactccagctctcacacccacagtcagcatatcttcatccagtcaccgaggcaatacaccctccctaaacacacagggacgctacaccacacactcagcggacccatcaccctacacaggaccacaacggcaccagacacaggcccacccgcacatcctggcccctgcgcagacacaaacagtacgaccacgcaagcgccaccgcaaagaaacaactccatatacacaacaaacacaagagccgccgacagtaagacgcggatcagtcacagcacaaagacaagcgacacaacactaaccaaaacacctccaaacccacccccacatgcacacaaaaccacaccagcacatacggcccccacacacacaccctatccactaggcacccacacaaagccccacaacagaacggacaaacaacgccactaacaccacgacatcccatccccggccaccagcagc

SEQ ID NO: 706298 - DNA, 226 bp, Homo sapiens
cacctatgtgtaaaagagacagactgccttggtgtgtgacaatggctctggtgctctgtaatggccggctttgcgggggacgattgctcgcagggcgtgttatcccatccattgtggcgacgtcccaaacttcaggcgttgatggtgggaatgggacaacaagacagctacgtgggtgacgaagcacagagcaaaagaggaatcctgaccctgaagatgttggtgg

SEQ ID NO: 706299 - DNA, 807 bp, Homo sapiens
gttcaccaggacaaatacaggttctatggttgttacccagcctggggaggagccttcagtcggcctggatgtcagcccaaagcatgtgctgtcagagaggtctgtgctgcagtgtggtctgacggtagctaggatgacctggaagttcctccatgagaatgagtatgttcatggaaatgtgacagctgaaaatatcttaagtggatccagaggaacagagtacaggtgactatggcaggctataggctttcgccataccgatattgcccaagtggcaaacacgttagccataacgatggaaaggcagtaagggagacccatcaacaacagaggagaaccattgacgatacagttatgcaatgagacacgtacaacaatgaggatagcgaaggtcacctcccagcacgtcaagcgaaacctccatgaaagacctagagaactaaaatgcaaatagcaagaaaagaagagacacataaacgaaagaatatacaatgaacaaaagtgaaacaaaacgtttgcacgataaccacaaatcgaacatgacgggaacaatcaactagaagagacaaaattaaaataacgtgaagagttagtctaagaaaaacaagacaaggagaacaacatatagaagaacgacacccaagcagagacgaacagggaaacaagagaacccaaagaaaaaaacacaataacaaaaccaaaccaaacaaaaaagaaagaaaagaaacatcaaccgaaaaataaggcaacaaaacaacaaaaaccaacacaagaagaaaaaaacagcaagaaagaaaagaataaagc

SEQ ID NO: 706300 - DNA, 921 bp, Homo sapiens
gctggggcgctgctgtgtgcttgctgaccggggcctcccgcggcttcggcctgacgctggcccggtcctggcctcatgctgtctcccgggtccgtgcttgtccttagcgcccgcaaagagcgaggcactgcgccagctggaggccgagctgggcgccgcatcgtgtctgcgccgtgcgctgtggatgctggttgcccgccgactctgggcgccgagtgcgcggcttgcagcagcatgctcggcgccctgcgcgagctcccccggcgccaatgtggctgcaggcgactgctgcttatcaacaacgcggggtaagcaccccgtggctggagcggactccccatgtgagcgcccacgttcctaccaccgcttgggtgaatcttaagggctacgtcctaggggtcagataggacgcctagaaatctaaagccctagtttgttccagcttgagtagcaatgtggaggcgaggtgtacaggaagactcgggttgccgtcgggacacacaggtcttgaccccgacttctctggcaaacagttcggccgatgccggagtcctccaaaaagcgccttgtagaacttacccgatcgccttgatcttgggcccctctggcggcatgcctgagtcagggcttgaagtctccaaaggaagtaaactctctgcttcgtccaaaggaccggtcagagcattaacgttcaggcccaaggacaagggaggtgccttctcaattctggcagctttgggcatgagctgaagttacccccagactgttgactattaccggaagcaggcaagcggaaatgcagatgaaagccatcttgaaagaaaagagccatatggcgagcgtcacacaccgtctaagggtactgacatgggagagcagggaaaatggggaggcaagtaggaagggcttggcgcaaaataa

SEQ ID NO: 706301 - DNA, 1055 bp, Homo sapiens
  misc_feature (1055)..(1055): n is a, c, g, or t
aaaggctggtgggagattcagagtccactggtgctttcgatttgacttaagtgaagtatcttggagcctagagccagagcttcgctaagacccacaaagactgcagttctgaatcttatcttggcttgtggatcttacaaggagaatcactaatcacagacgagattcagtgattgatccaggtgtttggacgatggactggttgagcccatccctattaataataagatgtcttctgagcaaccgggagctggtggttgacgtattctcgtccattacaaggcttgtcccagaagaggtagtacgaagctggagtcaggtaattattgaatgatggtaagagaacatggacatgcggcccctagaaggggacctgtaaatcgatgatggagagccccagtgccatgaatggtgtacccatcctggctcctggcagacatccccggggtgagttggagccacgtggttcaccagcaatgaggtttggatgcccgggaggtgatctccatggcagcagtaaagcaagcgctggaggcaggcaggctgacgatgttggtaactgcgtgtaccgccgggtcgtcagatgacctgacatcccagcatccacgatcacccaggacagatatatcagagcttgaacaggtaagtgagtggagctcttccgggatggggtaaactggggtcgcatgggtgtcctttttctcctcgggtggggcactgtgcgtgaacgcgtctgacgaaggagatgcaccgtagtggtggaatcgggatcggcgtggattgggccctacctggagttgtcaccttagagcgctggtcccggcgaagggagggggaacctttggggacactttgcgaaaaggggacactctgctcaattgccggagtcaccgcgttaccagagagaaatgcagcgcgtgcgctgcgagcaaaagcacagtataaagcacatatacaccctttatgcactcatcacgtcaaaaaatccacactctatgggtaccacaaaaaaatgaaacaccaatagagatgtgcgtctgacttgcaatcttggn

SEQ ID NO: 706302 - DNA, 160 bp, Homo sapiens
cttacagtggtgggggagcgagaggactgggtgagtgttccctccttgggtgtgggagcctccttggtctgaaggagccagatcactctcattggtctcgctgcctgtttcttgagccccgctgccggcgccgcttggggatttcctcatactctgtaac

SEQ ID NO: 706303 - DNA, 119 bp, Homo sapiens
cgactccgggtctcgcgggccgcatacggtacagtgccccaaacacttggccagcatgcaggggctgcccattccatgctgggacttcaggccacacggtacgcagctgaggccgccca

SEQ ID NO: 706304 - DNA, 269 bp, Homo sapiens
catcatcacactcagctatttttgtattttttgtagagatggggtctcgccatgtttgtccaggctggtctcgaactcctgggctcagcaatcctcctccctcagcctcttaaagcgccgggattataggcatgcgccaccacgcccaactttgttttaatgttcgttgtgacagaagcagtaaaatggttgtgcatctctgtaggtctcaatacaaccatatccattttaatgctaccctccaaagagaaagacctgagcaagccagg

SEQ ID NO: 706305 - DNA, 242 bp, Homo sapiens
catgtgtttgtgtctgtatgtgtgtaaccatcctcaagagtgtaaagtcatatctcattgtggttttgatttgcattttcctaatgatgactagtggtgatgaacatcatttcttgtgcttattgttcatttgtatatctttggagtaatgtctgttttgagttttttgattttttttaactgggttttttgtctttctgttgttgaattttaggagtatgatattaaactgtatgtgatac

SEQ ID NO: 706306 - DNA, 436 bp, Homo sapiens
  misc_feature (251)..(251): n is a, c, g, or t
tggtggggaaggtccaaaacaaaaaaaagttttttttttttttttgtcgccgggccaaaaaaaaaaaaataaatttccctttttgcttctctcaaaagaggggggggggtttttttttttcctctttttaaaaaaaaaaaacccctggagcagtggggaggcttacgcaataaaaccccaggacttggggggcccaagccaagaggtatccctttggaggccaagagtttgagacccagcctgggcaaaantggggtgacccccatctctacaaaaaataaaaatatttgccgggcatggtggtatgcatcttgaagtcccagctaatttggaggttgaggtgggaatatcatttgagcccaggagttcaaggctgcggtgagctatgatcacaccactgcactccagcctcggtgatagagcaagaccttgtatc

SEQ ID NO: 706307 - DNA, 264 bp, Homo sapiens
ttgggcagccacctttggccagcagcactgcgatgcacttgctgaccgcccatcatgatatgtctgtacccgccccagcgaaatggtgctctcctgcagctgtttccaggaagtcatagatatgtcctgtatcaaaaaaactggttgtccattctcttcaaagagcttgctctgccagggccataaacaaataagaaaggctcaggactaataaaaggctcgctatttgtctgagacaatcagcccagacctgagcaagccagg

SEQ ID NO: 706308 - DNA, 1090 bp, Homo sapiens
ccccttgctgactactgtgtcaacagctggaagcgaacttggacggggaaggactttactgtctgacaccctgaggaatgcctggaacttccagaggatggaggaggatacaaatacgcatggataggatggaatagcatgccgagttgtgactagaccgtcgtggctgacatagtctatggatagggatagtattggggacgcaagatagcgttgcagaatggcgtgcgatatgtgctcgacaacgcgacttgtggtaggacatcgtcgcatgactggtatttggtcatcatacgcatgcatttatggttctgcatgcatcacacatcatgtaggtagaagataatcctgtataagcctcaaaagccctctaagagaacaagcttcacatgaactgcggggttatccatgaggaacgccgaaaatgacaacgagccctggataaataaaaccgctgaacacaatttcgcacttagttagaggagccgtgtatgggtccaaatggagcatgaggcattgactactaatcgaacatacgctactgttgagccggactctgtgtctcactactctgtcgtttgaaatgaatatcgtgtccctcctgtatctgtctggggcatatctatgatcttggaacgatccccctagaataccattgtctaatctagggactccgagcaggggattgagtcatgaccttgggctctggcgatattcgaatgaacccagtgatccctacatggtcttgtactgtatttacctacctagggtggacgtggctacaccgggaatgggataacgtgtcaccaacccgcattgtaagggaagaatgaaacgcatgagcagtcacgcgcgatggatcgtaagttccgtgaacctaactctcttggcttgagggggcaatgactaaaaccctggtttcaggtacttctaacaaattccctctgcagtaatatattttggcccccggggtgttggaactgttatttagaggttctcatctgaaaaagtgctggtgttggcccttaaaatagaactttaagcgggggaggacttcccctttctgttcttactccatggattgcgtgca

SEQ ID NO: 706309 - DNA, 86 bp, Homo sapiens
  misc_feature (1)..(1): n is a, c, g, or t
ntccttcatctacctaaccacaggaacttgatctaggaaaagtcaagagaagagagcagaaagcaggctcttgctgcctaaaagag

SEQ ID NO: 706310 - DNA, 205 bp, Homo sapiens
  misc_feature (37)..(37): n is a, c, g, or t
aaggccagggttgtagaaaacatccccacatggcccnccagtggagacctgtagggaagattgtacttgcgaagcctcgaaatcaggcaccctggcttgccaatatgcttgtctattgtcttaatagtcagcctcaggattctgtcatctaacttacacaacttcattctctccaggctggttcttccacttttaaaatcataat

SEQ ID NO: 706311 - DNA, 831 bp, Homo sapiens
  misc_feature (687)..(687): n is a, c, g, or t
gtttcaccgtgaggacctgctggagtggctgcggctgtctgtgctgatgacgcctgttgcggtgcgttcccgattcacgtgctgcagattgggggcaatcatttgcacctgcactgaggaggacagtagagctcctcgtgttctttagcaagtgaagccattctcgagatagccctccatggtcgcccaatgagacaagcgtagacgatagcgtgacatttgatgaattgaggagaaccggtacatgtcatattcatggaacgtccgtggtaatctagatctacgcgacgaggcttgaagtttcacgcagcgttggttatacttttatgcgaagcattgtgctacctatgaaaagtgaatatgtcataaccaactaatccagtgggtgagactatgctacaggtgatgctagagccagatgtagcgatggagaatcaaggaaggagttggggaactgaaggttttgaaccatgtgtcgtctcgtttgtgttataacagcgcagatgcagagtgctgcctgctgagggtgtgaacggagctgtgttctgctgctgcttacatccagtctcctcctgcttccatccgtctagaaacttctccctcgagagcgccgagatgagcatctgcacgagatggcactggagcaatgtcacggcaggcagctaccggtgaattgattccacatgngtgagcaatgaacttctgtccgctgtcctgtgatgccaagctgtggtgaagtgtgttgcagtcccttctatccacgtattgttgaccactcttggtagctcagcaggggctgggatccgaggacctgggaaaacctggggagcc

SEQ ID NO: 706312 - DNA, 1611 bp, Homo sapiens
taaaaaaaaaatttttttttggggcccccacatatggggcccgcgggccgtggccataaacccccccacaaaaaaaaaaaaaaaaaccacaaaatgggggggaaaaacaaaatttcggggggaggaagaaggggggcagaagacaaaaaacagggtaggggaaatccgaaagaaccaccgcgggggtaggagggggtgtctctgcctcttagagggcctcctctctttgaggggctctctctccccacgcgaaatatactctctcctccctctctttgtcgggggaggggtgctgtctctcccctggagacgcgcgcggtgtgttctcctcacaaagagaagagagagtgtgctgcagagtgtgtgtgctcctctcacacacctgcggggggagacctctctccttctctggtgcgaagtgagacctctcgcgcgcgtgtgtgtgtgccacaccgagggagagagagagagagactctctctgcgacggcgcggtgagacacagtgtgggccgagagagaaacacagtgtggccccagcgaagagagagactcctcctgatgagagagagacacactctgcggaggagagagtgacggtgtgtgcgccacaacagtgcggcgcacaagagagaggaggcgagagagcgtgtcgctcactgcttttgtgaagaggcgcgccccaccaagtgtagtggtgtgcgtgtggttgtgaagtagacaccacgccattgtgtgttgtgtggttgtgatgagaccatacccgctgatgagaagagcagaatattttgttgtggggcggcgcccatcagatgattcctcctctccgcgaggaggagtgtatttttcttcttcactctcttcaccacatcttctaatataacacgcgtggtgggggcggggggcggtgatgaaaacacaccacaccgtggtgtgtttgtgttgtgtggctgggcgtcgcctcacgagataatacaatcatatcattaaaaaacggccgtcgcggtgtgttttatagaacgccccgcggtgggtcgtcggcagatgcggcgggtggtagtcctctcttggtggaatacatcacacccacaatttctttgtggttggcgtcgtgaccatgacgtgagaaaacacacacaaccccctccctcctgtttatttttcctctatcacctccccaacacacgacgaaggtggaaccacaagaaggagcacaaactctccttctgcttaacaaataagagtgctgtcccgccactatataaatttctttgtttgtctccccacacccgacacacaaagacatgattgtgcgttgttgcttctacctaggagaagcagcgcacgtgggttcgtgctgataataaagcgagtactcaactacccactaggactgggcgagcgaggctgggcgggggacgccgactcacatctattctaattgaccgaccccacacacccatacatagtataggtcggctcgcggtcgccaccacacaaactggcggtgcgaccaccacctgtggtgtgtggagcaaaacacacacgcagccgcatctgtcttatataacgaccggcggtcgacgacaaaacccataactcgtttgatgcag

SEQ ID NO: 706313 - DNA, 138 bp, Homo sapiens
tagagatcgactctgaggatccccctggggactccttattgcatatacttccaaagcatccgccatctggttctaggaagggcctataagatatttaggagaaggaagtcattatcattccatcttcaaagcaaaagg

SEQ ID NO: 706314 - DNA, 174 bp, Homo sapiens
ccagtgctaacattaggtaattaaacccatcgcgaaaaaaaatggaaaaaaagttcggtccggcttcgaccccgacgcagaaaataaacagcataaagccaagattaagcgcatcggtgttaatgctgaaatgttgttggcctaataacagcgatacgactaaaacggcaatgg

SEQ ID NO: 706315 - DNA, 246 bp, Homo sapiens
ttacatgggcacagaaatcagtacctgcttacacagcatctggttcggctcgagcatgagaggatcatagagagatgcgtgatatgagtcgtgaattctctttgcaaattctctattctaactctggagcccaagtgccagggtggagtctttgttctcccactttctagttagctgtccttcagcaagttacttaatttctgggcctcaatttcctcatctgcaaatatctagtgcccatttcaa

SEQ ID NO: 706316 - DNA, 95 bp, Homo sapiens
cccaaaaaaaggaggtggaggcacccaaaaatttcaggagccagtttcctttcctggtttttttccttccttcctttgaatttaaagaggggtaa

SEQ ID NO: 706317 - DNA, 474 bp, Homo sapiens
cagttgttacattgatatagattttcaaccagaaagataagatagtgctgggagaataaaaaagatagggtatcttccaacctcactgactataaatcttgtggaatacagcactactaaactaaaaacacacgtcaaaaagaacaattcactaatcccagtgggatgctcaaaaatcgtctttagcaaggttacaggattggctaatactgctattatcttattggctgcggcaaaacaagaacacagagctgctgtctaaaatatctaccaaactcccctccgagttcagcaggcaacaactcagatttgaaagaaactctgcagcaccctggcacatatggttagctgagtcgacatatgattagcaggcatttcaaactgatttcctcttaacatacgcaggagagacaacataaacttcctgcagggcatgtactactacatcatatctctgactcccttcttcctata

SEQ ID NO: 706318 - DNA, 141 bp, Homo sapiens
gttggtctatgagcgcagtagaagtatgcggatagaatgctgtttcctcggtttcgttgagtatatgaaccttgtattagacttatgcacaatagattcattctaacacaaagtcaagatcccacaaggttcttgcgttga

SEQ ID NO: 706319 - DNA, 427 bp, Homo sapiens
  misc_feature (417)..(417): n is a, c, g, or t
  misc_feature (426)..(426): n is a, c, g, or t
caaggacctccaacaactcaatgaaaaaaacacaaataaactccattataaagtgggcgaaggtcacgaatagacatttttcaaaagaagacatggatgtggtcaaaaagcacatgaaaaaatgcttaacatcactaatcatcagagaaaggcatattaaaaccacaataagataccatcttacaccagtcagaatggctattactaatgagtcaaaagacagcagatgtcatcaaggaataaagagaaaagtaaccacttaaacattgttggtggggaatataaactagtacttctatgggaaaggcagtatcaaggtttcttcaaaggaactaggaacttaaaaatacccttttgatcccggcattcccaccacggggatatcttcccaagggggaaccaaattcgtttacattnaaagggcant

SEQ ID NO: 706320 - DNA, 261 bp, Homo sapiens
cggcacgtggtgttagtccacatagatgggtgattgtaacttcattgccagtaaaggatgtcaaattgcagtcatgcttctgtgtacacatagtgaaaaatgggcaaataatgaggatctctccttcagtttgctttgtttaattctgttgtgtgttgttctgtaatgctgcgtccctaattgtacacagtctagtgatatgtaggagtataaagttgtcgcccatcattaaaattcacaaagttggtttatgaaaaggca

SEQ ID NO: 706321 - DNA, 120 bp, Homo sapiens
atcttggatcctcaacccgctatctttgtttcttatctggtctaccacatagccttctaactagtattctagcatatccttcttatcctctttcacttcttatcttaactctatatctca

SEQ ID NO: 706322 - DNA, 239 bp, Homo sapiens
gaaacagagacttgctctgttgctcaggctggagtacagtggcccaatcttggctcgctgtaacctcggcctcctgggttcaagtgattctattgcctcagcctcccaaatagcttggattgcaggcgtgtgccaccatgtccagctagtttttgtgtttttggtggagaaggagtttcaccgtgttggacaggagtttaacaacaggcctggccaatgtggtgaaaccctgctctact

SEQ ID NO: 706323 - DNA, 239 bp, Homo sapiens
gcggtaatgttaaatagtcaaagggggtgttctctggtgggcaggggtgggcgggtcacaagtgtgctcagtgggggagcttctgagccaggagaaggaaattcgcagggttaatcactcagttaaggtggggcaggaacaaatcacaatagtggaatgtcatcagttaaggcggggcagggccttttcacttctcttgtgattcttcagttacttcaggccatctgggcgtatacgtg

SEQ ID NO: 706324 - DNA, 114 bp, Homo sapiens
atcagcataaataagtcccatctgaagtcgcaccccatcttcaccatccagaaacctgagtctacctctacaggaccctgggatttaactccgtctctgccttccatatactgc

SEQ ID NO: 706325 - DNA, 834 bp, Homo sapiens
gctccatcaacagtgcctataccaccaaaatactacctcctgagaatggaaggcgccctcccacgccaggtgggccattaagacggatgtgcgccctgctgggcttcgtcttggacctgaagcgggacttcctagccgcgtgcgcgagcatgatcccggtaagacaatgctttacaaacgtgtacaccttcaactcggtccgcaagtccatgagcacagtcatccgcatgcccgacgggtggcttccgcctcttcagcaatggtgggcctcatgagatcctcttgtaaaaagtgcagccaacagtcttgaagcagcacactggcgaactccggtggctttcggaactcgggaccggtgacgacatgtgtgaggacagatcactcgagtccgaatggcttgcgatggccgtcacgatacgcatctgcagtcaggccttaccgtggcacctttcgtcatgcagggccacgggagccctgatctggtgagcaacgcagaattgatggatcgcatggcgtgaccctcagccttgacataaacgtgtactgtgcggcactttgaaggaacccactttgtgccggacgccagagtgttcccccattgaaggctattccggaaacaattgcacacgcagttggcttggacattccacatagttccggccagttggctgaactaggtgggaacaacaccatccaaacagcggcacacggggaccactccgacagaaccaaaattggcgggcaatcagtccaggacccgagaggacggaacttacctggtgccctaagaaggggaaggaagtccaagccgtgtggattcctacacatgagaac

SEQ ID NO: 706326 - DNA, 577 bp, Homo sapiens
catggggtcgtataataactcctcttatgtaccacatatttagtaactctgtgtttctcgtctttcttatttcttgataacgccgtgtctctatagctgaataaatcgtatgatcttttaaagaactaacttttggttttgttttctctcttgattttttgttttcaatttcagtgatgtttgctctcatttttattttgttcttctgtttgctgtaggcttaaactgctctttctgtagtttactaaggtagaagcttagattattgactatagatatttcttcttttctattatatgcattcagtgatatacacttctggcttattactgctttcgctgcatcccacaaattttgataagttatattttcatttagtttaaaatattttaactgtaagagttgatttgccattttttggtctggcagttcttttaggcagtttttgcctcatattttgacatgctgttgttaggtgcatatatgataaggattgttatgtcttcttggagaattaacccctttgtcattatgaaatgacccactttatttctgataatttttttatgataccgcg

SEQ ID NO: 706327 - DNA, 728 bp, Homo sapiens
tccaaacaagggtttgaaacaactacgggaattttgtccacaataagctggaagttggtggtagtatgcctcaaatataactgacggtatactataggggtaacttttcaaacagcccttagcacttttatactattttaacccattggtgctttgagtttccttttaacaaatgcttgttgtgaaagacacagatacccagtatgcttaccgtgaaaagaaaagtgtgtcctgtttggtaaaggaacttcaagttattggtcgtaaatactgggacagaggttggctgaactttaaaaaaatattaatttcattattataaggacctaatttattactcctggaagattaacccattttttggtcttcagaatttcacaaagaacaagacacagggtgtcctacgctgttggcctcacagggaaaaacaagatttttatcagggacgcaatatttttatctttccaaacataatttgcgtctaatggaatacttttcccaacaacttacgactggaacttcagccggatatagtcataaccttctgggtggggagattaatcccattcctggcatcaaaaacggtctttttcacaaaaaacaaacttggtaagatgctggctttgggtttttccaatccaggcgcagtttttttgaacaatactaccgagggaatttagggacagggtggtacaattcttttaattattaatttcaccgcgattttg

SEQ ID NO: 706328 - DNA, 635 bp, Homo sapiens
ccgaggacgcagacctgattactgcgcgccctgcgagaatcagtatatcaccgccagcatgctgtaccgattgcacaaggacatgaggatcacgttactgatcgagtaactagctctggtccgtggctatgaatgaataaacgtgcattggtatgtttctagtaccctctgtaaagcatagccgactgatgatcatgccagagcatgatcagagacgtgtctatgagcgaacaagtttcatggcatcagttgatatcagttacaacaatgttcacgtgcatgtggtaacaagggccctagcatgtggacgctacattcgctagacagtacctgggcagctgtataaagtctggtcgcatggttactgagtatcagatctagatctgacgtaggccttgagactgcgcgctcaccgtactacctgctagtatagcatgcatcattgagcagactcgtccgagaattgcgagatgctgataaccgtcgaactgagagggctgaccagcatgcacaacttcatatggagcgtgcacgcccattgtatcatgtccatgaacacccccacacagctgagtcggttacaggtcacatacattaataagcccctcggtacgacatgttcttctaagcccccc

SEQ ID NO: 706329 - DNA, 203 bp, Homo sapiens
cctgatagagatgacgcccaggtcaaagaagaacgcagcctctgaaagctgggaaaggcaaggaaatggattcttccctgacagcctccagaagaaactgtgtccctgatcggttccttctgatgggttcttggtctcgctgacttcaagaatgaagccgcggaccctcgtgaaaacatcaatattctgaatggacatttctc

SEQ ID NO: 706330 - DNA, 83 bp, Homo sapiens
ctcttggggaaccgcacagtaacttccgcaacaagggtcggaggccaccgggttactgggggatacgcggcaccgataaactc

SEQ ID NO: 706331 - DNA, 280 bp, Homo sapiens
agaaaacgccgatgaccatgagtacctattcaggggcgcaggtcggacgttatgaaacccatatgagcatgtgctgagagtggaggatcagactgtgcaacacggagccggcgccctagattgggtgcaccaggaacaggggcctgtccgagctctgcacggagttgagccgtatcagggtggggccctacgggatcaccagcaggtagcgcaggttcagctgagtctgctgctggaccagaccattctccttgggcgtgggcatgccagctcgctggcc

SEQ ID NO: 706332 - DNA, 961 bp, Homo sapiens
gtctggcttttactatctttcttaagaaaaggaaagaaaaagagtcaatagaaaatttcaaaaaaaggggatgatactagccttaagagtgttaccgtgtcaagtgttagtggatatgggtcataaaaggggtatcttttaaaaatcagcaacagagacttaatttttaaatcttaagattgggtagaaagggtttctaggaataggactatttaaacaagtgattgtgaaacccagtggctgtggggttagacaatttgttctaattatttccatggagctcagattttggggaacttagggaattatcagagcaaagcaatcatggtagagtagccacaagtattgggagaacacgtggtctggtcttggttaccaaaaggttgggcacacaatttatttcaataccttttagatttcataaagggcagggtgatataatggcctacgggaaagactgtgcacactcctggacaattttctttcaagccaaggtgtcacaaaacacttttttgagccggtaaaatgctcggtgactagacttcaattggcgactaatatattctgcgtgttgccttttttttccccccatgtggtatattaatatgcgcgggggacaatgtgaacctatgcacatacacaactctggggacgagcgaccttggggagatatatccaaaatgcgtattcgccggcgaaaagtgccaggcacttaaacaaggacgatgtgttcccgaccatgacggagaagagctgagccggcgtttctagcaacggcttttcaccaatggggagcgcacacgcgctacacgatgagggctaaagtatccattaacgactcaggagtctcacccatagtaatactcagaagcgagggaaccggaccgtaccctcttctcgtcgtctcgctccgaacattaattacacttcagagagagtaaacagacacgagagcgaaatc

SEQ ID NO: 706333 - DNA, 340 bp, Homo sapiens
ccagcagtagcatccttcttgcctgtattcaaagaatagagccaagtggtgccgcagtcattcaattcaatggaatatgttgtgtctctggtagagccaatgtttggaaacccggacttatttaataggggcaagaaggcttttgaaagatacattgagaaaatgactcagattcttacaagtaaaagttggattttgcagtaagttaatagagccaagggttgtttcagtaggggagtacatacaattacatttttaaaaacattggccttgtgggagaataataacataaatgtgttttcagggttccccaaaccagaccaaaattttagtcgaatat

SEQ ID NO: 706334 - DNA, 115 bp, Homo sapiens
ccatcaccctctacatcaccggccccgaccttagctctcaccatcgctcttctactatgacccccctccccatacccaaccccctggcaaacctaaacctaggcctccaattaat

SEQ ID NO: 706335 - DNA, 584 bp, Homo sapiens
  misc_feature (63)..(63): n is a, c, g, or t
  misc_feature (76)..(76): n is a, c, g, or t
  misc_feature (163)..(163): n is a, c, g, or t
  misc_feature (179)..(179): n is a, c, g, or t
  misc_feature (288)..(288): n is a, c, g, or t
  misc_feature (417)..(417): n is a, c, g, or t
  misc_feature (527)..(527): n is a, c, g, or t
  misc_feature (542)..(542): n is a, c, g, or t
  misc_feature (545)..(545): n is a, c, g, or t
  misc_feature (553)..(553): n is a, c, g, or t
  misc_feature (556)..(556): n is a, c, g, or t
  misc_feature (559)..(559): n is a, c, g, or t
ggatggtctggccagtacggggaggagcctgtgcgagacccaactggtgctctacgctgacgnggaggagctgaanaggagtgtgggcgagctccccagcaccggggaatcactccagaaggtgcaggagcaggtgcacacgctgttcagtcaggaccaagcncagggcgcgcgtctgnctgctcaggactttctggacagactttcttctctagacaacctgaaagcctcagtcagccaagtggaggcggacttgaaaatgctcaggactgctgtggacagcttggntgcatactcggtcaaaatagaaaccaacgagaacaatctggaatcagccaagggtttactagatgacctgacgaatgatctggataggttgcttgtgaaagtggttaagattcacgaaaagggctcaangaattgcgtgtgcagggcgcggaattaaagtccaatttgtcatgaccaatgagtggttttttcccatgtgtcccctacccaccaattttttgtgccctcttaagcagatnttaccacctgaacancanggcattgnatnttnatgcccaggttacctatttactttt

SEQ ID NO: 706336 - DNA, 129 bp, Homo sapiens
gagcatgggaccgtgcgccccgaagtgcctctctctccttggttttcacctaggctcctcgcctgtgtcaggagatgacatcagcctctgtgttttgtggcttcccatactccagagtgtcatccccat

SEQ ID NO: 706337 - DNA, 101 bp, Homo sapiens
tttttttttttccccaacccttttcccttccggggtttttgggcccccccccccctttttgggggggggaatttcccaaaaagggggttttttttttccca

SEQ ID NO: 706338 - DNA, 552 bp, Homo sapiens
  misc_feature (63)..(63): n is a, c, g, or t
  misc_feature (76)..(76): n is a, c, g, or t
  misc_feature (163)..(163): n is a, c, g, or t
  misc_feature (179)..(179): n is a, c, g, or t
  misc_feature (288)..(288): n is a, c, g, or t
  misc_feature (417)..(417): n is a, c, g, or t
ggatggtctggccagtacggggaggagcctgtgcgagacccaactggtgctctacgctgacgnggaggagctgaanaggagtgtgggcgagctccccagcaccggggaatcactccagaaggtgcaggagcaggtgcacacgctgttcagtcaggaccaagcncagggcgcgcgtctgnctgctcaggactttctggacagactttcttctctagacaacctgaaagcctcagtcagccaagtggaggcggacttgaaaatgctcaggactgctgtggacagcttggntgcatactcggtcaaaatagaaaccaacgagaacaatctggaatcagccaagggtttactagatgacctgacgaatgatctggataggttgcttgtgaaagtggttaagattcacgaaaagggctcaangaattgcgtgtgccaggcgccgattgcccaatttttattgcccataaagggccaattgtaacaactggaccaccaagcgtatggtttttaatgccgggttacctaatttctatttgtctgtgggctctggtttgg

SEQ ID NO: 706339 - DNA, 365 bp, Homo sapiens
  misc_feature (95)..(95): n is a, c, g, or t
  misc_feature (365)..(365): n is a, c, g, or t
cacgagggacagaccacagaggactgtgtatccacgatcatgagtggggaagctgaggcgcatgagctcgtatgtgagaggttgtgtacatatanggcaagtgtggtctgtggcctgtgttggcaggcgtgtaacaatggtgaagaaatcaagttctgaccttacactgggaccatctgagaaggcgagaagtcctgtcatatccgagttggcagaaccgcttgcttgaacattcccaagggcctggtctataattagatcaaccactgtggaattgatgaaattttcagagaaaggtgtgcccctgggtctatagaaagacttcagagtctgtgagctgtgtatgggctcaggctcctgtgtgn

SEQ ID NO: 706340 - DNA, 1201 bp, Homo sapiens
cccgcgttgtcggagcgtagggtttcgccttcacgctgtgctgagtgcccctcctggcctttggggggagagtctcgtggccgcaatggggtgttgtattgtgctttctggagctttccgggggtcctgttggcgttccgcctcccttcaccctggaggtttttgatggaggtggtccccctcctggggacctttttgccgaccgggaaaaattttttgttgaagctctccaaaagatatgggcttgccagaggccccacgggggaaaggtatccacggcatgtccagtggaagcttccccagagaaggcccataaaaaggtaatggctcctgatgcaacttattgaatgtaagccgtggagaccccacggggcccctttgttggtctttgccgcgtgtcccctaggataatggtgataaaggggaggccgtcccccagggggaatatgggaattatcctgcccaccctcctgattactggaaggaaaaggagtctcttagtgagcccacgagtatgaccccaaagaggttgggccgaagctttcacatatagcccttataaagaaggaaagggttgacccccccccctttatcccccgcttccaccatttctggcccgtgtctcggaggaccagagagaccccaaaaagtttgctctcccgcgaggggccctcgggcacggcccacaccttggagttcccaccttgcccccgcctattgggcccacccactttggagtcccccggagagagaaagttgtggcgcttcttctccacggagaggtggacgccaaactgagagagagtgaatgttccctggagagaatgtgaaaaatgaggaaaggaaaaaactcactggtcacaaggttcccacgaagccactatggaaatattctctatgagggaaggacccttcggcgctctgaccacacggaggttatgaaaaaactataatgacccttgttcagcaataatttaatatagagccctgctctctaattccacagaaggtggtgagggggaatgccaaggactaccgggattgctggaatttttgagctaagaaactgtgaagcccagaatcttgcttccacctcttttttaccctgccataccccccttacccccatacccaggcccactggcatagagcccactgagataaatgctatttaaattaagtgtatttaatgaatttccca

SEQ ID NO: 706341 - DNA, 193 bp, Homo sapiens
actctgacacccacacagtcacacagacgcattacttcccacacgacgcatacacacatgcacacacacacgtacacacatgcacacacatgcatagacacccgccacacacatacacacatgtataccaccccgatacatacacatgtccacaccagccacacacgcatacacacgtgcacaggctccacac

SEQ ID NO: 706342 - DNA, 1312 bp, Homo sapiens
gtgtcggcgctgcgtgtgtagcgagcggggttgtgtaggcagggggtcccgccggttgttggatgcggtgggtgttagtggcgatcgtgaggcgttggttgttactgtcgttcgttggggtgcgctgtcgtggtggccgttggctgtgttgtgcctcctggcgcttttgaactgtcccgccgttgtgcgctcccctggtgttatggtgcgtagacgggtgtgtgcgggccgcgctgctggcagcgtgcggtggtttgtgcctgctttctggtgtgcggcccccttgggggagacccttgttggctgtggaagtccttcgtgtattgtcctaacgtacatgttctgcgtggcgggagccgtgtggggggcccgccgtgtgtgatatgtctagccgtcctggggggcgttcgttgaaacgcgaccccatatgcagcgcctgtgatccaaaaaccaaggccaacgtcgtgctgttgaccacatccaagccaaggattttggggttggggctcacgagaaggacccagttgagaagcccgtgcttgcccgagtccagccatgggcagacctgtgctcgggggtcccccgttgcacacacgcttggtggaaagcttgtggttgctttcgcgtcgtgtggccaatgaatgcttgctgactgcgtgcagctgctgtttgggtcccacgcgggcgttgttagtgaggctgtagaccccgcgggatagattcgtgcagcgtttcacatccgtgaggcccccaagccgaggacccactgagcgcccacccgggagggagacccaaccaactcccagaccgcgtcgtgcgctgtaagagcctgtgacaccactccacccgcgaaggttctgtcgccagcgttccacgtccgtgatcccagcggagacccagagaccccgggacgcccacccagaaggatagaaactctcggaccacaattgtgaacacatccacaagggcaccagactcccagatgccgcccacccttaagagctgtaaccactcacccgcgagggtcccccagcgttccattcttgaagtccagtgagacccaagaaccccacccaattcccggaccaccaggatggactcaccagttgaaccaatgatgttatgtgtgacactttccaaatagctagaagagaagatttgacactgtttctaactcacaagaaatgcccaatgttgagctgatggatatcctgattaccctgatttgagtcatcaccacccttgcactgcactgtattagaacatcacatgtacctataaatatgtatattattatgtatccattttttta

SEQ ID NO: 706343 - DNA, 357 bp, Homo sapiens
  misc_feature (20)..(20): n is a, c, g, or t
  misc_feature (32)..(32): n is a, c, g, or t
  misc_feature (94)..(94): n is a, c, g, or t
  misc_feature (144)..(144): n is a, c, g, or t
  misc_feature (205)..(205): n is a, c, g, or t
  misc_feature (310)..(310): n is a, c, g, or t
gcttggctcacagttccgcngctgtacaggangcatgactggggacacctcaggaaacttacaatcatgggggaaggcgaaggggaagcaagcntgttttaccatggtggagcagaaaagaaagcaaagagggaagtgctacanttgtttaaaccaccagatctcatgaacactcatccactatcatgagaacagcatagggganatctgcccccatgatccaatcacctcccactaggtccctcccccaatggcacaacaatttgacatgagatttgggtggggacacagagcctaaccatatcattanggctaagcaatgatgttcaagtaggctaggtacgttaactgcatttt

SEQ ID NO: 706344 - DNA, 390 bp, Homo sapiens
tgttgttgtcattctactctcaaggttgtttcttgttgtttccttgcagaagatcagaaaagggaggacctcatatgttccctcctaattatacccagttacacggtctccataccacctgttacaaagtgcctttctggtctggaaggacttctcttgttttacctcctgtcttctgtgtcctgtctgctcttgtctgtataaatttcaggactcctgaaatagcacggaagccccctcctaatcctgtggtttgatgtttgatattgttaggattacaaaactatgtcatagactagaggagtcagacattccagagttcacagaaggtgttggtgtcccggtggttgtgggacacaggtgccctcctagtcccttggctttcaaact

SEQ ID NO: 706345 - DNA, 749 bp, Homo sapiens
  misc_feature (200)..(200): n is a, c, g, or t
  misc_feature (287)..(287): n is a, c, g, or t
  misc_feature (588)..(588): n is a, c, g, or t
ggatgcccccgggctgctaggaattctggcacgaggctgtctttgtaaggagcccttgttttccaagcaccggcggaagctgcacctgtacactctgtgtgggagactctttccacgctgggccaagaggagtcaagactctaagaacaataagatgtgtgcttttccccgcgtcaatgtaaaatttgtgtgcgacttcnttttgggctgagactgttaagaggggccttctccagaaggctctgagagcagagccatatttccaaagaagatgaagaaatggtganctgtgtgttttatttgaagggaactttcaacatgagagaaataattgttctaaaatggtgtatatatgagagtaatataagacctcctcccgcggaaagcatgggaggggaaaaggagggtgtgtaaaaatagacttcccattggagaactctttaggaaagcaagtaggattccccggggggcttgtgccctttatgcgtttagaaggaaaccacatagaagctgggaactgttaatgggaaagcaggccaccagctgagtttttctgagacccaagaaaatttacttgcgccttccccnaattttccgtattctcggttccttcctctgggggtgtccgccctgtcgccaatttcccctttttttgctgtccccttttccattacccgtcgatatgtgtctacccctggggcgggggggggcccacaccctcctcattccctcatttgtgcggcctttcg

SEQ ID NO: 706346 - DNA, 105 bp, Homo sapiens
gctgctgccccttctccccttcctggccacactctcatgtcccttcctgttcttccttcctagaagcccctgtcgggctagtcgggaggggctcctctagcgtcg

SEQ ID NO: 706347 - DNA, 892 bp, Homo sapiens
  misc_feature (256)..(256): n is a, c, g, or t
gcaacgattgtgtctgcctcatggggttttcctccagagcctttattctgtagccagacgacacgaggagtctgtgtcactgagccagtgcttctagatgctaccctgtgtgggacggcagctcaggcgacagtagatcagaaatgctggtcttgaaaccttgaaaagatcaagctgaatgttccttttcatctgtcgctgttgagtcgttcatctattgaagtaggtatgctaacgtgtcctcgtctgtatttcnatgaagcgtgcatttccatctctactttccgttttgcaggcaatactggaggtaaccgcttcctaaaccatttgcagaaatgtaagggtgttcggttgcgtgcatgtgcgttatagcaacagatctaccaacccgtgtgcatgactgagtgttggggaaaagagaagaagtaagaaaagttcccaagtcactttgtgttatgtggaggacatgtgtattaccaagtggggttgttagcttttaaatcaaaagtactgattacagatgtacaagttagcttaatcagaaagcctctccagagaagtttggtttctttgctgcaagaggaatgaggctctgtaaccgttatctaagaacttggaagccgtccagccaagtcggcacatttctcgtgcaaagtgtcatagctttatataaatgtacagtattcaattgtaatgcatgccttcggttgtaagtagcagaatccgtctcaagtgaacattgggaacatggctactgttttaattggggcctggacagatgggctaatgtatacatttcattaagaacataaaggtgtttgagtggtacacggtaggcctccagtcatttcagtaattttgaggttgagaaaggtatttagacgtattaagg

SEQ ID NO: 706348 - DNA, 364 bp, Homo sapiens
  misc_feature (262)..(262): n is a, c, g, or t
atggggcggggggttgggggggaagataaatgcattatttttccttctgacaaacatattaatattttttcaaccctgtattccttattttcaggatgtgaattatacatattatcattagcctaggaacactcaccaacacgatggcttaatttctctagcttattttctaccaaaaacaaggttatgaggggaaaaaagacctctgtaaaatagggggtatgtttcatatttggttaaagcaagataaaactaaaactgnctttcaaaaaaatttcaaaaactcttgtcttttaaaattatttatcctttttacaaatagataccaggtttctccttttaaacatagcactacttattttaa

SEQ ID NO: 706349 - DNA, 283 bp, Homo sapiens
  misc_feature (20)..(20): n is a, c, g, or t
tattcccctcagtcccctcnggaaatgtacacagaatgcccctaattttatcctctctctctactcaaatgatgccctgtttcttttcaaagaagccttccccggttcattcaatatgaagtggcattctctgtattcttaagtaaagtacccatactttacttttcttcagaacattcagtctgatactatgttttctgtctatttctaccattagattacaaactgcatgaaggcagagaattgtcttagttactctagacctctagcaattagaacagtg

SEQ ID NO: 706350 - DNA, 124 bp, Homo sapiens
  misc_feature (6)..(6): n is a, c, g, or t
cagtantgctccgctcagagtccccccaacctcactgtttccgttgccattagatggggaggttcactgtactcatggtgaggccaggaaggccttgagcttgggcctgggcactgatggcgcc

SEQ ID NO: 706351 - DNA, 1045 bp, Homo sapiens
  misc_feature (566)..(566): n is a, c, g, or t
aattagctagtagaggctgggtgaatcggcgaggcataatattatacttagcatataccatctcacttctaggaatactagtatatcgcatcacacctcgatatcctccctactatgcctagcatgggaatacatactatcgctgtcattatacgctactctcatacatccctacaatgacccactccctcttacgccaatattgtgcctattgccaatactagtctttgccgcctgcgaagcagcgagtgggcctaaccctactattctcaatcttccgacacatatggcctaaacatacgatacatgagcctaaatctactgccaatgctataagctgatgtcggtcccagagcatttgatattgagctaccagcctggacatgcagctttgccacaaaaaacactataatttgtacatcaactacaaccacccaccggcctgatttatggagtcatcatccctctactatgtttcttaagccaagatcagagcaaacagaccgtaatgttatgctgttgcccgcggatcctcttttccctccgaaccccgcctatacgaacgnctcagctccttaagtactaagacgtactcctgtatgtccctaccgccttctgcatgtgcatggccaaggcacaagcgacgcggttatccaggtgaaccgcactaattggcgcaaaagagataacgctaccgtgctgctatagtaatctcccgactgatctcccttaattcatggcattgcacacgccaacaggatagttgaatccataatattgcataatcttgcctatgcgtacaaccactcattacttacccggcttggttattcgtgcacctcgtagtggagggccagctgccagaacggcctgaatcgcaggcacatagcttcgcgtagtctacaccctatgtagggctcctcccccctaatcaatcgccctaatgtacgctcataagaaacctaggctccctaaaaaatctaataaggcaagcatcaactggccagaactttaaactgctgagcagagattaagatggacaagg

SEQ ID NO: 706352 - DNA, 211 bp, Homo sapiens
ccgtcgatggctcacgtacattatgagcagtacgagaaatactagtcaggaggaggtcaacatcaaccgcaagaagcgcatctcggataccacgcgtcactgctcgcctcgtactctcatcccgcggccaccggccactccctctaggcccctggcactgtcgagtttatcacagacgccggtacctaggtgagtcaatagtcgtcccggg

SEQ ID NO: 706353 - DNA, 339 bp, Homo sapiens
cccaggtagatctaagccaggtgagagcccaatccactggcagtttatgtgggcttcatgtggtggggtggacagtcctaagtggagatctccagctccttccggtgggctgcgacagactgctagccccagaagggtcaatgttgggagtggtcgtggctgtgagctgctcgacggagcttcagtgtgagaggatcgagccattgaaagctcattaccagtaggacataatttttggctctccctattcacaaccagtgcacagtttgacacagtggcctcaggttcacagtgcaccatgtcactgtgctatcctacgaaatcatttgtttctaagtt

SEQ ID NO: 706354 - DNA, 177 bp, Homo sapiens
ctaccacacatctgttatctcacagtgggtccagaaggtagagcagctcagggggtcactccaactcagtgctcccttgttggtttacacccattcatgcttgtctgcctctggccgtgccgtctcaacgtgctctactgactgttggtttgatctagcttgcctcacgctgttgca

SEQ ID NO: 706355 - DNA, 176 bp, Homo sapiens
agagatcttgggaatgtggggtctagaggagcacacagggagtcgtgtcctgaatatcgtggcagggttctccgtagcagaacttcagatatttcaggaaagccatgagagccctcaggaggcatggcttctcccagataaacgccagctacttctgcaggagatggggaaagatt

SEQ ID NO: 706356 - DNA, 431 bp, Homo sapiens
agcggagatccggtcggctcggagcccaggctccagccgggctactcacgctccggaggcggagcttcagcagcgggagggggaggaatctggggcctcccaatggcagctcgggtgtcttccatcgcagccattcaacgtctggcgacggtcaaatttaaacacccctcccacctcctccgccgggacctgtcgggaaagcgtttgcagttattgcggcggctggacacgccccgccgccgaagaggcgggagaagggcggggcctttctccgagttggcctatcactacgggcagcctgcggagaggcgggaggcggcgccaatcggggcgagcagctggagcccggcggagcagttggctgagttgttgcaacttttttcgaaagctgggtttcccgggagatcccaggcggtgacagagtggagcca

SEQ ID NO: 706357 - DNA, 475 bp, Homo sapiens
tggatgtcatttggtgtaagggcccaaacggctgcaaagagtggtgatagcgcctaagttagtgtaaagttgggattagggggtattccggcaagggggtggaaggatgataaaaaaatcctgctacaatatagtgcttgagtggagtagggctgagacgggggtggggccttctatggctgaggggagtcagggtgtggagacctattggggctgattggcctgctgctgctaggaggaggcctagtagtggggtgaggctgggatcagcgttaagaagggctattggtggggggtctcatgagtgggagtgtaggataaatcatgctaaggcgaggataaaacccgatatcgccgatacggtggtataggatcgcttgaatggtgctgtgtgggcatctgctcgggcgtatacatcactgatgagccagacggatataatccctagccctccagcgatgacagtggaaagtgg

SEQ ID NO: 706358 - DNA, 316 bp, Homo sapiens
catttacaaagctacagtaatcaaaaaagcatggtattggtataaaaacagataccaatgaaacagaatagagaacccagcaataaacccacttttttttttttcacagccaactgattttggacaaaggcaccaagtacgtacaccgaggaaaggatatcctcttcaaaaaatggtgctgggaaaatgggatatctgtatgcaaaagaatagaactgtaccccatttctatccatacacaaaagtcaacccaagatggattacagacttaaactttagacctgaaagtttattaatactcagctgttgtaactgg

SEQ ID NO: 706359 - DNA, 145 bp, Homo sapiens
cgaggatcacttagtcaggagttcgaggctgcagcgagctatactgtaccactatactccagcttgagcaacagagcaagaccatctaaaaaaaacaaaaaaggactctaaaataaaactgatgttcacatagttcagcgtctga

SEQ ID NO: 706360 - DNA, 432 bp, Homo sapiens
gagttctccctctccatcgtcccctcctctagggggtagggccaaatctcccgtgggttttttgccccccccccccaggggttttttcaggtggtgccagggggcatggtgtttctccaccaaccgggggacccggtttgggtttaaaaaaacccccaaaagggtccccttttcccggggtttgggcccggaggggtttttagggggttctttttttttcatttgggttggggaaggggggggcccccccccccccccccccttttgggttccatgatcccgcctgtaaaatgggggggcttttgcttcccctgcttaagggggggggctggcttttaaaccccccgggctgggtgccccctgccccctgctttaaaaagctcgtttttttgcccttttcctggaataaccctttgggtttgggtttgctga

SEQ ID NO: 706361 - DNA, 526 bp, Homo sapiens
  misc_feature (128)..(128): n is a, c, g, or t
  misc_feature (365)..(365): n is a, c, g, or t
  misc_feature (402)..(402): n is a, c, g, or t
  misc_feature (511)..(511): n is a, c, g, or t
gggagaccttcctttctctattgaacgatgctgctgccttagcctctgagtaggtgggattacaggcgtaccacacacgcccggataatctttgtatttttagaagagacagggtttcgccatgttgncaggctggtctcaaactcctaacttcaagtgatccacccacctcagcctcccaaagcgctaggattacaggcatgagcactgctcctggccttatatgccatcttgagaaggctaagggatgcccgaatagctagtaaaacattatttctgggtgtgtctgtgagggtgtttgtggaagaggttaagtatttaaatcagtagactgagtaaagaaagatccgccctcaccagtgttnggccagcatcatccaatcagctgaggggcctgaatanaacaaaaaggtggaggaagggagaatactgcctctccttgagctgagacattcatttttctcctttcccttggacatcagagctcctggttctggccttttggatgctnggtaatacttgcctc

SEQ ID NO: 706362 - DNA, 256 bp, Homo sapiens
aaaataaaaaatagttgggccagtggcgtgtgcctgtaatcccagctaatcaggaggctaagggaggagaatcgcttgaatccagaaggctgaggttgcggtgagctgagattgtggccattgcagtccagtctgggcaacaagaagtgaaactgtctcaaaaaaaataaagaaaaggaaaaagaaaattcacaaagttggtgtggaacttttattgaacttaacaatcttctcacagatgtattttttatttgag

SEQ ID NO: 706363 - DNA, 945 bp, Homo sapiens
  misc_feature (534)..(534): n is a, c, g, or t
  misc_feature (900)..(900): n is a, c, g, or t
tggagacagagaatgactatttcaaaaaaaaaaaaaaaaattcggggggaccggtggcccccccccccctcttttcagggggagtttctctggcttgggcccccaatttctctcccatgagtttctgcccggaagaaagaagcctctgggggggtatatcttttcttttttttcatccaggagaggggcgtctcctcttgttgcccccccgggttgtgggctgtggcagggggggaccttggcgcatcctggcaaccctgtcggccctcggtggggtcaccaggtggtatccccccccacctctcgactctgtggagatgaccgggggaaaaaatggcgcggggttgctcccaaacaacccggggcgacaaatttggcggtatccccacatatattgttgcgcccagagtggttgtctttttaaagcccctttggaaccaagaggtgtaacccacaccagggtgatgtggggacgctaccaaaacacctgttggaaatcagacgggataatcaccacccgtagtacgtggacanaggggagagttcactaccatcccaaagaaatgctccaccagactcgatgtagtggccagcattgaccggacataccacccgcgatgggaactccgtatgaaccgcacgaagctacacaggataaaaaaaggtgccagcaaactaaataaaccgctgaagttgatccaccactgggaaagcacacataccagtgaagcaacaatcagacacgacatcatgagcacgcaggtcaaatgttgatagacacagcgacctcccataacaacgtgagtgcacacgcaaaatccacacacgtcggaaccacacgaccgctgggaacagtgcaccaaaaaactacgagaagtacgtgagacagccgtaccagcnaggaaaaggtgatcgaacaaacccgagtaggattgacacccggcc

SEQ ID NO: 706364 - DNA, 846 bp, Homo sapiens
attcctggtggagccggagctgggcgcaggattctgccgaggcaccgaggcacctcagaggaggccgcggcagtgtcatgaatcgcggctggggatgtccgtcagaacccatgcgtgtatcaaggacctgtggcgccggcgctcttctggctccagttggcacagcgagacagctagagcgcgccgatcttgtgtattggcgctacattgtgcgttggacttgccatccatggtaggggcccgttggagtcgtataggcacacgttcgacgttttggtcacacgaggactaccacgttgcgatgcgggttgaacgttccgtcccctttgggcgagcgcaggttgattgctggggggtcacgttaggccccttgtgcccaaaaggcgttctaatccctattacgcacaccagggtgggccgcgcccgtgccttgaaggggacccggggggattgaatggtatgggagcgaggggaccgcggcctaggggcatgtgccaccttgggggccaaaccccgttccaaagcaccatttgagcccttcggttggacgctatgttcgagggcgggcgggatccacggggccgtagagcaacgggggaataagggtaaccggccaaaggtttgggatgtaggaagcccctttgggcttacagatgccggttgggtatcctcattttggtgttaaacccccccagttttgtgtattagccccattcgggccctttccaaatggcggttaggaaggcggcgaactagtgtggccctttggaacaggggggcggtggatttctccgcagccgaagtgagtggtgtgtgggcagcccccttctatggggcgagatgggc

SEQ ID NO: 706365 - DNA, 266 bp, Homo sapiens
agagtagtcatgtgtatcctccatcatatgctgactggcaaagctgccagagatattttcacaaaggattggtttgggttggtgaaactggatgtgaaaacaaagtcttgcagtggcgtggaattttcaacgtccgcgttcatctcaatacagacactggtaaagttactggtgacttgtgagaccacaatacaatgtggtgtgcagtattggtctcgacttttcacacgaaaagtggaacactgtataaccactctgtggaacag

SEQ ID NO: 706366 - DNA, 905 bp, Homo sapiens
gccaaagccagctccagcttactaccagacaagcttagccaaaccatttacccaaataaagtataggcgatagaaatgaaacctggcgcaatagatatagtaccgcaagggaaagatgaaaaattatacgccatagcatagatatacgcagaggactgagacccgctataccattctgtcagtactgaattaactagaaagtatactcttgcaaggaggagccaaagctaaagaccccccgaaaacagacgagctaactaaagaaaccagctaagaagagcacagcccggtctatgtagcaaacaataagtggggaaacgatctatcagggtcagaaggccgcagcagagaccataaccggaagcctggatgcattagctgggtggctccgacagcatgagcagatcatttcagtctcaaaacagtctcacaacttggccacacaaggaacgccatactaaaatccgcctaagggtcaaccacttgtagacctgtaaggctcccaaaaagaagggaaacccacgcgtcatgtttgggaacaacatacggacaaagaagagctatgctgagaagcagtaagctaaacaaagacagtctgtaaaccagccccaactaaggtacgcgaccctaaacaaagcgagtccaatggcaaagatcttaacggcagcaaggccgggtctacaaaaagctctgcgaacaccaaacccgcaaacgttagaccgttgagagcaaaaagtcgccgccaaaaacgaagttaattgaagcgtggcagaacttccctgtcaaacaacaccaccaaagtgtgaggagcgccaaaattcgttaattccaaacccgattaatcaggaaagggacagcctaacatgagttagaagtcagtgacaggtcaacgcatggcaaagcac

SEQ ID NO: 706367 - DNA, 105 bp, Homo sapiens
tcgcattagaccactagtgattgtggcatccagcatttgttaactaactttacacacagtatttggacaaggagaaggtattgaaaagactgcaggtgggtacgt

SEQ ID NO: 706368 - DNA, 369 bp, Homo sapiens
tgctaagatctacaggatgaaatcattgactcaggtgaatcactaccatcggctggcatgtggcttcttgcagcagaatgtcacagagcacataaaaccagaaacagctgacaaggcaatggccaccacaagccaaatgttccaccccgtggagggacttggttgcactttaaaactaagagtggcctgtgacatgaagcctactgacttgtgttagctatgactgctggttccctcctgagctgcgggggagccagacggtggcagggctgcagattgggaactggcaggacttgtactgtcctggactggtcattcatccgctccacacgaaaggtcaccttatacctggctggttagggctgctgt

SEQ ID NO: 706369 - DNA, 1281 bp, Homo sapiens
ggggatgacggcgggaaagatcgccagacaacgtgcagagaagaagctcacccgcgcgacagtgagagaggtatctcccagaagctggggaaggcagatgagaccaaggcatgagcagtttgagcaggtgctgtccagaatttcgaacatagcagctgacggcgggcgacccggtctgcagaaggatctccggaccatacctggcctccgtctaaagcctatgcacgaggcttcgcaagaagctgacatgcagctgtctgcacggagcgtgctatgagcccgcattggccgcggccgggatgcaggcaacacaagatcgccgagcaacaaccgatcctgcgtgtgagactcgcgagttacccaccacgaagctggtggcacccactggctgctgctgaccacttggcacagcgtacctgcggccagattccccggacagtcaacgtcaacgcagtcgccaaccggcgcggcgcaaacctgcgtgcgactacgacagctgcccggaacctactaacgaacggtccctttcaaactgccaccaccgacaggactgaacgcccacaccatggcccccggcccgacgcacgcgcaaccctcgatcccaacgccccacaaagcgccgcacccgaaccgcagcactgcacactgctccgactcatgccaccgcacgccaagccctgccccaacccccctgagccacaccacgccccaacgcaaccgcctacatacccgcctcacacacagccgctcgcccagcaagccactccgccggccgcacaatggccacgccgcaactacaccccgcgcaccaaccgcggccgccacctgccagcccaaagaacttcgacaccaagaacaacccctccacacgcaccggctgacccggccccgcgaccgcgcaccaaaacccaaccacgcgtcccgccacacccccatctcaccgcgaaacaagggacgcagccccacgcagcaccaccagccgacacctgccacacacaggacaccacccacaggcgccctccgcccctcgcagcataccagcccagggccggccacccccggggcgcaccgcagcgcaaccaccacgaacgccacgcgacccccccgggccgggcgcacccgcacctggggccccaccgcccaccacagcccacatctccaacccccacaccgcgcaacccagcgcgacagaccaccaccaacattaaatgcacgcaacgcaccacccaacagcaacacaaacacacccccccccagcaagcaacaagaagccccacacac

SEQ ID NO: 706370 - DNA, 163 bp, Homo sapiens
tggcagtacggatgtgtatgtacactagttatagatgtacttagtggaaggtggtcatttatcaaaggaagtgatttgctgcttaagcttaccagtgcctcatttgtactagaatacgtgctaacggtaactatgggaattatagacctcttcagccggcctg

SEQ ID NO: 706371 - DNA, 989 bp, Homo sapiens
gcagctcaacgattcagcttgccatactaattgaacgagctggagtgtatggcacagagtgatctacattcccaacatcagcaagatgtgctacggacccgcttaaagaccacggggatcgtgtcagacacacttcacctacaaggacctcacacgtgtcaagatgtaggaattgtgggctgtgtcgagcgtgatctcgaagcggtaagaagtggactcctactgacattcgagggctgtcgatcagcccatcgattgtgctactgcagtgggctcgaaggcgcactatgacttggtgctagatgccccgacgaggagattgaaccgagatgcaatgcaagcatgccctgaatgctagttcgatcgtcatctgcagatcagaacaagtggtccacgatgagcaacgtccaatcagtccttctatcctctaggcatatgaagagatacttgttaatgacggcagaatggatctacaagcaaccgatcacctcgtgactcatcatgcctctccactagatgctatcacgagggtgacaaacctacaactaattattggagtgcagacaagctgcattcgcaagaaagtaacgtatctgaagcgaccatgaattaaagccgtcaaagacgaccatagggaggatgtctaccaactagtacccttccatcgatgcgagcccactcgggatcatgcaaaataagactgtgcacctttcgagtgtatcgatcgccatctcctggttgctccgtcattctaatgaccgacccttgacggacatagccgcgtcgtctacatgagagcgacagtagggcgctgggttggcgatcgggccagcaggtgacgtttagtagcggtacccacctcgctggtggagagtggtggggctaaagatttcggttcccctggctgttcccccgccggttttcatccatctacagctccttggcttaagtccccctggcccctaggtccaaactagggggggggttcc

SEQ ID NO: 706372 - DNA, 892 bp, Homo sapiens
gcttgccgatctctttttattgatatgtcttgacaatctatgcattttatttaaggattctgacatagaatagtacattgttaataatggtcatgtatataatccacagcctggctcagaacaggaattgccaaactgtttctttataggtccaaagagtaaatatttttgactttgagagtcatgtggtctctgttgtggctactcagttctacccttgtagtaggaaagcatccatagatagtatacctaatgagttggtgtggccttattccaactagactttaattacaaaaacaggcagctagctggatttggtcattgagctgcagtttgtcaacccctgtctgcaggactctaatgggaaaatgatcaaaatcttaggtgactgtgcacggaagaagtggtatataggaggtgtgagtggttggcatgaggcagaacccaagcagactctgagcaacatatacaaataatcgcaatttgactggagcagtggccacccaagtagtggtacaatgggcagtattatatctttcttaggggagaggtaaaatcaaaggcattaggtggggcttgaactattaaatggggagtgaataccctatctggcctaaaaagagacctttagggggaccaggcagggcctgataggatggtacctttaacctggtggaggtgaaactgcgggctaattactttagccttgtgggaactaactttgcttttaaagaaataatgtgaggatgtaagaactgcgccctgtggcgcgggccacaccctttgtgtgtttgggttaccttaaggtgtcccttcacaggactgatgggagcggttgtgtcgcgtggatgtcccttaagtcgctcggggagaactctgccccgggggggca

SEQ ID NO: 706373 - DNA, 330 bp, Homo sapiens
  misc_feature (4)..(4): n is a, c, g, or t
  misc_feature (235)..(235): n is a, c, g, or t
  misc_feature (287)..(287): n is a, c, g, or t
gacnaactgaaagaggctgagcacccgtgctgaatttgcagagagaacggttgcaaaactggaaaagacaattgatgacctggaagagaaacttgcccagcacaaagaagagaacgtgggcttacatcagacactggctcagacactaaacgatcttatctgtatataagcaaaacagaagagtcttgctccaacagaaactctggagctccgggggtctctctcttctcttgtnagaagttccttgtggtattgacatcttcgctggggtggaaatgtcaagcaanttatgaatacatcaccaaatattgtgtctcggagaaggtgtgg

SEQ ID NO: 706374 - DNA, 329 bp, Homo sapiens
aagactgagtctcacctgtcaccaggctggagtgcagtggtgctatctcagctcactgcaacctctgcctctgcctcccggattcaagcgattctcctgcctcagcctcccgagtagctgggactacagacatgcgccaccatgcccagctaatttttgtatgcttagtagggacggggtttcaccatgttggccaggatggtttcgatctcttgacctcatgatctgcccgcctcagcctcccaaagtgctgggattacaggcgtgagccactgcacccagccttcagtatctatttttatccatccagatacaaaccatttccagag

SEQ ID NO: 706375 - DNA, 511 bp, Homo sapiens
  misc_feature (295)..(295): n is a, c, g, or t
  misc_feature (511)..(511): n is a, c, g, or t
ttctacagactgtaggattcaagtctgcagggcaggcactcgggaagggaagatggatgtaaagtgtgggagaccgaggacacagtggagcccacgagcacgagctggaacccacgaggatggcctggaacccatgtcagtctctcaccacctccagcttcgatgatgtgggtgtcctgcagaagaagctggtgcccttcctcacagagttaaatatgcatctggcccaggaattagagaagctgaaaggatgatcctggggaaggtggagcagctgcaggcctggctgcaggcntgactactgcccacaccaacgaggtgatctaacagatacatggcaacgtgtggaactgcaacaacgcctggtgccccagcacaaaccttcccaagtgttaaaaacaatgtgctgctgcttcacttccgccctcccggttatccaagcaaaatgtctcttgttgggccatctttactgggagagagttcccggggaacatagccttcacccaaggtn

SEQ ID NO: 706376 - DNA, 575 bp, Homo sapiens
  misc_feature (575)..(575): n is a, c, g, or t
atgcaggcactgtttgctttgccaatggagctgttgtaggtggaatagcccccaagaagctcagagctataatagtgcatcatcagatcctagtcggcagttccttatgaatggactggcggcgtggttgagctgatatggaaaagctgcaccttcctgcagaagatcaagctgatcctgctatcccaccccaaatttacagcctgtacggttatctttcagtgaaggcaggtatctgtgcttctcacatctgagaagcagttgttaagagcgcaaaggtggaggagatctagaaaagaaccgtctgtgtacagatttatcccagtgggtgtgaagggagggcaaagaacccagtggcacttcgcttatccagcaatttctgtcactgtggtgaccaacttctgcccgttccatagggtcttgaactgctcaggaactgggaattcattaaagtcaccgccttctgtaggaatgaggacattcatctcggaaggtttagcactgactatttcacaatccagggaattcttgctcaggtaagcatggcagccatctgttttgttgatggatatggn

SEQ ID NO: 706377 - DNA, 168 bp, Homo sapiens
aaatcctctgcacgcgtcttacttcttaggcgggtagcactccagatcagtgtctgcctatcaggcctgatttggtcaagaagttttacggatctggggttcaaaccccatatcaagcattctgtcagcttcgtccaatacaaggtaagtacatcggcgaagatatgt

SEQ ID NO: 706378 - DNA, 128 bp, Homo sapiens
tcaagcttctaacgatgtacggggacatgatattcaactgtcattgccatccagtccagaaccagaagatggtgataaagtatataagaatgaagatttattaaatgaaataaacagcttaaaggcga

SEQ ID NO: 706379 - DNA, 229 bp, Homo sapiens
ggcagtaggacgcgggttgttacgctgcacataggcgatatgtgtacagcttgcgctgtgagaagaatgacttgctgatcatcccggccggtgtaccgcactggttcgacatcggcgaaaacccgcactgtgtgacactgcgtttgttcaacacggcccaaggcgttgtgccctctttgaccggtgatgcgattgccgcccgctttccaaggctgggcgtccgtagcgg

SEQ ID NO: 706380 - DNA, 934 bp, Homo sapiens
tggtggtcacagacgactggccaggatattctcacctctgcctatctgtcctagactactgttcacacagtttaagaaggtgcgcaggggcagtgtgttagttctgtccgtggaggtgctacttccactggtagagaggacctgatggaggtgaccatagcggcactccgtcgccccacagagggcccggtcctggcagaagtggctcctgcgtgcgagctgcgacgtgccggctgctccgaacacttctcttcagtttatgccgtggtgtcagtcctgcatgtccagccccatccacaggcttcgggcagcctggtggggaagcaaccagggacagcctcatgagtcttttccatggctctgccagattttctccgcaggaggatagttattcccagagtcgggagctgctcgtgcaggaggtgaaggctgcagtctcctctggagccatttctccaaggaaggccccgaggtctggctcccggggtgggggtgtggtcccgataccttggcaccttcctgaaggaccttgtgatgctggatgggcctccaaggatgaggttggagaatggctacagtcagttttgacaacgcgggcgggaagggagtttgcagtcctttctgagttgcgacggtccacgaatgaatgtcgtgctattatctcagctgaccattggtatcagaggtgctaccggggctcggcccgtggcagaggtcagaagcctgggtatcctgtccgggggggccccgggtctggtgtcctcttgccccgggtgttcggcgacattggtctttcggtgccagtttggctcgggggcgcaaccggtttgtctttcgcgcgatgggagtggggggagaccctcctctgtggtggcccctttatgccttctccacatctttggagccttctgccgtgctctcccccaccctcgtg

SEQ ID NO: 706381 - DNA, 496 bp, Homo sapiens
gaccacttcacgtacggcctgtcggatgagataatgcaggcccacagatagcagctcttgctcgtcagccacgacaagctcctgtctgtagccgataggtacctcggcattgggaaaagcacacacggcctggccatcctcggacccgagaaccagaaaattgccaaggacccatcgtggatcatccgatgagcagccgtggcgctcgactgcacaggagcccgagtcaacacacctccgagctggatagaaaaggtcagaaatggtgctgcttttgcccagaaacctaaggccattgggtgtcgccccagcccccccactgcgacgttgggagctcagatcaatcccaagagcccacaggacacggttcgtttggattatcatgcatggagcgccaaggatgcgccacggaggagtttcacattggagcgccaggctcgttttccctcactctagagcactaaagaatgtagtaatatagcgcgagtctgactta

SEQ ID NO: 706382 - DNA, 982 bp, Homo sapiens
tattttttcatgtacttgattgactggttatataagagagggatgttaaagatcacttatatatgtgcatttgtctaacttcaattcatctgtccaatcatttgcttccatgtcatgttgcaagcgttccatgtcatcttatcacagcgctaatgcacgttggttcttgttcaatcattcatgcatgtcatctccattcatcgtccaagtgcatcatctcatcttcattcttgcaagattacattgtataagtatctgcatatagccgatacagcttgttccttacgttacataattgtggcatgactatcatgtaaagtgccagacactgtgagtaaagagcttgtgtcgtatatattataacatgtggactagaagaagaagaatgatagaagagaccagcacgaccatccgacatcactaggacaagcacccaagagaactaggaacagtatgcacaaacttcgccgaacggagaacatacgcgcgcactaccacacacggacacaccacatacaacaacacctaccccacgagcaacatacacgacacacagtctcatcccatgcacctcacacgaacctccccacgaagacaggcaatagaagagccaaaaaaacgccgcggcacaaaacgtaggccccacccgaacctacaccaaagcgataacaatacagacaaagtccatgacacacaactagcaagcacaccacggacgataagcaccacccggtgaatcagacgcccccagccccaggcgaacctaatgcaaaccaccaccgtggaaaccaacacaagaacggaaagacacaaagcaaaaaaccaccatggcacccgtccacaacaaaaacagcatgacctaggcgacacacaacaaagagtcgcaacaccaccacacacaaggcccgccggcgacccaaccaacacaggacacactacataacaagaaacaaaacaaccaaacatgagatcaaagcgtacg

SEQ ID NO: 706383 - DNA, 859 bp, Homo sapiens
  misc_feature (81)..(81): n is a, c, g, or t
agtttccgcgcgtatatgtttccggagaaactgggtagggaaaacataccgcccccggtgacatggggcccgcgacccccngaaacggggttacacgaggggcccacaacaccgggcaccccctctttggccaaaagcggggtcaccccagtgggcagacggtgctcggaagcccgtgccccaatttgtccgactcccctgggctgtcccccaaactgcgggagtaaaaaaggggcggtcacaactgccccgggccccaaattgtgctccaagcagggccccacagattcaatttggtgatgagccggacgcccaaaaaaagttgtggcgaggaaatagccatagccacgccagagtccttcgcaaaaaagggttggggacaccacacagcccccgcaggtacgggtcggcgtgatcagggacccgtcacatgtgtcccaaacaggtagaacggcctcggggacaaaccataggtactgccgagaccccgggtggccgaggccacaccgacgacacttctcctctggagcacaagggcgcaaaagagaaaattggggaccacatcacccactaccgtcccgggcccatgcccctgggataacccacgccctgggaagaggcgaagaaacctgggcaacggaaagaaacggggagtaccacccgcatggccaatggaggggacccctggccgcttcccccgagcgaatgtagaaaggagcgccaccgggcggagccgtgttaaaatatacaggcgcggcctagggaagcgaatcgagggggaaacaccggtcgcacgagagatgatagtatcggtgggcaaaccagaggagggaatttgggggtacaacccccataacaa

SEQ ID NO: 706384 - DNA, 469 bp, Homo sapiens
gccgagcctctcatactttggaaataagcctcagaatagagactgtccctccccacatttcatacttacatatcctccgagtctgaatatagttcctcttgcctgggccacttaatactactcctaggccaggcgcggtggctcacacatgttatcccagcactattgagaggccgaggtgggcggatcacgaggtcaggagttcgagaccagcctgtgcacatggtgaaaccccgtctttactaaaaatacaaaaattagctgggcatggtggcacatgcctgtagtcccagctactcgggaggctgaggcagaagaatcacttgaacccgggaggtgttgacggttacagtgagccaagatcacaccattgtactccagcctgggtgaacagagggagactccgtttcaaaaagaacagtttatgagatcagctttgtatcacatggatctaggacctctgtcggaa

SEQ ID NO: 706385 - DNA, 230 bp, Homo sapiens
tccaatgtacccagagtcacctttccaacaggcaagtatcacatgacccccctgccttaagccttcagtggttcctcagcggcttcaagataaagttcaagctccaggatatggctcctgcctcctgctctgacctcaacacatcctacctcaaacgttaggttccaaccataacgaaccacttgtaatttccagcacatactgtgctattggtaccattcacatccttg

SEQ ID NO: 706386 - DNA, 245 bp, Homo sapiens
agatgtattctcagcacagagctgtggtgtgtgtgctgaggtgcgaatgcaaccatcttgaggctggcggcgtacacaatataggcaagagactgctgctcgagtacgggtgtggcatgaatctgtgagcatcctttggaggtgcaccaccagcacatcggcaagcctccaccatcgcagagatgccctgttgccgcaaagtgtgtctcattgctgccgccggactggacgtcttcgggtcgttt

SEQ ID NO: 706387 - DNA, 137 bp, Homo sapiens
tgcatggttcatattctttcctaatggatcctgttaataatacttccaagcctgtccatggatctatcaaatgtcttcacttgtatatttacatggctaggtcatttctaatggtttatctcccatgatggggtacc

SEQ ID NO: 706388 - DNA, 297 bp, Homo sapiens
actaaccctaatcgcatagaagccgttgtcctcaagcacattgagggcggtgctcttacctggagccggagcgaccgctgacgatgatcaaacgcatgattactgcccgttttgttcatccaggacaacttgtgtacaacgcttcattgcttggaagcgctgcgcagtttgtcgcgtacatccttgcggtccagcatgctggtgatctgccgtagcagtttccaaggtgcgcatacggtggctggcttcctggggaaccagcatgcacaaaacatgcatggtctgacctggggcgcc

SEQ ID NO: 706389 - DNA, 170 bp, Homo sapiens
gtcgcgtatcgtacccgtaggtcagtaccattggtggccaattgatttgatggtaagggagggatctgttgacctcgatttgttattgtaaatgtgatgctgtagtgtgatgggatgggctgatgagtgactactgatttgacttgtgctgtgtgtgtggtacctgatgc

SEQ ID NO: 706390 - DNA, 122 bp, Homo sapiens
ttggtggctctcgccgggcagcttggagaggcgcaatactttccagctcccccgttacccgctaatataagtaaaggttggtaaaattcatactttaataaacaatttggggccagtcatgt

SEQ ID NO: 706391 - DNA, 264 bp, Homo sapiens
actgtaaatgattacttagatctagcagcatacagattaaaatccaatttgttggccgggtgcagtggctcacacttgtaatcccagcacgttgggagcccgaggcaggaagatcacctgaggtcaggagttcaagaccagcctggctaacatggcgaaaccctgtttctactaaaaatacaaaaattaaccggatgcagtggcacgtgcctatagtcccagctactcgggaggctgaggcgggagagtcacttgaacccagga

SEQ ID NO: 706392 - DNA, 732 bp, Homo sapiens
atcctcaggatttcattgactgaactgcacgttctatattgtgccaagcaaaaaaaaaaattgccttgtgacaccagaataatgagtctggcataaatttcatcttcaaccttaagggacttagctgggccacagtgacgctgttgtgcccaccaccggtgtcattgagagacaggggttactctcaaggcttctccaaggatacattttcacatctggcggctagaaacttgtgtacgacaaaggcattcatttgtaaaattattttcattacaaacctgtccacgtgggctggagagaagtatctaacattattttaccataggggtttggattaatatgtgtaattttctcaacttgaaacttgtaaccttttcttacagcacatctttttttggatgtgggagattggaggtatacaactgtcctggtggtacaaggagttggagcaattgctaaaaaccagcggttttaaaagagtagaaaagggtatgaccccgttgttcacagatgtgtatttccagaaaccttattataaagactcatagtgccataagattggtccccaagtggtatacgtcattatggcggaaacatatctcttggcaattattaaccttgatgtgagagctgaagtccttataagaattactcttaaggtgggggaatggccgggtagaacaattgggccatgtttatttaacgtggagaggaaattatgggcgaggggga

SEQ ID NO: 706393 - DNA, 221 bp, Homo sapiens
cggtctcaccctcccaaagtgctgagattacaggtgtgagccaccacacccagcatatcgagaagttttttccatttttggggttaggggggaagtctttggtggtatgtgggttttattggtgtgggtaacaatataggttttggtttggagacaggatctcggtggcccaggcttggtcatctctctacttagtgatcagtgggcatctctgttgccca

SEQ ID NO: 706394 - DNA, 438 bp, Homo sapiens
gaacctagatgacagaaaccacgaggtaaaccggaaataacccaaattgcgcttaagaaaaatactaccagacttgagaattttataacgtaacttcctaagtgtaaggtgacaaaatttgactttcgggatattctggcgtaaatttacccgtccgcctaaatgtgggcaaaaattcacagctacgttatattaagcaaatattaacagtgactataatttgctgggtgctgaaatttgataaaaaacttaaaagttaaaaaaaattgtttagatctttagtgtcacatagacttatctgggacatcgcattttttaatcctcacatgagatatggctaagtatatttttcacaatctgttaatctcacaaaaactaaagctgttaagcacagtttaaacccattctgcagggtaagaaattcatctgtaaggcaat

SEQ ID NO: 706395 - DNA, 95 bp, Homo sapiens
  misc_feature (32)..(32): n is a, c, g, or t
cgcggctttgttcaggccggccgcggttgctncgacacgaaccccaacgacgaattcgctcattacccagacctcttcttagtgagctgatctac

SEQ ID NO: 706396 - DNA, 217 bp, Homo sapiens
tgtgtactcgtatcgttcattaccattggtggataatttatttgatggtcagggagtgatcgttgacctcgtctgtgatgtaaaggatgcgtatggatgggagggcgattgaggactaagatgatggcgggcagagatagttcagacggtttctatttcttgagcgtttgagatgttcgtattagttcgttgtgttgtgagtgagaagactcgggcg

SEQ ID NO: 706397 - DNA, 275 bp, Homo sapiens
tgtgacagaagccctcactgccactcctagatttcaccagcggtaggaggctcccaattctttccattttccaagacaccgtgcctcagcgatagttaagggaatccccagtttttctttcttcttttctttgtactttcatgttctagcccacaggcaatcctgtggcagcagtggtggtgacagaggcagtgacagtgacagtggcagccgccagggccttcaggtgattaaagctctgaaggaaagtaaccttcctctctgattgtaggtcc

SEQ ID NO: 706398 - DNA, 298 bp, Homo sapiens
  misc_feature (48)..(48): n is a, c, g, or t
  misc_feature (55)..(55): n is a, c, g, or t
ggattgaggggccggaagaaaagatatagctatttaatggagatcttncagatgngaactcccccccccccccccccccacaaaaggacagctttgcagggccatttcaaaatacggccaagaaacatgtattggggtaaaatattttgactttcttctttgtcacataatgttatgccagagtcggattggaaagtaagtcacaacatagagggttaaataaaactaatctgatgagaatttatggtttgtagggcatgaatccccagaccacttagataagaatttgggcaagata

SEQ ID NO: 706399 - DNA, 108 bp, Homo sapiens
ccaggtatccacaactgacgaatgatcctctgtggcaggtgtctcgattctcgttgtgtgtgtgactatcgagcatcgcagatgcctaatagggtttggaatgtcaga

SEQ ID NO: 706400 - DNA, 868 bp, Homo sapiens
  misc_feature (632)..(632): n is a, c, g, or t
  misc_feature (862)..(862): n is a, c, g, or t
tttcgtgtgatatatgctagacgtagtgtgtgaagcagggaacaaagttctttttaactttcgttttaggtcgagggtacatgggcagattgttacataggtaaactacgtgtcacaggggtttggtttacagattatttcatcaaccaggtatttttctgatcctctccctcctcccatccaccactcttgttagtccccagtgtcttaattcctgcgggatgtggatgtgttctcattgtttagctcccaccaaaattcttaacatgatctaaaggccttgtctaacttcacataagcaggcttgagttaagttcttttctgtttttaagacataggtgccttttcttcgtatcattgtgcctttaaatattcatgcatgttcttgctggagaggaatcccatgcctacctctaaatagctgtgggatctagggaagattatgtaattccctaaaattctcttgccaatctgtgaacataaggtgaatattaacctggctattatttctcacccagaatcttgctgtctcctcctagtctccctccttcttcctttggtccccattgtctcttctgcatggtgtataccctaatcatgaaaaatgaaaccctgtgatgtattctctgtgncagatgcattgacttgctttctcattgagaaagaacccgactatcatgacttggtaagggtctgtgtgaagcttcatttctactcactgccctcatgcagcctgccccagctacacttgccttcccaagcatcctccagctgcagggccttttcatagtctggttccacctgactagaacactttttctctgcatataactggtataactcccttcctcatctcctttanttagaa

SEQ ID NO: 706401 - DNA, 405 bp, Homo sapiens
  misc_feature (12)..(12): n is a, c, g, or t
  misc_feature (15)..(15): n is a, c, g, or t
  misc_feature (130)..(130): n is a, c, g, or t
  misc_feature (235)..(235): n is a, c, g, or t
  misc_feature (285)..(285): n is a, c, g, or t
  misc_feature (332)..(332): n is a, c, g, or t
  misc_feature (351)..(351): n is a, c, g, or t
gacagtaaacanagncatgccccagggacatcagaggtctctctgcatggggattaacaggagaggaggaagccctgacatgtccaataaactcaatcatctggaagatagctcagtaggtgtatccttnacccagcattgtgggagaagatatgtctggaatgtgtatttctgcggggagtgagaaaggaatgtcagcagtcaggatgtctgcagatggggaattagaaatctntcttagtgttggtgggacccagttcaaaagagacttcagaaggattgatngtttagacgggtaatctatataggacctgtttagatgaacttcagtnggaatgagggatgatgtanttagggataataaggttagctgttaaccaagcaactgagcttttaaccaaagcc

SEQ ID NO: 706402 - DNA, 1150 bp, Homo sapiens
gtgtctgtgttgctttctcgctatgctgatgtgtcttctgctctactgctctcgcttgtctgtgtcccgtctggcttgtgtttgcgttgttcccggctgatgggcgctatctgtccggcctttccttgcgtgttatttctgcaacgcctcggtttcccctttgtcacgtctctgctttttgatggtggtttcctctcggggctctcttctgtgcacgagttggtgtccccacggcgctccagactttttccggtttgtcctgtctaaggttgttgtccggtcccatccggatcgctaactggtcatgctacactatggggtaatacttgggttaactcctatcgctacatattctgtttccctttgctaaatttggatatgtatcgtcctattcttatgataatttcatgggtttatcaccatggtatctcctggctgttacttacgcaatatagtgaggaattgctcacctagtatcgcccttgtgatatataggacgataagtcttcgtactcttcggcctttctactgcagattcagatgggacatatatgtcttgtactgagtgctcagtgaagtgcatagttttcatccagatatcatgtcgagatacctcaactcagagacagccatgactccaggagcatggcactaccgccaggtacatgagtctagcatccgaaaccttcagtggcctagctacagaccctacctgaagagcctatctcgaagactcctcagatgcctacctaactaaccccatcctagcagttccttcaccaaggtacaatatcctgggtcccatgactcttatctgcccaaatataatattacaaggactcatttagagttgttgaaagagtttctcttcgtaatggccctaagctgtgtacaatctgctgagatataaactgtaaatcacccatgtatttattgaactgcatacagtgagatactaccacatgatagtctttgctatctacaagatagtttatttgtgcaacgattgctgaccacaagagggctagtatcttgtgttgctccacctatgggaggggtaatggccagagaagtagagactgaagacaaagagtgtgttatgacccacattccaatttctttcacaactttaccttcgcggattggtata

SEQ ID NO: 706403 - DNA, 395 bp, Homo sapiens
agggtaggtgctaataatttctgctttaaaattgcaccatggaatactatgcagccataaaaaggatgagatcatgtccttgcagggacatggatggctggaagccatcattctcagcaaactaacacaggaacagaaaaccaaacaccgcatattctcactcataagtgggagttgaacaatgagatcacatggacacaaggaggggaacaacacacagcagggctagttgtgggtgggggcaaggggagggagagcattaggacgaatagctaatgcatgctgggcttaaaacctagaggacaggctgataggtgcagcaaaccaccatggcacacatatacctatgtaacaaacctgcatgttctgtacttgtagaacagaacttattaaac

SEQ ID NO: 706404 - DNA, 183 bp, Homo sapiens
ctgggaatgtgtcatacgggtagcaccaaagcggagcttgcctattctcttcacagagcttgcgggcaggtcagtcgcgaggaggtcctcctccacgtcggactcctccactctcatcatccgctgagatccggatctcagactcagactcctcgtgggatgcgagaggggactcctctagac

SEQ ID NO: 706405 - DNA, 310 bp, Homo sapiens
tcatggacataggtgcatcgtggggaaaaaacccctactccaaattccacaaatggtcaggagccgtgaccagaggctcaacatcattaatcattagagaaatataaatcaaagccacattgagagaccacttcatacccattaggagggctattgaaagaaaacacacacacacacagaattcaactggtgttggcaaggatgtggaaaaactgaaacccttatacattgctgggggaaatgtaaaattgggcagtcactatggaaaatggtaatggtggatcctcaaaaaattaaaatgttgcccagg

SEQ ID NO: 706406 - DNA, 350 bp, Homo sapiens
tgacctcataaagcatgatctcattctgcccatactggggcaacagtatccaagcggcattcaaattctgcccctactgaggaaattctttgcctgtagacgagcatgtaaggtcccaaacctttggcaatccacatgtgtcatccttccaaggctcaaagagagggctgaacaccaattttgaaacctctcctaagaaagtgaaatggtccagcacctgcacctaatcccgattatccctaatttcagatggtgacagttctgattctgaagatactctgagttcctctgatagatccaaaggctccgggagcagacccccaacccccacaagcagccctcagaagacc

SEQ ID NO: 706407 - DNA, 872 bp, Homo sapiens
ggcgtcagattgtggagtggcgtagacgagtgaagtcctggtctgcgtggaggtcgacgcatccgtcggagactacggacctgtctgggtctcagccggccaaagaccccgtccggaagtactagccgtggacatcatgagtggcaatgtcgggtatacatcgggagattaaatccagtggcagggatgaaggacgtggaaaaggattcttcaagggatatggaggtgtaagagatattgatctgaagaggaggctgtggtatgggggaatgcgaggatccagagggatgcaggatgatgctgtgtatgagcttgatgaggaaatagaattctgtaggtgaaagggttacctattgaatcatgcaaggggtcggatcaggaaggggagagaggtaggaggaacgatagctctgacggttttagatagtcgcagaacctcgaaagtgatagaggaaatgctggactgtaagaggagaaaatcgtcttatagtgagaaatgtatacctcaagagtcagtggaggatctccaaagattgcatgagaaaggctggggaagtaacgttttgggggatgcgctaccgactaaattgattgaaggtggggttgaggttgccttcataatgtgtgagtaagagactgctagtgacgaacctctactgcacgggaaataaatgggggaccagttaagttaattgaaggcgaaaaagccgggtggtcatgacggaggttcgtatccggacagaaagtctcgagggttgagcggacgttccggtatgcaattttaaacggtaaaagaggcaagagcggaaggagacccttagaaagtccgggtaagacaaggtgtttgaatcacccgacaggtaggtggtcaa

SEQ ID NO: 706408 - DNA, 1365 bp, Homo sapiens
agtgagactttcttgggaaaaaaaaaaaatgacagtgaagcagacttttagaatccgagatgtcattgcagaattattggtataaaattcagctgcaaagtgaagaaattgaaatggcccacacgttgatatcctgtggcaggttatacccttcatgttagcaaagacgaagccacgtcgctgtgttaagagggacaggctgggccggctgcagctgtagtggaagtgagggacacagggaaggaatggggagcagcaatttggggacagtagactggagtcactttctgactcaaaaaaggtcaagtacttattaaaaactatcttggttttctgttcagacttaggctcattttgatcattttaaggtcccagttgtcaaaaatatcaagtgaatttgtctcaggtttttcaggaaacaaaatttacaggaaggaagcaaaagccatgtcagtagccttgagctgacagctttaaagaaactggcaaacaggtaggttgtcctcatatagatccttccagtattctgaaaaacatccttttatttcttaaaaccagtaacccttacatttttcctataggatagttatttttgttgagatcaaatagacattctataaatgttataaattatgcttgcagttactcagcctatctaggcttaaggtttatcaatatttgaagttgaaacatcatcttatgaggtttagttttagggaagataaataaatatatcaaagtatttcataaagttgtatcaatgttccttctaacattagaagacttactgactgaggccatctgtgaacgactaggtgatctcagaatccttccagctctaataccctctgactaacactcacccagaattgctgtctgtgctggctgtgatctgcctccaggagcatacgccatcctgcgtgctgtgtccatcacagtgtctgtgctcggtgcccttaccactgtcccgtgtcccttggacgctgactggacagagaggagcctgtctctcagggcacatgagtcgtcgtggcaggaggagacgggcctcagtcacagtgtcacagacccttgtcacagtggacactagtcattcctgccatgtccttgcagcccaggaggactaaaaagattttaatgaagtctgtgttactcattctgaagaaaagaacttacctgagaggagtaatatttttttaatatatattgggtcagggacagggatggagtggttgttttatgtttacatttttaataagtaaaatagaagatttaagaactaatatttatggtattgaactttaagtgtgatatattccttagaaaaacacaactttaataaaaatggaaactaaaaaaaaaaaa

SEQ ID NO: 706409 - DNA, 242 bp, Homo sapiens
  misc_feature (112)..(112): n is a, c, g, or t
ccgaccgtgattggcttccgtgtctttccggtgatgctgttggggtctgtgggtttgggtgggaagagggccatctgcctgaatgtaacctgctagccctccgaaggccctngcgggcctggcttgtgtgagcgtgtggacagtggtggccgcgctgtgcctgctcgtgttgcctacatgtccctggctgttgaggcgctgcttcagcctgcacccctcccttgtctcatagatgctccttt

SEQ ID NO: 706410 - DNA, 551 bp, Homo sapiens
ttttttttggacccagtgtataaccttgacatagtggatacatcatttcttcctccatatatatttttcctccattaaaaaagaaacaaaaacttttttatacctgggttttgctcttgatttagctctcaaggtggtccttgtttactttttaataatcactgctcttcatctgtcaatatttaattggtatgatttatcccaaaattgtttatagaaagtcagttttttgttttcaactctagatctttgttcctgttcctcgagcctggtggtcaccctctggcttctgctaggcaatctgtttcctctgctggctggatttcttctgtgtatatggcactatgcagatggtagaagtggcattcctggctttggcttggaagaattgacgaccatcagaccttgaagcagaacttcacagcagcctgtcctcatcagcaacccaaccacctcaatcttggagaaggagaaggaactgcaagccaccaagtcttcatttttcagggtttgtaatcttcccaaagttttcctattttaaatttaatggc

SEQ ID NO: 706411 - DNA, 2423 bp, Homo sapiens
gcgcagaggcgtcacgcactccatggtaacgacgctcggcccgaagatggcggccgaatggggcggaggagtgggttactcgggctcaggcccgggccggagccggtggcgctggagcgggtctgtgtgggtccgaagcgttttactcctgttgggcgggctccgggccagcgccacatctactcccgtctccttgggcagttcccctccctgccggcaccacgtcccctctgacactgaggtcataaataaagttcatcttaaggcaaatcatgtggtcaagagagatgttgatgagcatttaagaatcaagactgtctatgataaaagtgttgaagagttgctccctgagaaaaagaatcttgtaaagaacaagcttttcccacaagcgatttcttatttagagaagacttttcaggtccgtcgacctgcgggcactatcttacttagcagacaatgtgcaacaaaccaatacctccggaaggaaaacgatcctcacaggtactgcaccggggagtgtgccgcacacacaaagtgcggccccgttattgttcctgaggaacatctccagcaatgccgggtctaccgtgggggtaagtggcctcatggagcagtgggtgtgccagaccaagaaggcatctcagatgcagactttgttctttacgttggtgctctggccaccgagagatgcagccatgaaaacatcatctcttatgcagcctattgtcagcaggaagcaaacatggacaggccaatagcaggatatgctaacctgtgtccaaatatgatctctacccagcctcaggagtttgttgggatgctgtccacagtgaaacatgaggttattcatgccctgggtttctctgctgggctgtttgcattctaccatgataaagatggaaatcctctcacttcaagatttgcagatggcctcccaccttttaattatagtctgggattatatcaatggagtgataaagtagttcgaaaagtggagagattatgggatgttcgagataataagatagttcgtcacactgtgtatctcctggtaacgcctcgtgttgttgaggaagcacgaaaacattttgattgtccagttctagagggaatggaacttgaaaatcaaggtggtgtgggcactgagctcaaccattgggaaaaaaggttattagagaatgaagcgatgactggttctcacactcagaatcgagtactctctcgaatcactctggcattaatggaggacactgggagacagatgctgagcccttactgtgacacgctcagaagtaacccactgcagctaacttgcagacaggaccagagagcagttgccgtgtgtaatttgcagaagttccctaagcctttaccacaggaatatcagtactttgatgaactcagtggaatacctgcagaagatttgccttattatggtggctccgtggaaattgctgactactgccctttcagtcaggaattcagttggcatttaagtggtgaatatcagcgcagctcagattgtagaatattggaaaatcaaccagaaatttttaagaactatggcgctgaaaagtatggacctcattccgtttgtctaattcagaaatcagcattcgttatggagaagtgtgagaggaagctgagttacccagactggggaagcggatgctatcaggtttcttgttctcctcaaggtctgaaagtttgggtccaagatacttcatatttgtgtagtcgggctgggcaggtcctccctgtcagtatccagatgaatggctggattcacgatggaaacctgctctgcccatcatgttgggacttctgtgagctctgtcctccagaaacagatcctccagccactaacctgacccgagctctgccacttgatctttgttcctgttcctcgagcctggtggtcaccctctggcttctgctaggcaatctgtttcctctgctggctggatttcttctgtgtatatggcactaggaatggaaaagtggatcttcaagatattcttttatgttatgttcttggacgctgactggacagagaggagcctgtctctcagggcacatgagtcgtcgtggcaggaggagacgggcctcagtcacagtgtcacagacccttgtcacagtggacactagtcattcctgccatgtccttgcagcccaggaggactaaaaagattttaatgaagtctgtgttactcattctgaagaaaagaacttacctgagaggagtaatatttttttaatatatattgggtcagggacagggatggagtggttgttttatgtttacatttttaataagtaaaatagaagatttaagaactaatatttatggtattgaactttaagtgtgatatattccttagaaaaacacaactttaataaaaatggaaactaaaaaaaaaaaa

SEQ ID NO: 706412 - DNA, 224 bp, Homo sapiens
atactttttgaactatcttagataatgtaacattcctttataacttacttaagcagtgtcaaaactggggtagaagggattttatttgttcccaaaagggttccatcttagctatctgttgatcgagccttcagcagacatctaagtatgatccaatcaaattttaatgggttgcatggcagtccggtgtacagctggcagtcagttggttggtgaagtcatta

SEQ ID NO: 706413 - DNA, 2276 bp, Homo sapiens
gcgcagaggcgtcacgcactccatggtaacgacgctcggcccgaagatggcggccgaatggggcggaggagtgggttactcgggctcaggcccgggccggagccggtggcgctggagcgggtctgtgtgggtccgaagcgttttactcctgttgggcgggctccgggccagcgccacatctactcccgtctccttgggcagttcccctccctgccggcaccacgtcccctctgacactgaggtcataaataaagttcatcttaaggcaaatcatgtggtcaagagagatgttgatgagcatttaagaatcaagactgtctatgataaaagtgttgaagagttgctccctgagaaaaagaatcttgtaaagaacaagcttttcccacaagcgatttcttatttagagaagacttttcaggtccgtcgacctgcgggcactatcttacttagcagacaatgtgcaacaaaccaatacctccggaaggaaaacgatcctcacaggtactgcaccggggagtgtgccgcacacacaaagtgcggccccgttattgttcctgaggaacatctccagcaatgccgggtctaccgtgggggtaagtggcctcatggagcagtgggtgtgccagaccaagaaggcatctcagatgcagactttgttctttacgttggtgctctggccaccgagagatgcagccatgaaaacatcatctcttatgcagcctattgtcagcaggaagcaaacatggacaggccaatagcaggatatgctaacctgtgtccaaatatgatctctacccagcctcaggagtttgttgggatgctgtccacagtgaaacatgaggttattcatgccctgggtttctctgctgggctgtttgcattctaccatgataaagatggaaatcctctcacttcaagatttgcagatggcctcccaccttttaattatagtctgggattatatcaatggagtgataaagtagttcgaaaagtggagagattatgggatgttcgagataataagatagttcgtcacactgtgtatctcctggtaacgcctcgtgttgttgaggaagcacgaaaacattttgattgtccagttctagagggaatggaacttgaaaatcaaggtggtgtgggcactgagctcaaccattgggaaaaaaggttattagagaatgaagcgatgactggttctcacactcagaatcgagtactctctcgaatcactctggcattaatggaggacactgggagacagatgctgagcccttactgtgacacgctcagaagtaacccactgcagctaacttgcagacaggaccagagagcagttgccgtgtgtaatttgcagaagttccctaagcctttaccacaggaatatcagtactttgatgaactcagtggaatacctgcagaagatttgccttattatggtggctccgtggaaattgctgactactgccctttcagtcaggaattcagttggcatttaagtggtgaatatcagcgcagctcagattgtagaatattggaaaatcaaccagaaatttttaagaactatggcgctgaaaagtatggacctcattccgtttgtctaattcagaaatcagcattcgttatggagaagtgtgagaggaagctgagttacccagactggggaagcggatgctatcaggtttcttgttctcctcaaggtctgaaagtttgggtccaagatacttcatatttgtgtagtcgggctgggcaggtcctccctgtcagtatccagatgaatggctggattcacgatggaaacctgctctgcccatcatgttgggacttctgtgagctctgtcctccagaaacagatcctccagccactaacctgacccgagctctgccacttgatctttgttcctgttcctcgagcctggtggtcaccctctggcttctgctaggcaatctgtttcctctgctggctggatttcttctgtgtatatggcactaggaatggaaaagtggatcttcaagatattcttttatgttatgttcttgtgaacaaagcacaaagtttgagtgagtgccaactgcagatggtagaagtggcattcctggctttggcttggaagaattgacgaccatcagaccttgaagcagaacttcacagcagcctgtcctcatcagcaacccaaccacctcaatcttggagaaggagaaggaactgcaagccaccaagtcttcatttttcagggtttgtaatcttcccaaagttttcctattttaaatttaatggc

SEQ ID NO: 706414 - DNA, 921 bp, Homo sapiens
ggatcggcccgcggtagtctgtggaagtgcttcgggcgctcatcgccgtctggagcgacctgatgctccggacgttggctgtgatggaagagttaagcagctgggggcgtacgcgtgggtagcgtaaatgtattctggcttcatgaaattaatgcagtattaataggaactgtggttatttcggagaactggttgagatagttgaggagagggaactgcgtgtggcgctgtgacgaaggatgaggagtgcctaggggtggatttgcaggagtgtgtgctttgtaggcgtggtgagagcgttgttgaggggagctatgtagagaggaagtggtgctataacgtggctacctctggagagggggtccgcgctacgctggttcaacacttacctccgctttgaggggcacaccccttagggacttttattcggttttcttgaagggtttggcttgggctgagggtacataacaagtgggagctcgtttcccttcctttttttgttctgggcttagggaaaacttgcgtgtgtgcttttgtggttcggtcctcggtagcaaaaggcggaaaggagaaaaacatttacttggtggggagcggggatccaaaaggggggaaagggacgtagagtcgttaagattcggctgggaaacatgtttgtggggggttggcgattggggcttctgagtgcgtgtactgttgggccggcaatttgagatttgctccgatgtttaggcgcgaatatggagagggtgcagtaggggggaacagtgtttgggttggacaccagaagattgtgggagtaattgggtaattcgggtgtggccttaagggaattgttaacaggtgagagaaggagtattggaattgggtgttgtatagatacttgggaaaggttagggttcgggacctgggactttttgg

SEQ ID NO: 706415 - DNA, 2413 bp, Homo sapiens
gcgcagaggcgtcacgcactccatggtaacgacgctcggcccgaagatggcggccgaatggggcggaggagtgggttactcgggctcaggcccgggccggagccggtggcgctggagcgggtcataaataaagttcatcttaaggcaaatcatgtggtcaagagagatgttgatgagcatttaagaatcaagactgtctatgataaaagtgttgaagagttgctccctgagaaaaagaatcttgtaaagaacaagcttttcccacaagcgatttcttatttagagaagacttttcaggtccgtcgacctgcgggcactatcttacttagcagacaatgtgcaacaaaccaatacctccggaaggaaaacgatcctcacaggtactgcaccggggagtgtgccgcacacacaaagtgcggccccgttattgttcctgaggaacatctccagcaatgccgggtctaccgtgggggtaagtggcctcatggagcagtgggtgtgccagaccaagaaggcatctcagatgcagactttgttctttacgttggtgctctggccaccgagagatgcagccatgaaaacatcatctcttatgcagcctattgtcagcaggaagcaaacatggacaggccaatagcaggatatgctaacctgtgtccaaatatgatctctacccagcctcaggagtttgttgggatgctgtccacagtgaaacatgaggttattcatgccctgggtttctctgctgggctgtttgcattctaccatgataaagatggaaatcctctcacttcaagatttgcagatggcctcccaccttttaattatagtctgggattatatcaatggagtgataaagtagttcgaaaagtggagagattatgggatgttcgagataataagatagttcgtcacactgtgtatctcctggtaacgcctcgtgttgttgaggaagcacgaaaacattttgattgtccagttctagagggaatggaacttgaaaatcaaggtggtgtgggcactgagctcaaccattgggaaaaaaggttattagagaatgaagcgatgactggttctcacactcagaatcgagtactctctcgaatcactctggcattaatggaggacactggctggtataaagcaaattacagcatggctgagaagttagactggggccgaggaatgggctgtgactttgtcaggaagagctgtaaattctggattgatcagcagagacaaaagagacagatgctgagcccttactgtgacacgctcagaagtaacccactgcagctaacttgcagacaggaccagagagcagttgccgtgtgtaatttgcagaagttccctaagcctttaccacaggaatatcagtactttgatgaactcagtggaatacctgcagaagatttgccttattatggtggctccgtggaaattgctgactactgccctttcagtcaggaattcagttggcatttaagtggtgaatatcagcgcagctcagattgtagaatattggaaaatcaaccagaaatttttaagaactatggcgctgaaaagtatggacctcattccgtttgtctaattcagaaatcagcattcgttatggagaagtgtgagaggaagctgagttacccagactggggaagcggatgctatcaggtttcttgttctcctcaaggtctgaaagtttgggtccaagatacttcatatttgtgtagtcgggctgggcaggtcctccctgtcagtatccagatgaatggctggattcacgatggaaacctgctctgcccatcatgttgggacttctgtgagctctgtcctccagaaacagatcctccagccactaacctgacccgagctctgccacttgatctttgttcctgttcctcgagcctggtggtcaccctctggcttctgctaggcaatctgtttcctctgctggctggatttcttctgtgtatatggcactaggaatggaaaagtggatcttcaagatattcttttatgttatgttcttggacgctgactggacagagaggagcctgtctctcagggcacatgagtcgtcgtggcaggaggagacgggcctcagtcacagtgtcacagacccttgtcacagtggacactagtcattcctgccatgtccttgcagcccaggaggactaaaaagattttaatgaagtctgtgttactcattctgaagaaaagaacttacctgagaggagtaatatttttttaatatatattgggtcagggacagggatggagtggttgttttatgtttacatttttaataagtaaaatagaagatttaagaactaatatttatggtattgaactttaagtgtgatatattccttagaaaaacacaactttaataaaaatggaaactaaaaaaaaaaaa

SEQ ID NO: 706416 - DNA, 297 bp, Homo sapiens
tggctagctgcagttgtctgtgaggctgctcttctggcctacgtatgccttgctcagccccagtgcccttgtgccaccaccttgctggctgtcagcaggcccattgaccctggggccccactgcttgggtgggcacatggtggcccttgtgtcatgagacgtctacaacacacttgatgactgtctctgtggaggctagtggttagcttgacgagactgggggcctagtgacttatggccttgaaaggggcttgccccaattgtggtagtgggccagccgtacttgattggagatga

SEQ ID NO: 706417 - DNA, 753 bp, Homo sapiens
  misc_feature (478)..(478): n is a, c, g, or t
  misc_feature (485)..(485): n is a, c, g, or t
  misc_feature (512)..(513): n is a, c, g, or t
ctacacttaccatgcaggtcggcgtctatactcaatctatccaataactggaccaacggtacaagcttccttaggaatgacaccccaatgctattctagagtacatatctacaacggggtttacaacctcgatgttggatacaggacatcccgatggtgcagcacgtattaaaggttaggtggttcattgatcaaaggcctacatgatatgaggccagactcgtgtaagccagggcaggttctatctacttcaaatggctacctgtacgaagggacatgagaaataaggcctacttcacaaagagccttacaccgaaaatgatatcattttaacttagggttatacccacgcacacgccgtaacaggttttaaaataagaaccaaatagggacgaatgatcatggcggccgcctcaggacagcctgttatagactggagcatgctaatgcatgcgtccggaattcgggcataacgggncaatttnacctatagggagatcggtaacaacaannttggaggggtttaagaacctcagaaatgtgaatatggagcctaaacccagcttaatatgttgggggggaaagcgcttttgggcagagggcgtaataaagggagggaccacgccaagggcttccaacaagaggctgaaaggcggaggctaaaaatggagccccataatctgtaagctaaaggtaactttgtggatggcctaattttaaccaaaaggccgaacttcggaggtttaaaagaaa

SEQ ID NO: 706418 - DNA, 187 bp, Homo sapiens
  misc_feature (114)..(114): n is a, c, g, or t
acacatggttagcacgaacgctacagaagtgtatctcataatgatgaaaagaaattacaacttaaaacacacacacacattacaaaagaaaagaaaaacattggtaaaactcangagcctcagcacaaagaggacttatgcgtctatatagtgccaggcgagtgggacatcaagagctcccaagaga

SEQ ID NO: 706419 - DNA, 174 bp, Homo sapiens
ggacatactctgtggtaagcactgtgtttgtaacctctttcctttataaattacccagtcttaggtatattgttatagcaacagaaaacggattaagacatatgttgtacattgaaccttaatgtacttgaacttgaagtttgatggctgcagcggctatagccatcttacttc

SEQ ID NO: 706420 - DNA, 143 bp, Homo sapiens
cgctagcggcattagtgaacggaggagaggtgaggacagaaagacagaaatctagagatatggaaaagggtgtctccttgagtctgcagctgagtactgatcagtatttgatgtgagaaagcgttcacttaatgccgctagcg

SEQ ID NO: 706421 - DNA, 119 bp, Homo sapiens
aaaatttgctcatttaatctatgttttttaattttttgacaaacagttgatcatagtattcctttatggttttttaaatttttgtaaggctggtagtaaagcctctgtttcattcctga

SEQ ID NO: 706422 - DNA, 391 bp, Homo sapiens
gggaggttgttttgtggcatttgtttgtttgttttgttttgttttgttttgctttccatgtgggaaaagttaacattggaactgtttttagtaaaagatttttttcaggctgggcacggtggctcatgcctgtaatcccaacactttgggagaccgagggagttggatcacctgaggtcaggagtttgagaccagcctggcccacaatggaaaaactccatctcccctaaaaaaacaaaagtagcctggtgtggtggcacatgcctgtaatcccagctacttgggaagctgaggcaggagaatcacttgaacctgggaggtggaggttgcagtgagccaagatcacgccattgcactccagcctgggcaacaagagtgaaactccgtctca

SEQ ID NO: 706423 - DNA, 321 bp, Homo sapiens
atgcgagtatgcggaagaagttgttgtagtgccccggtcatgatgacgctgtcgctcccgttccaggcacattcaaacttgttgaaaatgcagtcgttctcgtacatgtggaacagagcttgctcctgaaggtagtcagtggacctaggtatggtctcatatgtggtcattgcctccagtgttcatgtgtcccatgacctttgacttgtaagtgtagtccctgtggtgatgcatgtatgctggcctgcttgtggcttgaaacttcactgtcgtgacactggagggagatagatttacctgagaacgaattgagctggttac

SEQ ID NO: 706424 - DNA, 294 bp, Homo sapiens
  misc_feature (6)..(6): n is a, c, g, or t
  misc_feature (73)..(73): n is a, c, g, or t
  misc_feature (83)..(83): n is a, c, g, or t
  misc_feature (266)..(266): n is a, c, g, or t
ctttantagcagcattagaaccaacttaatgcacaaactcaaccagaaataaaaaagggagggaagacttccncaactcattntatgaggtcagcataaccctaacaaaaaaatctggaaaagacactaaaagaaaactatagaccaatatccctcataaacatactctcaaaaatctttaatgaaatattagaaatcaataaggttaagagctctgttgtataacatggtgactacagttaataacaatgtataatatttttganaattgctaagagaaaagattttgtgttc

SEQ ID NO: 706425 - DNA, 471 bp, Homo sapiens
gtcgtctagaggatccggtctgtacatcacatagcctcatgaagaatacagtgcttataaaaatgtcataaaatgcgcaactacagttccttcaaatacagttgatgctatctttggtcctaatatgtgcttcttggatgttactaattttgttgtttgttattgttctttgaataactggtaataagcaccaagttgagggctgattctatctacaggtaagaagcttggatgttttctccctgattttgtcatttctttccaacttcccaaatgcatgtcatacagcagggaagaggcatctctcatgtctcaaaaaagcttaatggcacaggtggatgtgggcactgaatgttgtacagcagtggcaaccagccgggaaaatccataggatcatttcagaccgcattcaacacagatactcatgtagccccgacgtttcttgtgaagggaattgatgtattgcttgag

SEQ ID NO: 706426 - DNA, 277 bp, Homo sapiens
accagccatcccgtaagtattgctttgtggtgctcaaaggccggccatgtaacgatcgtcgacgatgtctacttcgaacacctggcaagcacaggcacgccaaggtccactctggttggtattgacatctttactgggaagacatctgaagctatctgaccgtcacctcctaatatggatgtccccaacatcaaaaggaatgacttccagcttgattggcatccaggatgggtacctatcactgctccaggacagcgggacaggtatttagaggacc

SEQ ID NO: 706427 - DNA, 872 bp, Homo sapiens
gccgcccttttttgtgttttttttttacagtgagagaaaagatggaatcccgttctcatttgggcctctctgaaacttccatttacacccatggcgctcatctatcaagaagaggaagaaaaggctctgcctgtataccataaaaatcaagtactcatgtactggtgagaggtggcaggatattggttcctaccagattatttgggctctaagaaatttacattttcagttaccagtgtattgagggaaccacggggcaaactgttggaagatggtcttcgtggaattatgtcagtgtgccattgcataaagtgcttctggaagttaaaatctgccaggactagtcaaaagtgtccacactttggcaacaaaggataaaagatcccagtgggtatcaccgagtccttcccagctgggtctcattatgggcactgctgctttaacctccaagccgctggccctcaccccaggcgaagcctccgtggccgttcctcaggtagtggattgtaattgggatcctcatctggtgtatcaaaaatagctttcaacaatagatggtgttttcagaattcttattccaccaggttgatggggaaatacatcttccaagaaaaaatattttgttgtccaatgcaatacccaaagggtccccaatgattgatgtttccccaacaaacagggaaatcccatgagcccacgacagaaagggggctggaattgagaaggccgcagaattctgcggactagggtcttccggtcccacatagacgagcttatgtaaggctggcagaaaatagttccacagaccaaggggttaatcccccagggtataagtgtgcggccaaactttttcgacgcgtaatctttatgcc

SEQ ID NO: 706428 - DNA, 402 bp, Homo sapiens
acttgcgctatgagcagaggtactctgagccaagattgtgccactgatctccaacatgtacaacagagtgagacctatctccaaaaacaaaacaaaacaaaacaaaacaaaaaaatcataaacaaacaaaaaacttcaaggagggctcggcacggtggctcatgcttgcaatcccaccaccttggtaggctgaggtgggtggatgacctgaggtcaggagttcaggatctttcctggccaacatggtgaaaccccatctctactaaaaatacagaaatttagccaggtgtggtggcgcctggttgaggcatgagaatcgcttgaacccgggagttggaggttgcagtgagccaagatcatgcctactgcactccagcctgggcaaacaagagtgggactctg

SEQ ID NO: 706429 - DNA, 375 bp, Homo sapiens
tcatgatttctgcattttttgtttaatatgacattggtagcctgtttaacttcattttatcatggccacttataaatagatagcttaagtctgtgtgcacaaaattatgtttcattctgttaaattttttgtttttttcttttttagatagagatttaagttccttatataactaagggtcctattccaaatttaacaatcaaggtacctagttgtatgaaatttggaaattttcttaaccctctcttctgtgttattggcactttttgattttctaggagctctggggtttgcaagtttctgagccttgagtattcctgctttaaccagcgggatggcagccattttgccctgtgttagtgccttgtccgtggg

SEQ ID NO: 706430 - DNA, 279 bp, Homo sapiens
cagactagatggtattttagagaaaaatatattgcttcaaatatggttttttgttgtttgttttattgagacagagtctcactctggtcacccaggctggagtgcagtggcgtgatctcggctcacagcaacctccacctcccacattcaagtgattctcctatctcagcctcccaagtagctgggattacaggtgcacgccaccacacaaggctaatttttatatggttagtagagacagggtttggctatgttgagcaggctggtcttgaactcctg

SEQ ID NO: 706431 - DNA, 309 bp, Homo sapiens
  misc_feature (260)..(261): n is a, c, g, or t
caagtacggatgtgggaatggagagatgaggagtgactgcgccaatgggtagaaggtttctttttggagcgatgaaatgttctaaaattgactgtggtgacagttgcagaactctgtgaatatactaaaaatgactgaattgtatgctttaaatgggtgaactgtatggcatatgaactatatctcagtaaagcattttttttttggtttttttttaaaccccgattaggggtttcccactggcactggcattatacaanngcaaaacctggctgggtgatccaacccgggcctctctctctatgccac

SEQ ID NO: 706432 - DNA, 754 bp, Homo sapiens
gcgcagtggctcatgcctgtaatcccaacacttgggaggctgaagcaggcagattgcttgaggccaggagttcgagaacagtctggccaacatggcgaaacctcatctctactaaaattacaaaaattagccgggcatggtggcacatgcctgtaatcccagctacgtcaggaggctgaggcacaggaattgcttgaacccaagaggcagaggatgcaatgagccaagatcacaccactgcactccagccttggcgacagagggagactctgtctcaaaaaaaaaaaaaaaagggtgtgtggcccgggcccttaagcctttggccttggtggcccagccagagagccaatttaaaaggggctgggtttccttatatcacacagatataatttggctagtggctaacgccaaatggtatccctttggggtttttaacgtgcgttatcagcaacatatcagtgggtgggtcccttttggggctcaatttcccccagtggactctcttggtttccttaaaagcaagcctctttatccctagagggggagggaaccccaaaggggggccatagagggttatagagaaccctatattgtagcaagtgtggttttgttccataagtctcctcgggcagcagttccgtggaaacggtgtgctcaacatttttcaccagagtttcccaaccccttgggggcaagtgggcctctgcgcggggcaacatggggggacccaagggctctggcggtcaccgaacat

SEQ ID NO: 706433 - DNA, 714 bp, Homo sapiens
  misc_feature (45)..(45): n is a, c, g, or t
cgcgagtgtctttcaacaggaggggggcacccattacagggcaanaggtttgattcctttttgcttgaggccggcagccatataactccaagggggtttaaaaatcctccccccaccatttttgttgaaataacatgggagggaggtaccaaggggcgtttttccccaaaaggcacccgtcccttttgggaacagcactctttagggccagggttaacacctgagatttttccccggtaaacccgagggtccgcgtgtgtaaaatatctttaagtaggattgaaggcctctgtggggaatataatgttccccaagcctataaaaataaattttccaggttcttttttatgccagagagcagcccgggttcggttattttttaaaatgaataacggatttcttgacgggggtttgggatttcttccctcccggctgattttgggatagaacccattctttaaatttgataggcggttttcagaaaacttttatcaccaaggggccaatggttatctaaaacgggccatttagaagggggcggttttatactagatttcagaaatttgaaaaatagcaaagaaggcgggatttggaaggcagggtctccaattgctggtcaattttgaagctatgaagaataaaggtttcggctttggattatgaacccccgtttatgatttttaaaacccccttgaaataaaaatggttggacta

SEQ ID NO: 706434 - DNA, 199 bp, Homo sapiens
  misc_feature (82)..(82): n is a, c, g, or t
  misc_feature (117)..(117): n is a, c, g, or t
  misc_feature (193)..(193): n is a, c, g, or t
cttagaggatcctgggatgaggaacgtcactgggatgaggaacgtcactggggatgaggaacgtcactccagggactgcaancggcccttccagcactgagaagcacaggcacacanccaaaggtaacagcgttacacccatcccctcttcctccctgggcaccacctggacccggctatcacagaacaacanaaccaa

SEQ ID NO: 706435 - DNA, 245 bp, Homo sapiens
actgcactccagcctggacgacagagcgagactccatctcacaaaaaaaaaggaaaagaaacgggccatgtgacaaagggacaattccgtgtacgatcccacttctgtggggtccccagaagagacgatttatagagccaaggtagaacagaggttctcacaggccgggaaagggaggaagcggaagtgagtggtgatgggtccagagctggtgtaaggggtgtgggacggcacaggggttcacg

SEQ ID NO: 706436 - DNA, 111 bp, Homo sapiens
gtcggaccatgtatcctcttggagaagcatggcgatgggcaggactcagccctgagcactgccttctctctgactctcactggacaggagaggcagagagaaggcagggac

SEQ ID NO: 706437 - DNA, 729 bp, Homo sapiens
  misc_feature (407)..(407): n is a, c, g, or t
ggctgaggcaagagaatcgctggaaacccaggaggcggaggttgcagtgagccgagatcgtgccactgcactccagcctaagcaacagagcaagacttcgtctcaaaaaaaaaaaaaaaaaaaaaaaaagaaaaaaacctgtgatgtacttttttggtaattgtggggggaacaaaaattgggaaaaaggtgtgggcttaattggtaaattctcattcttgccattacaattgcaaagtcacgtgcattaatgggtctcaaattgtgattaagcccagtgaaaatattccattaagcggcatatacgtgtttaagacacacgaatagtttgaattcccgagaagaaaaaacacgttataaaaaccaaagtaaaacacaaagagtttggctcccgtggggcagttagnattcttcacaagggtggtaaggagaattattcttcttccattctattaagccccgtgtagccaccaaccttgtacccttttaagcctttcatgtgcattacctattttgaaattaagcaaaaaaatacgtgtcaagggacaattggggaagaaggggtacgcaacgtacccattcggtgaattctagaacaggacttgtcctccacacaaattttggacccacctaccgggcacgagacattattatctgatacatagtgtcgccttaccatagcgctagggtaccatcctgaacgcttacggtatataactgcttcccccg

SEQ ID NO: 706438 - DNA, 611 bp, Homo sapiens
gccgtgtggccctgggaccctgggcccagaaaggactgatgaactaccctgcagtggtgatggcctgaggcctggggttgaccactaactggctcctgacagggaagagcgctggcatgaggctgtgctccctcctcaggtggcctctggctggctgtgggggactcctgtttactaccacagggagacagaggcgaggtaagccatcccctctgtgtgatgaacttgctgcctgaccatccataggctgggctggccccaacactcatccgacagccccagggttgccactgaggccccaggaagttgctgccctccactatcgatgcctcctttgaattgcacacttgaggactgagacttgggcgttagagctccattgtccttggggttactggtcggccatttcggggtagctgggcgaaggcgtggtgcaaaaatgcacccccctataggtatgcttagttcaccaaggcaggacctggacgttccgtgaagtagcagcaggggaatagcccccttaccattgctacacccgaagggggaacggggatcgagaccctggtctactgtgcatggaatggggtacgtacactaatatcacatacccc

SEQ ID NO: 706439 - DNA, 153 bp, Homo sapiens
  misc_feature (77)..(77): n is a, c, g, or t
tgaggatccattgatatgcatgatcagccatggccactacccttcacagccggtgtttgccccatgcttcagagcanaccacgcatgctgacgtcgggcagccatccccaggccatcgtgtcatcctctaccccctcatacgcttatacaatg

SEQ ID NO: 706440 - DNA, 902 bp, Homo sapiens
cagtttccctatgggccccgcggcccatttgagtcccaatgctgggactgtaatcttgcgcccgacaactcggtttccatccccgagggaaactcgccattggtaacaccggccttccataattagggatttctcttcactggtcgcccactagatggtggcccattgggtcagacactcggagtcgcttgtcccaagaccttcacgcggcgacagtgttatgctacattctacacggctcgggtaatgtgtgacgcgcttgaatgttggcgcgtcccgcccaaatgaagtgctaggtcctcttgctgacgttgaacatcgttatacgcattgccggtaccatcaccgcgaggtgttacctggtcccctccccgtccaggaaatcccaggtgcccccccatgtaggctgtactcttcgggaatcaatctagctagctgtgcgcggacttatttttccagttcctcgcatgtcatttccccaccttactttcatcgaaatcccggcgcaactgaagaactcccgtaagggacgccatccggtgtgagatcatctcctcgatatgaccagcccactctcgtgagataataagatgcgactgcacgaagacactcagtgactaatcactgagcatgtcattcccacccatacagcggttttatacccccgcatgccaatttccccggatacgttattaacccgaactccacattttctaccgaatccactgacgccgggaggtctatacaccgactccaagagcgatcctagaataacagttgtggaccacaaaaacaacaggttgtcgaatcaccgatcagttcaaaaataatttcccttaaaatttttggaatagggccccccttttccctatgtcaacccccatttaccccctcatggcctc

SEQ ID NO: 706441 - DNA, 188 bp, Homo sapiens
agccggaccacgtgggtgtcatgcaccgtggtgtgaagaatttgctcttgtgtgcaggcgtagtgcaatggtgtgttcttggctcacgcaacctccacctccgggttcaagtgattctcctgcctcagcctcctgagtagctgggattacaaggcacctgccatcatgcccagccaggttttcttata

SEQ ID NO: 706442 - DNA, 235 bp, Homo sapiens
ggaccacacgaagtgaagcctgcacaggagactgctgataaatcttaagcatcaacagccaaatcgaccaagcagaagaaaggatataagagttgaagaccaccttactgaaataagacatgcagacaagaatagagaaaaaagaatggaaaggaatgaaaaaagcctccaagaaatatgggactatgtgaaaagaccaaacctatgattgattggagtaccagtgtggagagag

SEQ ID NO: 706443 - DNA, 753 bp, Homo sapiens
  misc_feature (25)..(25): n is a, c, g, or t
  misc_feature (40)..(40): n is a, c, g, or t
  misc_feature (99)..(99): n is a, c, g, or t
  misc_feature (136)..(136): n is a, c, g, or t
  misc_feature (141)..(141): n is a, c, g, or t
  misc_feature (215)..(215): n is a, c, g, or t
  misc_feature (223)..(223): n is a, c, g, or t
  misc_feature (232)..(233): n is a, c, g, or t
  misc_feature (242)..(242): n is a, c, g, or t
  misc_feature (261)..(261): n is a, c, g, or t
  misc_feature (303)..(303): n is a, c, g, or t
  misc_feature (311)..(311): n is a, c, g, or t
  misc_feature (315)..(315): n is a, c, g, or t
  misc_feature (319)..(319): n is a, c, g, or t
  misc_feature (327)..(327): n is a, c, g, or t
  misc_feature (390)..(390): n is a, c, g, or t
  misc_feature (392)..(392): n is a, c, g, or t
  misc_feature (537)..(538): n is a, c, g, or t
  misc_feature (555)..(555): n is a, c, g, or t
  misc_feature (708)..(708): n is a, c, g, or t
ggtactgtctgctcatagaagtcgnttagtgaataaagtnacatattgtgggcgattcagtccatctgtgtgagtatcagtaaagctgaaagtgactcntcatcaaataggatcttcatagctatgagagctgcanaatcnatctgtatgatcaaagttcttctgtggggagtcatcttgactataatcagctgtgatgctggtagccgtctatntggtctcntgctgtagnnaatagactngatgtaattggtgaaggtntgctgaagcctgactgaatgatgggtgacatctgttggttgntgtagacnaagnaagnatgtgatntgaatcggtctcgctccaatgtcgacacaggtgtaataaattggttctgattccacccatccntnttataatgctccggaaggtcccgatattgccataatgtattcaagacctgggctgctgccttcaccactttcagagatgatctgtcgcccctgcctttggttatgttcaccagcttctctatgcctcctgagtcggcagggcttnntgcgttctccatgtttntgctggtgacctcgtgcagagcacagcagatggctgccatggtctcatcagacaagacactggggccattgccgccggggagccggttgacaggttctcgccgttagatctttctggatcttaatgtatgaactgggtacagttacacatttntgtgtatagagctgaggtgtacagcaactcatctgacactcgtgc

SEQ ID NO: 706444 - DNA, 354 bp, Homo sapiens
  misc_feature (19)..(19): n is a, c, g, or t
  misc_feature (41)..(41): n is a, c, g, or t
  misc_feature (103)..(103): n is a, c, g, or t
  misc_feature (302)..(302): n is a, c, g, or t
  misc_feature (330)..(330): n is a, c, g, or t
gacttcccatccaagatcnccaaagaaatgccagacaccgncttacccgccgaagaacgcccacccagcagcacgacgaacgagttgaacgcaaccttccctnccgagcaggtcgcgctcctgttcggacagcgccctcggtgcgttcgagaaacaggaatgcgatgccgatcggattgatgatgccgatcaggccggtgaagccgaacaggatctcggagataagacggttgacgatcatcgggcgaagcatcggtcggggctgggcggcagcgcgccggaggtcacgcattgtagagcanagcgccggcccgagacgcaaacttgcgncgggtccggctcgccgtcgatcgt

SEQ ID NO: 706445 - DNA, 406 bp, Homo sapiens
  misc_feature (183)..(183): n is a, c, g, or t
  misc_feature (294)..(296): n is a, c, g, or t
  misc_feature (310)..(310): n is a, c, g, or t
gtggtgtggatgggggatgtattgtgcatgatggagggttttatatgatgatttgtaatattagaagggtaaaaaataaaaaagaataagggagaaagaaattttggtgttattttaataggggtgaatgtaactttgttacgggaaaactttgtgggattatgcggaatggggtggggttanttggtctggaaggatgaatacggtaaatgaaagatcctatgatgtgtagggtcatttttttctctggcagcagtaatattaataattttcatgatttgagaagctttgttnnngaagtgaaaagtcntaatagtagaagaaccctccataaacgtggagtgactatatggatgccccccaccctaccacatgtgtgaagaacccgtatacataaaatctagac

SEQ ID NO: 706446 - DNA, 303 bp, Homo sapiens
ggcactggaccggtcgacgactgcatacctggtggtagcagccaatgacggcccatgcccagacccgagagcactcattactggccagacagtttggggtggggcatgtggtggtgtatgtgaacaagtctgacgctgtccaggatctctagagatgtgtggaactgtgtggaactgagagatccgggagctgctcaccgagtttggctataaagggggaggagaccccagtcatcggaggctcttctctctgtccccttgagggtcggcacctgagttagtcttgaagtttttacaagagta

SEQ ID NO: 706447 - DNA, 452 bp, Homo sapiens
  misc_feature (11)..(11): n is a, c, g, or t
  misc_feature (120)..(120): n is a, c, g, or t
  misc_feature (304)..(304): n is a, c, g, or t
gcccgcagccntgggaggtacgtactactggccccctttcaacggctgggaaaactgagacccagaaaggggaagggacttgctcagagtcatactgtgaatgtggacgaggaccagctntcaactccaaggtgcagccacccacgtcttaaccagagcaggaaggcgtcagtaacctcggtggcccaacctcagaacctgactctgctgtcaagggggaagataatcccaaaccccgacaagtagctggagaatcataactgacctccaaccaagtgtgactttgggcaaagcgctaacactntgagcctcagtttcaacgtctattaaatggggataattgtagttccgccttttagggaatccctgagaggatgaacctcagaaggcatttagcagaaagcctggctgattttgccatgcctccttattaaatgggatgcgctataaaa

SEQ ID NO: 706448 - DNA, 116 bp, Homo sapiens
tgtggcagacggtttctcaccatgtggtcgggctggtctcgaacctcctgatctccagtgatctgcttgccttgatctcccacatgtgctggtgattacatggctgtgacgccacc

SEQ ID NO: 706449 - DNA, 367 bp, Homo sapiens
  misc_feature (18)..(18): n is a, c, g, or t
  misc_feature (100)..(100): n is a, c, g, or t
  misc_feature (153)..(153): n is a, c, g, or t
gatggagtttcgctcttnttgcccaggctggagtgcagtggtatgatcttggctcaatgcaacctcagcctcctgggttcaagcaattctcatgcctcancctcctgagtagctgggactataggcacccaccaccacctccagctaattttnatatttttagtagagactgggtttcaccatgttggccagactggtcttgaactcctgacctcaggtgatctgcccaccttggcctcctacagtgccaggattacaggcatgagcaaccatacccggccatcaggtatttcttcatagcagtaggaaaatggactaatacagtcaaatggtaccagtagagtggagtactgctattaaggatacc

SEQ ID NO: 706450 - DNA, 153 bp, Homo sapiens
ctcttgaacggtttctgcactgtatgtcgcaaccaattttgatctgatgtcaccaagtggcaagggtaatggaagtgtaactgttctggtagttcaataaggacctccttgcctttttaatagaaacatacataaaatatgaccaaccccgga

SEQ ID NO: 706451 - DNA, 137 bp, Homo sapiens
tgggtcagtggtgactgtgtgggtgcagtggtgatgtttaacgataattagagcttggcaggtagacaagggcagccgtggcagacagtccccacagcataacaggggcggccgccctcctcatcagccgagagccg

SEQ ID NO: 706452 - DNA, 1693 bp, Homo sapiens
tgggaaaaaacccttggtttatcccctctgtgggacccttttcccgtaaaaggcccctcccacccttggggtggggaacatgtggggggcgttgggacttcccagggaagctctccggggaggcggtgcgttggccctccagtgttattttggctcttctcccacactttttcccagggcggctccccttgccaggggttcaacgccacataattattgctgcgttgaagcgcagacaaccaggcgtcggggagctcccttataggggtctgcgtcgagaagggtttgtttaccccccaaaaaacccaccttctccaagagacaccaagataaactccttgtaaaataaaggacagaatctagaactataaacggccccgagggggcgccatcttatatgaagaaaatgagggactcacactataaaaatatgtgggacagtgcgtcgcaataggaacacaatatgtgatgatatgtcccacaaccaaattgctattcaacggacacccagataaacactacaacccacacaacagatgagagaagagacgcgacaacacaacggtgagagcacacagcgaacaacaaacgaatcagaacaacaaaaatcaacaaaatgccacacaaagaacaacaaagagagataagatgcaaaaacagacagaggaagaaacaaaacactcacaacaacgaagaggcgccacacaccacaaaatcaagaaagacagcgaagcaacgaccatgcgaaacaacgagcgaatcaaaccaccgtagcaccgagactaagtagagaaatagtcatatatcattgaacacatgccatagtgcggcgagtgatggtatacaaacacgagtcgagtagacttagactagatcgcctactaaaatatcgagtcagtagtatgtacacccaaacatatagtatgcaggcaccaacaatcgagaagagcaaaaatctatcgtaacatccgcacgttaaaataatagtgcagacgacatacactcaacaaaaacaaccaagcatatcgattatcaacacaagtgatgtgagtaaaacacacaccccgtgataatatatcaatatatcgatatgcaaaacaaacatcttctgcacgagcgtcagaagataatacaatagcgcagtgcacccacgacacatgacacatcaaagaaataccaccagcacaatgaacgcaatcgagacagaaaagagagacaaatgacattcaccaacccacacaccgacacaagaacatccatgactaagatccaactcgactacacgcacagcagcatccccacaagcgaatacacacacaacaaccacaccgaacaaaccacatcgcgaatacacaaaaaagcaactgagagaatgacacacacatgatgagacgacgagacaacgccagcggccaacagtcgagagagccgaatcgaagaccaacgcggtgatgagaatcagaaggaatagacacaatcgaagcatgacagaaaacatacaagccgatgataatgaaatgagcgacagtgcgagcaaccaacgtggaagaaaacgaatacgaacggacgggaatatgattcagatagacgaggacaagagaatcataagccaggagaagagaagcgaaagcaaaatgagaaaagaaataacgaaaatgcacgcacacaacctatcgagatcaatatcgagata

SEQ ID NO: 706453 - DNA, 866 bp, Homo sapiens
gaagaaactgccttcatccacgtctggtgtcttctccttcttgtgtcctcctgcccacagacgcctcagtctctggagaatcgcaggtatatggttctggtcccctcccatgctccacacttgagaccactggaggaatgggctgtgtccttctgagactacctgaactgagagagagtactgtaatgtgcgttcctatggagttgtgctcagggtgacaataggtagccatcgttcatctgagcctgagacggcggagagatgacggtattccacgtctgatcgcacttcgcgtgtctcacatggtcttcagtcctattgactgaggctaaatgtcctctcacggttcctgtgtgatagtgtccaattccaatgaacttagtgaagggggagccatagaggactggtgtaggaaccgattgacatgtcgtggtccttggtctcagacgggacacgctcacatctacgaaccaatggcgtgacatgtgcaaatttcagtgatcgtcttcgatggcatgtagacttctcacccccatgaatgagtagattcgcattagtatacattcaaggatcccgggtggacatcgtatcgcacccagggagagtgtccgcgaagagggtggcctcaatgcatgttcttgtgccctggtatcatagacctgccaggtctcctacaaggggtggtacgaggacatgggggaagcagacacctataccggggggcatttgctcccattggaagacaggacgtgccagaaatccactggagctgagacgttctggtgggatacatggaggggcctcactgaggcgctgggaacatgaggcagtcggcaggctggggggcaccagactctgggaccctg

SEQ ID NO: 706454 - DNA, 224 bp, Homo sapiens
gaggggtctcgctcgttcccagctggggtgcgtggggtgactggctcacgcccctccatctccgggttctgcgattctccgccttgcctcccgggtgctggaattaaaggcaaaaaccaccaaaacctgtaatttcagcactttgggaggcttaggcgggtgggatcacgaggtcaggagttcgagagcagcctggccaatatggttaaacccagtctcctacc

SEQ ID NO: 706455 - DNA, 396 bp, Homo sapiens
  misc_feature (81)..(81): n is a, c, g, or t
caatcgagccggtaccaggagtgtcgtctttggtttctcactcctcagcccaagttccttgcccggccgtgcattcgtgcnttagctgctcggtcgacgcagatttcctacaattcgtgccgtgatcgcatctcatctgcactagtgctccggactcgctctgcaatcgcacccggcaggtgtctggatctgctcagtcttgaagctgggatggtgagctctatcacccgtgtggtcatcatttacattgctatcaggatctgccccctcctggttgacgaagtccttcacactctgtgattgttcttgaagttcctggttggcctgttccacctgtcccctggaagcattagccttgtccagggctgcctgggcccgctgctgtgcctcgcttgc

SEQ ID NO: 706456 - DNA, 141 bp, Homo sapiens
gtaccgaggccaggacagcagtgatcaaaactggagcagctctcaggctcctgctgcttatgcacaagggtagaaagaagacagaacacaggccctgggaaaatggccagcatcaccaagtgctccaggacctggagatct

SEQ ID NO: 706457 - DNA, 180 bp, Homo sapiens
  misc_feature (110)..(110): n is a, c, g, or t
ttatcgtgcgagtgtctcggcatgggagctctgagctgtgttggggctcgtctctcctcctgagctctgagctgctgtcgatgctctgcctcacctgtgtaggagcgcgncctggctgcggtacgagctcgatcgtatctggctgctttccggtaatgttccgctacccccgccgcgcgc

SEQ ID NO: 706458 - DNA, 475 bp, Homo sapiens
  misc_feature (57)..(57): n is a, c, g, or t
tgaacgaaggtcactcaggtgaagttctcctgggcatttttctactaaggtttggcncaactttctcaaaacataataaacagacattactgcactttggccctccagaaagtcaacgagcaaaatgtcttggcatcccaaaacactgttgccatgacctttgctcttgactggtccactttcgccttaatgggaccacttcggcctcttggtagccattgctttgattgtgcttagtcttcagtattgtactggtgaagccatggtttatctcctgttacaattctttcaagaaatgcttcaggatcttaatctcacttgtttaaaatttccattgaaacctctgctcttgtctgcagctgatctgggcatgagggtttcgacactcattgagtggaaagtttgctcaactttaactttcagtcagaattgagtaagctgaaccagttgagatgtctatgatgttggcggccgc

SEQ ID NO: 706459 - DNA, 167 bp, Homo sapiens
  misc_feature (105)..(105): n is a, c, g, or t
aagccgagctaacacagcatataatgctggatcaagctaagttgcaagctacactacagctcacagcaacactggatccttaacccaatgagcaaggccaagatngaaccagcaacctaatggataccagtcagcttcattaacaactgatgcacgacaggcactcc

SEQ ID NO: 706460 - DNA, 210 bp, Homo sapiens
catgaaagggctcaagtgctgtggcttcaacaactatacggattttgaggactcaccctacttcacagagaacagtgcctttcccccattctgtggcaatgacaacgtcaccaacacagccaatgaaagctgcaccaagcaaaaggctcacgagcaaaaagtagagggttgcttcaatcagcttttgtatgacatccgaactcatgcagt

SEQ ID NO: 706461 - DNA, 108 bp, Homo sapiens
aaccattgaatgtcaacataaaatattaaaagtactcagagattaaaagacaaattacatatattgggattagttttagactgacattagagtgcttataagtgacgg

SEQ ID NO: 706462 - DNA, 363 bp, Homo sapiens
  misc_feature (361)..(361): n is a, c, g, or t
gatcctatacaccatagatagaattatgatacatgctcctaccaagtaaatgggttaaataaatgaatagggatactcttccttacaaatcagtagaatgagagaactattggaattagaaaatcactttttgacctggggttgttggtggctcacacctgttaaatccctggcaactttggggagggctgaggcaggaagggaacctgcttgagcccaatgatgcttgagaccagtctggcaactagtgagactcggcttccttaccggaaattggggttgggtaattaagggggggtaacccggaaggccttccgaaaatttccggtaaattccattggggtccataaggcttgttttncc

SEQ ID NO: 706463 - DNA, 328 bp, Homo sapiens
agagtagatgaacatgaccttaatttctttcaattttgtaaagaaacccagccatcccattactgggtatatacccaaaggattataaatcatgctgccataaagacacacacacacgtatgtttattgtggcactattcacaatagcaaagactaggaaccaatctaaatgtccaacaatgatagactggattaagaaaatgtggcacatagacaccatggaatactatgcagccataaaaaatgatgaggttcatgtcctttgtagggacatggatgaagctggaaaccatcattctcagcaaactatcgcaaggacaaaaaacaa

SEQ ID NO: 706464 - DNA, 634 bp, Homo sapiens
gaagagacatatttctatctttattgccggatgtgattttgccagcaggcaaataaatacaagtggggagagggggaaggagggggatcctgtataaattagaacacaatctcaggtggggggaaggtgggtgggctggcaggggaggtggcaggcagggagcccactgctgggcacggtggctcgtgggcgttagtcacccctgtgtccccgcgagggctctggcgcaggcttcgcccctcagtggctgggtcggattcgggggctcataaggcgcgtgcggatgttggtggaatccggactttgctgctgtctgagccacgagctcacaggtcgaggtcactttgttgttgccaccaggggcggcggaacgtgcatgcgaggtcggcaaggaccaggcatgcagctttctggcccatcatgggtcctcctccagggcactgataatctgatcatagtacctgtggatgttggttgtagagttcttgcagagccttccagagagtggggagcagagagtgtagtgcccggagagctcagccaaaagagagttcatcgtacctggtagcgcgccggacgagctgtggcgaatgtgcgcatagtacctctccgcatctgctttggtaggtggtgt

SEQ ID NO: 706465 - DNA, 128 bp, Homo sapiens
tgctgatcacgcatggggaggggaatacacggattcaggtggtcaggtgcaggcctgaggcagggagacccgctgctgctgagacaggcaggctggggacagaacctacatgctgcccaatgctgctg

SEQ ID NO: 706466 - DNA, 332 bp, Homo sapiens
tgatgattccatgagattccatttgatgatgattccattcgtttgcattcgatgatgattccatttaggtccattcaaagattccattcgattccattctatgatgattgcattcgagttcgtttgatgattccattcgactccattcaatgatgattccgttcgttgatattcaatgattccattcgattccatttgctgatgattccatttgactccattcaatgattccattcgattccattcaatgaggattccattcgagtccatttgatgattctgttcaattccattcgatgatgattcctctcaaatccatttggtcgacgcgg

SEQ ID NO: 706467 - DNA, 360 bp, Homo sapiens
gaggacctgttaactactgagtgtgcctggaaactgttaaagttagggctgttgttcgtcttgtcaaataattcataggcgagggacaacctgtgtgcaaggctgtttgtacagtgtggttcgtgtattgaggttgacctagaaggttgtttggttggctgtggtgcgagtggtagtttggcaggttgccacatcaagactaacactgggctgaggggaaaagtggctgttagggtcatgcaggaaaaagaaagtattgggttgtgtacccaaagaagggtgtagggggaagccatgttaacaattctccctgcagaggccaggtctgtaggctcaagagtatttgtcctcccaccggga

SEQ ID NO: 706468 - DNA, 319 bp, Homo sapiens
cctgattctgtggttgatctagaggatccctggcaggaatagtgcctactccagccggacagcagaccatgcgggatgtctggtgaggaccaggtgcaccctcccctctgccactttccccagatgagcctgcagcaccagctccctcagcctggagctcagcgtcttgccacgaggggctatcccatggcaggacatgacagctgcaagtgtgtaccgactgcctccgcggggcacctgtgtggtcctgacgcgtgctgctagactgtgtccatcaatgatggagacaggactctgcggtgtgacgggtgctgcagac

SEQ ID NO: 706469 - DNA, 203 bp, Homo sapiens
tatggaccatctctcatcagacgtctgtgaatgcggaccccgtctcccacgagatctggacgtcagaaactctgctccaggtacttgtagaactgtggcttcatcactattcctatggagatgtatcaacacaatgcagtacccttcatgccaaagctggaaggtactgcaactaaccgactcaggtgactcccagcggtgct

SEQ ID NO: 706470 - DNA, 242 bp, Homo sapiens
tgtgggcatgggctgagcatgtaggtgctgtgctgcatcggcagttctcacctgacttcggcgtggattcgtgacgacttttacggctggtacctgctgcagattttcggtcagccgatggccgtgttgccgctgctgatgctgtccaccggcagtatccagcggcaatcgacccagcgcaggttgcacagcgccgccaccagcggcagcgcaatcaactgcggcagcgactgaggtatcga

SEQ ID NO: 706471 - DNA, 155 bp, Homo sapiens
tagaggctacctatatcacgcactacgagaataacagggagtcattcaggcaatcatatgtcagatttggtacaggattaaatatactaacatttttaagtgtccttgggtttcaatattaactaaatagcaacaaacaagtataaagaatatac

SEQ ID NO: 706472 - DNA, 917 bp, Homo sapiens
  misc_feature (8)..(8): n is a, c, g, or t
  misc_feature (13)..(13): n is a, c, g, or t
  misc_feature (22)..(22): n is a, c, g, or t
  misc_feature (25)..(25): n is a, c, g, or t
  misc_feature (87)..(87): n is a, c, g, or t
  misc_feature (147)..(147): n is a, c, g, or t
  misc_feature (423)..(423): n is a, c, g, or t
  misc_feature (458)..(458): n is a, c, g, or t
  misc_feature (461)..(461): n is a, c, g, or t
  misc_feature (521)..(521): n is a, c, g, or t
  misc_feature (523)..(523): n is a, c, g, or t
  misc_feature (547)..(547): n is a, c, g, or t
  misc_feature (573)..(573): n is a, c, g, or t
  misc_feature (575)..(575): n is a, c, g, or t
  misc_feature (583)..(583): n is a, c, g, or t
  misc_feature (594)..(594): n is a, c, g, or t
  misc_feature (603)..(604): n is a, c, g, or t
  misc_feature (606)..(606): n is a, c, g, or t
  misc_feature (613)..(613): n is a, c, g, or t
  misc_feature (709)..(709): n is a, c, g, or t
  misc_feature (713)..(713): n is a, c, g, or t
  misc_feature (740)..(740): n is a, c, g, or t
  misc_feature (761)..(762): n is a, c, g, or t
  misc_feature (772)..(772): n is a, c, g, or t
  misc_feature (778)..(778): n is a, c, g, or t
  misc_feature (783)..(783): n is a, c, g, or t
  misc_feature (787)..(788): n is a, c, g, or t
  misc_feature (795)..(795): n is a, c, g, or t
  misc_feature (799)..(799): n is a, c, g, or t
  misc_feature (803)..(803): n is a, c, g, or t
  misc_feature (819)..(819): n is a, c, g, or t
  misc_feature (838)..(838): n is a, c, g, or t
ggtttggncctgnggctgctancgntcgccgcggagaaattgttggatctggcagtctaggaatgaatctcctctcagcctttaagnctcacctggtcagaatccttggatgagcctgtgggaccgttcctcctagcccggtggttnggaaccagtggctttgggactgataagaggatggacaaagattctcagggtgctgctagattcatccctgatggcatcaggcactgccagccgctcagaggatgaggagtcactggcagggcagaagcgagcctcctcccaggccttgggcaccatccctaaacggagaagctcctccaggttcatcaagaggaagaagttcgatgatgagctggtggagagcagcctggcaaaatcttctacccgggcaaagggggccagtggggtggaacaggncgctgttcggggagtgaaccctcctccagtgagangangaaggtatccaaagcccccggcactcctgtgccacccagacccagaccccagaccccggnanacaccaagagtgtgaaaaaaaatnaaacaaccactttcagtgaaccaagntntggggcgntgggaacctgncaaagaacnncnggctcanaaagctgtgttgcagaccaacgacctgactccgtccacctgggcgtgaaattcagctgccgcttcacccttcgggaggtccaggagcgttggttancccngcctctacgatcctgttcatctccaantttggcctgtcaggccatganngcagctgcgncccaangctantgcnnccatccnagancaangccctgttttagcaangctgtaggagcagctgctngagcaaagtggggatcgaccagccagcccaccttgcgagaccttccaggacctgctgcacagacaccctgatgccttct

SEQ ID NO: 706473 - DNA, 278 bp, Homo sapiens
  misc_feature (70)..(71): n is a, c, g, or t
  misc_feature (132)..(132): n is a, c, g, or t
  misc_feature (240)..(240): n is a, c, g, or t
gtcgaccgtttttgggtttgagatgttctcacttattgtccaggctagagtgcagtggctattcacagannaacataggactctccagcctctcaccgcactcattggggttgaatttgcacaaatatgagnggaacaaaagttactaattttacaaaacctaccatcgattttagctaaccttgataagtgaaatttcaaagcaagtaagtgctaattcagaaaaattaggcgtaaaanatcgttacaaatgcaacaactcagagatttgaaacgat

SEQ ID NO: 706474 - DNA, 428 bp, Homo sapiens
agattagacatatttaaaagccactatggtttctgtatagagaatggatgcatagagtagatgaggaagccaattacaagactgtggtagaaagaataaggatcatgaagatgtacagtggtgatgaagaaagctggatggatgcattccagagacgtttaggagacagaaagactaggacatatcaatattagccttgaatgtcaatgggctaaatgccccacttaaaaggcacacaatgtcaagctggataaaaaagcaagacccaatggtatgctgtcttcaaaagactcatcttacatgtaatgacacacataggctcaaaataaaagaaatggaggaaaatataccaagcaaatggaaatcagaaaaaaagcagaagttgcaatcttaatttcagacaaaacagactttaaaccaacaaagat

SEQ ID NO: 706475 - DNA, 1431 bp, Homo sapiens
  misc_feature (1431)..(1431): n is a, c, g, or t
tgcgagacagagtctggctcggtcgccagggtggggtgcaagggtgcaatctgggctcactgcaacctccaccaccgggggtcaagcgagttctccgtggcctcagcctcccaagttagcgtgggactacgaggcacgtgtgccaccacacacagctaattttgggtattttatagtagaagagtggggtttcaccatatgtggccaggagtggtctcgatctcgtgtgaccccggtgtatccaccgtggcctcagacctcccaaaggtggcgtgggatttacagggcgttgagccactgggtgcccagaagcgattttatactaagactttaaaggcttatagttctagggcacacagaattcacaactttcttttccccgagttatatataaacttcccagaagtgtggttctcaaaatccccaaatgtggggaagttccgtgaaaataatcaagtgcgtggtagaaaatctccatagtgttctatagcctctcgtgcgaggtggtattctcgtgcaaaggggggccaggatgtgacccccagacatcccgtggtctttcacttcctcagaagcgtggttacacaaatttagtggctattcacaagtggtattctcgtggtgaacaaagcattcgtggtaccaaagtttagcgaatgtgtcttctggggccctcttccgtgagagggcgctctcccggagaataatagggggggattgacgcagtgttcatataaggagaatccatttcatttccacccacggtgaacatgttggctccggggtgtttcccaagaggcactatcccgaatttccataagaataaaactttctggaggccaattcatttttccaaagggccagcaggtaacaaccacattaattgaggccccaataaattgtggtggccacacggacattgtgggagtgatgaatggtttcatacgtcctattcccacacaaactggggggaacacagacatatggattctccaatataattcttgggccccacaaaggaagtttgatcctttggagacaaggtttagggttgtgggcgcaagaggaatccatttgggacgagaaaacttgtgttgtggtttgaaggagcaccacgaatcccatggtcatcagaagagagattcaaacacaacgatggagagcgagccgagcgacgctacaacggatgatacaagacacacaccagaatccgggaggtggggagtaaaccacgagagaatcataacaccactggtggaaggaacccagatgaaacccccaaggaaatgaagagaaaaagcacaaaccggccgacgacggaagacagctttgtgaccaggacgcaagcatcaaacatgaatcgacgagacaggaggagcgagccgaacaaacaacacaacgaacgtgccgcgcgggcgccgctcagacagn

SEQ ID NO: 706476 - DNA, 233 bp, Homo sapiens
tgagatctgaagtgcaggaatcagcaatgctgaacaaatcctgcaagaagtaaggctaacccatgaccactcctcagagaccttccgtggtgccctccctccatcccttcctctcttttatgattcatggaaaaggagataattgtattcccatggaatgataggtagtctataatgggaaggactgtcaatattctaatgcatcatggtgatgataattattctgtgtttca

SEQ ID NO: 706477 - DNA, 221 bp, Homo sapiens
  misc_feature (70)..(70): n is a, c, g, or t
  misc_feature (84)..(84): n is a, c, g, or t
  misc_feature (105)..(105): n is a, c, g, or t
agcttcattatggacttgaactttcctaaagtttatctgttctttaatgaaatcgaggcatttgtaagtnctcagaagtttttnttgcctctcaatatgaataanacaagcttttggattgctttcccatgtactagcagcccccaagtatacactgagatcaggacacttattttgctgagaagggaagatttaatgtatttagcctgatctgcctactc

SEQ ID NO: 706478 - DNA, 429 bp, Homo sapiens
  misc_feature (225)..(225): n is a, c, g, or t
  misc_feature (346)..(346): n is a, c, g, or t
  misc_feature (423)..(423): n is a, c, g, or t
agcagtacaaggaggcagtaaaggactgcacagaagccctcaagctggatgggaagaatgtaaaggcgttttacagacgggctcaagctacaaggcactcaaggactataagtcaagcctttcggatatcagcagcctcctacaaattgaacccaggaatggccctgcacagaagttacggcaggaagttaaccagaacatgaactaaaccgtagagggcaacangggaccctgaacttgaccttcccaagaagaagccaagggcctcccttgcatctgccccaatgcccagcatgccgccaagggagtgcaaaatcaaccccactttgactccttggagaggtangcagcctttcaccttgacacattttactttgttcagattaagtccattacagacaagcacaggactctttttttttntttctt

SEQ ID NO: 706479 - DNA, 244 bp, Homo sapiens
ggattttatataaaataagagagagagtggtcagtttcatctttctgcagatggctatccaattttctcagcaccatttactgaataggttgtcctttcccagtgtacgtttttgtctactttgccaaagatcagttggctgtagatttgtggctttatttctagtttctgcattctgttccattgatctatgtgtctatttttataccagtttccttaaaatgaatcccaacggggaggaacg

SEQ ID NO: 706480 - DNA, 314 bp, Homo sapiens
  misc_feature (9)..(9): n is a, c, g, or t
  misc_feature (34)..(34): n is a, c, g, or t
  misc_feature (60)..(60): n is a, c, g, or t
  misc_feature (63)..(63): n is a, c, g, or t
  misc_feature (66)..(66): n is a, c, g, or t
  misc_feature (68)..(68): n is a, c, g, or t
  misc_feature (84)..(85): n is a, c, g, or t
  misc_feature (94)..(94): n is a, c, g, or t
  misc_feature (105)..(105): n is a, c, g, or t
  misc_feature (129)..(130): n is a, c, g, or t
  misc_feature (133)..(133): n is a, c, g, or t
  misc_feature (139)..(139): n is a, c, g, or t
  misc_feature (151)..(151): n is a, c, g, or t
  misc_feature (241)..(241): n is a, c, g, or t
acagtattntgaatgagagaacaatgggaagaanttttcgtacaggcatataggtcgtgntcnttncnctataatattgccccnnctacctacnttcgattcgtnccattcttcgcaaccgctgaatcnnctnttcttngctctgactgtnagaatcccctagcgagtcttcagcctcgctatccatatcagagggtggatcaaaactggcagtagaactgtccaggtcaagtcgattcanggattctctggaagatgttcgtaccatagactctttagaagaagaccggaatagagattcctttatcggactt

SEQ ID NO: 706481 - DNA, 553 bp, Homo sapiens
gtggagaggaagtggctcacttcaggtcttagagcgaggtgctaagaaggacctggagttgaattcaagggctcagaagggggtcaggggactgccttcaatgggtgcttcctgggcatactctgcccaggactggttttgaggtgggggtctggtggtggggttgggttgggaccccacatagtggaatgtcttccggaagctggtgactgtgagttacgagagatgcacagacatggcctctctgccgactctgaatggccttgaagaccctcaagggcagagacccaggctatgctccacgtctgggtccacaagggtgcccggtctcagctcagaacaccaaagagagtagacagagcccaggaagcatccggagcagtggcgcagcttcaggtcacttaggaaaacccagttctttgaaagctgcttctctgaaaattgacttgccagaagcttagttctgcaaatggtaaacgtgctggtatttcccaacttactaaaaagttttttttaaaggatacttaataaagatcacagaaattcatattgg

SEQ ID NO: 706482 - DNA, 130 bp, Homo sapiens
tgtgacaatgttcctgctcttgttgcccaggcatgaagtgcagcggcattgacttctggctcactgtaacctccacctcctgggttcaggtggttctcctgcctcagactcccgagtagctgcgattaca

SEQ ID NO: 706483 - DNA, 450 bp, Homo sapiens
ggtgaagggtgcgcggggttgaaagcaggccgctccgaccccgttccccactcccagaccagacagaggcaggcagccggagtcagccgcagtcgctgtgccctctgcagtgggtagttttgtactacatgctgtcggcacacttggggtcatgcaggctggtatgcgtaaagggggcctcgtctagactaatacatctagcatagggtccaaccagactatggacccttgaaggagtagctggaactttgtcgttgaagacggatgtatggatctagctggattgagtaccgcggcgaggtggaccatcgctagtgataagacacataacatcgataaccgtggactggatagaaagaagcctgaattcacaggccatgaaacaaacactacaccatagatcataaataacaaagctcccattaggagaaccatattcaaataaagtat

SEQ ID NO: 706484 - DNA, 1217 bp, Homo sapiens
gcgcgtcggttggcgcgcaacgggttctaggctgcaggcagctcgaggacccgcggccccgccccggctcggcctggcagatagcagaggcagcaggccgtgccgggggggcatgttgctgtaaccagtggcccaggggatgttacggtggacagtgcacctggagggcgggccccgcagggtgaaccatgctgcaagtggctgtcgggcatcgggtatactccttcgggggttactgctctggctgaagactactgagacagctgcggtcagagtagatgtgcacattttcaaatgcagttgtccttgcgtatggacaaaggctgcccccggtgaagtctgccatccgtgggcaagctcctgtggtaccctacatgcgctatggacactcaaccgtcctcatcgacgacacagtcctcctttggggcgggcggaatgacaccgaaggggcctgcaatgtgctctatgcctttgacgtcaatacgcacaagtgggttcacaccccggagtgtcagggacagttcctggggcccgggatggacattcagcctgtgtcctaggcaagatcatgtacatttttgggggctacgagcagcaggcggactgtttttccaatgacattcacaagctagataccagcaccatgacatggactcttatctgtacaaagggcagcctgcacagctggagggactttccactcaggcacaatgctgggaagtcacatgtcatgtcttcgggggccgtgccgaccgcttcgggccattccattcaacaatgagattaactgcaaccgattcgagtctatgacaccagaaatgaggctggtggactggtccccccgatccagttgctgcctgaggggcgccggagcacttccgcctttggatacaaatgggggagcttgaagcatcattttgggggatcataactgcaggcttggaacggcccttcacatgagctctgcagtttaatccctgtgtcctttaacctgcacacaagaatgaccccgcagggcaaggaggcatgtccccgcggctgacagtgtggtgaattgtaggggcaagatggctcgttgggggtaccagccatctcctcgggaagccggggatactttcgcttatagcactccacttacacctttggattacctactgatcttgcctatgcggcacttctaccaacagctggccagaacgggagatcagcacaccatt

SEQ ID NO: 706485 - DNA, 1273 bp, Homo sapiens
gctccgaggccctgcccaggtcagtgcgcaggtcagggcagtgtggcgggggcaggcatgcgccagagtgcagcattgcccagatccccatgttctgtcccctcacaggttcctacctcgctcggtttcttctcccgagccaccgcaggtgtgttgccgggcgacccttcactctgggggtccgccgagaggccagggcttgtaccccctgcgtggcacgtcggttgtctggagcggtcagggtactactcgcttcgggtcgttttacgtggcgtcttagcgtgaagcgacgtattaggaccactgcgtcagagtaggaacgtagccctagttcttcattagagctccggggtcgctattgctgtttgggagcaacaggctgcccccggtgaagtctgccatccgtgggcaagctcctgtggtaccctacatgcgctatggacactcaaccgtcctcatcgacgacacagtcctcctttggggcgggcggaatgacaccgaaggggcctgcaatgtgctctatgcctttgacgtcaatacgcacaagtgggttcacaccccggagtgtcagggacagttcctggggcccgggatggacattcagcctgtgtcctaggcaagatcatgtacatttttgggggctacgagcagcaggcggactgtttttccaatgacattcacaagctagataccagcaccatgacatggactcttatctgtacaaagggcagcctgcacagctggagggactttccactcaggcacaatgctgggaagtcacatgtcatgtcttcgggggccgtgccgaccgcttcgggccattccattcaacaatgagattaactgcaaccgattcgagtctatgacaccagaaatgaggctggtggactggtccccccgatccagttgctgcctgaggggcgccggagcacttccgcctttggatacaaatgggggagcttgaagcatcattttgggggatcataactgcaggcttggaacggcccttcacatgagctctgcagtttaatccctgtgtcctttaacctgcacacaagaatgaccccgcagggcaaggaggcatgtccccgcggctgacagtgtggtgaattgtaggggcaagatggctcgttgggggtaccagccatctcctcgggaagccggggatactttcgcttatagcactccacttacacctttggattacctactgatcttgcctatgcggcacttctaccaacagctggccagaacgggagatcagcacaccatt

SEQ ID NO: 706486 - DNA, 125 bp, Homo sapiens
cagaacctaaccttcgagcagtacatgctaagacttcaccagtcaaagcgtaactactatactcaattgatcccataacttgaccaacgggacaagttaccctaggggttaacagcggcaattct

SEQ ID NO: 706487 - DNA, 101 bp, Homo sapiens
ggattgatacagaaacgccttaggctggactatgcgtgtgctcagctcctcatcctgcagagcttcttggggggctgtgcgtaagcagtgtatacgaagtg

SEQ ID NO: 706488 - DNA, 284 bp, Homo sapiens
ccccccgggggaatgaacatataggattagttcttggttcatcccaaaggtctactggcggtccacagggggcaaaaacagcttctttccagggatgatcaatcccagtatacacggtctttcctaatatggtatgtaagggctcttcctcgtctccatagccgggcccatccattttccacggcttcacagtttggtcatcaccaacagtgaaaaaagaagtcccacaaaagcgagtacatattcctcgtacaaagccttcaggtgctggtatggtacggata

SEQ ID NO: 706489 - DNA, 445 bp, Homo sapiens
  misc_feature (20)..(20): n is a, c, g, or t
  misc_feature (59)..(59): n is a, c, g, or t
  misc_feature (307)..(307): n is a, c, g, or t
  misc_feature (441)..(443): n is a, c, g, or t
gaacacatcagtcccttcanaaaaccctgaggcttctcgaaaaaggctctccctctgtncccaggagaaggaagggacagatgaaaagtcacttcaagttcccagaatactcaggagctgaacttgtcaaggtttagatgtggcaaagcaggcccaggcatggtgactcatgcatgtaatcccagcattttgggaggccaaggcaggaggatcacttgagcccaggagtttgaaagcagcccgggcaacatagtgaaacctcatctctagaaaaaatacaaaaaattagccaggcgtgttggtgtanacccgtggtcccagctactcaggaggttgaggtcagaggattgcttgagcccaggagttcacggctgctgtgagccatgatcgcaccactatactgtagcctgggtgacagaatgagatggtgtctcaaattannnaa

SEQ ID NO: 706490 - DNA, 1317 bp, Homo sapiens
  misc_feature (425)..(425): n is a, c, g, or t
ggattccagaaaattcggaggcgaaatggaggcgcctggtgccccggccaggaccctgacgtggtgaagccatggagcagatacggtggcatttttcaacatccgggtggacacacagtggcccaggagagacgcaaatggaatggtgctggcagtgctccatggactcacctcagatggcctcgatcccagtaacgatagccaggaagcatcaggtggccagaccctaggggaactgtggggacatgtacaatcaaggcagtatgggatgccgagggcgtacagtagccgacaatgatgccgggcgaccgggggagggcatgggcatggcagaatcgtcaggcgtgtgccccaggaccggcggtgagagagaatgaatgggtactcatgacaatagacaacatggttaaatgcattcatgggcncgagaatggacgtccccacaagcgatttacgcgcagactggattaaggggcgtcacgggcgagttcgaagcaaggacgcaggtcccctttttggggccccctgaaggggattggccaagggaacacgattagccttggaagcccaacgcttaaaggaaacctcgccaattcaatttgtggtattcgaggtctccagagagatctgttgaactttttcccgtacaagtgtggttcagggaagagttaacatggaaagagaatcagaaacggtacttactattgtttctggggggggctttcaaatgaaaaggaaaattaacgaaaacacacgaaaagggattattaaagagtggacattgctttataagttagaagacgagaggggtatttaccgggtgtaacaaaaaatgcggaagaggggccttaaatagctggctacagcaattttgtggggggtaacaaacgtactgtggggtgacgtggatcactaatttaggcccatgtgggttttggtaatcgcgctttgtgtgagtaaaactcccgcatgaaaagcagtagctgttgggttcctatgtactgacgtgattgatgaaacaccacgaagaatgagtgggctgaggggcagtattaagagaagaaagatatttttggttagaaccgcgccgaggtagtaaattactatcacacgcgaggttaatatagatagagagactgcgagcaggatgagaggacgtgcgcatgagaaatggaatgaattgacgaaagactagtttttataatgcagggaatgataagtttagagaagtgaggcgccacgaaagcgagggaagttttctcaaaaaaacgcgacctagttggtggagcgagagtattatgcaaacgtatgtcaaaa

SEQ ID NO: 706491 - DNA, 160 bp, Homo sapiens
  misc_feature (93)..(93): n is a, c, g, or t
actcctgggctgtatgggcaaccctaagggatgctcatgcaagaaatgctcgggcctttagggatgtcctggctcacctggacaacctcaagngcacctttgccacactgagggagctgcactgggacaagctgcacgtggatcctgagaacttcaggct

SEQ ID NO: 706492 - DNA, 403 bp, Homo sapiens
  misc_feature (403)..(403): n is a, c, g, or t
agcaaattcactagcaagaataaagcggccgtatataagcgttttatgatatcctactagactttactgattccaaagaaatgtgtattaatgaatatggatcaggccgcgtactggcttattaccctggtcagaatgtcactccctatggattaaccaagatggctaaagatgcaccgactgctgttgataaacccacgtggaattgacacgctctgggtagttatgaaaccggatacccatgctcttggatgtactgggacatgggatacagaggtccaaatactacatacattcgagctggtgcagtcgaagttgacactgaagacatatctgtttcattgcgttcctgcgttatacaccctagatactacgctcttcaagatgaagatgctcgtgcccn

SEQ ID NO: 706493 - DNA, 348 bp, Homo sapiens
agtgggaccccatctctacaaaaaataaaaaaaaattagctggcaggtaacatttttattctaaatcacaatcacttttatcaaactccaaagaatcaatgagctttccttaatagattaagataatgtactacaagatgctaacacgtggttaatcctaatacttgcctgagatgtgctaaatattgtaattatgaagaaaaggctatctcaaattcctactgtttctatttgtgtctgatgggaacaataggagaatcactgctccaatcagcaagctgcatggaggtgtcttctttaacttcaataaatataatttcttacatttcctgatctgtctgtagcagt

SEQ ID NO: 706494 - DNA, 728 bp, Homo sapiens
agattgagcaaccattttttcccacgatccctcgacacaattaccacaaaagttgcttcccctggggcagaccttgtgtgaccaaacatggcataggagtaccagtccaagacccctctgtcaacccttcccgacatcatccactcactaaaggagtcagggcaactctggctagatgcctatcttcacccattaccacagccaccctgccccaatctggaagaagtaggaggaagactctggaccacaggcagaggggagcttgagggacaatggcccactatagtgttaatactcagagggggtttggtttggggacataaagcctctgactccaactcctcccttttatcttctagccacagttctaagaccccaagatggggggtggacacagaagtccctatggagggaaaggaggcttttgggccacaggggtgtaaattatttccctttctctagtgttggcacaagcaggtagttggtgaaccacgagagaacccacggagggtatacagaagaggagggacctactgaacccacgagtcaggaagagatttcacactggaattccacctcatgccgggcgtggtggcacgcgcctgtaatcccagctaccccggaggctgaggcaggagaatcgcttgaaccggggaggtggaggttcagtgagctgagatcacgcccttgtactccagcctgggcgacagagccagactccctttcca

SEQ ID NO: 706495 - DNA, 756 bp, Homo sapiens
tgtcagcagcgcttcttttttcctccgtggcggcccccccctgtggggttggggccgtgctcgtttcatctctccgtcgtcccttcgttttcgtgggtgctctttgtccccaggttggccacccctccggttgttcctccccccggcggggcctgtcttggacggtccttctccggaggcccccctccggcgacgatctgtttgttccccccccgcccccctgcggcggcgtggttttctcctccgcccaccgagagacccctctctttcttctccgcctcctgctctttttttcctcccctccccctcgctagtggtcgtccccaccctcttcgctctccctccgcacaagaggtactttcgccgcgggtctgtcgcggcgagatcccccgccccccgctgtaatcactcccggcgcggtgggtgtgggcgcgccccacacccgcgcgctgggttgctcgcctccccccccccccccgtcggggaggatgtgcgccctctgtcgtgcgtcgtcgccgtctctctttcgctcctgctgactgcccccgccagaagacgccgcgcgccccccccgcgccccctcttttttttgctctgctggagacgacccccccccccctccctccttcacacctccttgttgcggtgtgttgggtgcgcccccccctgtgggggggctgtgttcgttagaggggggggggggggggcccagggttcccccccccccccccccggaaaaagttggggttttcctca

SEQ ID NO: 706496 - DNA, 307 bp, Homo sapiens
ctggcgtccatgcaaagctggagtacgtgtatcactaagtacttcaaaaaatagaagggtctccttgagagcaaatctgtatagacgtcaggatgagtaagacagtatgaaataatgagatacactagagtagaaattaggaagtgacatactgatgagttctgggatagtgtaaagggtgaggggtacagatcttcccttaagacctggcaggaaaggagagactcggaaccaggagtggcagggccacccaggctggaggaggtgggtctgctcagtcctatgcagcgcaggctcagagcaccac

SEQ ID NO: 706497 - DNA, 110 bp, Homo sapiens
cagggggatcgcttgagtctgggagttcaagaccagcctgggcaacattgtgagacccaaactaaaaaaattagcttggcatggtgagagtgtgcctcgtcgtcccagac

SEQ ID NO: 706498 - DNA, 247 bp, Homo sapiens
ttccagagtgctagggttacaggtgtgagccactgcgtcgcttgtccccatgtttgaaatgaactgtgctaagataacgttttagatttatagaatagttgcaaagattaatagagctcctgtatactccacatctagtttctttttttttaccttaagttttgaaatggaggcttgctctgtcgcccaggctggagtgcaatggtgcgatcttggcccaccgcgccctgtcatataaatgcacatt

SEQ ID NO: 706499 - DNA, 926 bp, Homo sapiens
  misc_feature (19)..(19): n is a, c, g, or t
  misc_feature (92)..(92): n is a, c, g, or t
  misc_feature (105)..(105): n is a, c, g, or t
  misc_feature (114)..(114): n is a, c, g, or t
  misc_feature (126)..(126): n is a, c, g, or t
  misc_feature (158)..(158): n is a, c, g, or t
  misc_feature (162)..(162): n is a, c, g, or t
  misc_feature (180)..(180): n is a, c, g, or t
  misc_feature (217)..(217): n is a, c, g, or t
  misc_feature (226)..(226): n is a, c, g, or t
  misc_feature (243)..(243): n is a, c, g, or t
  misc_feature (247)..(247): n is a, c, g, or t
  misc_feature (298)..(298): n is a, c, g, or t
  misc_feature (319)..(319): n is a, c, g, or t
  misc_feature (346)..(346): n is a, c, g, or t
  misc_feature (364)..(364): n is a, c, g, or t
  misc_feature (378)..(378): n is a, c, g, or t
  misc_feature (400)..(400): n is a, c, g, or t
  misc_feature (402)..(402): n is a, c, g, or t
  misc_feature (436)..(436): n is a, c, g, or t
  misc_feature (464)..(464): n is a, c, g, or t
  misc_feature (467)..(467): n is a, c, g, or t
  misc_feature (496)..(496): n is a, c, g, or t
  misc_feature (501)..(501): n is a, c, g, or t
  misc_feature (506)..(506): n is a, c, g, or t
  misc_feature (563)..(563): n is a, c, g, or t
  misc_feature (566)..(566): n is a, c, g, or t
  misc_feature (578)..(578): n is a, c, g, or t
  misc_feature (587)..(587): n is a, c, g, or t
  misc_feature (595)..(595): n is a, c, g, or t
  misc_feature (606)..(606): n is a, c, g, or t
  misc_feature (611)..(612): n is a, c, g, or t
  misc_feature (616)..(616): n is a, c, g, or t
  misc_feature (628)..(628): n is a, c, g, or t
  misc_feature (646)..(646): n is a, c, g, or t
  misc_feature (648)..(648): n is a, c, g, or t
  misc_feature (659)..(660): n is a, c, g, or t
  misc_feature (670)..(670): n is a, c, g, or t
  misc_feature (701)..(701): n is a, c, g, or t
  misc_feature (707)..(707): n is a, c, g, or t
  misc_feature (710)..(710): n is a, c, g, or t
  misc_feature (722)..(722): n is a, c, g, or t
  misc_feature (743)..(743): n is a, c, g, or t
  misc_feature (763)..(763): n is a, c, g, or t
  misc_feature (773)..(773): n is a, c, g, or t
  misc_feature (775)..(775): n is a, c, g, or t
  misc_feature (814)..(814): n is a, c, g, or t
  misc_feature (825)..(825): n is a, c, g, or t
  misc_feature (905)..(905): n is a, c, g, or t
gttagttgtgatgaaagantggtgtccattgagagccctttcaacctgctgagcaggctgggcagaaaggagcaggacttgggacagacgantgaagatgcaganaccccatgnaccccacccctngaccttcctcccatgtggttgcagagccatcntctntgttcactgctgggttgnttcctggttaaagggccagaaggtgaaggagatgggnttttcaggnatcaaaatgaggttgantgtngtgcccacatcgctgaggtgttggatttcaactctgaagttctccagcatnttgatgaggaagatggtcatntctagctcagccatccgccgtcccccnccctgccgcacaccccanccaaagcccaagtnccggaagtaggtgttgttcttntntttgttcaaccatagggttgggttattttttttngggttgttgattgaagagtgggattttngcncagagcatagttggtcacttgttccagtnttttngttgnttttttgtttttttgaagaaccatgttttttttttgttttttttgttgggttttggnganggggtgaagtcntagtgtcancatggggnaggcttttttntgggnnacanatgtaaaaacgnggccatgtctccctgggncnggagccgcgcnncaaagacctntgcccgcagcatatcctgcaccttcaggtancatganatntcatacaagtgncactgcagggtcatggacgtngtgtccacccctcctgacancatctctgtnangttggccttgatgtcctcgaaggacatcttgctgtctcncaggagtctgnagaggatgccaaggtaatcgtggtagaaaaatccttttctgtctcaattcccagtagaagttctagggtgtatatgtcanatataaaaaaaaacaaatcca

SEQ ID NO: 706500 - DNA, 300 bp, Homo sapiens
gctacctgtacacctttagaccagattgcgctctgaggctgagaagcagcgaactcaggagcgggcgcagcccattcacgctgaaactcctcctcggacactgccttctcagcagcagcctgctcttctttttcaatctctgtcaggacctctgtagatgtacagatcacacatgacctaccatgtgcgttcacgggacatggtgccacgcatgcgcagaacttcccgagccaacatccaccacatcaaacccactgagtgagctcccttgttgttgcatgagatggctgtgtccacata

SEQ ID NO: 706501 - DNA, 219 bp, Homo sapiens
  misc_feature (20)..(20): n is a, c, g, or t
  misc_feature (29)..(29): n is a, c, g, or t
  misc_feature (45)..(45): n is a, c, g, or t
  misc_feature (67)..(67): n is a, c, g, or t
  misc_feature (105)..(105): n is a, c, g, or t
  misc_feature (158)..(158): n is a, c, g, or t
  misc_feature (206)..(206): n is a, c, g, or t
cccgcctcggcctcccagantgctgggantacaggcgtgagccancgtgcccggccccctcctctcnttttatctctctgctctttagttagctggcctcatgantcccatttttattttgtttaccttttatgttaaagaaatttttgcccaggctnccctttaggcagggaggagaacttccccctacctcttctttcaaagcnacaacatcaaaaa

SEQ ID NO: 706502 - DNA, 447 bp, Homo sapiens
taccctagcaccaggacatccctgcgaagcggagctctgcagatgccgcagtggcagctgtgggggaccccggggcccctccacaccacagggccaggtctcctgaggtatcattagattttctgaattagactaaaatatttcctaaggagttacgcttctcctttctttgcctttcctaccatagggagaatatttgactatccgatccacgctcccttgccactccaaatctgttagaaaggtaagtcagaattgagccctttcatagtggctcacatctataatcctaggggctatgggaggctgaggcttgagccttggttgaacccgggttcgaaagtagacgcagccatataggcgagatctcgtccctatttcaaatatgaagagaaacctcaggaagccttgccccttatggtatggacccccgggttccccacttgg

SEQ ID NO: 706503 - DNA, 335 bp, Homo sapiens
ggcatggggtctgtatgtccgtgtctattctgcatgtctgtgtctgtacatctgtgcatgtgtatgtgtagtgttgtaaaatacctaagttggaagaactgaatcaggaaaatctgcaagggccccagaatgagcggacaccgtatggccacagtgtgtctatggctggcatacccacaggcagaaggcagaccagtgtgcatgcccccagcattgttctttccccgaactcctctgctgagcataatggggcgttctggcccaagccccagacagtgacctgaagtctcctcccgactcctccagacccttgtcctgcccttctcacacctact

SEQ ID NO: 706504 - DNA, 143 bp, Homo sapiens
tacattcaaataaaacataatccagaagcaaggaaacccaagaggcattttctgccactataaaagtgcctggatgctcaacaagcaagccacaggacaaggcgcaaacaacgttcgcaaaaacgaaatatttgtgcatcact

SEQ ID NO: 706505 - DNA, 163 bp, Homo sapiens
tcacacgaactggaaataaaatccactgatgggaaccagaaactcagagacataagaaggaacagttatcttgtcagatgcgctttatggcatcttgattggcctcactcagggtctttgaagcccaaggtctgttgtagggatccagtgtacttgtcatggt

SEQ ID NO: 706506 - DNA, 332 bp, Homo sapiens
  misc_feature (4)..(4): n is a, c, g, or t
gctncgacctgacccaaaaataagtataaagtaaaatcagttaaggccaggcacggcgtctcacacctgtaatcctggcactttcggaggccgaggcaggcagatcatgagtcaggaaattgagaccatcctcgccaacatggtgaaaccccgtctctactaaaaatataaaaattagccgggcatggtggcgcgtgcctgtagtcccagctacacaggaggctgaggcaggagaatggcgtgaacccgggaggcggacgttgcagtgagtcgagatcgcgccactgcactccagcctgggcgacagagcgaaactccgtctcaaaaaaaaa

SEQ ID NO: 706507 - DNA, 746 bp, Homo sapiens
gacactttgtcaccaactgctgccaactcgccaccactgctgccgacctcgcaaccactgcttgtgtctctgaagcagaactgggcttgacctcctcggctcaagtgatcctcccacctcggctcggaactacaggtgagactgctcctggtgccatgaacggagacgacacctttgcaaagagacccaggatgatgctaaagcatcagagaagagaagcaaggcctttgatgatattgccacatacttctctaagaaagagtggaaaaagatgaaatactcggagaaaatcagctatgtgtatatgaagagaaacctataaggccatgacctaaactaggtttcaaagtcaccctcccacctttcatgtgtaataaacaggccacagacttccagggaatgatttgataatgaccataaccgcaggattcaggttgaacatcctcagatgacttgcggcaggctccacagaatcatcccgaagatcatgcgcaagaaagcagcagaggaccgaaaatgattcgaaggcgagtgtcagaagcatctggcccacaaaaacgatgggaacaactgcacgcccaggaaaagcaaatatttctgagaggattactacgagatctggcccaaaggggcaactgctggacccacagacgggtgagaagaagccgcggcgattctggacagaccgggacccgggaaattgcaagacccccggggtaccaccatgcctgttaagcaaacggggc

SEQ ID NO: 706508 - DNA, 329 bp, Homo sapiens
aactcaggtgcgagctcgggaggagcggctacggcatgtacgctggagaacaaggccaagaagcctgcactggtggccatgtcctccatcctgctggatgtctagccttgggatgatgagacggacatggcccagcttgaggcctgtgtgcgctctatccagctggacggtctggtctggggggcttccaagctggtgcccgtgcggctacggtttccggaagctacagatttcagtgtgtggtggaggacgacaaggtggggacagacttgctggacggacggagatcaccaggtttgaggagcacgtgcagagtgtccatatcgcag

SEQ ID NO: 706509 - DNA, 970 bp, Homo sapiens
ccagaggatcgtgcctggataatagaggatgtgtttcagccctgctcatgttacagttgaagagcttaggagctcaatcgagcatgactctattggccagttagtccccgaaattgctatgtattatatagtctgggggagaagtgaggtgtgcccagtttatggttaatctaacaactactggtggggacattgcccacagtctcgtgggattggaatggggatagtatcccattttactgtcttttaggtttacatatgttaccacgtttctcttctctgctccccttgcccactggggactccgtcttggctccttgaagttagtgcttagagttggcagtgcagcaggcaggtgatcatgctgctaagttctttctggacctctggcaaagggagtggtcagtgagaggccatcgttgccttgggatctgccaggctggggtgttagtcggtatctgctgtacacagctctccactgtgaatccgaatacttagccagtgcacgtaatctcttggagataaaattcattgaggtgttactaaatgttaatttgtctttgcggaggcatacagtaccggtccgtgaattaattagttcatattgagcaatacttcattccttaatcgtccctcatttgtttggccacagctattcagtccttggtcggaaggattctgccagactgtgtctcacccactactgagatgtcagcctgatgttttggattgaatgctccggggtagccgtctgaatggggtgcacgcacgctttatgctacacaagtgggtgtggggctgggtggatcgaggaaaccccatacggttaagatccaaacgtcgtatccttgtaagaagcggggaaccgggcgctaaatggcccaaacgcgggggcaaaccgggtggggagaacagacaaatggaaaaacaggggacgcgacaaaaaaagacagaacaccgagacatatac

SEQ ID NO: 706510 - DNA, 497 bp, Homo sapiens
gcgtcgactttgctttgcctgtcaggtcgttgtgctgccatcaaaagtgaaacgccactcccgtggttacgttgaacgcatcccccacatagaagttggccgagtcctggcccttggcgtcgtacgcggtgttggtggccgtgcgtacgtcttgttggtcaggttgcgcgcatcgacaaacacctcccacttcttgctcggggcctcgtagcccaccttggccccccacaaggtataggacggcgcactcagggagttggcaaaatccacgtaatagctggacgccgaccgggcattgacctgcgcgtagaaaccgctgccctggcgatactccagctccgcctggtagacctgacgcggcaagccggcaactggttgttgccgaacacaccatcattgcggtagtggaagttgttgaaggtgtaagcctggcgcaacgtacaggtgtcgccattggcgccgtccaaagttgcgattcaagcggcctcgatgcctgg

SEQ ID NO: 706511 - DNA, 264 bp, Homo sapiens
catttcactaaaagtctccaaaacatttctaagactactaaggccttttatgtaatttctttaaatgtgtatttcttaagaattcaaatttttatacaaatagttttattacaaatttgaattcttaagaaatacacatttgtaataaaactatttgtataaaaattaagcttttattaatttgttgctagtattgccacagacgcattaaaagaaacttactgcacaagctgctaataaatttgtaagctttgcataccttaa

SEQ ID NO: 706512 - DNA, 852 bp, Homo sapiens
gcgagaacaagatgtacctgactcccagtgagaaacatatgctcctcaaggtgatgggcttcggcctctacctaatggatggaaatgtcagtgacatttacaaactgggatgccaagaagagaattaatcttacccaaaagttgatacagtgtctttaagcgagcgtgcaggatggctgccaccgttgttgcggacgactcagtagcaggataggagactcgcgccaggataccattaagagccagtgcttcacgtatggaagagaacagagtccaagtggacgtgcagcccatgagcagcatcagcccccaagtacaatatctgcgagcagattggttcagatccgggatgaccacatccgcttcatctccgagctcgctcgctacagcaacatgtgaggtggtgacgggctcagggctggacagccagaaagtcagacgaggagtatcgcgagctcttcgacctaccctgcggggtctgcagcttctatccaagtggagcgcccacgtcatggaggtgtactcttggaagctggttcatcccacagacaagttctgcgaacaaggactgtcctggcaccgcggaggaatatgagagagccacacgctacaattacaccagtgaggaaaaatttgccttcgttgaggtgatcgccatgatcaaaggcctgcaggtgctcatgggcaggatggagagcgtcttcaaccaggccatcaggaacaccatctacgcggcatttgcaggacttcgcccaggtgacgctgcgtgagccctgcggcaggcggtacggaagaagaagaatgtcctcatcaggtcctacaggcaattcgaaagaccatctgtgactggag

SEQ ID NO: 706513 - DNA, 389 bp, Homo sapiens
tgtaccgtaggatgcctgtactggcacttgttttagcgatctctctctactagacttcgtattacagctacacgtactacgcttgtggctctcttccactatctcctatcatttggagctgtatttgccatctttggacgcttcattctctgatttcccctattctcaggctacagtcctataccagagcctacgccagaaaatctcagtttcactatcattattcatcgcccttaattactacttttttcccatccatcatttttctcagcttattccaggaattgcccccaacgttactacggactacccctaatgcaattctccacattgaaacattcgtatcattctgtaggctctcttcactttctcctacagcccctttttgt

SEQ ID NO: 706514 - DNA, 1119 bp, Homo sapiens
gatattagcagcggttatccggtgagcggtggtggtctctcattcttgcgtggagttaagggctccgatggacatctcaaggtcttcgagggctcgtccatctggagactatataaaatgttcgagaacaacatgtctcgaagatagtgactccaggacctactatgattgttctcgcagaaggtcagcgttgatgaccgaagtgagaactactgccactggaaaggtctactgtggatcactgcaggtcgcccgtgctagtgggaacttgtgtagcaacatgacgtaggctggtgtcttgctctgcagccacgaagagactgacataggcatccatacaaggtgctcctttgaatgatagatcctgtcttgttatcctgataaaacatttctataagactactaaatgtagggaccacttgtgtctttgaccaggctgtgggaaaaggccaatacactgtactggaatgctagactggttgctgagctacattggacaactaacgggctcatctggctgcaaagggtattaaagttactagctaatcccaggatgctcgagatagcctttgtggacgccagtttggttgacgagacgcgtcgtgtcgagatcgaaagcaagctgtataacacgaatttgggagggaaaagcggtcccttttggggtgccagtagcgtgtagcatgggctggggattaatgcacttatggcttttcagctcctatcagagtgacccctaagtggaacacttcaccggggggatggacagtggccacagtgcattgggacaatgaattagcggctggcaaagctggtggttcaaacggtccgaaaacacctggactcataaaggacggagaaatggaccttgaaagttcagcacttggctcttaagtatccaacagttcacttagataaagaggccagggaatgcccaggtaaaactcgtctgcgtgaacaaaggggggaatcgcgagaactgaaccaggaggaagcacgggaacggaccggcacatccggaggtccgcgaaacaaagagaaaggggagccactggatcacaagacaggagaggggaaaaagaagcacaagggcggcgggagaaggacggaccaggcacg

SEQ ID NO: 706515 - DNA, 386 bp, Homo sapiens
accggctgttgcggtcatctcagccacgggcctcttcttgtgtggcttctgttgctcccttgaagcaggccacagcgggcaacctatgcacttagtagcgtgtctgggagctgggctccgtggagcggccgtgcaggatgcaggccccggtgagcacatcatcccccatacaacctgatgctgagcctgtgtcctacatgactgatcccgtgagagtgcaggggcctccccttcttcctgaaggacttgggcccttgcgcgtggcaagcttgagaaaatcacaaccctggggggcttcttgggacgggacatggactcccagggccccacatccttccaagggtgagtctttcttgccaggccagaaccctggcgggggactcccg

SEQ ID NO: 706516 - DNA, 182 bp, Homo sapiens
cggtaccgacagcatagaatgtgctgatatgagtagtgtagatttggatattagtccttgtcagatgtatgatgtgaagattttctcccactcggggctgtctgtttactctactgacgttcctttgccggcaaaagctctttgtttaattaagtcccaactatttatccttgtttttattg

SEQ ID NO: 706517 - DNA, 119 bp, Homo sapiens
tcccccccccccttgggggcggaaacccccggcccctttggggttgtttcccctcttccccccgggttggcggcgcccccctcccctttgttttaaaccttcccacccctttccggaga

SEQ ID NO: 706518 - DNA, 121 bp, Homo sapiens
cagctcggacccttcctgcgtgcttccgcatgtcggctagccattcttctgctgctgctcccagttgagctctgtgcttgcggaaaccttcttttccacctccaccacctagaactctgcg

SEQ ID NO: 706519 - DNA, 147 bp, Homo sapiens
ggggagagatgacacatggtaaccagagcataatgtagcgaaggactaaacccgtatagccttcggcataatgagagttaacgtagaaagtaacgttggcaaggagaaccaaggcgtaagacccccgtaagccagacgagctaccta

SEQ ID NO: 706520 - DNA, 117 bp, Homo sapiens
tccccaatatataggaattaatttaaccaaataagtgaaagatctctacagagaaaatcacatatcactgttaaagaaactgacgaggatatattaaaggagaaagcgcattccatg

SEQ ID NO: 706521 - DNA, 236 bp, Homo sapiens
acgaagatccccggaaacctgtggctacaaaaaaagtttagccccaaatgccctcggaaatggggaagggggactctaagtactcttaggcttttgggagggggaaatatagaccccctaaaattgtgttaaacacagcttgaattatttgggttcgggggtgttctattaaactatggggagctcaggggattgatactcctgatgcgagaaatacaatgtgtttaggagtggga

SEQ ID NO: 706522 - DNA, 168 bp, Homo sapiens
caaaaccgggcttcttcctgcgcactccacccctgatggtctgagcttgacgcggctcacggagaccgcgcgaccctcagatcaagctacaacttcaagcagaagcgagaggcgttgtgtctatcaaaggcgtgtgtgctacactgttacctggctatgacaggcaag

SEQ ID NO: 706523 - DNA, 235 bp, Homo sapiens
ctttgagcagtgagtcagtcagagttcaagccagcctggccacatgctaacctacctctactaaaatcaaaaattagctggcatggtgcacatgcctgtaatcccagctacttgggaggctgaggcaggagaatcgcttgaacccgggaggcggaggttgcagtgagccaagacagtgccagtgcactccagcctcggtgacaggcaaggctccgtctcataattaaaaaaaaaa

SEQ ID NO: 706524 - DNA, 658 bp, Homo sapiens
taggtgaaaaagccagctgacttaatggctcggggggcagggggctcaggagctctgtgggggggcgggtccgattcctcttcaccatcacaggcttctggctgcccaggagtggcgctggccctggggaatgggctgccattgcgcaggtcgggggcggactgggttctgggcggatcagggtgtctgagtgctgctgagcgtggcgcagagcattctgtgtgagtgggggctccgcacattaggaggggtgcagagcttccgcgtggcgcgagatctcccgcttaatgtgaccacacaggaacactcttgtggccgatcggtgtgccggctccagcgcccacagtctttggcgggagaatcaggtcccgttgtacgcggagaggaattgggcgggccttcagagttattggggctcaagtgctgatagagtctgcttattcctctgtgatcagcgaaactgtgagcagttccgacagcgacgcatccattggcgagatgcgcagaacagtgggggggagctcccttcgacagggggagaccgtgaaccttcagaggcctgcggctcccagggccagggcggccgctccagggaagtcctcccgtgggggggaacactgggaacgatgacacggggcggaagcaagagtctggggga

SEQ ID NO: 706525 - DNA, 378 bp, Homo sapiens
accgcctactcaagcttcagtaatggtggacgcttctcctgccacaaagctccaacgtcccaggtcgaccccagactgctgtgctcgcggtgccactggggtatgaaaaaaactcctgcagctagcaggaccagatgtattcacagctgaattctaccagaggtacaaagaggagccggtactgttccttctgaaactatttcaaacaatagaaaaaaagggactcctccctaatgcattttatgaggccagcatcatcctgataccaaaacctggcagagacacaaaaaaaaagaaaacttcaagccaatgtccctgataaatattgatgcgaaaatcctcaataaaatactggcacactaaatccagcagcacatc

SEQ ID NO: 706526 - DNA, 108 bp, Homo sapiens
atagtctgttgtttgcctatctcgaatactgaaagaccacaatgcgaccctgcttgttgctctgcctcttcagtgatacaccattgctgtgcccacaatgaagtaagt

SEQ ID NO: 706527 - DNA, 236 bp, Homo sapiens
cctggagcaggggggccctggccacccccccccttgtcacacaatgtgtggcagcctgtgtccccaaatatttgtcagtcctcgacagggagcctgggctccgtcctgctttaaggaggctttggcaggaggtcctctctccccatccctccatttgggggtcccccaacctttgcacagctctccaggtggttagatataatgccccagcccaataaaccttttttcaggcctga

SEQ ID NO: 706528 - DNA, 377 bp, Homo sapiens
cgggccagctacggatgtggagatcgccacctaccgcagctgctggagggcgaggagtgcaggctgaatggcgaaggcgttgagacaagtcaacgtctctgtagtacagtccaccatctccagtggctatcgcggtgccagcggtgtcggccgtggcttaggcctgggtggaggaagcagctactcctatcgcagtggtcttggcattggaggtggcttcccttccagcagtggcagagccatcgggggtggcctcagctctgttggaggcggctgttccgctcatcaagtacaccaccatctcctcctccagcaggaagagctactagcaccatcgtgctgcctccagctctcggtcccacatccgtactggtccg

SEQ ID NO: 706529 - DNA, 382 bp, Homo sapiens
tcacgtatatgtactactacagaaacactaggaaatctccagacacggtctggcaaacattcttgagtcataccccacaagcacaggcacccaagccaaaatggccaatgggattcccttcaggttacaaagctttctgcacagctgggcacgggtggctcacgccctgtaatccccagcactttagggagacagagctgggcagattacctgaagtccaggagtttgagaaccagcttgaccacattgtgaaaccccatttttactaaaaatacaaaattagccaggcatggtggcacatgcctgtaatcacagctactcaggaggctgaggcaggaaaattgtttgaacctgggaggcggaggttgcggtgagctgagat

SEQ ID NO: 706530 - DNA, 345 bp, Homo sapiens
tcggcatggagcagcgaggttgggccgaccacggtcatcaccgcgcgacttgcccgaccgcatgaacaccggcgccgacaacgcatccacgccgggcatcagcaggccatgtacaaagtgcaggccgcggctgcggatttgctcgcacacgctggcataggcctgatcgtccgccaaggtgtgagcggtgccggcttgaacctcgcgttcgcgcagctccacggtttcccgcgacggcaagtaggcgctgaacaccagcccggtggacgaactgagcagcggcaacaccgagcccaactgcgtcaccacggtgacggcgcgcactgccggctcaatctacaccag

SEQ ID NO: 706531 - DNA, 605 bp, Homo sapiens
ggtccagcagttgggaggtgtcatggaagaggctgaagtagtggacgacgtcgtcgtcgaggatgttcacataccttgacgagccgacctcgtccagccatgggaggtgtcatggaagatgctgaagttgtggcaccgatcttctcttgcatgatcaagattcagtcttgcttcaggttgacgcagaatataagccctgtgtgtcacttatagacagtgaaaacccacggtctccgatctatcattaatcaggcaaaacctggtactgccctgctatgtaaagtaacccttttaaagcttacctggtttggaagaaagtggtacattttatccaggtatagaaaaaaaagatcctatttctgggccatcttattcaagaaaattgtccagtggggggtagggggaataaatagtggcacgactaatctaataagaggctgtcccagtcgtgggttagactctcctacaatgaaagtcagttcccagtagggacttgaagctgacccttcatgcttccatggcattgcagaatggtcaaccattcccggttgcccttaaaaatgccaaagcgtaggcgggacctgatgctgcagtgctgagaaagc

SEQ ID NO: 706532 - DNA, 423 bp, Homo sapiens
  misc_feature (423)..(423): n is a, c, g, or t
cgctctagagtatccccacgcctgtaatcccaacacttcgggaggccaaggccggaggatcatttaagcccaggagttccagaccagcttgggcaacatacccagctactcaggaggctgaggcgggaggactgcccaagcccaggatgttgaggctgcagtgagccaagatcatgccatcgtacatgcctaggggacacagtgagaccagtttccaaaaaaaaaaaaaaagggaacctttttggggggccccttggaaaacatttaaaaaaacggcccatactggggtgggggggggggttcaacccttgtcctccaagcattttgggggcccggggcggcaaaataaggagttcaggggttgggccccccccggaaccgggcctgaaattcgaaaaaatggcaatggctgtttcttgaaan

SEQ ID NO: 706533 - DNA, 942 bp, Homo sapiens
ggctagaacaggcgtcgggtgcgcggtgtcactctacctataccgtgaacgtcgttcctgggctcgttgtcctacggtaacgcctcctgggtcgatgtaccctatatgcattctggaattactcatgccttcaatcacgcttcggggagctatctcgaattgcgatcgtaatacattatagatcgcaggatggtaggtaaccatgggcgctacaatcaactgtgttgctatctatacagaccattcgtagcagaagatcgggtgtctggttgactcccggacgcatgatgacccagtatcctctaccaaatgtgaatgcagcaaatattacccaccaggtcattcagtggtgccacccaccacaaaggatgaaccctcctcctcctgaagatgactgcgaacaagagaaaagcgaaccagatgatatccctgtttgggaccaagcattcctgaagagtggaccacaggaacaacttttgtgaaactcattctggctgcaaactaccttagacatcaaaggtttgcttgatgttacatgcaagactgttgccacttatgatcacaggggaaaactcctgaggagattcgcacgacctttcaattatcccaaacattgacttttaccttgaaagaaggaggaacagcccaggtactgcaaacggagaaccaggtgtgtgcagagaaagtgcacttggttgtggcctggacacttgtacacactgttacgtgatgctccaaaatactaggttgcacctgctctggttaataaatggtcactattcagaccaccgtagcacaaatgccgctcacagtccagtgtttaagccagcacattggcctcactgcgttggttgtcggcaagatcccaacttacgccaggttttcactagacggcagcttctccggcccgcatacagacggggctcacaggggcgggcccct

SEQ ID NO: 706534 - DNA, 122 bp, Homo sapiens
  misc_feature (21)..(21): n is a, c, g, or t
  misc_feature (87)..(87): n is a, c, g, or t
atactatacatatatatacgncctggttggcaagccctgctgatcagagaaagtctctgcatgtcctagtgttagtaactaattttnatatagttaatgtaggataaagtagagtgcattaa

SEQ ID NO: 706535 - DNA, 402 bp, Homo sapiens
cccgactagcccgacagggtgtgaccccccacctcctcctgggcggggtggctgccgggcggagacgctcctcacttcccagatggggtggcagccgggtggaggggctcctcacttctcagatggggcggttgccaggcggagggtctcctcacttctcagatggggcggccgggcagagacgctcctcacctcccagacggggtcgtggccgggccgaggtgctcctcacatcccagacggggcggcggggcagaggcgctccccagatctcagacgatgggcagccgggcagagatgctcctcacttcctagatgggatggcggccgggcagagaccctcctcactttccagactgtgcagccaggcagaggggctcctcactgtcgggctagtcgggg

SEQ ID NO: 706536 - DNA, 380 bp, Homo sapiens
actatgtgatggtccatcgtctcagagccttactcccaaagtaccggctcagcgttccgtgtagaacaactgccggtgtttcctctcttcatcggtttccatgagtaccgcttatatttcacaactttctgttcatagagttatagtgacatagctctttggtaaaaatgcctgcttgccaatactttgattgcatattagacattcttaacagagcggcagtctagtgtagaaagttttattttgccatttttcttttaagtaaatttgttttaaaaaattctgatgtagggctaggtgtggtggctcaggcctgtaatcctggcacttggggaggccaaggtgggaagatcgcttgaggccaggagttcaagaccgag

SEQ ID NO: 706537 - DNA, 112 bp, Homo sapiens
  misc_feature (47)..(48): n is a, c, g, or t
  misc_feature (54)..(54): n is a, c, g, or t
  misc_feature (109)..(109): n is a, c, g, or t
tcctcgagatggtaagcagattacttccatcagtatgagccaggagnngagggngaagtcaccatggcagatgcttaagtcaactattttaataaatggatgaccagtngtt

SEQ ID NO: 706538 - DNA, 113 bp, Homo sapiens
ggctcaacaaattttctgtttgtcaaggaaaagtaaaagtggaatattaatccctttccgtttagttctggaaagtcaggaatttttccaaaaaattaaaaaatgggctggga

SEQ ID NO: 706539 - DNA, 130 bp, Homo sapiens
ccaagaacctgcctgcccatgtgctctctagtagctctcctaggcttggtgttcctagctcggggcccaccaaggatccataagcccattaaactacctccgaccagggaggcccaactcacgaaaaaca

SEQ ID NO: 706540 - DNA, 133 bp, Homo sapiens
tacataaattcaagaaaggagatgagtatgatgtatgtgccatttgttgggatgagtatgaagatggagacacactcagaaatcttcctgttccatgcttatcacgcaagtgtgtagaccttggttaataaaa

SEQ ID NO: 706541 - DNA, 312 bp, Homo sapiens
cacgaggaggatagcactagtccaattgttcccacatgagtagaggtgtggcctctattggcaatacatgtgtcttttgttcgattttacgtccatgacttggtttgctgtcccaactgcacagaaatgtcccttttttgtttgacttcctgaatgtgtgtgttttcctttttgcagaaaaactatctccatttaatccagaagctcttgctttatccggatgatcggaaggtacacagggcatccgcctcatttcccgtcggctgcagtatacgctgacttgggaagagtctactcctcgcccacaggaga

SEQ ID NO: 706542 - DNA, 830 bp, Homo sapiens
atctctttctgcctccctcgcgcggggggaggggctagttaaaaaacagacccgctccgtttgttggttggctgctcctgcctttctctcctgcgtgaggtacgtcgcacataccaccacccgcttgttgttggttgcctctccccatctctgagttaataccacccgcggcgtcccggatgttacctatcctcccgcgatgcttttactgcttatttcggcttcctcgcgtgcgcgcgcggtgtgatcacatttctttacacaccacgcggcgtcactcgagctctttggcttccttcgctatggtcactcattctgtatggggatggcccaccacatacatgtaacactcacgctctgggttctctccatacacagaccaccggcgtgggtggttgccgctccgccgagaattttcctcgcgaggtgttgtttctagtcgccgacgccgtctcgctgttcctgcacactgctcgtgttgtaccacttcattatctgggtggtgtctatttgttatcccctcgcccgccgcaccctcgctcgctgtttgttttgcgagtctctcctctccacccactattcgctgggcgcggacttgttcggtgtccgacccacttctttggtgtgcaccccgccgtttcccgcggctgttacactcctccttatttgggtgcacacttttctttccttctttttttttctcccccccccaaattttctctttaccccccaccacacccttgtggtttgaacccccccccccatttggcctttttttataatgggtttgtgttttttttttttttccctttttttttggggggttttta

SEQ ID NO: 706543 - DNA, 1296 bp, Homo sapiens
  misc_feature (1060)..(1060): n is a, c, g, or t
tctgggtgggggctaattatcaagaggggggggggccccccgaccaccattgtcgctcttctgtgtgggttggggaggagagaggcaccccctcttgtgctctggggggggaagactacaacgactgcgggcttggccgccgacagccagctcttgtggtaggtggttcctgctgccactgcttgttgtggggcgggatgaaagatgattaattcactcgcgcagcagcaggcgagcttgtttatataaccacaatactcacctgcctccttcgttcgtgtggttggttatcgccatcaacacttggtatcagcgacgcttcgacatcaacatgggctggtgggccccccaccgcaagacaacacgcggtgtgtttgtctctcccctccgggagagcagttgcctcacaacagcaaattagtagagcgtcaacacgacacacaacggccgcgctgtggcgagaggagcaaaaatcacggcgcggcgttctttctacggcggagaagaccactctggtgtgcaccacgaggaggcctctttggtggggcaacaacaacccgacagcgggggcgtatctctgttgttggtctaccccggggggtctctctatcctggagttgtgtgggcgcctcgcatctcttgccagtaatggtgcggagaggggtggacgacacacaacacgggttgcaactagcacgacctgcttttcttccaccgcaccacaccccctctagttggggggcgcacacacacacacacacgctcgtctccgccgtgtggagagaacttgtggtagcgactctcgacagcaacaacacacacacgtggcgcaactcgagtggggggaaacaccacgcggccactttcctcgtgcacacactgtcggtgtgagaggaagcgctctctcgcgccacacaccgcgggtgtagtccctctcctcggagacacacacgcggggtcctctgtaaccagacactcttatactgcgtttgtgagaggagataggaaggacccgcggttcacggctcctctgagagagaagagcacacatccacttccnctctaagggtgcatatcttcctcgagggcggttttctcatcgcttatgctatcttcccctggagaggagccggccctctcgagaggcaaaccactcggggcgccacaccaagcccctcgcacacatggtttcctccccggatattctagggttgtaaaaagaacgctcagatccccttattttttgcccggaaatttttgggcaccttatataatccttaaacccttttttggcca

SEQ ID NO: 706544 - DNA, 401 bp, Homo sapiens
attcaagaaggtacattcaacaaaatgaactaataaaaattccatgcaaaaactttgcttgaaaaaactataagcctcagattgtttttggtgaaatgtgctatctcttcaactgcaaattcctagtgtcagcattctaaagtaattgagttatgaaattaaattggattaagaaagaaataagtaaaataataaattcagatggcttttgatataattatttataacatgttgtaattgttatggaaatcttaatttaaaaaagaagtcttatttttgagggtcagtggtggtacctgtgttaatcttacagtgccatgtttttggaacctctcatttatgtttctcatctatcagccttatgctatatccagacttctttgatgtatccaaggacaatg

SEQ ID NO: 706545 - DNA, 125 bp, Homo sapiens
  misc_feature (29)..(29): n is a, c, g, or t
  misc_feature (120)..(120): n is a, c, g, or t
aacccatcacaaactactggggtgacaancgtgacaacctacgctacttcaagcctctgtggatcaggattggaggtgacaatcgtgacaacttcaagcctctgaggttcaggattggantgtca

SEQ ID NO: 706546 - DNA, 1055 bp, Homo sapiens
gcagatatggtgtttaggagggtagtatatgatatataggattggtgttagtgttgtggtgtgtgtgatgtgtggatgtattagtatgtgtgtggtatgtgtgtttgattgggtggtgaaagatgagtgtgtatgttgtgaggtagatgtttggttgaaaaggtgagggttgtcagtagtaatattttgtattggggtgttgctgtgatgttttaagatgatgagatggggagttgtgtttgagtgtatacggattgggggtggcacatatgtgtgtgatacgaattatgattggagaggtgtgagtggagtatttgatgatgtagttgaaagtgggagtgaggtcagttgtttgtgaggggtaggggatggttgaatttgtgggtgagatatggtgggtaggtgggtttggtcggcatagtttgtgtttttgttgagcgtcagttcttgtgtatatgggtggtgtgtgagtttggttggggtgcgatgtactctcttgactgtgtcttgggtgatggttgctacgaatgccaactgacctaagcgctggtgttctcagccccaatagtgcgcaaaaaaagattctcaatatgggggtcgcacagtgtgtcaccacgcatataggatgggcgacacaaaatagccacacccccagaaggggtatgaatgctcttgtgttcacagaatataggtcaataaggctcacaggtggagaggcacattgttgtgtggggagaacaccaagagatagcgggggtgcttcaacccctcccgcacaaggtccctgtgtcttgtgtgcacagacgaaagcggcgggcttctggaagaaagagttgagccttaaagttcacttgagcacccaccctccacaagtttggccacatggccggtttccacgagccactggaaggaagaaagaaaagcacatttcaatgggaaccacctgaaagaaagaacccgatattgccaaaggaagaaaagagactttaataagcccaggacaccagaatatttgccacattggtggggtctccaataaaaaagtattttccccg

SEQ ID NO: 706547 - DNA, 225 bp, Homo sapiens
tagatcatacttagatattactaagagtgctcaagcagatagctagatggagcgcttatggtacaaataatctcccttctaccccagttttgacactgttgagaagttataaaggactgttaaattctttaagactactttcaaaaaacgactaccgaactgacagacgtaattctgctggacaccgactagggccgctttcccgtctgcaaagtaactaatcta

SEQ ID NO: 706548 - DNA, 750 bp, Homo sapiens
cccgcttacctaaccgcggaccataattggcaaacaaaaaacaaaggggccctcaacatggggtcccggaccagacaagaaccacacgaagcatcgggggagtgacgccccacccccgtcggggttcgcgaggggtgcaccctcccagactacaacatatgaccgatcgcgccgcaagtgcggtgcccccggcgactgcaacatgtgtcggcgtcaacgcccagccgccaaggggggactacctccccaccccttggggggcaccacatcattctagggcgcaaccttcttcgccagtccacctcccggcttttcaagcccgcccacaaatgccccgaacgtggcccttgcccccgcctcccttacggggagaccacccccccggggggtgccccctgtagctagaacacgaaaacgccgctatcgtgggcaaaaaaggcccctcacctccacgggatgctcctgcgagaaacttccccgccctgcaggcctccacgccctggttcaatatcttcccgcggacaagcaattggggccgccaggaggcgctccgtctcgatggatcccacgacgccactcatggagcaatctgtgactcgtattacccacggggcgttgttcgcacgcaattaagaccgtggggccgtccaccggggtcatcccagtgcgagcgtcatcataaccgatgattgctgctttgttagaaaaacaccctggctttctgctgtaatgcgggcacaaaaaaaaaca

SEQ ID NO: 706549 - DNA, 512 bp, Homo sapiens
ctatatgttccattatagcctatgtttttctgattcttcgatctgcccattgcgcataatgctgtctccccccgtggcaggcctcctagggagatggcaccccggatgtcccttccacccccgctctccgtcctctgtagcgctcgttctccacgcccgctacgactcgtatgtttggcctccatggggcctcgcgatgtcttagagagtgacctcccaggaacacggtacctaacttttacgcacccaacactcattatagcctcccacttcaacccctctctttatccccactgctttctctcgcataccctcttgaccttattatcgcctccccactcgtcacctacattccacccacactattgctaaacaacttataacataaactactaccctcttctcctaaacaacaccatccctcccccccctcttttcgctcccaccagtttgcccctacgagagtgcttacctttattcccctttagtattagataacccgacataaagac

SEQ ID NO: 706550 - DNA, 148 bp, Homo sapiens
tagtacacccaggagacaggcacccactgtggagaactgcacgcttggtcaataggcttcttgtaataaacttaatgggttacatcaacaccattattgaccagtgagaggtcatagtagtgagcgtactgtctgcggatggcctcag

SEQ ID NO: 706551 - DNA, 257 bp, Homo sapiens
ccatctcagcctcccgagtagctgggattacacatgtgagccactgtgcccagcccagtgattgagactcgactggacatgaagcagtataatgtagcagtataacatagtattctggaagcagactaccgggggttgcatttcggctccatcactttctaaggtgtacttgaacaagtggcttaacctctcagtgttttcacgtactctcacatacatctagggattcaataagttaatgcatgataggagggggg

SEQ ID NO: 706552 - DNA, 172 bp, Homo sapiens
gttggactacgaggatgctacttcccctatcatagaagagcttatcaccttacagtgatcacgcttctcatgatcattttccttatctgctatcctagtcctgtatgccgctatatcctacacactgcacgaatatagactaactaaatactatacatctcaggacgctcag

SEQ ID NO: 706553 - DNA, 143 bp, Homo sapiens
  misc_feature (12)..(12): n is a, c, g, or t
ttgaaaaattangaaaaatgtgtactttgttctagagtgatgatggttgtacaactgtgaatattgtaacaaatcactgaatggtacactttaaagggtgattttatggtatttgaattatatttcaataaaataattatttt

SEQ ID NO: 706554 - DNA, 501 bp, Homo sapiens
gaaaacattcagtaaaatattattctgcagtaacttgtggaatgactgctgtacacacagctctgggctgggtacctggaagctcacgagcttgtttggcctcccctcctggacacaggaggtgtcaaggctgtggtcagcagaatctacccagctggacactgagtggacgccctgtggggtggctgtgaaatgggtccactttgtagtggcagcatccctgatagtacttctgaaagggacaagatagaaaagcaaaccaaactgaaactgagaagtcgtggatgataccaggggcgcacagtggctgacaggaagagactgcctggggggactcggagccagtggctggagtggagttagtttgaccgagtcctggactagggaggggacccccaaagcatgcccagcatggcgctagtggggcccaggcaccccatgtcccaacgactagaaccaataatcaggttaacactcattaaataagaagtgtctgtgaaa

SEQ ID NO: 706555 - DNA, 358 bp, Homo sapiens
cccgtctcgtgagactgtatgttgacatcagcattagttcctaaaaagataaactgctaaatatcactctatcattgaataacaaaaatgatacttgataatcctgtacctgaaactctgctcagagttgggagcatagcatttaggtggcagccatggaaaacaaagccagagaagaaagcagactttctgccctgcctgccctgtgttgaacattccccaggacaaaaaatccacaagccagtaaatgggagcagaaaagtgggaaatgtggatcaacatctccaaaattatcccatgtcgaatctacttatagttcaaaccgctgaccagcttcctgcaatgtgctgttctgtgg

SEQ ID NO: 706556 - DNA, 153 bp, Homo sapiens
tgaggttagaggatccccgtaggtttttgaagttgatagcaggcatgtgtggactgtttgagagcaatggcacaaaggggatgtactcccttttcataaagtcatcagagaaccaggggtatgaagtcttccagagaaatgcaaaatatagat

SEQ ID NO: 706557 - DNA, 1288 bp, Homo sapiens
ggatatttttgatgactgtattgtaaatactacagggatagcactatagtattgtagtcatgagacttaacagtggcaaatcaagcactcataatttgcaccaaaagcatgcccattaacaattattcagcactgtagcagccaccatttacacatacctccaggctcaattactgttaattttggggttgcaacttattatttttgaccagtgcaagggtggcattcattggcattgtccattagcaggcacaggtctagcatttcctgctcttcaatcaaacattacattgcacattgattcttctcagcaggtcacatgcaaacactttcactttactgcagcacagttcagtgtcccaacggtcctatgcgcacaatgtgcaacgacatggtcaatgtaggtagcctatcaccatttcacttcgtcccctgaaggaaatcttgaacaacatgttcacgtcacctggtaacagtccacttgtacagccaacagttaattagaatacagacttagtacgaatccatgacaaatgtcagtccaaccaagttgacattttcccctaattggctctcgtgtacttcacaggcagcaaccatacactgtgccctactacaataagcaacacagccaagtaacagaccacgagagaacatgccacacgcccgacaacgtgcgcccagaaccatgtgtcaacacaaggcgaacaccatcgacccacggaccccggacacgacccgccccaaattaataacctaccatgggcacacccagaaaaaaaaacaagagagcacaccaacagagcacacaaagcattcacgagacaagtcgaccgcaagaagagcagagacacacaatcgcgcgcgacgcaatggagcgcgacgaccacggacatgacaaacggggcatgccacgaagaccaagaacagccaaaacggaaccgatgtagatcacacacttaacacgaggaacaaacacaagaagacaaggaacacagacacgagcacaccactcagaccactccaagcaaccaacaagccacgaagaaaagactaccagaagccgagacaccgaccacacagccgcacaaacgcaacaccccaggagatcagcacaccagagttgccccacagacagaagcaatacccacaaagaccaacgatcgcccagacagaaacaacatagtgacaggaacacagaagaaacaacagtgaaacaaacacacaacgaaacgacagacacatatggagacactcaaacagcacgaaacaagaaaaaccacaacac

SEQ ID NO: 706558 - DNA, 288 bp, Homo sapiens
aagcttgcaccatctgtccttcgtactctgctgcttctgctcgtctgatcccagctgtcgcagcccacggacctatccatgctcgtggggtccatcgtcagactggtctgcgcctagatggtgtctgatctgtgcttgcagtcgcttgacgtcgcacgtcagagtgcgaggacgcgtgggcagtccgacgcagtcgtcgtcgacctggatcagggtcgatgtgtcagccggtctatcgtcctgttcagtggctagggtacatgcgttgtgttcaggctggtcaggctg

SEQ ID NO: 706559 - DNA, 304 bp, Homo sapiens
aatttttaaaaccaaaaaaaattttttccctttttttttgggccccaatttcccccttggggattttgggcccgaaaaaataaggtccctttttttaaaaaaccgggggtttttgggccccaaaagggcccccctgaaggaattattgtgtttataataaaaaccctttaaagggttaaaaccccccaaggggggccccaggttttggggcttttttaggggggggaaggggcccccccttttttaaaggtgccctcccccccccaaagggcccccaataaaaaaaaacctgttgaatggtcca

SEQ ID NO: 706560 - DNA, 160 bp, Homo sapiens
gagtagactgacggtgcgcttgcgctaagtgcacagacagggggtagtgtagacatgaagtgagagagatcacaatacgcgcgttgactacgagagagctgttgtatgtgtgtgaggatccaggagccacgaggctagctcctacgagtatagtcagccc

SEQ ID NO: 706561 - DNA, 199 bp, Homo sapiens
  misc_feature (125)..(125): n is a, c, g, or t
  misc_feature (156)..(156): n is a, c, g, or t
tagggcccaggacgtgcttgtcgtcctcatcaccctcgttgtttctgctggcactcttccagtctccctgctcggttgaccaggagtccgttcatgagatttacctgtgtttaaaatctagaccnagcaccccaatctcagatgctaacatccacnagcttccccacatttcctagcttgccagttaaagccttctgat

SEQ ID NO: 706562 - DNA, 275 bp, Homo sapiens
gcatggagcattaattcttaattattcagtatcttaattatccagtgttcatcccaaaggagatggaaaaaatattcaacagggcccattgtggtctttttactgggtttatagtcccagcatgaatttccttctgtggagcagatgctaaacccaatcatggagtgactggttacccatataacttccgtaccactgttgctctagtgggcgaatcttgacctggcagatcaatactgtggcattcagtagacgcgcccgcgaatttagtagta

SEQ ID NO: 706563 - DNA, 617 bp, Homo sapiens
  misc_feature (593)..(593): n is a, c, g, or t
ttgtcgcctataatcgaagttcctcagaaggcttcggcagcagaatggcttaaaccggggaggtgaaagttgaggaaccttgaaatggtgccattgaattcaaccttgggtaacacgattgagattttatttcaaaaaaaaaaaaaggccacgaaaaaaaaccaggccgcccgcttgggccaaggcgactttggattctaccaggtttatgcttgcgcccgaaatttaacttaattgggcaaattcgccttatattgagccgattaccatttaatggcccgtggtttagcatcgtaaggattggaaaaaccttgcggttaccaagttaaatcgctttgactaaaatccccttttggcacggtgtcgaattgccaaaaagccctgaactgacggcctttccaaccagtggcgcaccctgaatgcccatgggaattcgcaactgttaatatttggtgaaaatccgggtgaaatttaggttaactaagttaatgtttaacccattgggccgaaatggaatccctaataattgaaaggaattgacggagattggattgagtgttgttcattttgaaccaggtgcccctttggacttngactccgtcaggttttggggccgg

SEQ ID NO: 706564 - DNA, 329 bp, Homo sapiens
  misc_feature (195)..(195): n is a, c, g, or t
  misc_feature (211)..(211): n is a, c, g, or t
  misc_feature (221)..(221): n is a, c, g, or t
  misc_feature (239)..(239): n is a, c, g, or t
  misc_feature (283)..(283): n is a, c, g, or t
cccctgataaacctatcagattctgtgagacttattcattgtcattaagaatagcaggggaaagactggcccccatgattcaattacctccccctgcatccttcccacaacatgtgggaattgtgggagatacaattcaagttgaaatttgggaggcggcacagctgaaccatatcagtctgtattatctctccntttttctgctttaagngactatacgnaggtgttgttttcagggnttatacataggtattctgaaagatggggttattttctgtttcanactttgactaagtggcttcttttgtcccctatgtgccagaatagcc

SEQ ID NO: 706565 - DNA, 156 bp, Homo sapiens
cgcacgtcttgtggctggggctcgaggctgacagcaggggtgctaaacagattatttgccaaagtcatcagctgaagccagcaacttcccatcatgtagtagcgggccacagcgttgatatcagtgccgtccgccccttcagtacttctacaggga

SEQ ID NO: 706566 - DNA, 299 bp, Homo sapiens
  misc_feature (2)..(2): n is a, c, g, or t
  misc_feature (33)..(33): n is a, c, g, or t
  misc_feature (143)..(143): n is a, c, g, or t
  misc_feature (156)..(156): n is a, c, g, or t
  misc_feature (182)..(182): n is a, c, g, or t
  misc_feature (269)..(269): n is a, c, g, or t
  misc_feature (289)..(289): n is a, c, g, or t
ancctgtagcaccagggctttgggaggccaacnttagtgcatcatgaggtcaggagattgagaccatcctggctaacatggtgaaaccccgtctctaccaaaaatacaaaaaattagctgggtgaggtggctggagcctgtantcccatctactcnggaggcttaggcgggagagtggtgtnaacccacgatgcggagcttgcactgagctaaaattgcgccactgcactccagcctgggcaacagagtgagactccgtctcatttaanaaatacccaggataaacaanatccgtgtcg

SEQ ID NO: 706567 - DNA, 1543 bp, Homo sapiens
gtctacaaaacttgtgtgcgtactttggtacttgttcctgcttggcctgagtggatgacttggtgtatctcaaaccctggtatggatggtcacctattgctccaggtcaactgttacaactgtgaaggtacaaatccttgtcgaaaatgcacccattgaaggccttttgatgcttgaatgcctcttcccttggtggacaatttgttgcggctttcaattgctcaacgaatgctgtcctgctcacagggcactgctgtcgctcgcctggcaaaccgcctctgcctgcggctgaccagccaacaacactgacccccacccaactggcaagccagcctggccttttcacctgcctcaagggctgaatttacttcccttagagagcgcgagtcccaagtgccccaaaacatacaccggcggccggtggccataattgtcccctctttgcataacttttgcgactttttggcgcaagtcaacctggtgctctccacaagttttgccacttgccacaccgctccttgtgcccttggagggccctttggcacaacgcgggacaaaccacgccaactctgggcattcccggcctccgactatctccctagggcgcttacacacaccaccatgccccttgtggtcacaacgcgaaattggtgcgcccctcttaacacaagagttctccttttgggcaacaaggcttccttggggcccttgaacttggccctttgagcccccgagtatgtggtgtctgtcgacgctaacgtttgggggttctccccgtttgggcgccaaagaagtgtgccgcgcaaacttggttttgtattggcttctctgcgcctgaatgggccgttctccgttcacaatggtaaaccgcttaagttttccgacacccccatttttcttggggagacttccccgccacgttttctgcggccgttcgcgttaccccgcggttggacctaacttttgaaactgaagccacatgtaagcccacagggcttttgcgcccggggctagcagcctccttttgcgcttacatttttccatacaccattgcgcccactgcagtgtgtgggcactcccagaagcgcaaaacatgcgtgcgctcttgtgtcctttggcacagacaagcgcccttttgtactccgccccaagcgcggggttacccacaccccgcacagaacgctattctcttagtggtcccccccactatggtacatacagcggcccttacaatctgaagaaccgggggccttccacacaccgcttttgaagacatctacactattcaaattttccccccttatacagactaaacccctttttgtgtccaaagatcacccgcagaacacttttccctttacaacctctcacgcgattgggggttggcgacacagtactaacctggtgtggtgcctactcacacgacaaacccgccttgttgttatacggtgagtctatcccaaacacttttgtgtggggccacacttctatttacaacacgcgcgtctactacaggcgcataccggctatacacaacagccgg

SEQ ID NO: 706568 - DNA, 137 bp, Homo sapiens
gcgaggtggcagctcgcagtgagccacgatctatgccactaacactccaaacctggtgcgacacggcggagatcctaatctttataaaccacaagaaacaaaatctccaagtcacaaggtattcgaacataggtatt

SEQ ID NO: 706569 - DNA, 118 bp, Homo sapiens
gcattaccagattctgcggctagtggagaccaatggactccatcggagtatagaggaccctgttcacatgctaagcttgaggctttgatgcaatggtggctcatgagttctgtgccag

SEQ ID NO: 706570 - DNA, 254 bp, Homo sapiens
aacgggtgatgcggttgccatattaatcgacaaagagctctgctagaggatgatccagcggagagcaccgaaacttgtagcgatgatgcgcgcgcgcagaggcctttgtatcgctgaagggctcacgctgaagcctgtggagttaggcatgcctaacactccgtgctgactgggcagtgatctcttcacacccatgctgacagagaactggcagcatcattccgttcatgtgaaaggatacgcacctactattg

SEQ ID NO: 706571 - DNA, 200 bp, Homo sapiens
aaagccattatgctcagcaaactaatacaagaatagaaaaccaaacaccacatgttctaacttatcaagtgggagttgattgatgaggaaccaaatggacaaaaggttggggcaccacacacacttgagggtcccatggggtggaagggttaaggaagggttggagagatgtgagagtatcaggaggattagctaatgga

SEQ ID NO: 706572 - DNA, 282 bp, Homo sapiens
  misc_feature (159)..(161): n is a, c, g, or t
  misc_feature (201)..(202): n is a, c, g, or t
caaccgtctgtattcgtgggactaccccgtctcactacgccctaatacaactctctgtgatacagcttcctcagaactccataacgttactagttctgattatccatcttcataagatgtgcattctgtcgcgcgaacgctccacttaccggttctctnnntcgtccgacctccattacgtcctcggtcacctgtcgtacnnataacaaattacactggacaacatttggaatcgactatgctcgtcctttcgtcgtgctatgtctcgtaatatccgttaca

SEQ ID NO: 706573 - DNA, 192 bp, Homo sapiens
ccaccatcgaaagggaatccggttaagattccggaacctggatatggattcttcacggtaacgtaactgaatgtggagacgtcggcgcgagccctgggaggagttatcttttcttcttaacagcttatcaccccggaattggtttatccggagatggggtcttatggctggaagaggccagcacctttgctg

SEQ ID NO: 706574 - DNA, 618 bp, Homo sapiens
gtgtatgtcttagcttgggatatgtggtagtaagaacatgtcaagagtgctttcttcaaacctgtcagctcaactgagaagacaggtacttcattgcttattttttcccttggtttattgaaatctgtatctcatatccagtatctaacactttgtagagatacttacatataatgtaagtgcacacctacccagaggaatggataactgttaaagtgttaataatagctcgtcttagttgatttcagcataatttacattagggagacctaaaaagcaccttcaaagtattaaaagcacctttttttttttctttttcctaaaaagccattaaaatggtcactgctaacatttattaaacttcattgtagttgatgaaacacgctgaagggagcttccacatttcctaactaagcagcctgacttccttgttgggaaacacagggattttgctttagaattgataagatgaatgagcttggagctttgaattttttttggttcccggcgggaaactttttttaatggttaaaggggggccaaagggttcccaaaccacttgggggcttattaaaaatatgccggttggaaaaaaccacccgggataatttttttatt

SEQ ID NO: 706575 - DNA, 229 bp, Homo sapiens
ccccctagaggagggagagagggttgtgaacaaacggccctggagtgatgtaattcccatgtagggagactctcttggctgtgtgactgatgtgggggcctgggctgggcactgcttatgattatcatctaatttgttaagtgacattgttgaggaaagaatctgaagacccatggttggcgggttgccactgaaaaatgaatcacattttggtaattccttaaaaaaa

SEQ ID NO: 706576 - DNA, 876 bp, Homo sapiens
  misc_feature (660)..(660): n is a, c, g, or t
gtgagatgaagacgtaaaaccaaatggagtaagactattgtaaaatcatattaaaccttaggctgtctggcacagcatgaaagcaaatgtatgagcatgcccttatgaatatattctgatgtgttgactggcaggatactggacaagagcatggttttattattaatatatatataaatgagatcatctgtaaggtagcgcagtttaagtctgaagatacatcttgattagaggttctccagacttgattatcgcgcaatgtacagcaggtagcgcgagtcgtccctaagtggtatagggtagtcgtaggtgtataggtagtaggagggtagtcgcgtagttgagaaaatttggagatcaagcagatgtatagacttcattgctgtaagcttttgtgtgtaagaaggaatagggcgtgtgtagcacaaatcgaatatggtgagatcttgatgataagggttgtaatatacaaacatgcgatgaagagtatgggtgtgcaggtcgcgacaatgtatgggggaactctcgtagaggattagggaacccacggtggtggtgaaacatacgggatcacatcctatggcgttggagacacggagaaggggcttcgaaataggtcactctttttgaggagcgtcgcggttgttggggtcgcatgcncctgggtatctcgatgccctttggtaaactcgccatgggatcttctgggatggctcaccgtgtgggctctgaattgacttctgagagccactggcgctgttcagacccttggcccgggcgagcgctgggtgaaaaccttggtttcgttttcccaatattcttgggcggtggaggctatgccccgtgttgccagctgcttgcgaggtcaccttgccg

SEQ ID NO: 706577 - DNA, 424 bp, Homo sapiens
agtgcgtagcagaatacacaggtgtcgcagccctagcctattaggcatcccggactcaggctcttctctgtgagcatccatggactgatgctttccacatctcccctctgagctggggcctctgcaccacttctccgtctgttcattgctctcaccggttcaacaacgagtacaggttatgggctccatggtacgtgtccagaaaagtctcacgggccttttgatcctctaaaatgcaaagatttttgctgatcacttctcattcttggcagagtcttctctgaagagtgttgaatatgtgctgccctttacttcacatcatgggccaatcccattgcaaaccaggcactggccatagggcacaacatgcacaaaaggtcagcagctgtcaaagtgcttacctcttatttagttcagttgggag

SEQ ID NO: 706578 - DNA, 123 bp, Homo sapiens
ctggagaatgttccatcttcacgaatgacaagactgtaccagttcttctcctgcatagaatgctcagtgtagagagacaaataaatgaaatggccccagcccagccaggtccccaggaggttt

SEQ ID NO: 706579 - DNA, 136 bp, Homo sapiens
gtagctccgccggggggcttccttccatccagggacctccacaatttctctggatctcacactcattctccagccgctccagttgtgcagggggtggctggcgccaaccgagctggtcggcttctggaaggaagga

SEQ ID NO: 706580 - DNA, 92 bp, Homo sapiens
  misc_feature (15)..(15): n is a, c, g, or t
  misc_feature (32)..(32): n is a, c, g, or t
taggaagaagtgacncagagacagaaaggaanccaggcaacacagatttcacagaaactagataatctgttggtaccatcactctttaaaaa

SEQ ID NO: 706581 - DNA, 908 bp, Homo sapiens
gtaggcggcggcgcggggggaggcagcagcggggggagctggcggcgggaaggtggcggggtcggccagtactcccgtgcccccgccatttcggactgggagcgagcgcggccgcaagcgcactgaaggcggcgcggggccagagttctcaggcggctcccaggtgcgggaaggagaggcctgctgaaaaatgtgattgaatttataaactttgtgggacgttggacagcttggttggtggttaggcaagaattgcctttggcaggaataccagttaattccaagaactcatttgtggtgggcccgaatttatttgaattgccaacaaataagaagggaattcccttaccagggaaacgccaaacgttaggtcaacttgggcctgcgaagaaacaccctggttctcgttgggaatattcctgcggaacaaacagagcagggttcaaaagaaggaggcctacacaggtgccaaccgtgagtcggccccccagttacatttgagggactctgggcgacacgggcttcaccttgtggttgttattgcggccaatacaattaaattacctaaaattcattgtggcaggatatttcaccccattttttgagaggacacaattttagaaggacgtttaaagcgtcacttccttgaaaggaagttgtaaaccctttagtggtcccttctgtaggcgccaatcacaatggtgcatttggccctttcttagcaaccagtcggacaccaaacaccagggcctcagagcacttaagacaagaaacgttatggcaattcccttttatgtggaaaacattacagcaaaggacacagaccggcgttgtggatggatccttcctatacacttaggtcgcagacacttccgaaaccttgacgacgagcttggccagctgtgtcc

SEQ ID NO: 706582 - DNA, 538 bp, Homo sapiens
agcgagcaagtttctcatggcctttgctattaactctttcatgcctgctgacctgcaaaagaatcaggagggctggtgctggagcagatggcgcactgtgagtgatggtttagattctgcctggactcaaaccatttggttgatggcgggaaccttgattttcccccttcttatcctgagagtgtagggtttctctgaattattatttttttttttgcaaggatccctggatcctcattcctgatataagactagttctaggtaagtgcacattcatgtgatatattggttccatactaggcaatggaagtgccacattatctgtaaggagcaggagaagagccattagccccagtcctgggaacgaactttctgtaactttaagaaacataaaactttaaatgcaactgaaagattatattctgtcacctccaactactcacccataaatacaataggcaccacggaggctaggataaagtgcaaatttaagattataagtgtgcttataataaatattgacaacatcaaaaaaaaa

SEQ ID NO: 706583 - DNA, 167 bp, Homo sapiens
tcgcgcctcaaaatctaagtcgtgtgaggaaactacaaatgagaaaatcagtacaattacctgactctataacaaaaagaaaaatttcgatttgtatctcgtgacaaaccctctactaagttagagaagggcagttaatttatcttggtcccctcttaggctgctac

SEQ ID NO: 706584 - DNA, 594 bp, Homo sapiens
gaactcgcacctccgtcacacagcaatccaggcactccctgtagcagttgtacatgctagatacctcataacaacatagcgcctgagcataaaggaagtgcacatgtgagtaggttcctattcactgtcaaccagaggctaaaatgtgatgggtgactatcatcatcggtactagatgattagcaccagcacctcggtatgccatagccatcatttgccatggctaaccaaagctagcacaagtggccccgcgtataacccagagcaatcggactttaccaacaaagactctgtacccacgaatcaaaggcagataatacaccttgaaaccgagtatatcctagagtttctcgcccggaaactcttgtaatattttactccataaactataattggtcgtctaagaatatttgccagatacaaatatgtgcgtctgctccaagcttgctcgcgaggctgactagcatgagagagtataaatgcccagtcttctggccattgttcttctctcaaggaaaagtgtaaaccatagctctgagaataccatgattcccaatctttccaggcgtgtgtatgaccaatgtgaacagtcat

SEQ ID NO: 706585 - DNA, 894 bp, Homo sapiens
  misc_feature (663)..(663): n is a, c, g, or t
  misc_feature (894)..(894): n is a, c, g, or t
agcgggccggaagcgtgaagttcgctgtaggggtggttgaatgcgggtggggaaccatgtgtcggtatatcttcgcaccccttgcgttcttgccgcggcgatgcctggagcctgtaaagcgcgattgcgagagctcggaaggcctgacccgactcacgaccggaacccggctcccgtgcccgatagggggcgtgggtgtcctggttgctcctaactccttccgcagggctccttgcgtaacccgcgggtatccggagaaggtccctctgtcttcacgcggtctcgctttgctcgtgcacgcttgacgtgcgtcgctgtccgttctctcctcttgttgggtcctcacccggccatgggtacctcgccacccagtctattggggggacgaaattagccgaagccaatggggagactgacagacccgaagacatagcggatgacgaggcgaatgtgctgtggcacagtcagacgtacagacctcgcgtgcagggggaaactagtctacggcggggacaaccaaatggaacgtgggatcaggcccatagtatcctgaatgtgacaatgaccccgtaagtcgaaggagacttggtgcggtcagtgaatgcgataggactccaggggaagcacttagtcacgtcctacttcatggtcgtcctgcacgtngccatagctaattcccgcgaagcagggatatatggagcttgtatacagttcgctcctaatttcaaactactttctttccaaggaaaggaccatttttcaattaagcctgtctcccttgggtccctgctttgaaacggggtttgtgtacccagtggaagatgcaaaggtcacttgacatgcggcccttcgggtctgtatgtactcgtcccttccctaaagtaactcccccan

SEQ ID NO: 706586 - DNA, 600 bp, Homo sapiens
ttttattttatgcctttttttccctccccccaacattttttttttctcatgtctctttttaaattgcctcttttttatgatgctgttttagttatttttcttagactggcggggaattcttggaatatgggaggaagaggcccccccaaacaagggggggaaattaatcccccattgaccccggggtgggcatggcccccaggggggggaatggcaaaacttttcccctacgacggggggattattctccgcaggaataataacctacgagaaccccaaagcccggttttttggggaactaatccaaaaggaggcggccccccccaaaagcaggggaactcctcccccccctaagaaaaaggttggggtgcctggacaaaatgaaaaaaacccctccaaaaaaaccccaaaaaagggcgctccttttatagggggacacggggtggtccaaagggtgtcaacaaaaaagaaaggggccccccaaaaaatttgggttggccaaagggtttttagagacccccccccccccttcccccgggggtggggggggggcacataatattgccccccccaaaaacccccccccaaacacccccgggg

SEQ ID NO: 706587 - DNA, 460 bp, Homo sapiens
ggtgagccaaagggtgccccctgggtgaatttgttcccgcccttctttgaggaggttaaagccccaaaggcccccttggggggttttataagtgacttttacccgggaaccgggaaagtgggttggaaggaaaaaaaaagccccgtcaagggggggggggggcccccccccccctccaaaaaaagaaacaaaaagtagggggccagcagttatttgagcctgaggcctgagaaggggaagtcccccagaagttaaagttgccgggttaggcataaagggggccccgtggaaaaaacaggggcccctacaaaatgttttaaggtttttaaaccctccccccccccccggggagaataaaggggggggatcccagggggggggtttttcttccccccccaagggataaagcccttttcccgggactcaaaaaacccccaaaaaaaattttttttgtcaatca

SEQ ID NO: 706588 - DNA, 259 bp, Homo sapiens
gcatcttcctctctcacgctaatgtaacatatcccgaagtggaaggacagttcatgctcattccccccagcgcaacttctacaagatatctctctcttcttgagggagaagccagacaggggaaaggggagacttgggaaggtcctttaatggcaacaactgtggagtcctagcaggtgtgtgtgtcaagggcaggtgtctgcgatgctagtggccgagagggtgcagggctagcgctaggcatgggctgacggagtta

SEQ ID NO: 706589 - DNA, 251 bp, Homo sapiens
  misc_feature (3)..(3): n is a, c, g, or t
  misc_feature (153)..(154): n is a, c, g, or t
  misc_feature (162)..(162): n is a, c, g, or t
  misc_feature (164)..(164): n is a, c, g, or t
  misc_feature (179)..(179): n is a, c, g, or t
  misc_feature (201)..(202): n is a, c, g, or t
  misc_feature (209)..(209): n is a, c, g, or t
  misc_feature (213)..(213): n is a, c, g, or t
  misc_feature (218)..(218): n is a, c, g, or t
  misc_feature (235)..(235): n is a, c, g, or t
  misc_feature (240)..(240): n is a, c, g, or t
  misc_feature (242)..(242): n is a, c, g, or t
gangattttaacagaaacaaaaccgcagcagcgggtaggaggggagctggaggttggaatcacaccaacattatagcattattactctaaaaaaaattacttttttggctgggtgctgtggctcacacctataattggggggccaaggcgttnnggttttcntntaggtcgggatttcnagaacagcctttctaaaatggnnttttttntgtntctantaaaaataaaaattagntgggngnggtggaaaa

SEQ ID NO: 706590 - DNA, 169 bp, Homo sapiens
aagtagagatggggtttcaccatattggccaggctggtcttgaactcctgacctcaagtgatccacccacctcagccttacaaagtgctagggttacaggtgtgagccactgcgcctggccccttccctcttctttaacaccaccttccatcccttctgtcgtcttctc

SEQ ID NO: 706591 - DNA, 260 bp, Homo sapiens
tcgacttcatagaacacacttggtagtatttccattttttttttgttttgagacagggtttcgctcttgttgcccaggctggagtgcaatggtgcgatcttggctcactgtaatctcggcctcctggattcaagcgattctcctacctcagcctcctgagtagctggcattacaggcacctgccaccacacctggctaatttttgtatttttagtagagatggggtttcaccatgttggccaggcgtcgacgcggccgca

SEQ ID NO: 706592 - DNA, 788 bp, Homo sapiens
  misc_feature (403)..(403): n is a, c, g, or t
aaggtagtatgcggcagtacttcgttatgtagtacgtccggggttacatgatttagtggccgtcgttgacacggcgcggtagcgcgcggccctcgggctgcgtagggagggggcttccgcccctgtgtcattgctcctgcagccttatcgctgggactgcgcgacaccgacccccagacgggtgcccgctgtgtgccatagccggatgctgggcacgagtcccgcgattgccctataaggactgccaggcaataatgaaggttcttatactgaaaggatagcgaattgaagatgagtgtggccaggatccgtatatcagggaattaggattatatgagacttgaagccactattgatccctagtatatcagtttgagtttatgtctcttcccagtttctctgngaagctttctcatcctgaagattacgggggactcatttataccagccccagagcagtggaagcagcagagttatgtttggagcaaaacaataaaactgaagtctgggaaaggtctctgaaagaaaaatggacatgccaagtcagtgtatgtggttggaaagtgctactgctatctctagtgagtaaaattggcctaggatacagaatggagaaacctgtggaaattgcagaaacagcttgcagaatatatttgttccagggagtcctcatgcatagcctcttctatttccctgtggaaacctcaaaagagaaatccttgccaaaagcgctcaaggacaagggattgccatggaaagcataactgtgtatcagacagttgcacacc

SEQ ID NO: 706593 - DNA, 859 bp, Homo sapiens
cctggtgccatgagcagggctcctcgtgcccctggcccagggtctcttcccctgccccctcagttttccacttttcgggggtcctttattgttattaaaactgaatgggacttttcaacaaaaacaaaacaaaaaccaagaaaaaaaaaaactcttttgcggccgcggcctgggcccctggaagaaagccttctaagaaccaatcgcgttgtggcggccgcgggggcccccgagaagcggctacggggtgaaaccgtgtgggcccatcacccgtgttctccctaaggggagaaactccggggcccgacctagcaccacacgcggctggggaaggcagtcctctcacccaaccatataacaaaaccacccccgcgggcggcgggcaccaccgggaacccgacgttctcccgagacaccacaccctccccaacagatgtgagacgactgaccagaaggcagggcacaatcaccggggcgccatctatactcacaacagcaacgggggatgccaccaggagaaggagcgctccgagaactcctcaaaccattaacaccggccccaggtcccaggagatggtacacccacacaaacaacacacacccccgaacaacagacacacccaagaccgcaacccaaccccacccaacacacagccaaccacacaccaccaggacaaccacaacaccaacataaacacgcacgaccacaccaacaacactgacacacacccgacacagccacaccagcccccagcaacaacgcacaaacctagaccacaacaacacccaaacgaaactgcagccgacacagagcaaacaactacacgcgacactacaagcaagacaacaccaacacaat

SEQ ID NO: 706594 - DNA, 568 bp, Homo sapiens
ctcatctgtaacatccaagggatctgagaacagacgaggcagtctgactgtcctttctacttgaaagattagaatatgtatctaagtgacacgtgaatgccatttggatacatattctaatggcattcacgtgtcacttagcaaggtttgctgatgcttcaaagagcttagtttgcggtttcctggacgtggaaacaagtatctgagttccctggagatcaacgggatgaggtgttacagctgcctccctcttcatgcaatctggtgagcagtggtgcaggcggggagccagagaaacttgccagttatataacttctctttggcttttcttcatctgtaaaacaaggataatactgaactgtaagggttagtggagagtttttaattaaaaagaatgtgtgaacaagtacatgacacagtagttgcttgataatagttactagtaagtagtattcttactagagaaccccaagtagcaaaatgggacttatttttaaagcccagacacaggcgacgcgaagcagaggcagcacaccaacacacaagacaaaagcaccaaaagtgggg

SEQ ID NO: 706595 - DNA, 842 bp, Homo sapiens
gaaccatggatggtgtagaagagaagaagaaggacgttccgtgctgtgccagaatacccttgaggaaacacagcgaaggaatttcgcagagcttgaagatcaaggcgcctgagaacagaagtttgcccacaagatgcttcgaaaggcaaggaggaagcttatctatgaaagaagcgaacgcactatcacgaaggaatatacggcagatgtacatgaagctgaatattcgaatggcgatggatggtcaagatacccgtctggcgacttctatgtacctgcagaacccataattggcgtcttgtcatcatgagatcagaggtcatcaatggcatgtgatgcccagaatggttcggaaaggtgttgctgcttcttcgccttcgtcaacatcttcaatggaacctttgtgaacgctcgaactaaggcttcgattaacatgctgaggatcgtagagccatatattgcatgggggtaccccgaatctgaacgtcagtaaatgaactaatctacaagcgtggttatggcaacacaatcaatcacaggaagcgaatagcttagagagataacgctttgattgctcgatctcttggtacaatacgggatcatctgccatggaggattctgattccgtgagatctatatctgttgggaacacacgcttcacaaggaggcagaattacgttccctgtgggccccttcaagacttgtctttgtccacagaggtgtgcattgaactagataagacctacccattgtggtcagaaggtggcagaatgctgtggcaacaggggaaggacgagaatcaacggggttattacgaagaatgaactaatgtgtttaccatg

SEQ ID NO: 706596 - DNA, 911 bp, Homo sapiens
cagccataataactcctcagacatgttatgctggggccgtgtcgatgtatcagtgccagccagaacctcagcacacccacgtgggtcagatgcggtacaatccagtactgccaggcaatcaggcatttttaagagcaagtttcagaatggccgtgttaaatgaaacatatccagctgatgttacaataagcataacataacgactcagactaccagacatcttcagccacttcatcatccgtcaggaagccagagctttgcctgatttgacatccagtggattcctgtaattccaagcccaattttgaccctggttttgggattaaattagtttgtgaaggattatggcaaacactaccaactgtcactgtggacgtcagcacgttcacatggaggcattgatgcatgctattcacaattattccaaaccaaatttaattttcgcttttagaacaaggccagtttcacaaatggtatcaaaattacatatactacagtcacgatacgaacagggtgctgccacggagtgggaggtaccgcctacattttcacattattctggcgcccgaaattattacaaaattttactcagggacactaagattctttaaattagaaaatattctctattgaataatttctgtcacgtaaacataactacttgagtatgagctactgagatctaatagttccccaaatacaagttgagacctaactagtttctatctgtaactctgcttattagaggtacaacacggtgggctataaaagaaacgcggtcccctcagtaccaggcccatttcccaacaacggaattcaacgacctgttaacacttggccaattgtcaacatttgagtaccgactgtggggaaaaaaccggcacggcgggcgatatagacacagactgcag

SEQ ID NO: 706597 - DNA, 113 bp, Homo sapiens
gccagtgtgcccagcatcgttgcgtggtcagtcagccacatcattccaacactgcagcaacttctgcaagtgcctgcacagttggcagcacagtggttccacatgttgcaacc

SEQ ID NO: 706598 - DNA, 118 bp, Homo sapiens
gtagcacccttcagcaggaccctataaaacttttctccaggcctttgctctttgcaggttagcccttctctgctgagcttgccactgcaacatattttcaccatttctctagtaatcg

SEQ ID NO: 706599 - DNA, 213 bp, Homo sapiens
tgaagccggaatggtacgaatgggatgaagaattgatatggcttgttgaagttaccttctatcaaaaggagttggcgatgggatctgacaagcgatagtcagagaagaaacagtttttcacgaatttcttggggattggaggagacggaatagcgtcattgtaatcgcaacagggaagaaaagaagcagaaatgaagaaggttacataaatag

SEQ ID NO: 706600 - DNA, 131 bp, Homo sapiens
caaggaggatgccggcaaggcctttgccagctaaaagcgggactgagggtgcctcacgtgttgcaagaacagttttgagccattgttaacaaagcctttttttttcacataaaggagttgattacgaggga

SEQ ID NO: 706601 - DNA, 423 bp, Homo sapiens
  misc_feature (30)..(30): n is a, c, g, or t
  misc_feature (198)..(198): n is a, c, g, or t
aaaaagaggccgggcacggtggctcacccntgtaagtagtacgggaggttgaggcaggcagatcacttgagctcatgagtttgagaccaggtgtgggcaacatggtgaaaccccatctctataaaaaattagctgggcataggctgggcatggtggctcatgcctataattccagcactttggtaggctgaggcgggnagatcatctgaggtcaggagtttgagaccagcctgaccaacatggagaaaccccatctctactgaaaatacaaaattagccaggcgtggtggcacatgcctgtaatcccagctactcgggaggctgaggcagtagaatcacttgaactgggaggcggaggttgcagtgagccgagaccacgccattgaactccagcctgggcaacaagagtgaaactacatctcg

SEQ ID NO: 706602 - DNA, 383 bp, Homo sapiens
  misc_feature (40)..(40): n is a, c, g, or t
  misc_feature (56)..(56): n is a, c, g, or t
  misc_feature (268)..(268): n is a, c, g, or t
  misc_feature (360)..(360): n is a, c, g, or t
ggaggaatctaaatactagaacggaggtcacagaagtctntgattttttcttgatngaagcctcacctccgttcaatctcagcattctgacagaagagacggtaggcagagtgtcatccagtggacaccggacggcagcgtcactccgctcctagctgggactgggaatacctagggcggtatctatatgtctctgggccacatctggctctccaagggcttgccagagaacttcacctacgagcaccaggcgagggtggtacacggnccatgggtaaccaggaaaccacggctcagcacacggctgcatcgggggtcctcggttcccaccgacacatacagcaccgcaaccagagcttntgatgcaggggggatccgcggat

SEQ ID NO: 706603 - DNA, 243 bp, Homo sapiens
agatttgggatcagatcagatgatagtgcatcattccgcatgtcctattcaagtctcaggttctcattcccaaatgaggcctaacctcatggtagcaaccgtcttagggttgaaaatttaatccttcctatcatggctcacgtacccttataattaagtttgggacctgaacctcagctatgtctaccctccatttacaggagatgaaagagtctttatatactatcaaaagacgagggtacc

SEQ ID NO: 706604 - DNA, 448 bp, Homo sapiens
agtgctacctccacaaacagcttattttttaccctctaagggtaagaggctgggtgcggtggctcatgcctgtaatctcaccactttgggaagctaaggcaagaggatcactggagcccagaagttcaggaccagcctaagcaacacagggtttctctctgttgcccaggctggagtgcagtggcaccatcatagctcactgaagcctcatactcctgagctgaggtgggaggatcacttgagcccaggatgtcaaagctatagtgagctgtaatcacgccactgcattcaagcctgaagatcctgcctcaaaaaaaaaaaaggaaaaaaaggtaggcggagaagtagggttcaaaactagggtggtatccaccctggagaaagcgggtggggagaagacaaaactagggttcaaggtaggggggtaccggttgggggaggtagcacg

SEQ ID NO: 706605 - DNA, 339 bp, Homo sapiens
tattgcagcaaaccctgtggttttgacacataatttttcttccgccaaatagctctagtaagtttatctgtctgacatttgaattttacctgcaaagcatgagactcatgctgccttttgccaccataggcattaatggtattgagaattaggccttacttttttttttttttgtagatgagattagttttgtagaccattagttcacattttgctcctacccttgtgcataaaatcatttcatcatttccgtgtgtatgatgctacttcaagctacttccttggatattctgtggaagatggacatcttaaaagtaaactacttttgttatggctaat

SEQ ID NO: 706606 - DNA, 252 bp, Homo sapiens
  misc_feature (99)..(99): n is a, c, g, or t
aattatttttatttctgtgggtacatagtaggtgtatatatttatgggatacatgagatatttaatacaagcatacaatgcataataatcacatcaggntaaatgagtatccatctcctcaagcacttttcatttctttgtgtaatagataatcccaattatacttttcttagttggtatttgtcatttatttatttttaacatttatttgttccataaagttatttgggggtcccaggtgggtaattttgg

SEQ ID NO: 706607 - DNA, 601 bp, Homo sapiens
atcaggtggtccacccgagaccccttgagcaccaaccctagtcccccgcgcggtcgccttattcgctccgacgaagatgaaatgaaacaatcatgaaccagtgaaaaactcgccaaactggcaggcacaaggtgcggcagtttggtgcggagacatggacacttgcgtctgcatggaataggaatgacaggtcgagtctcagtagaagcagcgacacagacgaggagtgagcagaagaaagcttcagatgtctccgttgaagcaagttaggggtaaagaatatctctgggtattgaagaggtgaatatgtttacaagccaaggaacagtgatccgactttaacgaaccgctaaagttcaggcgatctctggcgagcgaacacttgcaccattacaggccatgctgagacaaagcagctgacagacatgctacccagcatcttaaaccagcttggtgcggatagtctgactagttcacggagactggccgaagctctgcccaaacaatctgtggatggaaaagcaccacttgctactggagaggatgatgatgatgaagttccagatctagtggagacatatgatgaggcttccacgaatga

SEQ ID NO: 706608 - DNA, 161 bp, Homo sapiens
ttctccgcgcgtgttggcgtctgtcgtgttgttgaccgtgtgtgtcggacgtgttggggtgttgtgtgtggacggacgtgttggggtgttgtgtgtgtcggacgtgttcggggtccgtgttggggtgttactttgtgtacggacgtgttgggtactgtgtt

SEQ ID NO: 706609 - DNA, 153 bp, Homo sapiens
gtggatgtgtgtgcatgcctgagtgcgttttttggggaggggtgtttatttttagtacccccttctggggttttctgatccagtgtggatgtgaaaatatgggaccttctccagtgtagctccttccaatatagtccatgctggggaatgtta

SEQ ID NO: 706610 - DNA, 381 bp, Homo sapiens
  misc_feature (292)..(292): n is a, c, g, or t
cagcgggcacccaggcgtggcgggtaatgctcctttgggtttgacttctgatcatctccctcttctcccctcctttcacaccgaggctcctgctctcctgtgcctccgaggcccccagctggcaagtgccttgttgcctctgccctttgaagtcggcacaattcatagcacctgtcggcaggtcaagcgcaacggcaaattcaaggccagactacgacaaaaccaggatgcggatgccccatgaagaggctcacaaccctcgaaacccctgaaacttgatcgtccatatccnagaagacacaacgcctggacgatataaacatcaacgaccccacgttaaaacacaacctcccatctgtcataacacaacacccacacaac

SEQ ID NO: 706611 - DNA, 221 bp, Homo sapiens
cagacaccagaccaacttagactgtgccccaaaaaacttgtcatccctactatcttctgtctagtcaaactcctatttgccgttctcaactactcatacatgcccttctcttgtttacactgccggtttacactgtttctccaagtcatcacagctgatatctcctggtgctatccccacctgccaatagtaataaagcaatgtcacttttttaaaacatg

SEQ ID NO: 706612 - DNA, 643 bp, Homo sapiens
cagttgcaggcgagcaggcgaggaatcgccgtgggtcttggtgttctccacgctggttcgcaggtgaagagatggcgtttgtgaagagtggctggttgctgcgacagagtactatttttgaagcgctggaagaagaactggtttgatcttgtggtcggatggtcacctgatctattatgatgaccagactcggcagaatatcgaggataaggtccacatgccaatggactgcatcaacatcctgcacggggcaggaatgtcgggatactcagcccccggatggaaatgtcacaaatgactgcatgctccagattgtttgtcgagatggtgaaaacaattagtctttgggccgaaagcgcacgagtagtgatgtgctgtggtctggaaaattttaccacttccagaatcctaggacaaacacagcgtatgtgggctctgcagtcatgacctgatgagacatccgtggtttcctcacctccaccatacacggcctatgcttgcaccggccactgagggtagggagaaccctgagcctccagcaggcttatggctattgggccatacggtggtgcgtacccgccaggaactcaagttgtctacgctgcgaatgggcaggcgtatgccgtgcctaacagtaccatag

SEQ ID NO: 706613 - DNA, 922 bp, Homo sapiens
atatagcatctcacttgctaggaagtactagtatatcgctcacacctcatattctccctactatgcctagaaggaataatactatcggtgtgcattatagctactctcataggcctcaacacccactccctcttagccaatattgtgcctatggcatactagtctttgccgcctgcgagtgcatgcggtgggccgtgagcccttacgtaggtctccacatcctcctaatcgacgaatatggcctatggacatagcagtacgaagtgagcacgtgaaagcctactccaatgctaaaactaatcggccggcgaacaattgtattacatacgcacgtgacatgacgtttccaaaagacagcatagattttgaagtcaagctactaagcgccacccatcagcgctaatgtattagcatcatcccgtctactatttgttgtaacgcacaatcgtaacaacaacgcaatattatagcatgttcctcgaaccttggtcctccgaccacgcgttaagaaccgccggctcctgaatactgaatttagcatcgagtcctacccttcaaaggtctataggtaagcctaaatggccacttgatggcctaggggaaacaagtagtccatggaagaaagctctaccttctcgtgatgactaaatcttccgcgtacaagattctcgcttgagattgataatcagtgtcacaggccagcagaatctaatcatatagtagatcttcttcgacgcgacagttattccccagctgggtatcatcgcccgtattagggaagcagcagatggcctgaacgtgggggccttgtccgattgcttagccctagtagtccgttcccctaatcatcgcattatgaggctcacaagacctaggtcttagaatttttaccgtttgtgcgagcattaaatcgggcaaattg

SEQ ID NO: 706614 - DNA, 512 bp, Homo sapiens
  misc_feature (6)..(7): n is a, c, g, or t
  misc_feature (512)..(512): n is a, c, g, or t
ttctgnnggtttattgattttaaaccacttttttggaagcttttatgtttttaccaacctaccactgctatgactgtgtcataagatgcacttctttacactcagctgatgaggggttacaatcagcaattgacctttggatgcagagcctaaattgttttaacgcctattattatcttgggtgggcattctggtacatgacgtgctaaaagggttgcaaggaaactgctgcgtcaaccttgttcaggtgcatggaaaatattattatgcttcaaaaactgatttaatttgaccccttgcactaaaaagtatacatgaggtgcatttttccgaaatcacatgtaattgtgctcctacaaacaggaccagaggaaatgtagctaccttaaagacctatctctcaaagcactggaactacggtggcgggcattggaacgctctatgagaaacaccgctctttgacagcgactgggcgtgatccttaatagacgaactcgtagggacatactgan

SEQ ID NO: 706615 - DNA, 1014 bp, Homo sapiens
tacatccgggggtttttctaaagggcacttctcgaggcaattgggtgaatctccataacttctccaaagctccaaccaatttcctaaaatcttaagaaactttatatggcacgagtttcaatggcagaggtgctgtctggtagcacttaacacccgagtgaagagcccagccatctatggacaaatccttggatatggtgtctcttaaggacaaatggatggctgggtcatcggcaagttctcagaatcttccgtggtgttattgaggatggctggggttcccttcgggcttggatctcaaagttcccttgggctttgcctccctccagcccttttctcacgccctttgggcgtggtcctggtggtcacgtggattcggggtgagaagaaatatcggttggcttggaacccctttcccccacgaggaacccatctttatggagtgtcctcagaggtttcgaatttaatgcggcgaacttaaacaggtggcttaaatgcgccgggcgcatttttccccccaaagaaagacaaagaacagagaaccagacaaacgacgaaaaacacaagacactggtggtgcgcggcgcgacgcgctcagggggccgcatagagaagaaaggtgtttaaaaagaacgaaatccggccgtaggggcgacgcgggggagccccacaatgagagagcatgatgaggagaaacaaaggggggcgcaaaacaggcgtgggtttccccaagaggagaaagacacaccgcggggggaccgagaaaaacagcagcgggcggtgagaggtctcgcccacaagcagagagaaaaaaaaagacgccgccgcgggggggggaacaacacgcaggcggccgtctcgctggaaagcaaagacgaccgaaaagaggggaggcacctcgggaggacgcgcaacaaacacggggggggaacataccaacgagcggggaggggcccccaacagcgagaggcgccacaacacaaagtgaccccgggcgcgcgcggcgggggggga

SEQ ID NO: 706616 - DNA, 758 bp, Homo sapiens
  misc_feature (17)..(17): n is a, c, g, or t
  misc_feature (737)..(737): n is a, c, g, or t
  misc_feature (756)..(756): n is a, c, g, or t
cttaagtgtgtgtgttntgacatggttcatccaccagctattccctcatctccctccttctgtttaggcctctctattccctgataaacaatattgaaattaagccaattaataactcggcaatgacttctaagggtcaagtgaaaggaagagtcacatgtctttcattgtaaatcaaaaactataaatgattaagcttagtaaggtgtggcctcttgtgccaaacacttagccaaattgtgagtgccaaggaaaagttattgaaggaaattaaaagtgctactccagtgaacacacaaatgataagaaaacaaaacagccttagtactgatagggagaaagttttagtggtctggatagaagatcaaagcagccacaacatacccttaagccaaatcctaatccagagtaaggtcctaactctctttaattctgtgaatgctgagagaggtgaggaagctacagaagaaaagttgaaagctaacagagtttgtttcataaggtttaaagaaagaagccatcaccataaactaaaagtgcaaggtgtagcagcaagtgctgatgtagagcatcagcaagttatccagagatctagctaagatcattgatgaaggtggcttcctaaataacagttttcaatgaagacaaaacatccttctatcggaagaagaagcatctaggttttcacagctagagaggagatgcctggctcaaagctccaagcagaggcggctccntgttaggggtaaagcagcngg

SEQ ID NO: 706617 - DNA, 217 bp, Homo sapiens
  misc_feature (8)..(8): n is a, c, g, or t
ggggaaanctcctagcgagcatttctctcccccctacttaacctaatcacaatcattggagaacactggtaacacccaatttaaaaatggattgtaatataaaagttcatttgtaaattagtagcttagaacttgaatacttttgtctcataaaaagtttacccataatacatctgaaatagaaaaccaaatcaacattataataaaatttcaattt

SEQ ID NO: 706618 - DNA, 356 bp, Homo sapiens
gcaggcttgtgcggcagggggcatgcacctattaattgcagtgcaggggcggtcaggaatgatagagaacattcttgcaggaaaaatgaggaacatgagaggatatgcatgcaacaagaatgggggagagaggctggccgtgcatgccccacgtctgtcctcagttcgcttttctagaagacaaatccagacacttgtgcactgctgccacaggaatattccatggcatcagaaagttcccactcgatttcttaccagagtaggtcacacagacacgtgggttgtctgttcaaggtgataggaggagagagatgaaaggccaggccagcgagtaaagttccaaaacattctgtaat

SEQ ID NO: 706619 - DNA, 184 bp, Homo sapiens
cgataaacagcgtctcaatcatctttttcatgactcccaagctagaaaggcaagccctccagagggcgttatgtgacccacaaccgagcactttggtgacagaccttcggggcctgtctgaagccatagcctctaccgagagcccagtggccgactctgcactctccaccctggctggaaccag

SEQ ID NO: 706620 - DNA, 152 bp, Homo sapiens
cctgtgtgtgattagctgtctctaacaattgtacatcataattgtcattattgtctcaacttggggctctccccaacctggggacccttccttattgttgctacccacctatcattgtgaagcagaatacaccaagcgttggattgttgcta

SEQ ID NO: 706621 - DNA, 261 bp, Homo sapiens
ggagatccatattcagctctatcaaagcttagtgaaactgatccatctagacatcctctaagaagttcctgcacaatatagcaatcggtccagacgctcctgatccagctgcagcttctcctcccgccgccgggccttgcgctcctgcagacgccgcaattcctgctgccggcctttcttgtttctacctcagaggtcagcagtagctgcccaggagcttgctggaacattgggagctgcatctatgtggcacttcttctc

SEQ ID NO: 706622 - DNA, 198 bp, Homo sapiens
ctgtaatcacctgggccaggagatactggcatgccctggtagatacagtgcagaggcatgggtagaacgacagtttcgatgtagtcctcccgacatctatagtcatactcagagtagctgggtattaaaacagtgcaaagtagaaacccaacttccctccctttctcttcgtgtggaggtcctgtgctgaacctccaa

SEQ ID NO: 706623 - DNA, 670 bp, Homo sapiens
  misc_feature (49)..(49): n is a, c, g, or t
gaggggaggaagaggggcagaagaagaaagcagagaagaaaagaagcgnatctctggaaagcagagcaagtaaagcaatctgcaaaagaagaacaggagaacaggcattcacatcaagaagagtatttcaacttgtttgatactcataaaaaccccatggagaagacatagccaacatcatcatcttcactcagaaataaggaaactgaaacctagaggggctgggtgctagtagcaattccatacagagccgtcccattcagctgcagcagaaaacacccgggtctggtctggactcaaagccaggtgcagcactctgcccctgtggcctgggggaagaaggaaagacagttcatactcctccacgttacatggcttgcttgctcaggacttgtaggcaatgtaagttggggccattgagttcccatcccaggattaaagggctttcccacacccaccaggttcagagcttccaccaactgagccattctgggaaacagccaatcagggccgactgggacagttttctccctcagtggttttgcccctttaacagtttcctttggcttccattaccaatttaccccaatgggttgctttaaaccaccggaattgaattctcacaattcttgaaattggaaagtcttaaattcatggggtccacaggggc

SEQ ID NO: 706624 - DNA, 688 bp, Homo sapiens
  misc_feature (554)..(554): n is a, c, g, or t
  misc_feature (586)..(586): n is a, c, g, or t
  misc_feature (591)..(591): n is a, c, g, or t
  misc_feature (597)..(597): n is a, c, g, or t
  misc_feature (608)..(608): n is a, c, g, or t
cggaccacgcgtccgagcatatgtacaagaaatcattttacgtcttattttaaaataaatcatgtgttgaccgtacatgtctaacatttgtttttctaggatccattccgtaccgttcgttaagggatattcgtttaagactttacgtgttaattctttattcttgatgtgtacttagagaaacttaagaggtcctgtggttttatttcccctctccgtgttgccctgtctagttgcgtgtggaattatatcccttacaggcaaaactttcgaaggtgggtggatgtggctttttaaactcttaagtttactgtgcatccatctcttgtactaagcgaattgtttatcatcttgacatggttggtcatttctatgacgaatttagttcaaacgttgtgtacgtgtgtagttctatatagtttgtgttaagcatgtcattcatataaactgtttaagaatttttcagatggcctaggtttcatccctcttactggttgtctgtgaatgaactggttaaaagataagggttatagtttgtaccctcaaatgcgttngtactttcagagcaggtttaaacgttgttttnttgtncctatntccgaactgtnggcctcatggaaatccctttcccgatctttgtagcaccatctactggcaaaatggcaaagcagctgcgtttcacttccga

SEQ ID NO: 706625 - DNA, 447 bp, Homo sapiens
gagacttgccaacacttagccagcagatccctgagcatactgcgtgacacaggcctcttatggactctttacgtctgtgtaattccgactcgggatataggcctatattcgattccgtgacctcctccacatcttcaacacatttgttatactgtcgtattgtgctcacgaagttctctgtgtgactgactggagagcatgtgctctctgtcactcttgtatacgcggatgcaatctcctgagcctcctattcactgagagccgggcttcctgaagattgatgcagctgtgctatttaccgctgtacatgaagcggactgtctgctttccagcatcgcgattcgtgcgtctgaaggcctcctcccataggaacagcctctactgggaagctgtggccaccccctggcggtgtattactgggcgggtcccacttggtgccaggtgccg

SEQ ID NO: 706626 - DNA, 81 bp, Homo sapiens
tgaacttcacaatgtgtcccgttctccccagaccactctagcctcagtatattgcaataatatttcttcttatatttgcaa

SEQ ID NO: 706627 - DNA, 244 bp, Homo sapiens
tctagctgatcggatgttgcaaatcactggtgtccttgacgagcgcagtgctcgcgcccagtacttagaccgcatggatattgagcgggaacgcggaatcaccatcaagtcccaggcagtgcggatgccgtgggaggttgacggtgtcactcaccttctcaacatgatcgacactcctgggcacgtcgacttctcctacgaggtatccagatctctgcaggcctgtgaaggagcgattttgctc

SEQ ID NO: 706628 - DNA, 699 bp, Homo sapiens
  misc_feature (258)..(258): n is a, c, g, or t
  misc_feature (260)..(260): n is a, c, g, or t
gggcccaaaatgagccggtgtttttgaaaaattggcactgtgttaaaacccaggcaagttcctctttgggccaaaggaaccttcttaatggcaaaatttttcccaactctcttaagggaactctcacaagccattttgcccccactctttaaaactaaggccaatagttccaccggttcccaatttcccaagaagcgggggtcattggtgaacaatgaattggggcccataaatggggccttcattaagcctccaaancncttgttacttggaagtaatatgaataagaaggcttttttttaagaaatcacaaccaattcggtcttggaatgcttaaaacctccattaacagtaaaaatctttctcactaaaatggataaatcagttatgtcaattgacagatattaaataacagtgtgtgaccccaaaagtacttaccctaaaacatgtgttgcttgaaagcacatgtgtgtatcgcagccttgccatgtcttgttcataacacacagggcagcagggttagctcacgtgtctttagaactccagtactcacccagggactccagttcacaggccagaaatcatatgcattatgaagttcccctctactccatgcacatagtaagtctgactatggcagtcagacttacttactcccattttcccttcgatatgtgactttttctcagtaaatattaa

SEQ ID NO: 706629 - DNA, 131 bp, Homo sapiens
tggaaacacgacaaccgatacagctaaaatgggatcttgagtgtgcccgagtgtggcaacaagataccatgctcaaactcaacctggtagaccttatactactgtagtaagtagcgttacctactatatgc

SEQ ID NO: 706630 - DNA, 339 bp, Homo sapiens
atcggggcgacgtggcgacacgccgtgccccgatgacgccgaacgccccggaaatccgcgtgtttccgcggttctctgctactttgaaggcggcctgatcggccacgggggcggtcgaacgatcgtttccgagtactcatcgatagctgtaccgaaacagcggaaagtccgaggaggacattcaatggctgacaagtcgctgaacaagaccgagctcgtcgcgaagatcgctgcgtcgaccggccagagccaggccaccgtcgacgccgtgctcggcggtctcttcgacacgctcgccgagtccgtcggttcgggcaccaaggtctccatcccgggttg

SEQ ID NO: 706631 - DNA, 370 bp, Homo sapiens
ttagaggatccccccgactagccgacaggcacagtcatcgtacaatggctctttagaccagctctgctaccagcttctctcaggcctgaactttctcaagtcgacctcaacaggccagtcatggtttttggcagctctccaggcccagctcctgcatcttggtggccctccaggcccagcctctgcctcccgtcggcctctacagtcccaacatctgcctcacagcagattcttcacgcccagcatctgcctcactgtggacccccctcgccgcgcacaccgccgccttgtcctggcatcaaacacacacgcacaggtgcatacacaggcccgagctacggccctgcacaccctgtcgggctagtcgggg

SEQ ID NO: 706632 - DNA, 130 bp, Homo sapiens
agtgtggctctgtggtgcacagaaaaccgcagctcctgccgtatgtagttctgtggtatgctccagtgcccgagtgcctttggtggactcgatctatccacgtgcttattacttgtcttaagcacatgat

SEQ ID NO: 706633 - DNA, 380 bp, Homo sapiens
gggcccccccccccaaaaaacaaaccattttcggggtaaagttttttcttgccccccttttaaagccaaaggacccccccccccccccgggatttccctacccctgggcgggccaaaatttgttttttatgttttgtcttttcaaaaaggcaacaaaaagggaaccaaatttggttgttttctttcggccccaccccctttgagtttaacccaaggttttgccagggatggagggtttatcccttttttttgttgaaaagaattaaatttttatagaagggagggaacaaagggggtttaacccttcccctgttgagggcccctggggttgtttccctttccgggtttttccaaaaaaaacaactcggggggttctggta

SEQ ID NO: 706634 - DNA, 531 bp, Homo sapiens
  misc_feature (66)..(66): n is a, c, g, or t
  misc_feature (349)..(349): n is a, c, g, or t
cagtagatgcagcaaagcagcaacaacatgtggtggtgggggttcatggcccaaggacccccttcnagaagattctggttaagcacgtgggcaaccggctttacagcgtgtcctacctgctcaaggacaagggggagtacccactggtgtgtcaaatggggggacaagcccatcccaggcagcccctaccgcgttttggtgcccttagtttggggcccgtgccaaccggcagcccccaaacttgccccgctacccaaaaagccccgccctttttccctcaaccccggcccttgggcccccctggccgcccccctgtcatttcaaccgcccctgccctttgccgttttgngtttaccttccctccccaaccaaccgttgaccttttggtttttacttgggcaaaaggaaccctttggtggccctgctttttttttttggttttgggaggggtaagggatgggggtcctgtacccaacccccccctagtttttttttccacccaaaaggaataaagttttttttcctttttca

SEQ ID NO: 706635 - DNA, 144 bp, Homo sapiens
ccgaagacgacactggtgaggcgcttctacggtgcgggtctggggttacggaacaggaagctgacatctccctccactactccctgtgctgttacacagtgtcattgttgatgttaaattaaagtcatattcttgcttctctct

SEQ ID NO: 706636 - DNA, 170 bp, Homo sapiens
agcacaggggcacacgtatcagacaggaactcgtacaggaaggcatgcaccgcagtggtgaatacacgtctgaccaggctccatcttaactgatctgaggacgtcagcacggagctcacagtgtcgacggaacttgtccagggaggcatgcaccgcagtggtgaatacac

SEQ ID NO: 706637 - DNA, 283 bp, Homo sapiens
atgtgtcggttgagtaggcagtcatggatcaggtaatgcagtttgttgagccacgtcggcacttcgtaaaggactccattcggctggttaacacagatgcactaaacctgatagaaaagcaattccagcaagattgcccatggctaacagcaaatagagatttgctcataatgcggcattccattggacttcgtttcgtgcacaattgatcgggtattcctcattcaatcaacatccatctgttgcgtcggccagcaatcaccattccttggcaagcagcagt

SEQ ID NO: 706638 - DNA, 163 bp, Homo sapiens
ctctacaggatcatcatatctgctctaggctggatgtgatagagagacggagagggatagccctccctttgtgggttagaattactgagaggaattgttccattggaatgaaataagtatttacttccagagttgcattcacggtggtgaagacagcatatca

SEQ ID NO: 706639 - DNA, 137 bp, Homo sapiens
  misc_feature (52)..(52): n is a, c, g, or t
ctgccgctactactacatgtgtgatctgaaaacccgctggttctgagctgcngtctatgcatggtaaagtaataccaagggctttttatcatttccttcttccctttaagtttcactagaaattttaaaaatcatgg

SEQ ID NO: 706640 - DNA, 687 bp, Homo sapiens
tgagcaggagtctcgctctgtcgcccaggatgcagtgcattggcgcgatcttggctcactgcaacctctgcctcccggttgaagtgattctcctgcctcagcctccctagtagctgggactacagggcatgtgccaccatgcccggcataattttttttatttccttgtggcaacggggtttcaccgtgttgggtcttagatctcttgaccttgtgatccgcccaccttggcctctcaaactgctgggatacacaggcatagagccaccgtgcctggccccagaataacccttttctatgtgagagtgtaaaaaatgttgctgccgctgggtgtggaatgggggatggctgggtttgagcactggctgttgtcaccgttgcaggtgttacccctgaggttgacagtggttctgaacattcacttttccccatgtgaaggcccggagttgacctatcacgtgtgcttctcaaaattcgggaactagggtgacctctaggagaagttgcccagcgagagcttcccggcgatattctctcaacaagattccgaggtcactgacctcttctttcaagatttaaaccgcaaatatccacatccatcattcttgcgtaaagagaccatccttattttttggaacatggagtcttcgctctgtgtgcccaagctggattgccagttggctttga

SEQ ID NO: 706641 - DNA, 1207 bp, Homo sapiens
ggatcgcagctcctgacaccatgtctgtctcttagttcttcatgctatttctcattgcaaagcacccataatgttgcaagcaggcaatcacataaaggcaaatcccagcacatgtctattggtgcagcagcagacatttattgcatgatgcatcatacacaaaacattaaccagtgcatggcaaaacttccatttcatgcagcagccatgcggttaccaagccctgtgcgttggcacttggatcaatgcgcacaagcctatacgaacgatgactgtaatcgactggctaccccaggtgaaacaatggggaccaaaaccatttatccttgaaatacttggaaagggatgccacaggactcggagtttaatgcccgcaaacccccaatggacacttctagactccctttgcaaagacgcgtcagtgaccaacaggaaaatggtagccggttcactaagagagtaaccttacccaggcaccaataaggggagccagttcgggggagcccacggggggggactggtgggcaagggacaaaaggtgaacagattcagacacaaatggcggcatagaccggaacacaggccccaatacacctccggttaacacacacgtgtcatggaaaaagggaaaattcccaccggtggaaaggaaacagctggcgcaaagggaaccaagagggacgcatagacggaacggcacataacgcacgaacacgcaaaatacgagcgaaaaatcgggacacgactagggacaaccccacaaggaatgtgaggaaccgtatcaggacaaacaattgggcatgggcgacacaccaggcactccgcatagccacgccccccgacagggacacagcagatccagacacacaagggaaggaaacccaggggaaacaaccaacacttccgaaaccgacaccgggggcccggggaaccaatgacaacgacacacaaggatgaacagggaaaacgcacacagtcatcacatgacagtccaagataaagcgctaacaagaatagtagcagaaaaagctccagtaacccaagtaccgatcagtaccagaaacgtacgagcgcgcaagcaaggacacagaaacacacaaagagatgaaaaaacaaactaccacagcgatggaaccaccaccaagcggccgcacatcatcaagaacatacagagacaagtgtaaccgccatccaccataacgggcga

SEQ ID NO: 706642 - DNA, 223 bp, Homo sapiens
tagcgggtgtatgaaggggcatgttgccatattgactagttggagagggggcagaatgctaaaaattcatcggtgaacaacacaacaatacacaaagaagaactgtctcactcaaaatgccaacagcactcattttgtagaaacagtaggaaggacacacaccaaattgttaggagaggaggttatttcttgggatgtggggattgggaaagcaagcagattt

SEQ ID NO: 706643 - DNA, 304 bp, Homo sapiens
acatctgacctcgtgatctgtctgcctggctcccagcgtgctgggcttacagacgtgagccaccacccccggcctctgccactcatttctcagtctaattactgtcttgtaatgttgtccataggctaatgtttcaggattgtgggctgtggttatagtagaacatactgtctgctacctatagacttctagctacctacttacttttacacctctttctgccacctagaaattctgagtttagtatctccacactcccacgttctacggctgaggcaggtggatctcttaagcccagcctggg

SEQ ID NO: 706644 - DNA, 914 bp, Homo sapiens
  misc_feature (380)..(380): n is a, c, g, or t
ccggtgaatggggcagaacaggcaggttccctcgacccaggaccccctgttcccacgtctatggcccccagtgcccatgtagacctggcagtgccccccgtgcttgcgcaccctatttgggggtctgggtggctactggagtggccttgcaagagtggggcagagaagtgcaggaccatgacatctagtggcctctgaactttctccgtgggcgcagcgtgacggactggcatcatcatatgttggagatgagatccttaagggacacactcaggacaccaagaccttctattctgtgccggacactgcgcatcccatagagggatcccaggttaggcacgagtctcacgttgataccatgagtgaggtagcacaaccanttgcacgcatgagagtcacgtgtcttttacgtccaaagcgagttcacccagtgtgctcacaagaagggggcaatcggcacccactcatgatgatgtgaccttagaggcagtggcacagggccttaagggagactgagctgagaggccaaacgcccaaagttggaacgcagacaccaagagcgcccataaggacggggaacaggctgggaggaacgcagtaatcaatagggtgcacatccagtctgaccagagcctgacaactaatgagcaacaagaagtgcagattgagaacctaggggatcgaaaggccatgtaaccaggagtagcccgctacaggagatcgttccaggatcccggaaaaacggagtggaaagccttcttatccacacgaggcagattgccgaagaaggcgttgacatgacgaggagggggcagcgagggaaacgggagaatagacaggggaccacaatagccgaaacaagcagaacgatggaaaaaagaggcgaagcatcaagagggggcagcaacaacaag

SEQ ID NO: 706645 - DNA, 298 bp, Homo sapiens
acagtgcatgagtcgagagagacccctcactgagtattgtgtctcgaaacgagcagcctgagccgagagttataggctgtacacggtggctttaaggagactagcaccgaggtgctcatgaaaagcagtcctgaagaacgagaaaggatgatccagccggtgaaggaagaattgaggttagaagaagcaaaactcgtgttgttgaaaaagttgcggccgagtcaaatacaaaaggaagccaccgcccagaaggccacaggttctgttgggagcaccgtgagcacccctcccccgcttg

SEQ ID NO: 706646 - DNA, 282 bp, Homo sapiens
gcttcaccttaccaccagacaaccttaggcaaaccatttacccaaataaagtataggcgatagaaattgaaaccttcgcgcaatagatatagtaccgcaaagggaaagatgaaaaattataaccaagcatatatatatgcaaggactatacccctatatccttctgcatatatgaaattaactagagaataactttttcaaggagaggccaaaagctaagagcccccgcaaaccagacgagctacctaagaacagctaaaagagcacaccccctctatttag

SEQ ID NO: 706647 - DNA, 400 bp, Homo sapiens
ctgtgctattatctcatgctctaatggggagattatattttctcatatacttatgtgaaccacattaaggggtacatctgtgtgctatatttttctcacaatggaaatgtgtttttatatatataaatccatgcgtctttgaaaaattcaacctggattgagagtacactataaataccaaaatgaaaggcattttgacttccacattcccagagataatcaccatgtgacacggtaattccttgtgttcgagagaaggcgacatttgatcacagctgtgtgtgccttactctgtctggggaaggcctcgggtgaatcatggactcaaggtctctgttcacattactcaagttggtaagaattgcgcacgtagaggggggagaggtttgcattggctgtt

SEQ ID NO: 706648 - DNA, 638 bp, Homo sapiens
aaacggtatctggaactatgataatgtgacaaaacaagttctataacattcacaaaagatcacactagagcaatgaatccaaaccaagaagaaatctctgaatgccagataaacaattcagaaggttgattattaagctattcaaggaggttccagagaaaggtgaaaaccaacttaatacaatttttttaaaatacaggctatggatgaaaaagtctccagagaaatagatatcataaagaaaaaacaatcacaacttctggaaatgaaagacacacttagagaaatacaaaatacactggaaagtttcaacaataaactagaacaagtagaagaaagaacttcatagcttgaagacaaggctttctaattaacccaatccaacaaagaaaaaagaattttaaaaaatgaataaagccttcaagaaatttgggattatgttaaatgaccacacataagaataattgatattcctgaggaagaagagaaatctaaaactctggaaaacttatttgagcaaataatctaggaaaacatccccggtctagctagagatctaaacatccaaatacaagaagttcaaaaaccacacaggaaattaattgcaaaaaggtcatcatctagatacatagttccag

SEQ ID NO: 706649 - DNA, 287 bp, Homo sapiens
gctcgacataatggcgcaatgactactgttaggatgttacagaatcatgcatggaataaagatctattcaggccaggcgcagtggctcacgcctgtaatcccagcactttgggaggccaaggcaggcggatcacgaggtcaggagatcgagaccgtcctggctaacacagtgaaacccagtctctactaaaaatacaaaaaaattagccgggcatggtggtgggcgcctgtagtcccagctactcgggaggctggggcaggagaatagcgtgaacccaggaggcgga

SEQ ID NO: 706650 - DNA, 614 bp, Homo sapiens
ctgacggcagtgtaatccggaatcatgggcatatcggatgtccagggataatgagggacagatgtagtgctcgtgctcatgtgtgacagcgatcagcggatgtaggaagcagcagtgggacctgagcgagctcacatgggaatgtcactgaataagctattctatactactaaatttcagcctcagaaaatgagggagcacctggagctagttctggtctagagtagaatattcccaaggtgctaagagctagcagaacaagctcatctttgggcagaactggtagtataagtatagacaagtatgaagaatatgataatgccataattaccatgaatgaatcatccaactgatgcctggaaagaagggcaattcaaagatatcattaccaaggttgccaatgtggaactatactacagagcaatacagttctacttagaattcaagcctctgtagtaaaaatgattagctgatggtgctagtctccacggatggaatcacactcgtgcagtcaattattgcagcaaggtataacagctaccactggtgaaaccggataagcgttcagtacaggaaccataacaacaaatctgtgaatgcatcattgaacaatc

SEQ ID NO: 706651 - DNA, 451 bp, Homo sapiens
  misc_feature (34)..(34): n is a, c, g, or t
  misc_feature (76)..(76): n is a, c, g, or t
  misc_feature (79)..(79): n is a, c, g, or t
  misc_feature (90)..(90): n is a, c, g, or t
  misc_feature (116)..(116): n is a, c, g, or t
  misc_feature (120)..(120): n is a, c, g, or t
  misc_feature (134)..(134): n is a, c, g, or t
  misc_feature (236)..(236): n is a, c, g, or t
  misc_feature (255)..(255): n is a, c, g, or t
  misc_feature (315)..(315): n is a, c, g, or t
  misc_feature (382)..(382): n is a, c, g, or t
  misc_feature (417)..(417): n is a, c, g, or t
cacagctggctgccagcccgggccttggtggaanaggcccttgcccagcgattccaggtggacccaagtggagagnttntggaactggcnaaaggtgcatgtccctggaaggagcntctntaccacctggaatntgggctgtcccctccagtggccattttttttgttatttaccctgaccaggctggacagtggcgaatacagtgtgtgcccaaggagccccactcattccaaanccggctgcccctgccaaanccatggcggggttttcgggacaaggccctggaccaggtcagtgggatccctggctgcatntttgtccatgcaaacggcttcattggcggtccccgcacccgaaagggtgccttgagcatggcccgtncccccttggcccagcgctcatacctcccccaaatntcctagtttaataaaaccttccctttcatactta

SEQ ID NO: 706652 - DNA, 409 bp, Homo sapiens
  misc_feature (276)..(277): n is a, c, g, or t
atcttccagatggacagacagtctgtggtcgtcgccaaacccctgaatctggccctgcccgcagtcagagggatggcaatttgtaagctacagactattgcgaatcattcacttggagactgaactaagactactggcaccaggctccgtagaccctcgggaagagcatggtctggcaggcagactggatgtggccacagataacactccctaaggggagagcgtgagcctgcaggccagaatgccaccactttctcctgtgtcgttccagagagnncctgtggctatgcacgcttgctgctacagagggtagtgctgtatacctcctgggctcacttactgacttttcagtctaagggcttattgcaattggtacataacgatcatactttgtaatggttaagtaaaa

SEQ ID NO: 706653 - DNA, 938 bp, Homo sapiens
  misc_feature (22)..(22): n is a, c, g, or t
  misc_feature (145)..(145): n is a, c, g, or t
  misc_feature (281)..(281): n is a, c, g, or t
  misc_feature (359)..(359): n is a, c, g, or t
  misc_feature (413)..(413): n is a, c, g, or t
  misc_feature (430)..(430): n is a, c, g, or t
  misc_feature (451)..(451): n is a, c, g, or t
  misc_feature (521)..(521): n is a, c, g, or t
  misc_feature (560)..(560): n is a, c, g, or t
  misc_feature (562)..(562): n is a, c, g, or t
  misc_feature (566)..(566): n is a, c, g, or t
  misc_feature (576)..(576): n is a, c, g, or t
  misc_feature (590)..(590): n is a, c, g, or t
  misc_feature (596)..(596): n is a, c, g, or t
  misc_feature (610)..(610): n is a, c, g, or t
  misc_feature (663)..(663): n is a, c, g, or t
  misc_feature (705)..(705): n is a, c, g, or t
  misc_feature (754)..(754): n is a, c, g, or t
  misc_feature (756)..(756): n is a, c, g, or t
  misc_feature (791)..(791): n is a, c, g, or t
  misc_feature (805)..(805): n is a, c, g, or t
  misc_feature (823)..(823): n is a, c, g, or t
  misc_feature (831)..(831): n is a, c, g, or t
  misc_feature (867)..(867): n is a, c, g, or t
  misc_feature (907)..(907): n is a, c, g, or t
gcgtggcttagtgctaggctcntgttctcctcttcgtccttcttgttcttcgtgtcgccctctttctgctcgggcttggcgttgttctgcatggctttggcaaacgcttccacatcgcccttgttggcggcctccacagcctctncaggcagatcgaactggcacatgagggggcccagctgccccgaggccaaggctgcgctgaacatgcccagggcctgctggtactggggcgaggtcagggtattctggatctcatccgcggtctgcggcagcgactncccagagggcaagttgggaagcaggcgctcctggacatccgcgttggcgagggtgggagccattttctccggcgttantcactggccaggtccacttgctggccgcctgctggcccggctggtacgttcatngtggccaggatgctctngaggtcgctcagctggatggnctgggtcgggctggctgctgttctggctccatttccggaactgggcgcggggctcgggctagttgctgangcagccgctggagcagaaggggctggggtggcacgggtngnagangtggtggatnatggggtgaccgcngccgantggctccgggagcnggaggaggagctgctccctggaggcccactgctccccagttagctggccaggncagggccagttagggcccccagcccacccagttctccgaggncggctggtccgatgaactgcatgaaccggctgttgctcatgtttcccancngggtctgcagggcaccctcaccgcctagcgcaganagttcgtggccgcngcttccgctggcccccanttccccangcatcgggggggttgttcaaaaactcgttgactttncggcaatgctcctcaacctggtctgtttggggttcctgcntccagaagaaaagccgcttggaccctgcctt

SEQ ID NO: 706654 - DNA, 109 bp, Homo sapiens
ccatcttcgtcccatcagcggattctatacattgatctcttgtttggtatatcacaaccagcagtaacgacgtgtcaacaatgagtggtctgatgggagcaagatgcgc

SEQ ID NO: 706655 - DNA, 474 bp, Homo sapiens
ggctgatctctatgaggatcccccacgcgcaccgagcgagcacacggcttcgtagacgtggagataagatcccgagcaaaattgagaaaattcgagcaagtatatttaacaagtaagtgacttgatggtagtcaagtttggatggtgaagatgaatcgatggaaatgtcaacagaagagattctaaccgtgtctgtagtaaatcagagtctctttgatactcaagggagcccagggttagaagattatttcaatgataagtcaattaaaggggagaagctggtgcccggagccagagaggttctgacggagatatttaagagtttgcccattcagagcagacgcttgagcctgacaccagcgaagcacatcagagtctctgacatttatcttagcaaagagccgatcaattcccagaccccaggtaaaactcctccacctctttttcaccaatgtccggccgccaaaaaaggtg

SEQ ID NO: 706656 - DNA, 154 bp, Homo sapiens
ggtaatgttgatagttgggaaggtgcggtgttgcgtcggaagagctctccctccggtcctatgagtgaacttctcaaagttccaggccactattgagcggcgcatcagtgtctccaatctgatgagcttgggatcagtcagggcccgatgggtt

SEQ ID NO: 706657 - DNA, 194 bp, Homo sapiens
ccagttacacagctcccacgaaacttttagttaagcagctaaacaccctaatcaactggcttcaatctacttctcccgccgcaggcagaaataggcgggagaggtcccggcagaaatggacgctgcttcttgtgaatttgcaattcgaacatgacattcacctcgggacgtgggaaaacagagggctcaacctc

SEQ ID NO: 706658 - DNA, 1021 bp, Homo sapiens
gggcacagcgatggcgctagggggaactgctggcctctgaaactagctctgggaccggtggtctgcgtgctggccctagctggcccctgtctcccatccccagaatgggtattcactggtggattctgagctttgtgctactccatgtttcccacgacacgatgttccctttctacatgctgctggaggactggactgctactactactcctggctgtggcagtgagagaatcctggcagacatgaagaaaaaacttgcgacttggtaggagaaccagggtaaagagtcagagaaagacgttggctctagtgcacgaggctgacaagcactgtttaatagacagctttgaggagcactgtgggccagggttcagacacatacatctacatcttcagggtgtgccgggaacgcttggaaaccagcacttcttggggcagtgcctgggtgcaaatcaaagcagaagtaatgggaaggagacagtggtagggagactccagcgagagtcacatgccttcaacggaagtaattggatcatgctgatctatcaagggggtgatgacatatgacccaccagctgtggcccacggagccagcgctcgcgcagtgctgactgactctccctgcaccccgacccaccctaccggaccactccaacccctgtcgcctgaggacccgtggcacaagtcccccgacagcctatcatacacccccccttctgagcaatgggattacgcaagcactgcgcccttgctccaaaccaggcagaaactatatccccacgccacatgtgaggcactcatcccagcctgcttaacaccctgacgcacggctacctgggacatcccccatccgactcgaatggatcgaaaatgatttggtatggggaggggatccccctacgcagcgcacaggcacctgtgcaagctcgggcaggcccaacaggcgaccctggccgcgacagctggcccccgactcaccggccccctctcgcgagccatctggcgcagacgccggcccgcc

SEQ ID NO: 706659 - DNA, 1378 bp, Homo sapiens
  misc_feature (373)..(373): n is a, c, g, or t
  misc_feature (1057)..(1057): n is a, c, g, or t
agcggaagaaataagtccatgctagtggaagggctgctttgtcaggaggttgtggaattccttacttctccccttcttccctcccataatatgcttagctatgtataacagtgccacagtaatcggaccatcagcttgtttccatttactcacagagcaaagcaacttgctccatcatcatctatatttggcttcctagctttgtataacgataaccatccgttcgttttctgaactaccagatgtgtgtactggcgctttctgcgaggagggcgacgttagcgcaggtaaatgagtggccctctacctcaatctttctttactccatgctttttcatgctcacggtaacgttaatctggaggcaaaagaaantcccacgtattcgacggcctctttataggaaatcgagctttggagaatactagtgcactagcctggacttgtgtcttaggagctaaacgcattttcctttgtgacctaaataccgcatggtgtgaagtgcgtgaagaattcaggtcctaagacaaacacaaatttgcacattattctcgaatagtgtggtcctgcccaagtcagttagcggataccacaatgacacgaaaggtcatttcatgggaatcttactctttccctttctaccaactaaggttgaatagagcggcattggactacaggcgttcgggttgcacgttgtgcgctatagtaacacccttcctggttcaatttctttactaagcgattaaggccccttaactttttactcaaattcctgggatgctcagggggtgttactttttactttccttcccgttggtgataagagcaatacgcctgaactgtatttcgctggataaagcgaaaattcctctatgctccatatgcttgaggccaagaaccccgaaaggctgaacagacacctccatggggaaatcggtgtgtctggccactcacatttatagacgtgaaaccatgcacccgattggcggcgcactcttacgtctggtcacggacttactctctcaagcacaggtcaatctttggggcacctacatggcntttccctgcgtccctttacacttggccccttgattgccctccgtagtttataagtgaccgcgcttttcccgtcctacccatcttcagatagggctaggaaaatcgccagttggtagtggcttgcataactggcatactatgggcttattccacccttgccaacagcggaagaagggttcctaaggttagagaggacccgggcctctgtggctgtaacagcgggttcggccagcaaacaagcattcttttcccccaaaaaagaacttctggatatggaagctttaaagagagtttagtatcatatcctcgaaaaggttccta

SEQ ID NO: 706660 - DNA, 955 bp, Homo sapiens
gaccttcagcgtgagccccttggaaggtccaaacgtggggggtcaaactaggcgtcccccttgcccggcacccttgtggacccaaaccaatttcgtgaacttaaacgtaaataggtacttttcaacattggttcaataatgccgtgaaaaccttgttcaaggtctattatgcactcggagtaatgttttttctagacgcgcgctgaccggccgcccaatatctacttaagggcgcacaccacataaatctctctcagctgtggcggcgaccacttttttgatctctcggggcgaaaccctggtgacaacaaaaaacgcccccaattttccaggggaatgaataaatctcgggtgcgccccctccataatcaggaggttgctgtgccaagtgccacacaccctgttgggaggcaaacaaaatatcatcttttcagaggaggggtttcacatcaccccgccccgcccctccgcaggttttaatgggttgtagtatctcccctctcgctccctcttatcctgttggatggtaggtggccctgaaaagatgcgcatctctatctcgaggttagagtctccccagagccgggagtgggctaagaacgccccctgggagaatttttaataccagcgcgccttctgcttatatcacaggttctctcccccggcacacaaaatctgttctttttctaaccctcgccccaagcagaagatacattcactttcctcccctagcatccggcgacctcataattattcccagcagcgtgccccaaaaaattgcaaaaagattcttgtccccccatgaaactgcccacaacccttcctgtcgtgcatagatgcgacgccaacacccaactctgatttatagagaaagtcacccattccactccctttttttcccccctaaaaaacgaaaaaaaaacccccacatgacaaaaaaaaccgaacataaaaa

SEQ ID NO: 706661 - DNA, 1610 bp, Homo sapiens
acgtcgctgtcgacgaatcaggtggtgtgggtgcatagtctgtcgtgttacgagccgcgcgttctctggacgcagtgtcgctctctgcttggaacgactcgcttgggggcagcggctgtttctgctcacacttctcttgggatgtgggtggccccacttgttggcggcccccgttgggtgttgggtgccaccaggcgtcgcatagagtcgccccacgtgttctccctcgcagcgtcgtcccgggcggtagtgtttcccgacggtgtacggccgggtcacagacagtttggggtttgcttttcccgggggggtgtggggtacttaacgccggccccgccagtttggtgacgctctttggcctgggaagatggctttctctgttgtgccccccgtcgcccccaacaggggatgccctcgggtggagccccccaacgcagtacggtgtgagtacggtttcctccggggaaggcctgcctttggtgcgccggccgttttgcccgtggtatgtcccgggggggctcctgggcaccagcgcccccgtgtgggcgccccgcaggttgtgcgttccccccgtttttcggctccctttttttcccccgttggggggcgcccgctccttgagttagacagcacgcacaccgcccgggttgtgagatttggggggtgataagtcattgggccgcctttggggcactcctcgggggccaaccccccgctgtttaatttgcccccgtcggcgacaacacacgggggcacccacgaggccaacatcccccgttgtttctcccccctcccgcgtgtagaaacacacacttgggccgttttctctcgttaaataaattgggccccccgcggttcttttatacgcgccctcgtatattgagagagtggagaaattaaatggtcgaaatgttttgtcttgtctcaaaaagtggttatgacactttcccctgctctatgggagtgtgctggttgcacacccacacggggagaatattttgagagagggagagaaagttttcgggccccagcgctataggagatgaaaaccaccacggccacaaattgagcctggccgccacgagagctgtgagattataaggggcccacataagagagaggaaagagattccaccgcgaaagggggccgggggagagaatagccctcgggtgtgtctccacgacaattcgctctcccacgcgaggctgttcccccgcttctgttctctcgcgggtctggagagcttgcgccgcggagaccacgctttggcgggtgtttgtgcgtctctttctataattgtaagagatgagacaatctcacagagtataaccctataaaatatcacatctacactttgtagacaagtgagaccacacttcacgccggcacatttatgtaacacatccacgagaaaggttgtgtatggcacccacccttctgtcaccgcttttggagacacttctgtcatcacaccccgctgaagcacatcactttcccctcccgcttttcctcctcccctggcacaactggctgatcgactttgtgttctctgttgtttaaaaataggttttccctgttttggacatttcatataaatgggatcacccca

SEQ ID NO: 706662 - DNA, 141 bp, Homo sapiens
cggacggtgatcatagtcgcacgtaaggattataagagaacgcagaggggtagtaaggagggagtggacatctgtacgttgaatagatgaacagattaaaagccatcagtccaataaaatatgattcagcctcacatttct

SEQ ID NO: 706663 - DNA, 285 bp, Homo sapiens
  misc_feature (31)..(31): n is a, c, g, or t
  misc_feature (50)..(50): n is a, c, g, or t
  misc_feature (73)..(73): n is a, c, g, or t
  misc_feature (75)..(75): n is a, c, g, or t
  misc_feature (94)..(94): n is a, c, g, or t
  misc_feature (99)..(99): n is a, c, g, or t
  misc_feature (109)..(109): n is a, c, g, or t
  misc_feature (121)..(121): n is a, c, g, or t
  misc_feature (141)..(141): n is a, c, g, or t
  misc_feature (171)..(171): n is a, c, g, or t
  misc_feature (181)..(181): n is a, c, g, or t
  misc_feature (189)..(189): n is a, c, g, or t
  misc_feature (235)..(235): n is a, c, g, or t
  misc_feature (237)..(237): n is a, c, g, or t
atttctcgtcagcgttgaaaagggttacccngggcactggcctagagccncaccgccgaatagacttagcccngngagtttgccgtgttgagcnggacnatttctggcncttgcaagtccngtgatttcgtcggtaattcngagggtggggggagggacgtgaaatcgtcntagcttagcnttctgtcngtgaatgtcgatatagtgtattgtgtgttttaacgaatgatttacncngacggttgcggtaaaagtgaatttggaaataaagttattacgcggatt

SEQ ID NO: 706664 - DNA, 361 bp, Homo sapiens
ccatccagcctaagcaacaagagcgaaactccgtctcaaaataaaaataaaaatagacctaaaaatagcagggagtgggctgccagtagtggctcacgcctgtaatcccagcattttgagacgctgaggtgggggttttgagatctggagttcgagcccagcctgggtaccaggctgtgaaactctgtctctactaaaaacccaaaaattagctgggcatggtggcacgtcccctgtgatcccagctactttggaggctgaggcccaagaatggcttgaccctgggagatggaggttccagtgagccaagatcgcccccccgcccttcagcctggaggccagagcgagactctgtcttcca

SEQ ID NO: 706665 - DNA, 577 bp, Homo sapiens
acagagaatggagaatgtaaataccaatgccttgaaaggggccatggtgcggcgtgtgagagataagaaacagtcaattactcacagttggaccactctgaccagtgatgatgatctcgtttctgcaactgtacctttaaccaagaaatccagaacagcaccaaaggagttaaaacaagataaaccaaaacctaacttgaacaaatctccggacagaaaatcccagtacaagagaaaacccctaaacacacggctggctttagatgacaagctctaccagagagacttagaagtggcactagctttatcagtgaaggaacttccaaacagtcaccactaatgtgcagacatctcaagataaaagcttgtgaaaaacatggcagtagtaaaatagaaacaatgaataagtctcctcatatctctaatggcagtgtagccagtgatcattagatccggataagattactgtggcaagatgatgtcggggtgtcaagggaacagaaaagcagcatctaaagctgcagacagcagacggacgattcttctgtcaggcagtgatggtgatagtgtaatgaat

SEQ ID NO: 706666 - DNA, 844 bp, Homo sapiens
  misc_feature (16)..(16): n is a, c, g, or t
  misc_feature (166)..(166): n is a, c, g, or t
  misc_feature (178)..(178): n is a, c, g, or t
  misc_feature (218)..(218): n is a, c, g, or t
  misc_feature (223)..(223): n is a, c, g, or t
  misc_feature (228)..(228): n is a, c, g, or t
  misc_feature (232)..(233): n is a, c, g, or t
  misc_feature (236)..(236): n is a, c, g, or t
  misc_feature (242)..(242): n is a, c, g, or t
  misc_feature (256)..(256): n is a, c, g, or t
  misc_feature (259)..(259): n is a, c, g, or t
  misc_feature (262)..(262): n is a, c, g, or t
  misc_feature (269)..(269): n is a, c, g, or t
  misc_feature (272)..(272): n is a, c, g, or t
  misc_feature (282)..(282): n is a, c, g, or t
  misc_feature (284)..(284): n is a, c, g, or t
  misc_feature (292)..(293): n is a, c, g, or t
  misc_feature (302)..(302): n is a, c, g, or t
  misc_feature (313)..(313): n is a, c, g, or t
  misc_feature (323)..(323): n is a, c, g, or t
  misc_feature (397)..(397): n is a, c, g, or t
  misc_feature (404)..(405): n is a, c, g, or t
  misc_feature (407)..(407): n is a, c, g, or t
  misc_feature (410)..(410): n is a, c, g, or t
  misc_feature (413)..(413): n is a, c, g, or t
  misc_feature (419)..(421): n is a, c, g, or t
  misc_feature (423)..(423): n is a, c, g, or t
  misc_feature (425)..(425): n is a, c, g, or t
  misc_feature (427)..(427): n is a, c, g, or t
  misc_feature (440)..(441): n is a, c, g, or t
  misc_feature (446)..(446): n is a, c, g, or t
  misc_feature (450)..(450): n is a, c, g, or t
  misc_feature (454)..(454): n is a, c, g, or t
  misc_feature (456)..(456): n is a, c, g, or t
  misc_feature (489)..(489): n is a, c, g, or t
  misc_feature (492)..(492): n is a, c, g, or t
  misc_feature (506)..(506): n is a, c, g, or t
  misc_feature (510)..(510): n is a, c, g, or t
  misc_feature (512)..(512): n is a, c, g, or t
  misc_feature (548)..(548): n is a, c, g, or t
  misc_feature (731)..(731): n is a, c, g, or t
  misc_feature (822)..(822): n is a, c, g, or t
cgctggcttgtgcgcngtctccgccgcccccctctttcgccgccgccgccgccgccccgggcatgtcgtccaactgcaccagcaccacggcggtggcggtggcgccgctcagcgccagcaagaccaagaccaagaagaagcatttcgtgtgccaaaaagtgaagcnattccgggccancgagccgatcctcagcgtcctgatgtggggggtgaaccanacgancaaanaacnnaanaaagtncctgttcctgtcangcnaangccaaanganttcaaagccnanagcaaaannaaggtgganaaacaactctncaaaaagganaacctgcccagccgctttaagtttaaggagtattgccccatggtgttccgaaaccttcgggagaggtttggaantgaagannangantancaaaannnantnangcgcagcccccannaaaantganaacnanggtcggtgtggcacgcgtttcctcaccacctangancggcgctttgtcancaanantgtgtccagcgaggacgtggcggagatgcacaacancttaaagaaataccaccagtttatagtggagtgtcatggcaacacgcttttgccacagttcctgggcatgtaccgcctgaccgtggatggtgtggaaacctacatggtggttaccaggaacgtgttcagccatcggctcactgtgcatcgcaagtatgacctcaagggttctacggttgccanagaagcgagcgacaaggagaaggccaaggacttgccaacattcaaagacaatgacttcctcaatgaagggcagaagctgcatgtgggagangagagtaaaaaaacttcctgga

SEQ ID NO: 706667 - DNA, 105 bp, Homo sapiens
cattatagtgtcaagatgctgcaacctgtggggcccacgtatcaagcaaatctcctgccccagactcctgagtagctgagactacagacgcgtgccaccatgccc

SEQ ID NO: 706668 - DNA, 476 bp, Homo sapiens
tcgctggggtggtgaatctgtcagacggcaggagtactaggaccaggtaggagatatagtgagatctctagtctctacaaaaaattttacaactgagcaaagtatagtggcttgcccctatggtcccagttgcttggagagagaggtgtagtgatcagatgaataaagagtgggatggcatggagctttgattgtgccagtgcactacagacggtggggactgagatgagacctgtaagtctaaaaaaaaataaataggccgggcccggcgtagtggctcacatttgtaatctcagcacttggggaggccgaagtgggcggatcacctgacgtcaggagttcgagaccaggctgaccaacatggagaaatcccatctctcctaaaaatacaaaattagccaggcgtggtggtgcacgcctgtattcccagctattgaggaggctgaggcaggagaagcacttgaacctgggaggcg

SEQ ID NO: 706669 - DNA, 247 bp, Homo sapiens
  misc_feature (186)..(186): n is a, c, g, or t
gcatggcacctttagcaaatcccctccagtccttcctgagatccttcaccagcatcccagactccacagttatttatgaatgatgtcgtgattctccctccacctgcattttaagagtgaaaggcatctaacctgatgctcttggagagagataacctgtctgtcataacttaaggatgagaaaancatttgttcttttgctgactttggttacagtcagaaaaaataaactagatgtttgtgtcta

SEQ ID NO: 706670 - DNA, 326 bp, Homo sapiens
  misc_feature (13)..(13): n is a, c, g, or t
cgacactcttggnttgagtgcggtggctcatgcctgtaatctcagcactttgcggggccgaggcgggcagatcacccgaggtcaggagtttgagaccagcctggccaacatggagaaactccgtctctgcaaaaaataaaaaaattagccgggcatggtggtgtgtgcctgcagtcccagttacttgggaggctgaggtgggaagttcactagggtccgggagttcaaggctgcagtgaggtatgattgtgccactgcactctagactgggcaatataggaagatgccatctctaaaaaaaaaaatttagccaaccaagagtgtcg

SEQ ID NO: 706671 - DNA, 299 bp, Homo sapiens
ccctatgaggtccctgtgtgctctgagacagcatcaacggccgcctctttgcgctatccacttagcatgactacagtcattaccagagctctcccttttctctcacggtggcagagagtaaaagaattccgcaatcaccctaagcactacattgtaaactacattcagggctctaagcaggactgtccagccctgaggctccccctccatgctcttcaaagcccgggtgggtgtcagggtgtctggcagagtgcgagtggaggctggccggcttgctgggccaccctacccgagggagg

SEQ ID NO: 706672 - DNA, 332 bp, Homo sapiens
cccctgcgggtcacatatataggtaaagctctcaagactcctgagccaactttatatgtaactggctttcctaggctgggggcttgacctaagtaaagaagccaaggagtcagatctagatagcagagaagtacgtctcatactacaacatagcaactacggttagagtccaccccatgaagctgtatcagatggtgtatctaggactgaattctataagtatatatggtccagactaaaacaaatgtggctagctaggtgggctgtgctgtctcagtaggacatggacagactccagcttacaccctcaggaagacttggacctacagtgc

SEQ ID NO: 706673 - DNA, 435 bp, Homo sapiens
acagcgcagctcctacgtgtacttgtgagggctgctgcctcaatatgcagccgcgtgctccaagctgagggctggtgggctgcactgtacgttcagcaacaagagtgctggtgctggatgagaccaccacatccacgggcagtgcagtgcatgcgactggtgctgcggtgtgtggtgtgctgctgtgtgactgtgcgagggatacaccttcacgctcactggtgctggtgcctgctctggcgaggagtgagggttgtgcccccatccgcctgtaccccaaccgaccgccgtatgggtgtgcctcttgcctgcctcttcccactgggctgcttgttgcaacttgccctcaccaccaaggtgcacttcgacttgacgtggtgagttgcaggccttgcttgggtgttatgcagcgggatcccccgactctgtgactgt

SEQ ID NO: 706674 - DNA, 839 bp, Homo sapiens
  misc_feature (17)..(17): n is a, c, g, or t
  misc_feature (61)..(61): n is a, c, g, or t
  misc_feature (96)..(99): n is a, c, g, or t
  misc_feature (126)..(126): n is a, c, g, or t
  misc_feature (128)..(128): n is a, c, g, or t
  misc_feature (144)..(144): n is a, c, g, or t
  misc_feature (148)..(148): n is a, c, g, or t
  misc_feature (152)..(152): n is a, c, g, or t
  misc_feature (164)..(164): n is a, c, g, or t
  misc_feature (167)..(167): n is a, c, g, or t
  misc_feature (188)..(188): n is a, c, g, or t
  misc_feature (191)..(191): n is a, c, g, or t
  misc_feature (226)..(226): n is a, c, g, or t
  misc_feature (233)..(233): n is a, c, g, or t
  misc_feature (237)..(237): n is a, c, g, or t
  misc_feature (239)..(239): n is a, c, g, or t
  misc_feature (264)..(264): n is a, c, g, or t
  misc_feature (271)..(271): n is a, c, g, or t
  misc_feature (288)..(288): n is a, c, g, or t
  misc_feature (293)..(294): n is a, c, g, or t
  misc_feature (296)..(296): n is a, c, g, or t
  misc_feature (302)..(302): n is a, c, g, or t
  misc_feature (304)..(304): n is a, c, g, or t
  misc_feature (331)..(331): n is a, c, g, or t
  misc_feature (375)..(375): n is a, c, g, or t
  misc_feature (385)..(385): n is a, c, g, or t
  misc_feature (400)..(400): n is a, c, g, or t
  misc_feature (402)..(402): n is a, c, g, or t
  misc_feature (496)..(496): n is a, c, g, or t
  misc_feature (572)..(572): n is a, c, g, or t
  misc_feature (574)..(574): n is a, c, g, or t
  misc_feature (577)..(577): n is a, c, g, or t
  misc_feature (623)..(623): n is a, c, g, or t
  misc_feature (705)..(705): n is a, c, g, or t
  misc_feature (750)..(750): n is a, c, g, or t
  misc_feature (760)..(760): n is a, c, g, or t
  misc_feature (775)..(775): n is a, c, g, or t
  misc_feature (778)..(778): n is a, c, g, or t
  misc_feature (830)..(830): n is a, c, g, or t
cccttaccttatatttnatcctttaagagtacattttatacaaatccgtaaccaggcttcnctcatgtttcccctgacatgcccgtcactctaacnnnntctctttcttttatgtagtagcaaaangngtcaataatcctttcngganaggnactatttcggtnccncccaactggggttcaccatanacncgatccacaaatgggattggggcctcgccaatggngtagttnggcngngttgcccgggcggtcatctccgtcnggggggngtagcctttggggacanatttnncngttaantnctctagaacttcttttcggtataatcngaaacttcctgttaaatcagatgctcctggtctcagcaagatcngggttaaaanattggccccacggcngnttatttttcttttcaaatcccagccatatacacctccatttcctttgtagcgagttccagagtcaatatcaaaattaccctccttttgcgtccnaataaattcaggaataaattttggagggtgtgagagatcagcatccataataatgatgtagtttcctgtggttttnanaantccatgaatatatgcagttcctagtcccaactttttctctcgtggncttagaagaattctgtctgacccatagatcttctccaactgttcagcaacatcccttgttccatctgggcttccatcatctntgattataatttcatagttgattccactctcggagaagcttttcnccagcagccncacggatgtgcggcnggntctcgcgctcgttgtaggtaggtaaagcaccgaatatttgttctgtcggggnctgcgcact

SEQ ID NO: 706675 - DNA, 778 bp, Homo sapiens
gggtgaatacacttccttcctgcggggcacagaagaatataaaaaatttcatttttaaggccgccccccccttcttggtctccgaagcacccccaacttctttttgtgcccaaacaacctcattaaaagacggggaagaattgtgggtgtgtgccctcaccaaaaattggagtggggggaacacacactactcgtcgggtgacaagaaccccgctctcttctattataaatgtaagttgtgttttatcttccatatgggagacacgcgcgtagccacccacacgcgtatatgttgctttgtgtaaaaatgatgtgcaggggagaactctgtttacaaacacatcatcgcgcgtcgtgtgcgcatatatatgtgcgcacacgttgccccccgcccacacatacgtgggcatgtcttaagagtggtgctgcgcgcatggtagtattgcccgcacgaacagcatcgcgtgcgagtgtatacatatagccccccgccgtgaatttccccgttcttgcacacactcagtattttatttatgtgtgcgccattccgacgggggtgtctcttgtggtacccacacatgtaaccgattttcttgcgtctacatgtgtactctcgcgcctattcatagaatcttctgttcaccccgctctaaaacactgctttcatagccgccaacttggctcctcccgagaccccgtccaccacgtggcaaaatctatgcttcttctcctacataacaacaacaggaccccaatctgacccacaattgacaaaaaa

SEQ ID NO: 706676 - DNA, 369 bp, Homo sapiens
ctcatctcctgacctcgttgggatacgttatggtgacagaagagaagaatggtgtcgatggggaagccagagccggttgcgggactccgggactgacgaccaggaggaggagccgctggagcgggacttcgaccgcttcattggagccactgccaacttcagccgcttcacccatctggggtctggagaccatcccttgcccggatgccacagtgcgatggggcttaacttaggccaagccttgcggcaagaaatacacgcaaagttccccaagaactgagaaccagagctagaaattcaaagctgaaatccctatcaagcagataaccagctctaagaaaccgattccatcaaccccaattaaggagc

SEQ ID NO: 706677 - DNA, 495 bp, Homo sapiens
tattttaacacgagtgttccccatttgggtccttgaccccttatttgggccttaggagttgcaaaggggcccttgtatccccttggttgtaaggcccctggacaaacaaaggtggccaaaattgggaggcatggccctggggtcccagcaatttggtggggaatctcgtttttttttttaaaacttttggggaagggtttgactcccgaacatccccgacgggtttcctttttttttggggggccttgggacacctgccctgccccccagagggttaggattgggattttttttagggccaggcaggtgcttggacttttcccctgttggatggggactggggatgtgggaggggacccccagggggatttattttaggcctgtgttaaaaggaaggtcccctgtccccctccccctttttccccccccctccccagggtcccctcccctgtcccattgtaattgaatttcaggataataaagggtttgcctcca

SEQ ID NO: 706678 - DNA, 103 bp, Homo sapiens
tctagaggatcaccggtatctcttttccggacatgcttcgagtactaattttaccgcccggacagctggtgctttcgggggagctggtttgctgccgcctgcg

SEQ ID NO: 706679 - DNA, 803 bp, Homo sapiens
  misc_feature (401)..(401): n is a, c, g, or t
gttagctagtacgaggcgggtgtagtgtacgccggactcgattcctgtaggcaacagtgcccttaaggtcggcgacagcctcttctgggttcactgcagtccaaccggttccctaccctctgccattatgaacatccgcaacgctcagccagacgagctgatgaatatgcaacactgcaacctcctttgccttcctgagaactaccagatgaaatactatttatatcatggcctttcctggccccagctttcttacatcgctgaggatgaggacgggaagattgtgggctatgttctggccaaaatggaggagtggacaaccccccaaaggaatgatgtcccgcatggccatatcacctcactggccgtgaagcgttcacaccggcgcctcggccctgggncgccccccccccccaaaaaaagggggcaaaaaagccctgaactgggaccaggtcctccagggccatgatagagaactttaacgccaaatacgtgtctctggcccaaaacccggggggtttttccaaagggacagagtaagccggccagccttgcacctttattctaacaccctcaactttcagattagtgaggtggaacctaaatactatgcagatggggaagatgctttttaaacttttggccttatgcaaacgggccgggggcaattcctcctccgcagaatggcagatgagctgagacgacaaatggacctgaagaagggcgggtaatggtttgggggggtttcaccctttttggggggcgggcctttccccaaagggggggcaagaaccaggagacca

SEQ ID NO: 706680 - DNA, 502 bp, Homo sapiens
  misc_feature (68)..(69): n is a, c, g, or t
  misc_feature (72)..(72): n is a, c, g, or t
agttgcgttgttttttgtttattagtgaaaaaaaaacacccccccccccccccccccccaaaccccgnnatnaaaataataaattatatttttttttttgggggaggggcggggcgccctccccccctcctttttctttttttcttataaaaaaaaaaaaaaaaaaggggtgttatttcctcctccttctattaaaaaaaaccaccccccctctctcttccccagaaaagaggtgtggggggggaaccggcccccccccccccccgcggcgggggaaaaaaaatcttgggggggggaaaggagggggggccccaccccccccccccccaaaaagaggggggtctcaaaaaaaattttttttttttttttctgtaaaaaaaacttctcttttttccccctttgaaaaatttaggggggggttttttaaaaaggggaggggcttaaaaacccccccaaatttggccccccggggaacaatagcctttattttcccaagtaagtt

SEQ ID NO: 706681 - DNA, 85 bp, Homo sapiens
aagacagcagcatatatctctgcagcgtctgtagcgggagttcttacgagcagtacttcgggccgggcaccaggctcacggtcac

SEQ ID NO: 706682 - DNA, 609 bp, Homo sapiens
gaaaaaaagaaccagtttggatacataggtatggtctgagtctatgatatcaattggtgttcctagggttatatcgtagtgagcatcacccatatatttacagtagtgaatagacgtagactacacgagcagtatttgcacctccgactacctataatgcatcgctatcccgcaccggcgtcaaaggtattctagcatgactcagctcacgactccacggaagcaatatgaaatgatctgctgcagtgctctgagcacctaggattcatctttcttgtcactcggatgtggcctgactggcattgtattagcaaacgtcatcactagacatcgtactgacatcgacgacagtactatcagtcgtagctcacgttccatgtatgtcctatccatgtaggagctgtatttgccatcataaggagggcttcattcactgattgtccccgtattactcagtgctacaacccatagtagcactataaccgtactgcgcaaatagtccgatttgcacttattcgataatttcatctggcggttaatctaacgtttgcgttcccgacagacagcgtttgctcgggacttatccggaatgccccagacgtatacgtg

SEQ ID NO: 706683 - DNA, 430 bp, Homo sapiens
cgttatcctatagatacgtatgacaaaaaaataaaaacaaacagatggtgaaatggacttaaaagcacaattcttggtatctgggaacgtttcactgggcaacactaactgtatgatacagacgttaccgggaacagtagtttatgtttctcttcctatccccaaagaagcacaataaaaaaaatagacgcaaaagggaggagggtgtagtttaccaggttatttcagtgcagcctgtgggaatgaatacccgggccacagtgagcagtgcccttggctgtataccccaggctcctgtatgtggtgcgatggtaatatccaagagggtttgacaaaagagagtaacctactaaaggtatccaaaaaagggcctgaggaaatcgggttaaaatgtataaccttgtatggctactgatctataggagtggtg

SEQ ID NO: 706684 - DNA, 436 bp, Homo sapiens
  misc_feature (380)..(380): n is a, c, g, or t
ggctcttcaggctgagctcttaggttccactccacggtggcacgcgtggttaacctgggcatgcacagggtacatgaccttcaacctgcaggtcgatggcaattggaaaacaactgacaacttcattacataaaagttgaactgattcgggtgcggtgactcacgcctgtaatcccagcactttgggaggccaaggcaggtggatcacctgaggtcgaggagttcaagaccagcctggccaaaatggtgaaaccccgtctctactaaaaatataaatattagccaggcgtggtggcgcacccttgtaatcccagctaccccagaggctgaggcagcagaatgcttgaacctaggacgtggaggttgcagtgagctgagantcggccattgcactccagcctgggtgacaagagtgaaactccatcaaaaaaaaaaa

SEQ ID NO: 706685 - DNA, 378 bp, Homo sapiens
  misc_feature (3)..(3): n is a, c, g, or t
  misc_feature (61)..(61): n is a, c, g, or t
  misc_feature (310)..(310): n is a, c, g, or t
  misc_feature (313)..(313): n is a, c, g, or t
  misc_feature (372)..(372): n is a, c, g, or t
aanaaataaacaggcactcacctttcaaaaagatactcaagtgtattaatttttaaacttntctgtaggtttaaaatcttatttatttatttttttgagatggagtcttgctctgttgcccaggctggagtgcaatggcatgatctcagctcactgcaacccctgcctcccaggttcaagccattctcctgtctctaccttctaagtagctaagattacaggtgcctgccaccatgcctggctaatttttgtatttttattttattttacttttttgagatggagtctcgctctgttggccaggctgggntgnagtggcaccgatctcggctcactgcacgctccacctcctgggttcacgccattctcctnctcagc

SEQ ID NO: 706686 - DNA, 5495 bp, Homo sapiens
  misc_feature (308)..(308): n is a, c, g, or t
  misc_feature (323)..(323): n is a, c, g, or t
  misc_feature (329)..(330): n is a, c, g, or t
gagaagaaacgtcaagtggtcaagccctgcaggaggcattgatgcgatcttccttactaccacactacagaacatcagtgaggatgttttagcagtaatggataataaaaatccaaccatcaagcagcagacatctctttttattgcaagaagtttccgccactgcactgcttctaccctgccaaagagcttgctaaagcccttttgtgctgcactacttaagcacatcaatgattctgctcctgaagtcagagatgccgcatttgaagcattgggtactgctttgaaggtggttggcgagaaagcantaaaccattcctagntgatgnngacacactcaagcttgataagatcaaagaatgttcagaaaaggtagaactgatacatggtaagaaagctggactagctgctgataagaaggaattcaaacctctgcctggaaggactgctgcttcaggggctgcaggagataaggacacaaaggacatttctgcacccaaaccaggacctctaaaaaaggcacctgctgctaaggctggtgggccaccaaaaaaggggaaaccagctgcaccaggaggcgcagggaatactggaaccaagaacaagaaaggactggagactaaagaaatagtggagcctgagctctcgatagaagtatgtgaagaaaaagcttcagctgttcttccccctacctgtatacagcttcttgacagcagtaactggaaagaaaggctggcttgtatggaagagttccagaaggctgttgagctaatggaccgaactgaaatgccatgccaggcattagtgaggatgctagccaagaaacctggatggaaagaaactaattttcaggtgatgcaaatgaagcttcatatagttgctttgattgcccagaagggaaatttttccaaaacgtcagctcaggttgtattagatggccttgtggacaagattggagatgtgaaatgtgggaacaatgcaaaagaagctatgacagcaatagccgaagcctgtatgttaccatggactgctgaacaggttgtgtcaatggctttctcacaaaagaatcccaaaaatcagtcagaaactctgaattggctatcaaatgccataaaagaatttggtttttctgggttgaatgtcaaagctttcattagcaatgtgaagacagctcttgctgcaacaaacccagctgtgaggactgctgccataaccctgcttggcgtgatgtatctgtatgttggtccctctttgcgaatgttctttgaggatgagaagcctgccctcctatcccagatagatgcagaatttgagaagatgcagggacaaagtccacctgctccaaccagaggaatttccaagcatagcacaagtggtacagatgaaggagaagatggagatgaaccagatgacgggagcaatgatgtcgttgatcttttgccgaggacggagatcagtgataaaatcacttcagagttggtatctaagattggtgataagaattggaagattaggaaagaaggcctagatgaagtggcaggtattattaatgacgcaaaatttatccaaccgaatataggtgaacttccaactgccttgaagggtcgactcaatgattcaaataaaatcttggtacagcaaacgctgaatatcctgcaacaactggcagtagccatgggcccaaatattaagcaacatgtaaaaaatttaggcatccctatcatcacagtccttggagacagcaagaacaatgttcgagctgctgccctagcgactgtgaatgcttgggcagaacagactggcatgaaggaatggctggaaggagaagatctttctgaagagctcaaaaaggaaaatcctttcttgaggcaagagcttctgggctggctggctgagaaactacctactcttcgttccacccctacagaccttatcctttgtgttcctcatctctactcctgcctagaagatcgaaatggagatgtgcgaaagaaggcccaagatgccttgccattcttcatgatgcatttaggatatgaaaaaatggccaaggctactgggaaactaaagccaacttctaaagatcaggtattggccatgctagagaaagccaaagttaacatgccagccaagcctgctccacccactaaagcaacttctaaaccaatgggagggtccgctccagccaaattccagcctgcatcagcacctgctgaagattgtatttccagcagtacagaacccaaacctgatccaaaaaaggccaaagctccaggattatcctctaaagcaaagagtgcacaagggaagaagatgccaagcaaaaccagcttaaaggaggatgaagacaaatccgggcctatttttattgttgttccaaatggaaaagagcaaaggatgaaagatgaaaaaggattgaaggtgctaaagtggaattttactaccccacgggatgaatacattgagcaactaaagactcaaatgtctagctgtgtggctaaatggttacaagatgagatgtttcactcagactttcagcatcataacaaagcccttgctgttatggttgatcacttggagagtgaaaaagaaggagttattggttgcctggatcttatcttaaagtggcttaccctgaggttttttggacaccaatacaagcgtcctgatgaaagcactagaatatttaaaattgctcttcaccttgctaagtgaagaagaatatcatcttactgagaatgaagcatcttccttcatcccctatcttgtcgtcaaggttggagaaccaaaggatgtcattcgtaaagatgttcgtgccatcctgaaccggatgtgccttgtctacccagctagcaagatgtttccctttatcatggaaggaaccaaatccaaaaactctaagcagagagcagagtgcctggaagagctgggatgtctggttgagtcctatggcatgaatgtttgccaaccaaccccaggaaaagccttaaaggaaatagctgttcacataggagaccgtgacaatgctgtacgcaatgctgcactcaacaccattgtaacggtgtacaatgtacatggggatcaggtgttcaaactgattggaaatctttctgaaaaggatatgagcatgctcgaggagaggattaagcggtcagcaaagagaccctctgctgcaccaataaaacaggtggaagagaaacctcagcgtgcacagaacataagctccaatgccaacatgttacgcaagggaccagctgaggacatgtcttccaaactcaaccaagcccgaagcatgagtgggcatcctgaggcagcccagatggtccgccgagaattccagctggatctagatgagattgagaatgacaatggtacagtccgatgtgaaatgccagaacttgttcagcacaaactggatgacatttttgagccagtccttattcctgaacccaagatccgggctgtttctccacacttcgatgacatgcacagtaatacagcatccacaatcaatttcattatctcccaagtagccagtggtgacatcaacacaagtatccaagctctgacacagatcgatgaggtcctgagacaggaagacaaagctgaagccatgtccggccatattgatcagtttctgatagccacttttatgcagctaagactcatctacaacacacacatggcagatgagaaattggagaaggacgagatcatcaagttgtatagctgtatcattggcaacatgatttcgctgtttcagatagagagccttgcccgggaggcctccactggagtactaaaagacctaatgcatggcctcatcaccttaatgctggattctcggattgaagatcttgaggaaggacaacaggtcatccgctctgtgaacctcttggtggtgaaggttctggagaagtcagaccagaccaacatcctgagtgccctacttgttttgctccaagacagcctgctagcaacagccagttctcccaaattctcagagcttgttatgaagtgtctctggagaatggttcgactgttgcctgataccatcaatagcattaacctagacagaattcttctggatatccacattttcatgaaggtcttccccaaagagaaactgaagcaatgcaaaagtgaatttcccataaggaccctaaagaccctgctacacaccttatgcaaattaaaagggcccaagatcctggaccacctaacgatgatcgacaacaaaaacgagtctgagctggaggcccatctctgccggatgatgaagcacagtatggaccagactgggagcaagtctgataaggaaacagaaaagggagcatctcgaatagatgaaaaatcatcaaaggccaaagtgaatgatttcttagctgagatttttaagaagattggctctaaagaaaacactaaagagggactagcagagttatatgaatataagaagaaatactcagatgctgacattgaaccatttctgaaaaattcctcacagttcttccagagctatgtcgaaagaggccttcgggtgattgagatggagagggagggcaaaggtcgtatttccacttcaacaggcatctcccctcagatggaagtcacatgtgtgcccacgcccacaagcacagtgtcctccataggtaacacaaatggggaagaagtggggccatctgtctacttggaaaggctaaagatcctccgacagcgatgtggtctggacaacacaaagcaagatgaccgacctcctttgacctctttgctctccaaaccagcagttcctactgtcgcctcttccacagacatgctccacagcaaactctctcagctccgggagtcacgggagcagcaccagcattcagacctggattctaaccagactcactcttcaggaactgtgacctcctcctcctccacagctaacatagacgacttgaaaaaaagactggagagaataaagagcagtcgcaaatgaagctgccccactcccccggcaccctgcagctttagtttactaaactagaagtcctcatagtttaaaatggcctcagcaggcctagtgtatacaaactggttgtatgtatcatgccgtggagctagggggaggagtcattgtggcacaagtatttgtacatactctgcttctctctgtcagcgtcctgctgctctagaagactgtccgtggatgagtttagtgtacagacttgtaaacagctgccccctctctgctcagtctagttcccagatccttttctttttaattgctcatttgtaaaattgtcctaatctttcctagctttttaatagttaatattagaaactctttactattaaaaagctaggaaagattagaaactctttaatagttttcctttcagtttgtgagctcttctctgtcgccctgaagggtcactgtattctgtatgaatgcatggcatgatacaactaatttaagagtcttttataaataaagtttgcattaacta

SEQ ID NO: 706687 - DNA, 5901 bp, Homo sapiens
  misc_feature (308)..(308): n is a, c, g, or t
  misc_feature (323)..(323): n is a, c, g, or t
  misc_feature (329)..(330): n is a, c, g, or t
  misc_feature (5716)..(5716): n is a, c, g, or t
  misc_feature (5770)..(5770): n is a, c, g, or t
  misc_feature (5811)..(5811): n is a, c, g, or t
  misc_feature (5825)..(5825): n is a, c, g, or t
  misc_feature (5843)..(5843): n is a, c, g, or t
gagaagaaacgtcaagtggtcaagccctgcaggaggcattgatgcgatcttccttactaccacactacagaacatcagtgaggatgttttagcagtaatggataataaaaatccaaccatcaagcagcagacatctctttttattgcaagaagtttccgccactgcactgcttctaccctgccaaagagcttgctaaagcccttttgtgctgcactacttaagcacatcaatgattctgctcctgaagtcagagatgccgcatttgaagcattgggtactgctttgaaggtggttggcgagaaagcantaaaccattcctagntgatgnngacacactcaagcttgataagatcaaagaatgttcagaaaaggtagaactgatacatggtaagaaagctggactagctgctgataagaaggaattcaaacctctgcctggaaggactgctgcttcaggggctgcaggagataaggacacaaaggacatttctgcacccaaaccaggacctctaaaaaaggcacctgctgctaaggctggtgggccaccaaaaaaggggaaaccagctgcaccaggaggcgcagggaatactggaaccaagaacaagaaaggactggagactaaagaaatagtggagcctgagctctcgatagaagtatgtgaagaaaaagcttcagctgttcttccccctacctgtatacagcttcttgacagcagtaactggaaagaaaggctggcttgtatggaagagttccagaaggctgttgagctaatggaccgaactgaaatgccatgccaggcattagtgaggatgctagccaagaaacctggatggaaagaaactaattttcaggtgatgcaaatgaagcttcatatagttgctttgattgcccagaagggaaatttttccaaaacgtcagctcaggttgtattagatggccttgtggacaagattggagatgtgaaatgtgggaacaatgcaaaagaagctatgacagcaatagccgaagcctgtatgttaccatggactgctgaacaggttgtgtcaatggctttctcacaaaagaatcccaaaaatcagtcagaaactctgaattggctatcaaatgccataaaagaatttggtttttctgggttgaatgtcaaagctttcattagcaatgtgaagacagctcttgctgcaacaaacccagctgtgaggactgctgccataaccctgcttggcgtgatgtatctgtatgttggtccctctttgcgaatgttctttgaggatgagaagcctgccctcctatcccagatagatgcagaatttgagaagatgcagggacaaagtccacctgctccaaccagaggaatttccaagcatagcacaagtggtacagatgaaggagaagatggagatgaaccagatgacgggagcaatgatgtcgttgatcttttgccgaggacggagatcagtgataaaatcacttcagagttggtatctaagattggtgataagaattggaagattaggaaagaaggcctagatgaagtggcaggtattattaatgacgcaaaatttatccaaccgaatataggtgaacttccaactgccttgaagggtcgactcaatgattcaaataaaatcttggtacagcaaacgctgaatatcctgcaacaactggcagtagccatgggcccaaatattaagcaacatgtaaaaaatttaggcatccctatcatcacagtccttggagacagcaagaacaatgttcgagctgctgccctagcgactgtgaatgcttgggcagaacagactggcatgaaggaatggctggaaggagaagatctttctgaagagctcaaaaaggaaaatcctttcttgaggcaagagcttctgggctggctggctgagaaactacctactcttcgttccacccctacagaccttatcctttgtgttcctcatctctactcctgcctagaagatcgaaatggagatgtgcgaaagaaggcccaagatgccttgccattcttcatgatgcatttaggatatgaaaaaatggccaaggctactgggaaactaaagccaacttctaaagatcaggtattggccatgctagagaaagccaaagttaacatgccagccaagcctgctccacccactaaagcaacttctaaaccaatgggagggtccgctccagccaaattccagcctgcatcagcacctgctgaagattgtatttccagcagtacagaacccaaacctgatccaaaaaaggccaaagctccaggattatcctctaaagcaaagagtgcacaagggaagaagatgccaagcaaaaccagcttaaaggaggatgaagacaaatccgggcctatttttattgttgttccaaatggaaaagagcaaaggatgaaagatgaaaaaggattgaaggtgctaaagtggaattttactaccccacgggatgaatacattgagcaactaaagactcaaatgtctagctgtgtggctaaatggttacaagatgagatgtttcactcagactttcagcatcataacaaagcccttgctgttatggttgatcacttggagagtgaaaaagaaggagttattggttgcctggatcttatcttaaagtggcttaccctgaggttttttggacaccaatacaagcgtcctgatgaaagcactagaatatttaaaattgctcttcaccttgctaagtgaagaagaatatcatcttactgagaatgaagcatcttccttcatcccctatcttgtcgtcaaggttggagaaccaaaggatgtcattcgtaaagatgttcgtgccatcctgaaccggatgtgccttgtctacccagctagcaagatgtttccctttatcatggaaggaaccaaatccaaaaactctaagcagagagcagagtgcctggaagagctgggatgtctggttgagtcctatggcatgaatgtttgccaaccaaccccaggaaaagccttaaaggaaatagctgttcacataggagaccgtgacaatgctgtacgcaatgctgcactcaacaccattgtaacggtgtacaatgtacatggggatcaggtgttcaaactgattggaaatctttctgaaaaggatatgagcatgctcgaggagaggattaagcggtcagcaaagagaccctctgctgcaccaataaaacaggtggaagagaaacctcagcgtgcacagaacataagctccaatgccaacatgttacgcaagggaccagctgaggacatgtcttccaaactcaaccaagcccgaagcatgagtgggcatcctgaggcagcccagatggtccgccgagaattccagctggatctagatgagattgagaatgacaatggtacagtccgatgtgaaatgccagaacttgttcagcacaaactggatgacatttttgagccagtccttattcctgaacccaagatccgggctgtttctccacacttcgatgacatgcacagtaatacagcatccacaatcaatttcattatctcccaagtagccagtggtgacatcaacacaagtatccaagctctgacacagatcgatgaggtcctgagacaggaagacaaagctgaagccatgtccggccatattgatcagtttctgatagccacttttatgcagctaagactcatctacaacacacacatggcagatgagaaattggagaaggacgagatcatcaagttgtatagctgtatcattggcaacatgatttcgctgtttcagatagagagccttgcccgggaggcctccactggagtactaaaagacctaatgcatggcctcatcaccttaatgctggattctcggattgaagatcttgaggaaggacaacaggtcatccgctctgtgaacctcttggtggtgaaggttctggagaagtcagaccagaccaacatcctgagtgccctacttgttttgctccaagacagcctgctagcaacagccagttctcccaaattctcagagcttgttatgaagtgtctctggagaatggttcgactgttgcctgataccatcaatagcattaacctagacagaattcttctggatatccacattttcatgaaggtcttccccaaagagaaactgaagcaatgcaaaagtgaatttcccataaggaccctaaagaccctgctacacaccttatgcaaattaaaagggcccaagatcctggaccacctaacgatgatcgacaacaaaaacgagtctgagctggaggcccatctctgccggatgatgaagcacagtatggaccagactgggagcaagtctgataaggaaacagaaaagggagcatctcgaatagatgaaaaatcatcaaaggccaaagtgaatgatttcttagctgagatttttaagaagattggctctaaagaaaacactaaagagggactagcagagttatatgaatataagaagaaatactcagatgctgacattgaaccatttctgaaaaattcctcacagttcttccagagctatgtcgaaagaggccttcgggtgattgagatggagagggagggcaaaggtcgtatttccacttcaacaggcatctcccctcagatggaagtcacatgtgtgcccacgcccacaagcacagtgtcctccataggtaacacaaatggggaagaagtggggccatctgtctacttggaaaggctaaagatcctccgacagcgatgtggtctggacaacacaaagcaagatgaccgacctcctttgacctctttgctctccaaaccagcagttcctactgtcgcctcttccacagacatgctccacagcaaactctctcagctccgggagtcacgggagcagcaccagcattcagacctggattctaaccagactcactcttcaggaactgtgacctcctcctcctccacagctaacatagacgacttgaaaaaaagactggagagaataaagagcagtcgcaaatgaagctgccccactcccccggcaccctgcagctttagtttactaaactagaagtcctcatagtttaaaatggcctcagcaggcctagtgtatacaaactggttgtatgtatcatgccgtggagctagggggaggagtcattgtggcacaagtatttgtacatactctgcttctctctgtcagcgtcctgctgctctagaagactgtccgtggatgagtttagtgtacagacttgtaaacagctgccccctctctgctcagtctagttcccagatccttttctttttaattgctcatttgtatagttttcctttcagtttgtgagctcttctctgtcgccctgaagggtcactgtattctgtatgaatgcatggcatgatacaactaatttaagagtcttttataaataaagtttgcattaactatacctgactcccaagatgctccatatcatggagtgttgggcagcaattttttaacttttggtaccagctgggtattcagccagttagagaaaggttaattactgcttacagagcttccctttttcttggctcacagacttggagctgtcttttattcctttggaatggaaggaactctccttccctgctctccacaaacagctcctagggagcagaaaaatctcatccttccttgttttgagattttggtcatgatttccctccaattatcaccagtcgtttcaagaagctcttgagcatcctaccactntgctgaccaaaagcacacaagattgcgcccagagattggctgggcttcagaggntctcacactacaactaagattgtgttcatttgacctaaggnagttgggaaatctntaagggttgctgcttggnttgataaagccccttttgtccccagcttacaattgctttacattcaatccgagtaggg

SEQ ID NO: 706688 - DNA, 933 bp, Homo sapiens
caacagggatgatcgatatgatagagggagggccctggtcgcatgtccactatcaactaggcatgtcccacatcagatggaagtcacatgtgtgcccacgcccacaagcacagtgtcctccataggtaacacaaatggggaagaagtggggccatctgtctacttggaaaggctaaagatcctccgacagcgatgtggtctggacaacacaaagcaagatgaccgacctcctttgacctctttgctctccaaaccagcagttcctactgtcgcctcttccacagacatgctccacagcaaactctctcagctccgggagtcacgggagcagcaccagcattcagacctggattctaaccagactcactcttcaggaactgtgacctcctcctcctccacagctaacatagacgacttgaaaaaaagactggagagaataaagagcagtcgcaaatgaagctgccccactcccccggcaccctgcagctttagtttactaaactagaagtcctcatagtttaaaatggcctcagcaggcctagtgtatacaaactggttgtatgtatcatgccgtggagctagggggaggagtcattgtggcacaagtatttgtacatactctgcttctctctgtcagcgtcctgctgctctagaagactgtccgtggatgagtttagtgtacagacttgtaaacagctgccccctctctgctcagtctagttcccagatccttttctttttaattgctcatttgtaaaattgtcctaatctttcctagctttttaatagttaatattagaaactctttaatagttttcctttcagtttgtgagctcttctctgtcgccctgaagggtcactgtattctgtatgaatgcatggcatgatacaactaatttaagagtcttttataaataaagtttgcattaacta

SEQ ID NO: 706689 - DNA, 297 bp, Homo sapiens
  misc_feature (12)..(12): n is a, c, g, or t
  misc_feature (38)..(38): n is a, c, g, or t
  misc_feature (54)..(54): n is a, c, g, or t
  misc_feature (64)..(64): n is a, c, g, or t
  misc_feature (153)..(153): n is a, c, g, or t
  misc_feature (203)..(203): n is a, c, g, or t
  misc_feature (248)..(248): n is a, c, g, or t
  misc_feature (261)..(261): n is a, c, g, or t
ccttttgcggtntcctagccacactgaaccctgagatncttattcccgaattcncacagggccncaatgtgcagggttcagccctggggccatatcccttttcacctgggttggtgagcatgtatttggagtggtttcttcctgcatgtattngccaaggaaggacaagggactagagggtctgagttaggtccagacttgtnccctttccccagcccatcacaggatgctgggtgcacacccactcntactgacgatgtnccaccaacatccaggaggcgttctcccaaggacttt

SEQ ID NO: 706690 - DNA, 5036 bp, Homo sapiens
  misc_feature (308)..(308): n is a, c, g, or t
  misc_feature (323)..(323): n is a, c, g, or t
  misc_feature (329)..(330): n is a, c, g, or t
gagaagaaacgtcaagtggtcaagccctgcaggaggcattgatgcgatcttccttactaccacactacagaacatcagtgaggatgttttagcagtaatggataataaaaatccaaccatcaagcagcagacatctctttttattgcaagaagtttccgccactgcactgcttctaccctgccaaagagcttgctaaagcccttttgtgctgcactacttaagcacatcaatgattctgctcctgaagtcagagatgccgcatttgaagcattgggtactgctttgaaggtggttggcgagaaagcantaaaccattcctagntgatgnngacacactcaagcttgataagatcaaagaatgttcagaaaaggtagaactgatacatggtaagaaagctggactagctgctgataagaaggaattcaaacctctgcctggaaggactgctgcttcaggggctgcaggagataaggacacaaaggacatttctgcacccaaaccaggacctctaaaaaaggcacctgctgctaaggctggtgggccaccaaaaaaggggaaaccagctgcaccaggaggcgcagggaatactggaaccaagaacaagaaaggactggagactaaagaaatagtggagcctgagctctcgatagaagtatgtgaagaaaaagcttcagctgttcttccccctacctgtatacagcttcttgacagcagtaactggaaagaaaggctggcttgtatggaagagttccagaaggctgttgagctaatggaccgaactgaaatgccatgccaggcattagtgaggatgctagccaagaaacctggatggaaagaaactaattttcaggtgatgcaaatgaagcttcatatagttgctttgattgcccagaagggaaatttttccaaaacgtcagctcaggttgtattagatggccttgtggacaagattggagatgtgaaatgtgggaacaatgcaaaagaagctatgacagcaatagccgaagcctgtatgttaccatggactgctgaacaggttgtgtcaatggctttctcacaaaagaatcccaaaaatcagtcagaaactctgaattggctatcaaatgccataaaagaatttggtttttctgggttgaatgtcaaagctttcattagcaatgtgaagacagctcttgctgcaacaaacccagctgtgaggactgctgccataaccctgcttggcgtgatgtatctgtatgttggtccctctttgcgaatgttctttgaggatgagaagcctgccctcctatcccagatagatgcagaatttgagaagatgcagggacaaagtccacctgctccaaccagaggaatttccaagcatagcacaagtggtacagatgaaggagaagatggagatgaaccagatgacgggagcaatgatgtcgttgatcttttgccgaggacggagatcagtgataaaatcacttcagagttggtatctaagattggtgataagaattggaagattaggaaagaaggcctagatgaagtggcaggtattattaatgacgcaaaatttatccaaccgaatataggtgaacttccaactgccttgaagggtcgactcaatgattcaaataaaatcttggtacagcaaacgctgaatatcctgcaacaactggcagtagccatgggcccaaatattaagcaacatgtaaaaaatttaggcatccctatcatcacagtccttggagacagcaagaacaatgttcgagctgctgccctagcgactgtgaatgcttgggcagaacagactggcatgaaggaatggctggaaggagaagatctttctgaagagctcaaaaaggaaaatcctttcttgaggcaagagcttctgggctggctggctgagaaactacctactcttcgttccacccctacagaccttatcctttgtgttcctcatctctactcctgcctagaagatcgaaatggagatgtgcgaaagaaggcccaagatgccttgccattcttcatgatgcatttaggatatgaaaaaatggccaaggctactgggaaactaaagccaacttctaaagatcaggtattggccatgctagagaaagccaaagttaacatgccagccaagcctgctccacccactaaagcaacttctaaaccaatgggagggtccgctccagccaaattccagcctgcatcagcacctgctgaagattgtatttccagcagtacagaacccaaacctgatccaaaaaaggccaaagctccaggattatcctctaaagcaaagagtgcacaagggaagaagatgccaagcaaaaccagcttaaaggaggatgaagacaaatccgggcctatttttattgttgttccaaatggaaaagagcaaaggatgaaagatgaaaaaggattgaaggtgctaaagtggaattttactaccccacgggatgaatacattgagcaactaaagactcaaatgtctagctgtgtggctaaatggttacaagatgagatgtttcactcagactttcagcatcataacaaagcccttgctgttatggttgatcacttggagagtgaaaaagaaggagttattggttgcctggatcttatcttaaagtggcttaccctgaggttttttggacaccaatacaagcgtcctgatgaaagcactagaatatttaaaattgctcttcaccttgctaagtgaagaagaatatcatcttactgagaatgaagcatcttccttcatcccctatcttgtcgtcaaggttggagaaccaaaggatgtcattcgtaaagatgttcgtgccatcctgaaccggatgtgccttgtctacccagctagcaagatgtttccctttatcatggaaggaaccaaatccaaaaactctaagcagagagcagagtgcctggaagagctgggatgtctggttgagtcctatggcatgaatgtttgccaaccaaccccaggaaaagccttaaaggaaatagctgttcacataggagaccgtgacaatgctgtacgcaatgctgcactcaacaccattgtaacggtgtacaatgtacatggggatcaggtgttcaaactgattggaaatctttctgaaaaggatatgagcatgctcgaggagaggattaagcggtcagcaaagagaccctctgctgcaccaataaaacaggtggaagagaaacctcagcgtgcacagaacataagctccaatgccaacatgttacgcaagggaccagctgaggacatgtcttccaaactcaaccaagcccgaagcatgagtgggcatcctgaggcagcccagatggtccgccgagaattccagctggatctagatgagattgagaatgacaatggtacagtccgatgtgaaatgccagaacttgttcagcacaaactggatgacatttttgagccagtccttattcctgaacccaagatccgggctgtttctccacacttcgatgacatgcacagtaatacagcatccacaatcaatttcattatctcccaagtagccagtggtgacatcaacacaagtatccaagctctgacacagatcgatgaggtcctgagacaggaagacaaagctgaagccatgtccggccatattgatcagtttctgatagccacttttatgcagctaagactcatctacaacacacacatggcagatgagaaattggagaaggacgagatcatcaagttgtatagctgtatcattggcaacatgatttcgctgtttcagatagagagccttgcccgggaggcctccactggagtactaaaagacctaatgcatggcctcatcaccttaatgctggattctcggattgaagatcttgaggaaggacaacaggtcatccgctctgtgaacctcttggtggtgaaggttctggagaagtcagaccagaccaacatcctgagtgccctacttgttttgctccaagacagcctgctagcaacagccagttctcccaaattctcagagcttgttatgaagtgtctctggagaatggttcgactgttgcctgataccatcaatagcattaacctagacagaattcttctggatatccacattttcatgaaggtcttccccaaagagaaactgaagcaatgcaaaagtgaatttcccataaggaccctaaagaccctgctacacaccttatgcaaattaaaagggcccaagatcctggaccacctaacgatgatcgacaacaaaaacgagtctgagctggaggcccatctctgccggatgatgaagcacagtatggaccagactgggagcaagtctgataaggaaacagaaaagggagcatctcgaatagatgaaaaatcatcaaaggccaaagtgaatgatttcttagctgagatttttaagaagattggctctaaagaaaacactaaagagggactagcagagttatatgaatataagaagaaatactcagatgctgacattgaaccatttctgaaaaattcctcacagttcttccagagctatgtcgaaagaggccttcgggtgattgagatggagagggagggcaaaggtcgtatttccacttcaacaggcatctcccctcagatggaagtcacatgtgtgcccacgcccacaagcacagtgtcctccataggtaacacaaatggggaagaagtggggccatctgtctacttggaaaggctaaagatcctccgacagcgatgtggtctggacaacacaaaggtacctgtccttttcttctgtgcagttcagggaggtaagtccacaagcaggtctgaggccaggctgggccaacagagaggctggttaagtcttgcggtaaggttctggaagctgattcttgacctgcttgaacctggccttttagacaatctgttctccttcctcaaaaaccagatgaccggagtctcttgaccccttggttccaaacaagcagttctaagggggctcttccaacaaattgtccccagaaaatctctcacgccgcgtcgggggcccctttcacgggtttaccaac

SEQ ID NO: 706691 - DNA, 4360 bp, Homo sapiens
  misc_feature (308)..(308): n is a, c, g, or t
  misc_feature (323)..(323): n is a, c, g, or t
  misc_feature (329)..(330): n is a, c, g, or t
gagaagaaacgtcaagtggtcaagccctgcaggaggcattgatgcgatcttccttactaccacactacagaacatcagtgaggatgttttagcagtaatggataataaaaatccaaccatcaagcagcagacatctctttttattgcaagaagtttccgccactgcactgcttctaccctgccaaagagcttgctaaagcccttttgtgctgcactacttaagcacatcaatgattctgctcctgaagtcagagatgccgcatttgaagcattgggtactgctttgaaggtggttggcgagaaagcantaaaccattcctagntgatgnngacacactcaagcttgataagatcaaagaatgttcagaaaaggtagaactgatacatggtaagaaagctggactagctgctgataagaaggaattcaaacctctgcctggaaggactgctgcttcaggggctgcaggagataaggacacaaaggacatttctgcacccaaaccaggacctctaaaaaaggcacctgctgctaaggctggtgggccaccaaaaaaggggaaaccagctgcaccaggaggcgcagggaatactggaaccaagaacaagaaaggactggagactaaagaaatagtggagcctgagctctcgatagaagtatgtgaagaaaaagcttcagctgttcttccccctacctgtatacagcttcttgacagcagtaactggaaagaaaggctggcttgtatggaagagttccagaaggctgttgagctaatggaccgaactgaaatgccatgccaggcattagtgaggatgctagccaagaaacctggatggaaagaaactaattttcaggtgatgcaaatgaagcttcatatagttgctttgattgcccagaagggaaatttttccaaaacgtcagctcaggttgtattagatggccttgtggacaagattggagatgtgaaatgtgggaacaatgcaaaagaagctatgacagcaatagccgaagcctgtatgttaccatggactgctgaacaggttgtgtcaatggctttctcacaaaagaatcccaaaaatcagtcagaaactctgaattggctatcaaatgccataaaagaatttggtttttctgggttgaatgtcaaagctttcattagcaatgtgaagacagctcttgctgcaacaaacccagctgtgaggactgctgccataaccctgcttggcgtgatgtatctgtatgttggtccctctttgcgaatgttctttgaggatgagaagcctgccctcctatcccagatagatgcagaatttgagaagatgcagggacaaagtccacctgctccaaccagaggaatttccaagcatagcacaagtggtacagatgaaggagaagatggagatgaaccagatgacgggagcaatgatgtcgttgatcttttgccgaggacggagatcagtgataaaatcacttcagagttggtatctaagattggtgataagaattggaagattaggaaagaaggcctagatgaagtggcaggtattattaatgacgcaaaatttatccaaccgaatataggtgaacttccaactgccttgaagggtcgactcaatgattcaaataaaatcttggtacagcaaacgctgaatatcctgcaacaactggcagtagccatgggcccaaatattaagcaacatgtaaaaaatttaggcatccctatcatcacagtccttggagacagcaagaacaatgttcgagctgctgccctagcgactgtgaatgcttgggcagaacagactggcatgaaggaatggctggaaggagaagatctttctgaagagctcaaaaaggaaaatcctttcttgaggcaagagcttctgggctggctggctgagaaactacctactcttcgttccacccctacagaccttatcctttgtgttcctcatctctactcctgcctagaagatcgaaatggagatgtgcgaaagaaggcccaagatgccttgccattcttcatgatgcatttaggatatgaaaaaatggccaaggctactgggaaactaaagccaacttctaaagatcaggtattggccatgctagagaaagccaaagttaacatgccagccaagcctgctccacccactaaagcaacttctaaaccaatgggagggtccgctccagccaaattccagcctgcatcagcacctgctgaagattgtatttccagcagtacagaacccaaacctgatccaaaaaaggccaaagctccaggattatcctctaaagcaaagagtgcacaagggaagaagatgccaagcaaaaccagcttaaaggaggatgaagacaaatccgggcctatttttattgttgttccaaatggaaaagagcaaaggatgaaagatgaaaaaggattgaaggtgctaaagtggaattttactaccccacgggatgaatacattgagcaactaaagactcaaatgtctagctgtgtggctaaatggttacaagatgagatgtttcactcagactttcagcatcataacaaagcccttgctgttatggttgatcacttggagagtgaaaaagaaggagttattggttgcctggatcttatcttaaagtggcttaccctgaggttttttggacaccaatacaagcgtcctgatgaaagcactagaatatttaaaattgctcttcaccttgctaagtgaagaagaatatcatcttactgagaatgaagcatcttccttcatcccctatcttgtcgtcaaggttggagaaccaaaggatgtcattcgtaaagatgttcgtgccatcctgaaccggatgtgccttgtctacccagctagcaagatgtttccctttatcatggaaggaaccaaatccaaaaactctaagcagagagcagagtgcctggaagagctgggatgtctggttgagtcctatggcatgaatgtttgccaaccaaccccaggaaaagccttaaaggaaatagctgttcacataggagaccgtgacaatgctgtacgcaatgctgcactcaacaccattgtaacggtgtacaatgtacatggggatcaggtgttcaaactgattggaaatctttctgaaaaggatatgagcatgctcgaggagaggattaagcggtcagcaaagagaccctctgctgcaccaataaaacaggtggaagagaaacctcagcgtgcacagaacataagctccaatgccaacatgttacgcaagggaccagctgaggacatgtcttccaaactcaaccaagcccgaagcatgagtgggcatcctgaggcagcccagatggtccgccgagaattccagctggatctagatgagattgagaatgacaatggtacagtccgatgtgaaatgccagaacttgttcagcacaaactggatgacatttttgagccagtccttattcctgaacccaagatccgggctgtttctccacacttcgatgacatgcacagtaatacagcatccacaatcaatttcattatctcccaagtagccagtggtgacatcaacacaagtatccaagctctgacacagatcgatgaggtcctgagacaggaagacaaagctgaagccatgtccggccatattgatcagtttctgatagccacttttatgcagctaagactcatctacaacacacacatggcagatgagaaattggagaaggacgagatcatcaagttgtatagctgtatcattggcaacatgatttcgctgtttcagatagagagccttgcccgggaggcctccactggagtactaaaagacctaatgcatggcctcatcaccttaatgctggattctcggattgaagatcttgaggaaggacaacaggtcatccgctctgtgaacctcttggtggtgaaggttctggagaagtcagaccagaccaacatcctgagtgccctacttgttttgctccaagacagcctgctagcaacagccagttctcccaaattctcagagcttgttatgaagtgtctctggagaatggttcgactgttgcctgataccatcaatagcattaacctagacagaattcttctggatatccacattttcatgaaggtcttccccaaagagaaactgaagcaatgcaaaagtgaatttcccataaggaccctatagggtcttaggggagagagaaagagagagaggaaaagcgatgaatacttttttcatcaggttgagtgggtaatataagagtctgtcactctttttgcttaacaaccttcgcttaaattagtttcttggtcatttctctttcctttccacctgtcttaaaatatgtggcagcctatcaaccagaagaacgggcat

SEQ ID NO: 706692 - DNA, 3534 bp, Homo sapiens
  misc_feature (308)..(308): n is a, c, g, or t
  misc_feature (323)..(323): n is a, c, g, or t
  misc_feature (329)..(330): n is a, c, g, or t
  misc_feature (3453)..(3453): n is a, c, g, or t
  misc_feature (3461)..(3461): n is a, c, g, or t
  misc_feature (3479)..(3479): n is a, c, g, or t
  misc_feature (3483)..(3483): n is a, c, g, or t
  misc_feature (3486)..(3486): n is a, c, g, or t
  misc_feature (3488)..(3488): n is a, c, g, or t
gagaagaaacgtcaagtggtcaagccctgcaggaggcattgatgcgatcttccttactaccacactacagaacatcagtgaggatgttttagcagtaatggataataaaaatccaaccatcaagcagcagacatctctttttattgcaagaagtttccgccactgcactgcttctaccctgccaaagagcttgctaaagcccttttgtgctgcactacttaagcacatcaatgattctgctcctgaagtcagagatgccgcatttgaagcattgggtactgctttgaaggtggttggcgagaaagcantaaaccattcctagntgatgnngacacactcaagcttgataagatcaaagaatgttcagaaaaggtagaactgatacatggtaagaaagctggactagctgctgataagaaggaattcaaacctctgcctggaaggactgctgcttcaggggctgcaggagataaggacacaaaggacatttctgcacccaaaccaggacctctaaaaaaggcacctgctgctaaggctggtgggccaccaaaaaaggggaaaccagctgcaccaggaggcgcagggaatactggaaccaagaacaagaaaggactggagactaaagaaatagtggagcctgagctctcgatagaagtatgtgaagaaaaagcttcagctgttcttccccctacctgtatacagcttcttgacagcagtaactggaaagaaaggctggcttgtatggaagagttccagaaggctgttgagctaatggaccgaactgaaatgccatgccaggcattagtgaggatgctagccaagaaacctggatggaaagaaactaattttcaggtgatgcaaatgaagcttcatatagttgctttgattgcccagaagggaaatttttccaaaacgtcagctcaggttgtattagatggccttgtggacaagattggagatgtgaaatgtgggaacaatgcaaaagaagctatgacagcaatagccgaagcctgtatgttaccatggactgctgaacaggttgtgtcaatggctttctcacaaaagaatcccaaaaatcagtcagaaactctgaattggctatcaaatgccataaaagaatttggtttttctgggttgaatgtcaaagctttcattagcaatgtgaagacagctcttgctgcaacaaacccagctgtgaggactgctgccataaccctgcttggcgtgatgtatctgtatgttggtccctctttgcgaatgttctttgaggatgagaagcctgccctcctatcccagatagatgcagaatttgagaagatgcagggacaaagtccacctgctccaaccagaggaatttccaagcatagcacaagtggtacagatgaaggagaagatggagatgaaccagatgacgggagcaatgatgtcgttgatcttttgccgaggacggagatcagtgataaaatcacttcagagttggtatctaagattggtgataagaattggaagattaggaaagaaggcctagatgaagtggcaggtattattaatgacgcaaaatttatccaaccgaatataggtgaacttccaactgccttgaagggtcgactcaatgattcaaataaaatcttggtacagcaaacgctgaatatcctgcaacaactggcagtagccatgggcccaaatattaagcaacatgtaaaaaatttaggcatccctatcatcacagtccttggagacagcaagaacaatgttcgagctgctgccctagcgactgtgaatgcttgggcagaacagactggcatgaaggaatggctggaaggagaagatctttctgaagagctcaaaaaggaaaatcctttcttgaggcaagagcttctgggctggctggctgagaaactacctactcttcgttccacccctacagaccttatcctttgtgttcctcatctctactcctgcctagaagatcgaaatggagatgtgcgaaagaaggcccaagatgccttgccattcttcatgatgcatttaggatatgaaaaaatggccaaggctactgggaaactaaagccaacttctaaagatcaggtattggccatgctagagaaagccaaagttaacatgccagccaagcctgctccacccactaaagcaacttctaaaccaatgggagggtccgctccagccaaattccagcctgcatcagcacctgctgaagattgtatttccagcagtacagaacccaaacctgatccaaaaaaggccaaagctccaggattatcctctaaagcaaagagtgcacaagggaagaagatgccaagcaaaaccagcttaaaggaggatgaagacaaatccgggcctatttttattgttgttccaaatggaaaagagcaaaggatgaaagatgaaaaaggattgaaggtgctaaagtggaattttactaccccacgggatgaatacattgagcaactaaagactcaaatgtctagctgtgtggctaaatggttacaagatgagatgtttcactcagactttcagcatcataacaaagcccttgctgttatggttgatcacttggagagtgaaaaagaaggagttattggttgcctggatcttatcttaaagtggcttaccctgaggttttttggacaccaatacaagcgtcctgatgaaagcactagaatatttaaaattgctcttcaccttgctaagtgaagaagaatatcatcttactgagaatgaagcatcttccttcatcccctatcttgtcgtcaaggttggagaaccaaaggatgtcattcgtaaagatgttcgtgccatcctgaaccggatgtgccttgtctacccagctagcaagatgtttccctttatcatggaaggaaccaaatccaaaaactctaagcagagagcagagtgcctggaagagctgggatgtctggttgagtcctatggcatgaatgtttgccaaccaaccccaggaaaagccttaaaggaaatagctgttcacataggagaccgtgacaatgctgtacgcaatgctgcactcaacaccattgtaacggtgtacaatgtacatggggatcaggtgttcaaactgattggaaatctttctgaaaaggatatgagcatgctcgaggagaggattaagcggtcagcaaagagaccctctgctgcaccaataaaacaggtggaagagaaacctcagcgtgcacagaacataagctccaatgccaacatgttacgcaagggaccagctgaggacatgtcttccaaactcaaccaagcccgaagcatgagtgggcatcctgaggcagcccagatggtccgccgagaattccagctggatctagatgagattgagaatgacaatggtacagtccgatgtgaaatgccagaacttgttcagcacaaactggatgacatttttgagccagtccttattctgaaccagancgggtgtntctcccccttcgtgctgnccgnatnangtcccacaattcctattccagttcccggggggctccaccagtctcc

SEQ ID NO: 706693 - DNA, 526 bp, Homo sapiens
  misc_feature (109)..(109): n is a, c, g, or t
  misc_feature (121)..(121): n is a, c, g, or t
  misc_feature (125)..(125): n is a, c, g, or t
atattcacattatcttataaactgaggctgactcataagcaaatgaacaacgggtggaagatacctttctataaacttctaacactggttatgtgacattccacatatngaaatagtcaantacncatcaaagagaggagacttagggtggcaaactcatgcaatcttataatcagaaagtgtaaaagagaagaaacctcactttggtgatgtaccttagtcatgatctacaaatacccaaatgctgtttttttctaggttaacactgtgctgaatgactgcttggatgatcaaaataaaggtattttttcacgtgtacaggaggggataatggggccgggtgcggtggctcacacctataatcccagcacttcaggaggccaaggtgggaggatcccttgagtccaggagttcgagaccagcctgagcaacatggcgagatgccattgctacaaaaaatttaaatatcagccaggcatggtggggtgcgcacctgtagtcccaactactcgggaggctgagatgg

SEQ ID NO: 706694 - DNA, 2247 bp, Homo sapiens
  misc_feature (308)..(308): n is a, c, g, or t
  misc_feature (323)..(323): n is a, c, g, or t
  misc_feature (329)..(330): n is a, c, g, or t
gagaagaaacgtcaagtggtcaagccctgcaggaggcattgatgcgatcttccttactaccacactacagaacatcagtgaggatgttttagcagtaatggataataaaaatccaaccatcaagcagcagacatctctttttattgcaagaagtttccgccactgcactgcttctaccctgccaaagagcttgctaaagcccttttgtgctgcactacttaagcacatcaatgattctgctcctgaagtcagagatgccgcatttgaagcattgggtactgctttgaaggtggttggcgagaaagcantaaaccattcctagntgatgnngacacactcaagcttgataagatcaaagaatgttcagaaaaggtagaactgatacatggtaagaaagctggactagctgctgataagaaggaattcaaacctctgcctggaaggactgctgcttcaggggctgcaggagataaggacacaaaggacatttctgcacccaaaccaggacctctaaaaaaggcacctgctgctaaggctggtgggccaccaaaaaaggggaaaccagctgcaccaggaggcgcagggaatactggaaccaagaacaagaaaggactggagactaaagaaatagtggagcctgagctctcgatagaagtatgtgaagaaaaagcttcagctgttcttccccctacctgtatacagcttcttgacagcagtaactggaaagaaaggctggcttgtatggaagagttccagaaggctgttgagctaatggaccgaactgaaatgccatgccaggcattagtgaggatgctagccaagaaacctggatggaaagaaactaattttcaggtgatgcaaatgaagcttcatatagttgctttgattgcccagaagggaaatttttccaaaacgtcagctcaggttgtattagatggccttgtggacaagattggagatgtgaaatgtgggaacaatgcaaaagaagctatgacagcaatagccgaagcctgtatgttaccatggactgctgaacaggttgtgtcaatggctttctcacaaaagaatcccaaaaatcagtcagaaactctgaattggctatcaaatgccataaaagaatttggtttttctgggttgaatgtcaaagctttcattagcaatgtgaagacagctcttgctgcaacaaacccagctgtgaggactgctgccataaccctgcttggcgtgatgtatctgtatgttggtccctctttgcgaatgttctttgaggatgagaagcctgccctcctatcccagatagatgcagaatttgagaagatgcagggacaaagtccacctgctccaaccagaggaatttccaagcatagcacaagtggtacagatgaaggagaagatggagatgaaccagatgacgggagcaatgatgtcgttgatcttttgccgaggacggagatcagtgataaaatcacttcagagttggtatctaagattggtgataagaattggaagattaggaaagaaggcctagatgaagtggcaggtattattaatgacgcaaaatttatccaaccgaatataggtgaacttccaactgccttgaagggtcgactcaatgattcaaataaaatcttggtacagcaaacgctgaatatcctgcaacaactggcagtagccatgggcccaaatattaagcaacatgtaaaaaatttaggcatccctatcatcacagtccttggagacagcaagaacaatgttcgagctgctgccctagcgactgtgaatgcttgggcagaacagactggcatgaaggaatggctggaaggagaagatctttctgaagagctcaaaaaggaaaatcctttcttgaggcaagagcttctgggctggctggctgagaaactacctactcttcgttccacccctacagaccttatcctttgtgttcctcatctctactcctgctctagaagactgtccgtggatgagtttagtgtacagacttgtaaacagctgccccctctctgctcagtctagttcccagatccttttctttttaattgctcatttgtaaaattgtcctaatctttcctagctttttaatagttaatattagaaactctttaatagttttcctttcagtttgtgagctcttctctgtcgccctgaagggtcactgtattctgtatgaatgcatggcatgatacaactaatttaagagtcttttataaataaagtttgcattaacta

SEQ ID NO: 706695 - DNA, 1708 bp, Homo sapiens
  misc_feature (308)..(308): n is a, c, g, or t
  misc_feature (323)..(323): n is a, c, g, or t
  misc_feature (329)..(330): n is a, c, g, or t
  misc_feature (1558)..(1558): n is a, c, g, or t
  misc_feature (1642)..(1642): n is a, c, g, or t
  misc_feature (1653)..(1653): n is a, c, g, or t
  misc_feature (1691)..(1691): n is a, c, g, or t
gagaagaaacgtcaagtggtcaagccctgcaggaggcattgatgcgatcttccttactaccacactacagaacatcagtgaggatgttttagcagtaatggataataaaaatccaaccatcaagcagcagacatctctttttattgcaagaagtttccgccactgcactgcttctaccctgccaaagagcttgctaaagcccttttgtgctgcactacttaagcacatcaatgattctgctcctgaagtcagagatgccgcatttgaagcattgggtactgctttgaaggtggttggcgagaaagcantaaaccattcctagntgatgnngacacactcaagcttgataagatcaaagaatgttcagaaaaggtagaactgatacatggtaagaaagctggactagctgctgataagaaggaattcaaacctctgcctggaaggactgctgcttcaggggctgcaggagataaggacacaaaggacatttctgcacccaaaccaggacctctaaaaaaggcacctgctgctaaggctggtgggccaccaaaaaaggggaaaccagctgcaccaggaggcgcagggaatactggaaccaagaacaagaaaggactggagactaaagaaatagtggagcctgagctctcgatagaagtatgtgaagaaaaagcttcagctgttcttccccctacctgtatacagcttcttgacagcagtaactggaaagaaaggctggcttgtatggaagagttccagaaggctgttgagctaatggaccgaactgaaatgccatgccaggcattagtgaggatgctagccaagaaacctggatggaaagaaactaattttcaggtgatgcaaatgaagcttcatatagttgctttgattgcccagaagggaaatttttccaaaacgtcagctcaggttgtattagatggccttgtggacaagattggagatgtgaaatgtgggaacaatgcaaaagaagctatgacagcaatagccgaagcctgtatgttaccatggactgctgaacaggttgtgtcaatggctttctcacaaaagaatcccaaaaatcagtcagaaactctgaattggctatcaaatgccataaaagaatttggtttttctgggttgaatgtcaaagctttcattagcaatgtgaagacagctcttgctgcaacaaacccagctgtgaggactgctgccataaccctgcttggcgtgatgtatctgtatgttggtccctctttgcgaatgttctttgaggatgagaagcctgccctcctatcccagatagatgcagaatttgagaagatgcagggacaaagtccacctgctccaaccagaggaatttccaagcatagcacaagtggtacagatgaaggagaagatggagatgaaccagatgacgggagcaatgatgtcgttgatcttttgccgaggacggagatcagtgataaaatcacttcagagttggtatctaagattggtgataagaattggaagattaggaaagaaggcctagatgaagtggcaggtattattaatgacaggnagaagcaaaagcagaaagccctgataaacccatcacatctcgtgagacttcttcactatcacgagacagggtttcaccatcgtntccacattggnctcagactcctgggctcaagcgatccacccaccttggnttcccaaagtactgggg

SEQ ID NO: 706696 - DNA, 609 bp, Homo sapiens
  misc_feature (477)..(477): n is a, c, g, or t
aacgaggtagggacctgggctgggggaagagggagggggggggaaatagatggaccccaaattcagggtgaacacagctccattctggtatactcttccttgggactcctacttttcttctaaactctcggggtagataaggtaatccttatgggccttagagatacccaagatattataaaaccagagctgttatgtctgtcaccagcccggcaggaataatccaggaaccggtggtacatgtgactggtccgaggtagaaatgtctcagctagatccccaagtgggggggtgaaaggtgtgaacagaatgggctgtaaaactactggcctggcaaggtcaagtacatttaaaagaggcagaaactgggatctggcttcttttttcatcaggctggtcagttcagggggtgagagaggagaagcttacagcagcggaggggtccagataaactagtccttacctcgttcggacggngctgaggagagggcggggctgctggggtagcggggcaggctggggggctggcggttggcacgggccccagagtcagggcaccacaaggcggtaggggctgctgggatgtgccgtcccccatttgacaccagt

SEQ ID NO: 706697 - DNA, 183 bp, Homo sapiens
aagccgctaactcgttctatcgccgattcttgtacttcgccgcttctcgttcttcgccgcttctcgttctatcgccgcttctctgtacttcgccgcggtctctgtccttcgcctgcttctcagttcttcgcctgcttctctgttcttctgcctgcttctcgcttcatggatccaatgtcctgt

SEQ ID NO: 706698 - DNA, 401 bp, Homo sapiens
  misc_feature (20)..(20): n is a, c, g, or t
  misc_feature (79)..(79): n is a, c, g, or t
  misc_feature (100)..(100): n is a, c, g, or t
  misc_feature (106)..(106): n is a, c, g, or t
  misc_feature (109)..(109): n is a, c, g, or t
  misc_feature (233)..(233): n is a, c, g, or t
  misc_feature (243)..(243): n is a, c, g, or t
  misc_feature (283)..(283): n is a, c, g, or t
  misc_feature (306)..(306): n is a, c, g, or t
  misc_feature (308)..(308): n is a, c, g, or t
  misc_feature (313)..(313): n is a, c, g, or t
  misc_feature (331)..(331): n is a, c, g, or t
  misc_feature (380)..(380): n is a, c, g, or t
taatcacaatttcaagtttngaaatgaaaaaaaggggtagtacctgttcttgatcaactgtcatataaagtcaaaagtnaatcactttcagaacatgcanttaaantanagcaaattgcacaacagctcgtctttgaaaaatcctgcactgaagcttatgaagaacacaccttttttctggacaatttaaaaggaaacactgtagatgtacaaggaggtctccttaaaccaantgaacctgtnaatgtcatccggataaaagtttcatcttgaccaaagtaancatatttatgcacaaaaaaaacntntcttnacacccgctgtagcttgnacatacttcaaaaatacgtgaaagtgtaactgcatcacagcaggtctgnttaataccgagggtcaacaat

SEQ ID NO: 706699 - DNA, 1193 bp, Homo sapiens
  misc_feature (308)..(308): n is a, c, g, or t
  misc_feature (323)..(323): n is a, c, g, or t
  misc_feature (329)..(330): n is a, c, g, or t
gagaagaaacgtcaagtggtcaagccctgcaggaggcattgatgcgatcttccttactaccacactacagaacatcagtgaggatgttttagcagtaatggataataaaaatccaaccatcaagcagcagacatctctttttattgcaagaagtttccgccactgcactgcttctaccctgccaaagagcttgctaaagcccttttgtgctgcactacttaagcacatcaatgattctgctcctgaagtcagagatgccgcatttgaagcattgggtactgctttgaaggtggttggcgagaaagcantaaaccattcctagntgatgnngacacactcaagcttgataagatcaaagaatgttcagaaaaggtagaactgatacatggtaagaaagctggactagctgctgataagaaggaattcaaacctctgcctggaaggactgctgcttcaggggctgcaggagataaggacacaaaggacatttctgcacccaaaccaggacctctaaaaaaggcacctgctgctaaggctggtgggccaccaaaaaaggggaaaccagctgcaccaggaggcgcagggaatactggaaccaagaacaagaaaggactggagactaaagaaatagtggagcctgagctctcgatagaagtatgtgaagaaaaagcttcagctgttcttccccctacctgtatacagcttcttgacagcagtaactggaaagaaaggctggcttgtatggaagagttccagaaggctgttgagctaatggaccgaactgaaatgccatgccaggcattagtgaggatgctagccaagaaacctggatggaaagaaactaattttcaggtgatgcaaatgaagcttcatatagttgctttgattgcccagaagggaaatttttccaaaacgtcagctcaggttgtattagatggccttgtggacaagattggagatgtgaaatgtgggaacaatgcaaaagaagctatgacagcaatagccgaagcctgtatgttaccatggactgctgaacaggttgtgtcaatggctttctcacaaaagaatcccaaaaatcagtcagaaactctgaattggctatcaaatgccataaaagaatttggtttttctgggtaagtcagaacgaaatcaagtggaaaatagttaaatgttctgtcagtctctaagtcata

SEQ ID NO: 706700 - DNA, 217 bp, Homo sapiens
ggccaccagcagacaacataagaacggaaatacatgttacgatcactaccttctgacttatgaggtcaaaaaaatacacagcattataaggaataagaatggactaagggcgggacacgggggctcaggtctgcaatcccagcacttggggaggcggaggggggcagatcaggaggggaggagtccaagagtagccgggccaacagggtgaagggta

SEQ ID NO: 706701 - DNA, 275 bp, Homo sapiens
ctgaaaactgcaatcgtttccaagcagtgacatttacatcccagcatgtacgaggtcgatatgtgaggttatcacattccaatgttaagggttatctcatactcaccaacatttgttattatcttttttattcaaaccatcctagtgagtatgaaatggtatttcattgtggttttgggttggctttcctcttgtctagtgatgctaagcaccttttcaagtgcttatttggcttttgtttatcttcttcagaaaggtatctattcaaataattt

SEQ ID NO: 706702 - DNA, 111 bp, Homo sapiens
gaaagcgttcaagctcatcacttcttaccctaaaaaatccaaaacatataactgaactctcacacctaattggaccatcctattaccctataggaggactatgttaggata

SEQ ID NO: 706703 - DNA, 252 bp, Homo sapiens
gcttgagatttcttgttttgaatttcctcgaacatggatctgagcctggccacgagagaacaggtattcgtcccgggtcttggccttcaggtaccacatggctctccatatccttgctggatttactgtgtgccacatccagcttgcctcattgcctcctcgatttgactgaccagcttctgccgtacggcggtgctccgcctctcggtctcttgcgcggaatcgttcatgcctgttccccagctcccgccg

SEQ ID NO: 706704 - DNA, 1194 bp, Homo sapiens
accaacgggccactaacgggataacagagcacagagggtcgagctcacggtggaatccatagtagctattaaactatctactaactaggccaagggaagcgataccattgttagaataaagtattcggtctcgagagtcagggacccaagtgcatagtagattctgggagctactcggaacccacaggcaggcacgctgcagtgaacaagccgaggtgactgctgtatcgaagccgtgtagctaaggctgcatgttcaagagcggaatttatgcaatcaagacacactgactgagtctctgaagttgaactggctgctattgcgctttaaatatcatgtattcgcagcttgggatgacgctaggcaagtgatgttccgagtaatgaagagattggatcggctgggcatgcggatttctggaggggcccactggcagccaaaggaccagcatgggctaagccaggtgagctcgccgtcttacgcaggagtttgtcgggaagagcgattccagttgatagaaaccgtactacttgccaggcctcagcgggatctgttgtgtatatccgggtagctggcacgtcaggaactctggggcaaggtccgcgaggctggtgaatggcattgataccctactcactgtgtgcatattcaccatgggaaagtttgccctaatgggcaaccctgacaggatcgattgacgatgtgctaggctctaaattaacccgttcctaaacggcttggctgggtttcatctatactgagtggggttcaacatgagaagggctaatcgcacattgcgggcagagcaaacctctagaacctccggaaaggacgtaaaccggccacgcagacccctagcgcgtccaccacaaatccgtggcaaaccacaaatagcaaaagcccgccacggcacccacgtgaaccacggcacagcgacccgggtgcgcgccccacgaggaccccaggtactacagagcggctaggatagtacccgacacgagcggggacagcaaaaaaaaggacgacagcggcgggggaacaaccggcaaagaggcgatgggtagcaggccacggcccaaacacctggaaacgacagacagaggtaagtccaccacaacaagcgaaacgcacacggaacgacggccggcagtgagacacaggacacagcgccaacaaagagagagagaaacaact

SEQ ID NO: 706705 - DNA, 143 bp, Homo sapiens
gccgattgccgtgccggtgatcctcgccggtgtgcgcaccgccgtggtgatgaacattggtgtgatgaccatcgccgccaccatcggcgccggtggcctgggtgtacttattctggcttccatcagccgcagcgacatgttcg

SEQ ID NO: 706706 - DNA, 140 bp, Homo sapiens
gattgcagctcatgaaggtctgagtaagttcttcagtgaagcgatactctgagtaccacagtgaccagccgtccttatcaaagtactccaatgaggacacactctctgtggcactgccatatttctgggagcactttgat

SEQ ID NO: 706707 - DNA, 200 bp, Homo sapiens
aaagctgagaaggagaagcaagccactgagaacaaggtgtgggccgggccagcttgtcgggaagggccctgagcaggggcaagcttttagggccaagtggtgcaggtcccaccccggctcttctaaggctctgcttttctggccctggcatgttcactgcctcttctggggctcagtttctttatctgtcaagtggggtt

SEQ ID NO: 706708 - DNA, 704 bp, Homo sapiens
caaaaattcactgagcatgccactgcaaactcgacacttgcatcttgtgcccccatagaacttggggatggacggcatgcacttgggcatatggtataataggatcattacttgtgactacttaacgcttagactcatcatttggtgctgtctgccaaacattcagcagggtatctcccaataaagtgttcctaagtcgggctgtatactggaatgcaaggcaggctatcaaattttaggtgaaatgagtccgagtatccatgtaatgtgtttgctgtactaagacagtaactgtacatgtggtacaaaatgctccaggttccttaagtctttgtatgctgtccatgaatcctctgtggcagctgtacatcacagagccagaagccagacggcgcgcagggactatgaagtaggctgaccaaacatcatggggacatctgggtggcggacatccctgttgatgtctcgttgtggcccatggagctattatggctggtcttgcattagcttgaacttgaagtgaagaaccaatttttgctacttagtcttatctctccatgacttagaatggtcagtaggctactgagtgagtgctgtatctgaataggctggatcgcacagtgaatagaaggtgggcactggctttcaccggaaagtgaactggtttcagagaccaagagtccctgctcagtgtccgggaaaga

SEQ ID NO: 706709 - DNA, 111 bp, Homo sapiens
ccgacggggttcttgcagcagccagtgccttcttctggcacttggttctcttcttagtcagccctttttccttggagccagtgtccacgaagacgagtttttcatttgggg

SEQ ID NO: 706710 - DNA, 665 bp, Homo sapiens
gtagccagttgttgtgtgtctgggtggccaaagtccatttgtgtcatgttcctaattctctgttcccacataaatcttttaaagtcataaatgaagccacggtccctggccagtgaattcgcaagcatctagatctccgattcagttccagttctcatccatgatgcatgccgttacagggaacgataatcttaatatggagtctacttgtggcttactctggtcgatatttggagatccaattgtggatggtcgatctgttaaagaatttagccctcagcgtatcctttcgtaccgtattgtataattcggttttgcgagcttgataatcgagcaggcgagaataggaatccgtcgcaagctgtatgtatccagcccacagacagctcgcgatgcgctgacccctggagaagaagagttgaattgacggcattatatgagcaaaatgtgaaagccgatagtggatttatcctgcgagctcatgtcagcttctgtgcctgtggtagtaacgaagttagaggccttgaccagttgtgcattcagcagctgctgtcgtgaggtaaggaggtgcatcctagaaacgagcctttctacttgaggtcgggggagcaacggggaggacttgcgtcacacgctggccttgggaatatctaggtgaatgactg

SEQ ID NO: 706711 - DNA, 302 bp, Homo sapiens
ccgtcctctctggcacagtttccatcacaacacggaattagtgcatgtggagggcgatgtagtaagtgctcccgccgccctcctccccttctctccttcctcctcattctaacgctagctgctggccatgcccctccagactgccccttgggggttggtttcttgttagctttgagttgctgtgtgctgagtgggtgccgtctggcaggccgtgatactgacggatgcctactggcatgtcagctgacctagggacagaggagggaggggagaaacattggcggacgtggtaccgagctcta

SEQ ID NO: 706712 - DNA, 418 bp, Homo sapiens
agaataggcgatcacaacgtggcatagtagctactttactataagaggaatattagaatctagtctcaatgctacataacggatcagaaatacagattattgatagccaagcgacgttagtcgatagagctcttgtgaggaaagtcattgactttatcctctttaaccttcgacggttggggtgggtcatccaaagcatggggtctgtaccacatctttctttcttcagcacatttcatatcctcagttctgtcacaaatggttgtattagcatgttctctcatcatttcacataatcatactatagtggactcaaaagcatcataaatgctgtatcaaaatcagcccaataatagtcaactaggatatctgcctttatagtgttagacattagcctgagtaaaaaggcttaaaaatt

SEQ ID NO: 706713 - DNA, 1079 bp, Homo sapiens
  misc_feature (4)..(5): n is a, c, g, or t
gaanncctttttgatgtatgtgtgtgtctgattgtagtgatgcactacaaatgataaatactctaatgtgcaagaggccgtccaacggtgcccgcctatttcttagacccctggtattcgccggtacacacctggggtaatgtccccctttgtgtccaaagggccaaaaaaggggacccttttaagaaaggggtggagtgccacccgggtgtgccattaaagattgggaaaacccttgtccccgggcccagggcccacaatgcatctggaggttttcaaagttcctgtttttgaaaggagatcttccgatttgcccgaaatggtggaagtgccatttaggaaattccactgtggttttcccgggagatatttcccgggtgtaaaactcgcccggacttaactttccctggcactggatttttaaaccccgcggacccaaaatgggggggtacactggggccccacaagaatgcgccccgaccccactgagattggaggcttcaccctttgaatgtttccagagactatcccgcatggttatactttggctttcgttctgttttctgttgtgtgggtttttagactataaaaaaacgcccacacattcacgatacgcgagagagccttcttaagggctcacgcacccccaacacggttccgccccaattccggagaagaagagtgatggagaattcatgagacccgcaagaaggggcacgagccacatgagacttgaaaagaaaggggtgtccataaaagtgagtttcccagagcacgcacttggaaaagacactagaaaaggcttgcccactctatttattcctcctccactgagtgttcttcgttagagaaaagttaaaatgcctgtgagagagccccacagtttgaaattggggaagctcctctggaggctttcactggtggaaaggcacctaagtttctgggaaagacccctcggggacgcaaaccggtgctaaagattggacgagctgatggatatggaccccccctcccagaaatctgttttaagattccagacttccaattagtggcccaattaaaagtgctatttgtgtgat

SEQ ID NO: 706714 - DNA, 404 bp, Homo sapiens
aatttgcttccctatgttgctcatgaattgggtcataatcttggaatgaatcactcgtggagagatcgtacctgtggcagcaaagagctgcatcatcgaatacaggagcatcgggttccagaacactttagcagtagcagtgcagaggactttgagaagttaactttagataaaggaggaaactgccttcttaataattccaaagcctgatgaagcctataagtgctccctcctgtggtaataagttggtggacgctggggaagagtgtgactgtggtcactccaaaggaatgtgaattgacacccttgctgcgaaggaagtacctgtaagcttaactcatttgctgagtgtgcatatggtgactgttgtcaagactgtcggttccttccaggaggtactttat

SEQ ID NO: 706715 - DNA, 117 bp, Homo sapiens
tgggtggtggttggtggaggggtggttgtggtggtggttggagggctggggtggtggttgggtggaaagggtggtcgtgctggttgggtggagggctgggagtggtaagttggaggg

SEQ ID NO: 706716 - DNA, 915 bp, Homo sapiens
attgtaaatgctcatttatgtgttaatgacattgaaggtacatttattagtaccaaagccatattatgagttttctgtatagctaggctttagaaagattgattgactgtagagaaatagttttataagaaaatgatatttttattcagtaatttaattttgtagatgccaaatgaaaaacgtttatttgctgctatggtcttagcctgtagacatgctgcggtagtatcagaggggcagtagagcttggacagaatagaaaagaaacttggtgttaggtaattgactatgcgactagtatttcagactttttaattgttatatatatatacatttttaattcgcttctgcaatacattctgaaaacttgttgtgggagactctgcattattagatggtaggttgactagtgattagtaggtttatacaagcatgcgttgcacttctttgtggggagatgtgtgtagtcgatgttcgtatgtaggtttcgagtgtaggctgactgttttataatttgggagtgctggcatttgatccggatcccctgtggtttctaagtgtatggtctcagaactgtggcttggatcctgtgtttagaactggggagacagaaactgtgggttcgaatagccagtcacgtgcttgagaacatttgatgcaatgatggccgagcactgaactttgagatatgacggtgtacttactggctggtagcaaaataagatgtggccccttaattttaccgtaaaataagaaaagcaacaaagcgacggagggcacttgtgtccggcagtagtggaacaccgaaaagtttctcagaaacgcatttggggaccgggcaccaaaagtgacggaaaaggggctaagggtcccagagagacggggcaaacaaacaggcgatgacgaaaaaaaacg

SEQ ID NO: 706717 - DNA, 452 bp, Homo sapiens
ctatagtcattgtatgccaagttggctcaacaagtcgattgagtgcaaaagctgtagtattgtgagagaagcctgtgccctgatccgagtttactctactctctcaggtgacactaaattcccttctcatctactactcctccagagaggtgactgtgcgcctctgcctcatgtttgacgaacctttaacccaggtcttgagcaacaagctgttctgttccatagagctgtaagccaaagcagctgctgtggattctggcgctttcgcgtctacacgggaatacgtctgcatctccacccaagcatccactccgatctccttctctgtgtcatgtatgctcttcttctttatccgggtttaagtactctcctgatatcgaagtgttgatttctgccttcctagcgagtctccataagaaaatttggccccggagcaggatgattttggacta

SEQ ID NO: 706718 - DNA, 214 bp, Homo sapiens
gatccagcgcatgacatcttggagatgtacgcgctggtatgactggcttgtgacttcgtgcttgcccttgccactcttgggtacctcactccacatctcctttcacgttctccagcaccatgtcgcagtgcctatcgagggccttcacgcggcccaggagtttcttattcgttgcggcagtggatgagcacttgcgctcgtcccgatggcggca

SEQ ID NO: 706719 - DNA, 284 bp, Homo sapiens
  misc_feature (21)..(21): n is a, c, g, or t
  misc_feature (172)..(172): n is a, c, g, or t
  misc_feature (180)..(180): n is a, c, g, or t
gctagtattgagataccaggncacaaaggtcaataaaaagcttcatataggctgggcacagtggctcatgcctgtaatccctcactttggggggctgaggcgggtggttcacttgaggtcaggagttcaagaccagcccggccaacatggtgaaccctgtctctactaaaantacaaaanttagctgggtgtggtggcatgcatctgtaatcacagctacttgcaaggttaaggcaagagaatcacttgaacccgggaagcggaggttgcagtgagctgagatt

SEQ ID NO: 706720 - DNA, 239 bp, Homo sapiens
gcagctggagctcagcaggccccttttgccgtagcaaaaccctgtgcgggtcaccactgccaggactgtgcggccccacatcggacccgggcctgcaagatgagggtcccgcacgaagagtgtgtgcctgccggtgtgtctctgcacagtagggccccaaacccctccggcagtgccgacttcagcactggaatgctctctcctgtcagagagcacacagacaccaatgcacccaggaa

SEQ ID NO: 706721 - DNA, 284 bp, Homo sapiens
agttaagcattaaggccttggcacgcagcctccgtctccggggctctccgggactagctgcaaaacttatgctctaaacatttctagttcccccaaacaacctagaggccttgggacttcacatcccccagcacacaagcctcaccacccccttcacatcccccctccattgcttgttccagcatcttggtgaaaggggcatcagctctggtgtccctgagagacgagaagcctgtgggaacgacagaagaacatggcatttttataaattatttttttgaaat

SEQ ID NO: 706722 - DNA, 316 bp, Homo sapiens
gaggcgctctagacgatcccttataggttcgcaggaacagatgaacgatgtatctcctttaaaaacaaacaaacaaaaaaagacagtttccctctgtcacccaagctggagtgcaatggtacaatcttggctcactgcaacctccacctcccaagttcaagcgattctcctgcctcaacttgtcgagtaggtgggattaccggcacgctccaccacactgactaatttcgtatttttaatagagacgaggtttctccttgttagccaggttggtctcaaacgcctgacctcaggttatccacctgcgaacctatga

SEQ ID NO: 706723 - DNA, 307 bp, Homo sapiens
tcttgccgccggagacggtcctgctgctgccgcagtcctgccagctgaccgacgatgtccatccacctagtctagccgccgccgcccctgcgcaacaacaacaacaactgcgaggaaaatgagcactctctgcccccgccggccggcctgaacagctcctgggtggagctacccatgaacagcatcggtggcactgataatggcaatgggaaaaatggggggctggaacacgtaccatccttgtgcttcaaccccaatggaagccctgtggaaaatgctttagagtgcccaacatgattcaggacag

SEQ ID NO: 706724 - DNA, 1030 bp, Homo sapiens
  misc_feature (152)..(152): n is a, c, g, or t
  misc_feature (423)..(423): n is a, c, g, or t
  misc_feature (518)..(518): n is a, c, g, or t
  misc_feature (525)..(525): n is a, c, g, or t
  misc_feature (532)..(532): n is a, c, g, or t
  misc_feature (629)..(629): n is a, c, g, or t
  misc_feature (631)..(631): n is a, c, g, or t
  misc_feature (653)..(654): n is a, c, g, or t
  misc_feature (660)..(660): n is a, c, g, or t
  misc_feature (663)..(663): n is a, c, g, or t
gcggtgcggagcatttcggctctgagcggctgggcgaccggcgcgtcgtgcggggctgcggcggagctcccttaaggaaggtgcaagaggttggcagcttcgattgaagcacatcgaccggcgacacagccaggagtcatgagcgacagagncgagcagaactacggcgagcgggaatcccgttctgcttccagaagtggaagtgctcacggatcggggaaatctgcaaggcatacccctgcaaggtctcgctccaaggaagattccaggcgttccagatcaaagtccaggtcccgatctgaatctaggtctagatccagaagaagctcccgaagcattatacccggtcacggtctcgctcccgcgtcccatagacgatcacgtagcaggtcttacagtcgagattatcgtagacggcacagncacagccattctcccatgtctactcgcaggcgtcatgttgggaatcgggcaaatcctgatcctaactgttgtcttggagtatttgggctgagctntgtacancacaganagagatctaagagaagtgttctctaatatggtcccattgccgatgtgtctatgtatatgaccagcagtctaggcgtcaagaggatttgccttgtatntngaccctgtcgatgatgccaggnnagctanagnacgtgccacggcaaggacgccgatggacgtagaacagcacagagcaccacaccaaagaccaaccgccacacaagacatcactggggagaccaccatgaaaccatgccaacggaaacaagaccaagaaaaagacccggaaacagaccacgccaaaaatccacacccccggaaccgacaccagcagggcgaagagacccaaacgacaaagtagaaacgggacacaccactcacggcgcaaccaaacacacacgacaaacacagaccacactccactgaccccacgcgcacacgcgaaataagtcaacgacgcagagtgacacaccaggatgacaccggctgccaactcttccccgcatcacgataacaa

SEQ ID NO: 706725 - DNA, 838 bp, Homo sapiens
tttcgaaatttccacctcccccgataccaggtcaaggaatccccacgtattctctcactttttttgcccgctaattttcaagagtggcttgcccccctattaacaatttggacaaacttctggaacaacactattttttttttgaacaccaaaaatagggctccttaaactaatgtctttcaaataatttcatcccccccagttacccgtggataacttggctctaacaaaaattcttgtgtacaatcgcccaccacatatctttggaaatatcacctctgtggaaacattctttacaaaaacacttggtttccacacaaacgtttacagtccgccttacaattaatctcccgcgagatgtccccacatgctcttcttccacaaactttccacgcacggcgaaaacatattccttataatgaaaattttcctatgaggaaccccctcctctgtcttcacacaaagtatacccccgcccccaaacttctaaaacctaatgtaggacccccctgttggagatatactagcattttttccagaaacctatatccgcatactccggcaagttgaaatataccctatatccttcgtcgtcttttaatattctgggaacccacattcctctgaatcagaaatgatacctcccgtatatcccacgcgtggttataatctcaccacaacatgagaatcagcaccatagtacaccacacccccactcttgcggttaatcaatactcgacatacgtgcaagaatactcttcctgacacgttataaattcccttggacctacccccccccttgcaccccccgtcttcaccccaaccctttggacataaa

SEQ ID NO: 706726 - DNA, 779 bp, Homo sapiens
taaaaagggtaaccatcaggggcaaggaaaagaaagggtcgtatttccaattcattatccttattctgaagatagtaggggagaattttaagcagagataggggtgaagatggggactattatagagtggtgggactatggggcgcacaatctgggttctccagttaaggaattttttatatggtggtttggtggttgaaagatactatattaacgctggtgagaccataggggacatacgggagagtccattggccgtaatatcgtcactacagttatggtggaaaattcttatctacacacacggggtgaaacctctctacaggttttctaaatgtggccgtttatacagcaaggggggtatcaacacgggttgctattggaaaggcatatttgccactattgcgtggggggctcccaagggttgctgctggggtggtgagaaagcaagaatgcaaggctcttgggtttggtgccgtctctcctggttgttcacacacaagaccgggtatctgggcaaggtttgggggaactctaacaggtaacactctctgtgggcggggacaaagggtggactgaggctcaatcagtggagctttatttggaccacctttttagtgcagtgcttagagggaaacacgaagacatccgtggttacggtagaattcattcgggctaggtatattaacgtacaaagagaacgattctcaccaataggccggtgccgcagtgggattcaccacctggtaatccccaggcaattgtgggggagggccatg

SEQ ID NO: 706727 - DNA, 896 bp, Homo sapiens
  misc_feature (152)..(152): n is a, c, g, or t
  misc_feature (289)..(289): n is a, c, g, or t
  misc_feature (384)..(384): n is a, c, g, or t
  misc_feature (391)..(391): n is a, c, g, or t
  misc_feature (398)..(398): n is a, c, g, or t
  misc_feature (495)..(495): n is a, c, g, or t
  misc_feature (497)..(497): n is a, c, g, or t
  misc_feature (519)..(520): n is a, c, g, or t
  misc_feature (526)..(526): n is a, c, g, or t
  misc_feature (529)..(529): n is a, c, g, or t
gcggtgcggagcatttcggctctgagcggctgggcgaccggcgcgtcgtgcggggctgcggcggagctcccttaaggaaggtgcaagaggttggcagcttcgattgaagcacatcgaccggcgacacagccaggagtcatgagcgacagagncgagcagaactacggcgagcgggtctagatccagaagaagctcccgaagcattatacccggtcacggtctcgctcccgcgtcccatagacgatcacgtagcaggtcttacagtcgagattatcgtagacggcacagncacagccattctcccatgtctactcgcaggcgtcatgttgggaatcgggcaaatcctgatcctaactgttgtcttggagtatttgggctgagctntgtacancacaganagagatctaagagaagtgttctctaatatggtcccattgccgatgtgtctatgtatatgaccagcagtctaggcgtcaagaggatttgccttgtatntngaccctgtcgatgatgccaggnnagctanagnacgtgccacggcaaggacgccgatggacgtagaacagcacagagcaccacaccaaagaccaaccgccacacaagacatcactggggagaccaccatgaaaccatgccaacggaaacaagaccaagaaaaagacccggaaacagaccacgccaaaaatccacacccccggaaccgacaccagcagggcgaagagacccaaacgacaaagtagaaacgggacacaccactcacggcgcaaccaaacacacacgacaaacacagaccacactccactgaccccacgcgcacacgcgaaataagtcaacgacgcagagtgacacaccaggatgacaccggctgccaactcttccccgcatcacgataacaa

SEQ ID NO: 706728 - DNA, 915 bp, Homo sapiens
gcttattgcgatgcctagctggatggacttggattcgaagcccagttgggccgaccaggtggaggaggagggggaggacgactgatgtgtcaccagggtagctcctcaaggggatccctcgtggtccacagttgtgagaccagtcccagaagccagagctatctgccgtggagctccatctgctccgcgctcccaaggaggtcatcaacggaaacataaagacagtgacagagtacaagatagatgaggatggcaggaagttcagagattgttgcgtggaccttcacgggattgagcacccggaagggcttgcaaaagtgctgtcgcgaggaggagatgaactggaagaattccggcgaactcagagtttgacccccccggagccgatgtgtgcagcaccaatgtccgtgagtatgtctctatgacgtacatcagcctctctgaggcgctggactgccagagacggaggaggaccctatgaacaaacgtcaaggcgccagcaagatcagtagtcctgccgcatctgcacagggcgacactggaccacccgctgcccctacacaggatacgctggggcccatgcaaaggagctggccgacgcagctgggcctgtctactgcgagaaggagaagctgccgccgagagctacgagccggttgcaaggcgacgcataacccacgaccgcgccctctgtgcccgtcgaggctgcgcgacggggcccagcgcgcggggacgtcatgcaccccaccccgaagcccacacaacgcaccatccgtgtcacacctcgcgaagaccgcgtgcgaccgacctgggtagctctccgccatccggcgcaactccgatatacctgctaagcagcccggccctccaggctgccaccacacacccccccgacaacgcccccccgccactcac

SEQ ID NO: 706729 - DNA, 286 bp, Homo sapiens
  misc_feature (4)..(4): n is a, c, g, or t
  misc_feature (96)..(96): n is a, c, g, or t
  misc_feature (100)..(100): n is a, c, g, or t
  misc_feature (106)..(106): n is a, c, g, or t
  misc_feature (112)..(112): n is a, c, g, or t
  misc_feature (117)..(118): n is a, c, g, or t
  misc_feature (123)..(123): n is a, c, g, or t
  misc_feature (129)..(129): n is a, c, g, or t
  misc_feature (131)..(131): n is a, c, g, or t
  misc_feature (150)..(150): n is a, c, g, or t
  misc_feature (155)..(155): n is a, c, g, or t
  misc_feature (157)..(157): n is a, c, g, or t
  misc_feature (171)..(171): n is a, c, g, or t
  misc_feature (229)..(229): n is a, c, g, or t
  misc_feature (279)..(279): n is a, c, g, or t
tctntaaggctcaggctgttctcaaaggctttttatttacctgggagatgctcacgcctgttattttttccacactctctggcaggcgatttagantttncatttnttcccnatttnnttttnctgccncnatggtcccacttcctgctngacancntttttatcttattngctgaagttaatgggacctactgatctcctctgccactctggggcagcttctctagcntcattttcacttattctgcctttttgttcttttttttgtttttttttttntttgcca

SEQ ID NO: 706730 - DNA, 200 bp, Homo sapiens
actctcataaactttaaaaaattatgagtagctcgtacatatatctactttactgacaatcagagaatttattaaaggattacattagacagccacagtgtctcaggtccaaaattttaaaccaacgtagtatgctacaatcatttcagataccattctcataaaatctaaattacatagtatcaacattactactaggt

SEQ ID NO: 706731 - DNA, 260 bp, Homo sapiens
cacttctttttatattttcaagagggtcaataaggccttataagaagcaggtttaggtctcctccatagagagacatcctctccttaagtaaaaccttatgccacactcaataaaaaatcgatttggccgggtacggtggctcacgcctgttatcccagcactttgggagctgaagcaggtggatcacctgaggtcaggagttcgagaccagcctggccaacatggcgaaaccccatctctactagaaatactaaaaatt

SEQ ID NO: 706732 - DNA, 258 bp, Homo sapiens
tctccgacatactggagaccgcagcagctataccgacctggctgatgccctgctgaactgctgcagacttggatttgtccaactggtagatgctgcaaagcctatgaggtccagaggagctcattttatttaggtggtaggtgattcgaaacccattcggccccttgaagtgcttggattcccaaacaggtgatccaggctgggaggaaccaagggcctccttgggccccaaggattgaagggcccttttacaaggca

SEQ ID NO: 706733 - DNA, 215 bp, Homo sapiens
gtgcatgcgcaaaggcatgccctaaagatgcagctgtagtacgtcagtgttattcaagatgtcaggaactcaatgtctacatgcattccattcgtctctcagctctacttactcttgagagaagaggggcatcatattgacttaagtggacagttggaactaaaatctgtaatactagaagctttctcatctcctagtgaagaagtcaaatcagc

SEQ ID NO: 706734 - DNA, 303 bp, Homo sapiens
ttttgggcctgggccaagggccttgtgtaggccatgttcctcgggcaactgccccgggccggagttgggccctccaacggccctggggggtggttcctgcatagctagccccaacccataaagggctgtgatgagtgggtgggcctgtgctttgtttgggcccggactttgggtctctccccctgcggagggtttccctgggggtttgcccccttcctgggaggggcccccggcctgggtggggcccttttcggcagagcccccccccttatacctttggatgggataaaggttaatttttta

SEQ ID NO: 706735 - DNA, 114 bp, Homo sapiens
tggccaccactctggacactacctggccttctaacctacctggagagcctgaccaggcctgccacagagacctgagcagccaggagacctgagcatgcaggagacctgagcaag

SEQ ID NO: 706736 - DNA, 267 bp, Homo sapiens
cagactgtgttacaaaaattattaaaaatcaggtgggtgaggtggtgtgaaaccgtagtctcagctactagggaggctgaagtgggaagatcgcctgagtccaggagttcgaggctgcagtgagctatgatcatgacactgcactgcagcctaggcaacagaatgagaccctgtcttaaaaaacaaaatacatggccaggaagggtggctaacgcctgtaatcctagcactttgagaggccaagacaggtggatcacctgaggtcag

SEQ ID NO: 706737 - DNA, 686 bp, Homo sapiens
cccatgctagatgccacatcctgcccagtccacgatgctacgtgcgctcctggcgcctgcctccaggcccagcgaggcggaccctttctcaggcccaggcgccttccaggtgccttctgtacagaggaccgtatgcttcatgatgcgtttaaaggcttcatttcacatcatcattggtggtgaagtggggattgtccacgtgctcaaccataggttaaggtgactagcacttgtcgcgcgagcacctgcgtcattgtctctcatatctgatgacatctcactccgaacacatcctagttgttgtaatacccgcgaaatgaactttccagaatgcaaaaacaataacagattcagagaaccctggtcacacctgctgagcaggtcccctctactctggttgcatcatcagaatgcttgtttgctcaacaagagcaggcgctctcaacatcaaggcacaaagaaagacgtctccaggggcaagaatgatgactgaagtgaccagtcggcctctgcgaggcccgaggtcagagtcacggcggacggcgatgttcagcctgacgggcattgggaggaagagccaaggacaggtctcccgctggtggctcaagcgtcctcacgcgtacttctccaggaagttgatgtggaacgtctttcatcttctgcagcaccgttttcagcttctccaa

SEQ ID NO: 706738 - DNA, 393 bp, Homo sapiens
taatctatctcatcttgtctggatgtggaaatcataaatggtctgtcatcataaatgtaactattttaaattcaagtatatattatacattttgaaaatctgtaattcctgagtagaaagcaccatgttaaaatatttttttttaaaaaattaaatgccattatgaattaagtcagtatataataagatttgtaaggtcctgtgtttgatacctattttttgaagtgatattcaatacaatagaattgtaatacattagaaatagtagagtttgccccatagagagaagagtttgtattagtttgatggtatactgactgcctgtgtaaccacaattttcctttaatgttgaaaataatttttcttattaaaaggttaattctttacaaagcc

SEQ ID NO: 706739 - DNA, 315 bp, Homo sapiens
tatcccagcactttgagaggccaaggcaggagatcgcttgagcccgcaagttcaagaccagtctgggcaacatggtgaaaccgtttgtacagaaaattagctgggtgtggtggcacacacctgtggtcctagctactcgggaggcctgggtgggaggattacctgagcctgggaagatcaaaactgtggtgagctgtgatcacgccagtgcgctctgagcctgggaggcagagtgaaaccctaaatcgaaaagggaaaggaaaaggtctttgcagatgtaaatagatttaagatctgaaatgagataaaaagaga

SEQ ID NO: 706740 - DNA, 385 bp, Homo sapiens
catgttggtgtgctgcacccattaactcctcatttacattaggtatatctcctaatgctatccctcccccatctccccccaccccatgacaggccccggtgtgtgatgttccccttcctgtgtccaagtgttctcattgttaaatttccacctatgagtgagaacatgcggtgtttggttttttgtccttgtgatagtttgctgagaatgatggtttccggcttcatccatgtccctacaaaggacatgaactcatccttttttatggctgcatagtattccatggtgtatatgtgccacattttcttaatccagtctatcattgatggacatttgggcaaccatattttttgttgagttttgtttctttagtgcttagccatca

SEQ ID NO: 706741 - DNA, 850 bp, Homo sapiens
cgcggtggctcacgcctgtaatctcagcactctgggaggccgaggcgggtggatcacaaggtcaggagatcgagaccatcctggctaacacggtgaaaccccatctctactaaaaatacaaaaaattagccaggcgtggtggcaggcacctgtagtcccagctactcgggaggctgagactacaggcacgcactgcaacacccagttaatttttaaaatttttagtagagacgagatctcactacgttgcccaggtaaactcctgtctctataaaaaatgaaaaaattaggccgggcgcggtggctcacgcctgtaatctcagcactctgggaggccgaggcgggtggatcacaaggtcaggagatcgagaccatcctggttaacacggtgaaaccccatctctataaaaatacaaaaaattagccaggcgtggtggcaggcacctgtagtccagctactcgggaggctgaggcagggaggatcacttgagccccggaggtcgaggtacagtgagccaagagtgcactatgtactccagcagggaagagaggagacctgttttaataattaataattacaaaaagagtacaacaaaaaaatttttggcggctgactggaaaaggtttttagaaaatggtgggggggccagattgtacgtaaatggcgaagtggtccaaggatctggcttgaatgctgtgttttcaaaacgggggcagggtttgacaatcaggcgttggcttttgctatcaggccagcgcactcgcccgggcggtgtgaaaaagataggatataacgtgacagtagtaaacgacaacagtaggtggtgttagtggataggccatgagagat

SEQ ID NO: 706742 - DNA, 249 bp, Homo sapiens
tccattatttttattgcaacctctctgcctgtaagggatatgtcttgcccattttacttttgccaaattccccttgccgattgttttcaccagtctgtagtttccgatgtgcaggttgtacatctagcacagtgaggctatacgagtatctaccaccgagctcatgacgcggctggtccgacgaggtaacttcttgtacgcccatctccatgtgacgtgtggtatacactacaatgggcagagcgcccg

SEQ ID NO: 706743 - DNA, 805 bp, Homo sapiens
ggaaccaggggacgtgcacgcccggagttaggagcctcttccatcaagtggacctgatttaggaggcattaggcagaagcaagctgcacatttgttgcaagttgcagcctgcaagctaaacaggaaattcttgcaaacacaaagatgtggtggttcaacatgttcattatggcatggcagttggcaaggactcaaagatgatatcatccatttgtgcaaattggcagatgttttcaaggccaaaaacctaattgaggtcaatgcggcaaatctacatgcaagcccgtgcaaacaattgctccgtcttggcaattcttctcagaacaagtgcgcatgtcttaggattggacacatgtcaaggtagatggcgcacttccaaatgggttagacgttacctatcgaagtacactgaacttgacggacgcattacacggtgcacgttactacacacacactggcttggcgaacaatgaacggcagtatggtacttggacctcaagcttcctaatcttcttggtcgtgcagaaaaggtgacctttcagttttcctatggaaccaaaagaaacttcgtatggcctgatacttcttcaaaccacggcccggaaacttcgaaagaaattactctgtaaacttatataaagttactggaccagaacccttggagctcacagccgggagacggacagcaggaatggcagctggagtaccagtttccccatatgggaagacccagccacacgggtcaagtggcgacaggcgtctgcgcgagacactggcgccggcctctccaacgccggacgtacaa

SEQ ID NO: 706744 - DNA, 402 bp, Homo sapiens
tcatcgaaaccctgctctaccaaaaatacaaaaattagctggtggtggtggtgggcacctgtaatcccagctactcaggaggctgaggcaggagaatcgcttgaacccgggagacggaggttgcagcaagccgagatcacgccattgcattccagcctgggcgacagagcaacactcagactcaaaaaaaaaaaaaccaaaaaacaaaaacaaaacaaacacacacacacaaaaacaccatttttttggggccggcacatgggctcacgcctgtattccccagcatttgggaaggcccagggggaagattcccctgagatcaggattttgagaccagcttggccaagtgggcaaacccttgtctctaactaaaaaacacaaaggggttccggatgaggggtc

SEQ ID NO: 706745 - DNA, 156 bp, Homo sapiens
atcgcatgcctatcatatagtaaaacccagcccatgacccctaacaaggggccctctcaagccctcctaatgacctcccggcctagccatgtgatttcacttccactccataacggtcctcatactagggcctacttaacccacaaaattaaccat

SEQ ID NO: 706746 - DNA, 720 bp, Homo sapiens
tctccgtccctactggcctttctcctcgtcttcatatttgtacggtacaagcaataaagacactcatttcagaccaggaaaaaaaaaaaaaaaaaaaaaaaaaaaaaaaaaaaaaaaaaaaaaaaaaaaaaaaaaaaaaaaaaaaaaacaaaaaaaaaaaacaaaagaggcaaaaaaaaaagacgacgagcaaggacaaaaacaaacaccagcccacagacacacaacatagacgcaggcacccaggaactgagaatacagaagagagacaacaacgaaagagagacaatagcaacaaataccacgccataggcgcgcaagctaaaaacgaactatggtacgagtcataaaagtgacgagagaaaagaggacagaagaacgacagggaaagaaaggacagcaacaacctacagagggacgcagatgcaacaaaagtagacgaagaagcaccccaagctcgaacacgaaatacgcacgcacaacagacggacggaagaaataaactgaaccaacaccaagccagagagtagtaagaggagctcagttacaacagcaaagagccgcaatcaagctcacacgagaccatccatcgacgctgccagcaaagcaaagacgactactctcatccgcagagggagaatacaaaagaaggcagcgacgagaattagaagagaaacaaagacgaaaagagaaggacagactcacatacccgatgagata

SEQ ID NO: 706747 - DNA, 282 bp, Homo sapiens
  misc_feature (270)..(270): n is a, c, g, or t
  misc_feature (272)..(272): n is a, c, g, or t
  misc_feature (280)..(280): n is a, c, g, or t
gaggacacatggacacagggaggggaacatcacacaccggggcctgttggggggtgaggggcccaggggagggacagcattaggacaaatacctaatgcatgcggggcttaaaacctagatgatgggttgataggtgcagcaaaccaccatgacacatgtatacctatgtaacaaacctgcatgttctgcacatgtatcccagagtgtaaagtaaaataaaaaaataaaaattaaacacaaataacatttctaataaaacacagcactananctgttctnac

SEQ ID NO: 706748 - DNA, 867 bp, Homo sapiens
aggtgggctgggacctacacctcagtgaaagccggagaatgtgggcacgaatgcggggctttgatgacccgcaaagggcgaggcatgcaggaggtggaggaattaagtgaaacagtggaatgtgttgttaaacagcaccgtgtgggcgaggccttaagggtcgtggtccttgtcttgggcgtgtggtcttttgggcgtcgacgatggcctggttcttgggtatgtgcgtgggctactactgtgggctggttgccttgcttgtgtgaaatgcctgccctgctgcgcttcttgcccatggcgcattggggcatctgtactctatgcctaccactccatgccctgttgggcctccatccctgtgccctctgctctgatgctgctgcctggacctggttcttgccttcttggacaatctttaccggttggagggagcaaagtcctgcacactggagtggtgtactagcggatcaagtatggacactgactcagactgaggagcagctccactgcactgtgtaccgaggagacaagagccaggctagcaggcccacacagacgagctggagtgcgtgcgcaagtaccttccagctagatgttaccctggctcaactgtatcaacacttggggtaccgtggacatccaaattccatgaggtggctcagaaattccaaggtgtgcgactgctgcgacaagaacccattgaatggctattcacatgtatctggtcctccaaaaaaaacattgccgcaatcactggcattggctgcagtgatgtgccaatggttaggacctcggttaaccaggttgatgatgtcccatacatggatacccagcatgaagcctggttgcaaaattgaggcacctcag

SEQ ID NO: 706749 - DNA, 554 bp, Homo sapiens
gttattgacttactgctggagtgaaggagtctaagtagtataaagaataatagtccttatcagatgtgtgtttcgcaactatgtactccatgtctgtggctcgtatattcattcccttgacgtagtcttttgcagagcagaaaattttaattttagtaaagtccatcttgtcacttatttctttcatagctcttgcctttggtgttgtgtctaaaaagatatcactatactcaaggtcatacagattttctcttgtgttttcttccaggagttttattttacatttaggcctgtgagccatttagagttaatttttgtgaacggtataaggtctatgcctagattcattgttttgcgtgtggatgttcatttgtttcaataccatttgttgaaaagaatattatttctccactgtattgtctttgctcctttgtcaaggatcagttgactatatttatgtactatatttatatacttattgggccctccactgttgcattgatttatatattatttcaacaatgcatactctcttattatagtagggggtccat

SEQ ID NO: 706750 - DNA, 736 bp, Homo sapiens
ggttaaatcacaggggcaggcccaggacaagcagtttggttattcccccttctgttggttgcccgaccggcagagggggctccatgtggcaggagctaggctcccaacgcccatggttcttgccacccttctgggcctcccaggctgggctccgataggctcctgtctcccctgccagtatagttaggcaatttcaggttgtgtgaggccgcagggataaatccaggtggctctgggctgggccctcttctcttcccagcggggaggtgctgttggcctggctgggctggcctgaatctgtttcaagttctcccttcctgcccagctcagttcaccagtgctggatccacggttcaacttgacggggacttggttttttacaacagcgttggcaagttggctctgtctccgtgggcagccattattcccagaacccacgtgggtttgaaggtttctgtgggcgtggagggaccccaaggttttccaagccagtggctgcacttggcagcaggcctcttgaagggaggcggaaagggtaggcgcggagagcaggctccattctgggtcgacttggaggcctggttcccaggttgagttcacaccagtgctcccagctggcggttgctcagtctctcctgctggtgcaaccgcggggggccggggctatgccatgctgctgttgcgaccagggggtgctctgggtgctcccgaatgctgtggttggtcgctgtgctcc

SEQ ID NO: 706751 - DNA, 302 bp, Homo sapiens
acccacgcgtccggagagggaccagaggggggagacagagccgcatgcagtggattgctccttgacgacgccagcctgagcttcttctccaccacccccgtgaggcttcctccttttactggccttccagctcctagggcagaccagagctaatcccatgtacaatgccgtgtccaacgcggaccttatgggtttcaagaattttctggaccatttgggagaaaaggtgcctttagaagatgaggtcgtgcccccacaagttctcagtgagccgtatgaggaggcaggggcttctctcagcc

SEQ ID NO: 706752 - DNA, 270 bp, Homo sapiens
ttttttttttttaagaaaaacccattcggtttggggggggggggaattcaatgggggtttggcggggcatttctctgataattaggaggtggcccattttttttatgtgggggggcggcttttttgccatcggaccttaaacaaaggggaaaaaaataggcatggggaaagggcctttttattaaaaaaagggggcgggaatggctggctttccatttccagaaaaataaaactgaccccctccttttcaccatataaaaaaattacctc

SEQ ID NO: 706753 - DNA, 458 bp, Homo sapiens
  misc_feature (51)..(51): n is a, c, g, or t
tgaaagtacggtaactgcagtagaagggaatgggggtacggtgagaatganaggttgtggcttgcataagcaaaagggatgccgtactttggtggggagaatacatgcatgaatgacgatacggaataccacagacgcgatagaagggccgaccagtgtgaggggggcatgacgcgtgaaatacaaaacaggagggaggcctgcaccttggaagaagtatgaagcagctaaaaaacgcgaggctagaaggcatactttaaataattaataataaggacttcgtgggcgatgaaaaacaattgcccgacagtaataacccgaatattgggagtattgatgcacagattatattttgcgacgacttaaacaataagaacctcctacacaggcgcagattgccccttacgttacataattctttgggcgcgttgaccgcgaaacctttgcataacactaac

SEQ ID NO: 706754 - DNA, 230 bp, Homo sapiens
  misc_feature (36)..(36): n is a, c, g, or t
  misc_feature (38)..(38): n is a, c, g, or t
  misc_feature (137)..(137): n is a, c, g, or t
  misc_feature (141)..(141): n is a, c, g, or t
  misc_feature (207)..(207): n is a, c, g, or t
  misc_feature (220)..(220): n is a, c, g, or t
cggcgatggaaccagcggagtagtcgagcgagttantntcagccgagggccgaaaccggtaaggtggcgctgttccagcgattgcggctcccgggtgctgcagacaggggatcgctctcttctctcgccgacagctnttcntaccctccatgagaaggaagacagctctgtctgacggtagcattcctgacggcgatctcctccagnaacactggctggntgaggacatg

SEQ ID NO: 706755 - DNA, 954 bp, Homo sapiens
  misc_feature (716)..(716): n is a, c, g, or t
caggcatctgggcctggagctgtccccgcgggggtagtggaggctccccggggaggggcgaaggtccctaccttggtgcatgcatctctgcacgctctgatgagacaccagctggcgctgcgggagcgcgtggctcacggtcctgtaatcctaacactttgggaggccgaagcggtcggattggttgagctcaaaagttatgagatgagcctgggcaagcattggtgaaatgcctgtctctaatgaaaacgttgagccaggcgtggtggttggtgctagtacgttcccagctactcaagtgaggctgtatgggcatggacgaattgcttgaacctgggagttggaagtttgcaggattgtagccgagtatggagcctacttgcgacgtctcatgcctggtggtggacaggagtcggtagacctcgtaaatcaggcgacaagataaatcactatatacaaaaatggaccctatagagaaaggggacaacacgcaggtaggtctcctcccaggtgcccgtagggttatccctccgtggggagaggcactggttggggcccaagggaatcatgccacattgtgtgtagacgtggcaccacagggtggtgagaaaatcctaccatcccaaaaaatatgcaggagaaaaccagattcatgcactgtcttcctcggctctgtgccaccctaggctctgcaaggacatctctgcgtggttgcnaactacccacggggagggattctaggtcccccatcatggggattccacctaggagagacacgggacaagttaaaccaatggtgtcccttcctagatacaagccgtagtgttaaagtgcctcgccaacggactcctggataggttctattagaacaccaagactcctcaccatagaacatgctaaccttctaaaagtggctcaatatgggtgcctgcaaaaggcaatccgcataacatg

SEQ ID NO: 706756 - DNA, 446 bp, Homo sapiens
ctgtatttttggcacagatgttctgatacagtatttacttcgaggatccctacagacaggctgagtgtctggagcattctggcctacatcttgtttcagacgttatagaggtcattgcttggatagctctgtagtcctgcccttatccatagtttcagagtcttggactattatcttctacgtcgtgactcaaaactacctgtcgaggtgagttcacataattaaccacaagcctagcacattctgctccccagtaggcctctgtctcactgttcaccctcaacattgaaggccacgtcagtgtgaggctgatagatggggtgactgctgccaccaagtacatctgcaacctttgctggctgtatataagatggccagaagaccttggggcaccccaaaacgtgtatccctcaatcagtagggctttccctctttcacttctaaca

SEQ ID NO: 706757 - DNA, 267 bp, Homo sapiens
gcccgtatagaggatcctctctgccccagatgtatgtgatcctgctcagcctcccaagtgctgggctacaggcgtgcacacgcgcagtaattttaatattttttttttgggtagagatggggttcactgtgttgcccaggtgttctcgaatcctgacctcaattgatccgcccacttcagcctcccaaagtgctgggattacaggcttgacccattgttcttggttgaatctggcatttctgatgggggttaagaatctgggaggga

SEQ ID NO: 706758 - DNA, 718 bp, Homo sapiens
ggatccatcgcgtttacacgagcaccggtggttaccatgaaccagattgtgcgaagcttctctcctgtcaacatgcggtcagctctcccgactagcgagatgctcactggagggatcggacagtgtgtctatagctggtgggctgcccgcaaccttgcatcccgcgacttacacccggtgtatccaattctcggtgcgtacactctccgtgctctgacttgtgttcgctctcggtgctctgttgcggtactaccctctgcatgattcctctctgcttgcctgtggcttccttggcgttcgctctactccgtgaagttgaggtgactggaggaagggttgctgatgtggtggggggtcccgtgtattattgccttccgtcgaccagtgtgcgcttgattcacttctggggccccctggatcctgggggcggtcttcatgcatgcgatatctcgtccgctgttactcgttccccatcaggtctggtcccgtccctgtgcccgtagtcgattgatcctagtcacgggtcatcgcttgcacgggcccagtgacggggttgttctcgtgagctgtgtatttcccattgatcatcatcctccactatgacgttccatcggatcttggcccgtacagcgcctggtacgctctgcgatgtcgtacgtggattcctcctttcgtgctacaggtacctacttcgtcggcctggtcacaggacctgtgc

SEQ ID NO: 706759 - DNA, 90 bp, Homo sapiens
tgcagtggatttaattatgaggctaaaactcaccctcatctttcctggaagaactaattaactatggtttattgtagggttttgtttgtt

SEQ ID NO: 706760 - DNA, 380 bp, Homo sapiens
gatcgcttgtaatatgtacgaagacggcagaacaatattaccatgagagatatgaaaacaaagagcaaatgcaccatgtatccagctacatcacacactacataaatgtgaaagagcttagcattacaatcaaagggttttttaaaatgacagctgcaactaatatctatccctaggaattcatactttagattcaaagacacaaacaacttaaaagttaaaggatgaaaaatgattatacaatacaaacagtaaccaagagagatggagcggcacatgttggcagagacagacagagagagagacccactgcctacaagataaagtctaaatcactttataatctggcctctccttttcagtttagtcttccactcatg

SEQ ID NO: 706761 - DNA, 453 bp, Homo sapiens
gtgtgatagaggatcccctcagcaccacggaggatggctacaatcagagaatatcaagtgttggtgaggatgtggagaaaataggatcctcataccctcataccctgcaggtgggaacagaaaacggtgcagccacttcggaagactcttgggagtgcctcagaaagtgaaagagagttgccatatgacccagtaattccagacataagcatatggaaatgaaaatgaacgtccacacaaacactggtacgtaatgttcacagtagcactactcctaacagccaagaggagacaacccaaatgcccatgaactgatgaatggataaacaatgtggactctccgtacatttggccataaaaaggaacgtacgtgctacaacatggttgaaccttgaaaacactatgccaagttcaagaagccagtcacaaaagaccacatcctccatggtgctg

SEQ ID NO: 706762 - DNA, 104 bp, Homo sapiens
tagtgaggcaggagatttgtttgaccccagcaggcagagatagcagtgagctgagatcgtgccattgcactctagcctgggccacaggggtgagattctgtctc

SEQ ID NO: 706763 - DNA, 310 bp, Homo sapiens
  misc_feature (50)..(50): n is a, c, g, or t
  misc_feature (62)..(62): n is a, c, g, or t
  misc_feature (128)..(128): n is a, c, g, or t
tcagcggtacacagcataaactattactataggcctgatataaggaatanagttgcaggcanaagggagagaagggaatagcaggaggaactagtccagagagaaaaaaaaaaatatgtgcaaaaccntggagatccaaaaggttgtggtgcttccagatggacaaaattaaggcctgtaaaaaagaaataaactagagatctctaaaagggaggatccttctggatcctttccaaaagtttcccctctcatccttaccatcgtaaaagcatttccccttgactctgcttttctttccacataccaatag

SEQ ID NO: 706764 - DNA, 325 bp, Homo sapiens
attccatttgggaacagaaaacggggggttttgggcaaagggccctggggccccccccctcctccctgggttgggtccccggtggctataggccctttcccttgggcccccccccaccggttgggggcccgcccccctgcccggctgggtttttcccccaacccccttttatgggggggggaaagggggggaggggggggggcccgcccccccccccgggctttggggggggcccgcccccctggggttttcccctccccggggggtttttcccccgcccctttgtttaaatccaacccggattaaacccccaggttttttttga

SEQ ID NO: 706765 - DNA, 344 bp, Homo sapiens
atacagtaaagtattagtatcagcaggaaacttcaagcatgaagaccagttggaactcaggatgaacagtgctagttgaaagccactgctctggatctagcctaggattctaacaattactagactagccaaccatcttagacagagtggatgaagtctggatactaaggtgggatgacaaaaaagatggccttatcactctccttcactatccttttgctttaggttgacacagctcattgtctaacaaaagccttccctggaacatccgtttcaatcctactctttgccttcaaatcacaactcagtcgtcacctctcagaaatacctgacccaacatcatt

SEQ ID NO: 706766 - DNA, 192 bp, Homo sapiens
  misc_feature (176)..(176): n is a, c, g, or t
gcggtgctctgacggctcccccctgacccgtccccactctgggaccacggtccccttgggggcccttgactgtcaaccttccgggccactggacggtcgccttccaccttggggccgacgacacaccgtccaccgtcgcccttcactcttgggacactttcctacccggggcgggngtacccgacgctcgac

SEQ ID NO: 706767 - DNA, 309 bp, Homo sapiens
tcagagcggtctccatcgctcagtgggttaaatatgcatcactaccttgagctgtagtgtaggtcacagatgcgtcttgaatgccacgttgctgtggcatagactggcagctgcttggacacatcctcacagagcaaggatgacagtatctagtaagtggagcatgaattagccatactgcagagcacacaggtttcatgttaacccacccgtctcttttatgaagatccggccttttctcttttagagtttggaaccttctgggagggctgctctggactctcctcctccccacacctgactattgct

SEQ ID NO: 706768 - DNA, 851 bp, Homo sapiens
  misc_feature (54)..(54): n is a, c, g, or t
  misc_feature (67)..(67): n is a, c, g, or t
  misc_feature (86)..(86): n is a, c, g, or t
  misc_feature (126)..(126): n is a, c, g, or t
  misc_feature (142)..(142): n is a, c, g, or t
  misc_feature (152)..(152): n is a, c, g, or t
  misc_feature (181)..(181): n is a, c, g, or t
  misc_feature (186)..(187): n is a, c, g, or t
  misc_feature (195)..(195): n is a, c, g, or t
  misc_feature (226)..(226): n is a, c, g, or t
  misc_feature (237)..(237): n is a, c, g, or t
  misc_feature (245)..(245): n is a, c, g, or t
  misc_feature (269)..(269): n is a, c, g, or t
  misc_feature (276)..(276): n is a, c, g, or t
  misc_feature (279)..(279): n is a, c, g, or t
  misc_feature (294)..(294): n is a, c, g, or t
  misc_feature (300)..(300): n is a, c, g, or t
  misc_feature (305)..(305): n is a, c, g, or t
  misc_feature (555)..(555): n is a, c, g, or t
  misc_feature (638)..(638): n is a, c, g, or t
  misc_feature (642)..(642): n is a, c, g, or t
  misc_feature (730)..(730): n is a, c, g, or t
gaagcctccgaacacgcacagaggaaggagccagctcccagcccactcatcgcngggctcatgattntttacaaattatgttttanttccaagtgtttctgtttcaaggaaggatgaaataagttntattgaaaatgtggtnactttatttnaaaatgatttttaacattatgagagactnctcannattctaantttgttggcccttgtgtgtgtgttttttttnttaaagttctncatcattnattacaatagtactcgcgcatcgncccctcnccngcacaatgcagcccncccacncactnccatggccctttgctcccccaggagggcatccctggggatgtggctggagcatgagccagctctgtcccaggatggtcccagcggatgctgccaggggcagtgaagtgtttaggtgaaggacaagtaggtaagaggacgccttcaggcaccacagataagcctgaaacagcctctccaagggttttcaccttagcaacaatgggagctgtgggagtgattttggccacactgtcacatttgttagaaccngtcttttgaaagaaaagtatttccaacttgtcacttgccagtcactccgttttgcaaaaggtggcccttcactgtccattccnaatngcccacacgtgctctctgctggattctaaattatgtgaattttgccatattaaatcttcctcatttatactattatttgttacgttcnatcagaatccccgaacctcctattaagcttagctgcccctttctgaggatgctgagaacggtgtctttctttataaatgccaatggctacccttttaccataaaattttgcaatgtgccca

SEQ ID NO: 706769 - DNA, 401 bp, Homo sapiens
atctgtctcaaaaaaaaaaaaaaaaaaattagccagctgtggtgcacatcctatatcccgtttctggagctcgtaggtatcaccgaaccagagtgaggtgtgtgaccgagacgtaccacgcactccagcctgggtaacagggtgagaccttgtctcaaaaagaaaaattacaataaaataaataaaataaaacggaaatgcatccctttcacaggattgagaaaggagaattcagtgagttagtgcaagtttttctgcttatctaacactgcataccaaacaattccaatatagtgatgaaaaaaaggtcactaggctgggcgtggtggctcatgcctgtaagcccagcactttgggagtccaagcggcgatcgcaaggccaggatggtctcgatgaacta

SEQ ID NO: 706770 - DNA, 668 bp, Homo sapiens
gagcagacgcaactgcgtctctgggcgcgggccgttggcgctcgagaggcagtgcaccgcgacctcaggtccccgaccacgtccctggcagccccgattatacagcctcagcagagcacggggcgggggcgaggggcccgccgggagggctgctactcttgagacctctgcgggctgctagcacgccccccttgctgggtgtgtcctcgctcgtccctccctccgtcttaggtcactgttttcaacctcgaataaaaactgcagacaaattccgaggcagcctcattgaccagacggaacccagactctgacaggttcggtccgcatcctcgtaccgtaatccgcaaggacccactgaccacgaagcccagtgaatactaacagaatcactttacagccgagccctcctgttcgctccggacaccatggacaagtttggtggcacgcagactggggactctgcctcgtgccgctgagcctggcgcagatcgatttgaatataacctgacgatttgcaggtgtattccacgtggagaaaaaatggtcgctatagcatctctcggatggaggccgctgaactctgcaaggctttcaatagcaccttgccacaatggcccagatggagaaagctctgagcatcggatttgagacctgcaggtatgggttca

SEQ ID NO: 706771 - DNA, 947 bp, Homo sapiens
agcggagcgccatggcggccggagtgtttcggctaacttggaggtactggccacgactgcatgcccgtgcacgccgaggtgatacctctcggcgtgtgacccatgtgtgctctgctgaccgacagatggatgtctgcactgtctaacgtgctagactatgctcagctttgtgggatacagcggagcgtttgtgagcatgcttggcgaggtaagccgttatagccgtagccaacatagccaagtcatttagcgagacggaaatcctgtaatgaatcagggccccatgtccggtagactagagtgaccacgtctggtgaggaacatcgggagtccacgcgagagacctctccaaggtcagtagaatgggtgtacagaatgcgtcccatcatgggccctcgctggttccagcatggtccctcctgtggacccccatgggtactactggctggcgagacctttgtctgcctcgatgtatgactggatgaacgcgagtttggcacttgtgctcctggaatcgcaaacttgggccttacatgggcaacctcagaggccctgctgtgtgctgcttggacgcccctggtcccttcaatggtgtccacagtgacctggctgctgacgccttggtgaaccttggtgcaaacgtggtcctgcaggtgactcgtgggtccagctggccgctcctggtcagggctgcgtgcaaccatggtccacccttggtatcacctcggacgaagctggtcgcacagagcgactcgattgcgaccaacacggggtgcgtcgccgatgcccctggaagtttcctggcaattccctaggcatgccaccaggggcattacgggcgacaactactgggtgttgcaatggatttgcagtggcgaagccccggtggtaccaggttgtgaaaagaggtggaactggcggctgcctggtgaagaaggaagacaccg

SEQ ID NO: 706772 - DNA, 359 bp, Homo sapiens
tgagcggccgccatggcagtaccttccgcgagctgcacctgctcatggccagtctggactgaggacagcagtgggcaggggcgctcggcacgcacagggcctggcctcagcccccactcctgttccttgtgcacccactggcccatgagcctctgcctggcccctgctgctatcctgtggccgtcctggaggaagtgatgctggtccctggccacatctacagcacagaactcttgagacaactatatacaacactagctgcccaaaaatgacaaactgttgattcttaaggacagcaaactgaacctaaacagataatgtaattaataagacaaaataaattaaatatataaaaaata

SEQ ID NO: 706773 - DNA, 371 bp, Homo sapiens
  misc_feature (5)..(5): n is a, c, g, or t
  misc_feature (39)..(39): n is a, c, g, or t
  misc_feature (163)..(163): n is a, c, g, or t
  misc_feature (275)..(275): n is a, c, g, or t
agttnggtccttctccttgaaacttgagggcctattccnggaagtttccctccctgcaccctgtctgcagatcccttttgcatggccctaaacttgtcatcctactgatggttttcccaaactgtggctcccccaaacaccccacccatcagaacccactggnggtgcctgttaaaaatggaagtccctccaagataagcaaaaaactgagggatttcattaccactagactggccttacaagaagtgctcaagggaatcctacatctgaaaagnaaaagacaataataactctcatgaaaacatgaaaaagtataaaagttactggtagaggagaaatagaaagaagaaagagaaaagaagcaaaactat

SEQ ID NO: 706774 - DNA, 1021 bp, Homo sapiens
ggagactgtacgtgagctgatggcgtaccgggttgcttgccggtgctggccgcgaccgggagagccggggcagagcagaggtgctcatcagcactgtaggcccggacgattgtagtggtacccgttcctgacccggactaaggtccctgtcttgcagctggatagcggaactacctcttctccactagtgcaatcatgccgatataattcataatagtacatctcggctgggagcaagatgacctccattaaccagtggctggaatgggaagacgacagagctgcagccagctttgtctagctgccctgtactattatagtcggtccaatggcaacgaagggggcacgatgtacttggattcaagtagcggaggagccctgactcacatatagaccacagtttagagtcgacagaactgaactttcctggactagggagagaacagaatactactagccgacatatgtacaagtcggggagccctatacgcattaactagcaaggatcaacgacctaacctccctgagagagctagagtagaccttgacacagataggttccagaacactcgaggtacaccacgggaaagccatagaccggcagagacatgacacgaaacacctagcataactggcagagcagaccaaggtgatccagagacaactacgagaccattaccaccacaacaaagcagacaccaggcccagaacaccgactaagcgaggaaacgcgcgcttggacaaccccaacataggcagacccgtggaagcgaagcggaagggccagcatagggcacgtaccccgcataattcgttgcaagggcagggacacgcaagtggggcaaacatagagagcataggacacacacatggcccagagcgggacaaaccaagcgggcccacatactaacacacggacactcgagagcccaccaagcagtacgagagcccaccccacacacaagacacagacaccaacagagtgatgagacccaagggaacgaaatcgacgccaagcaaa

SEQ ID NO: 706775 - DNA, 150 bp, Homo sapiens
tggcgcacgtacctggaccgttgggtagtgtggtctatggtgttacctgagattaggggatatcagttactgaaagcctcctattatggcccatacagctcctattgataggacatagtgcaagtgagctacaaggtagtacgtgtccgg

SEQ ID NO: 706776 - DNA, 123 bp, Homo sapiens
ggatgttacatcaactgttcgcaagccaatgcactgggcaccaggagaaatcggaacccagagccaaacctggctgactccataaccagatgaagactttcccctgaaggttatttctaatga

SEQ ID NO: 706777 - DNA, 201 bp, Homo sapiens
ggatgaccttgcccacagaccttggcagcgcagttagaggcagggatgatgttcttggagagccccgcgcccatcaaggccacaatttcccggaggcccattccacaatcttcttgggtggcagtgatggcatggactgtggtcaagagtccttccaagataccaaagttgtcatggatgaccttggccaggggtcctaag

SEQ ID NO: 706778 - DNA, 309 bp, Homo sapiens
ttggcgaactgagttccctatctgtgcgggtggctaatctgtagcgtcagagggaaagatttgtgcaagtaattgtcacacagaagaaagtcctcacaaattatcggattccagtcacattgactcacttattcaagataactaaaaacattggttgtgtgatgaccggaatgacagcctgacagcagatcccatgctccagagggcacgctatgaggcagctaactgtcaatactagtttagctattagattcctgtgcacatgctgtgtaagagaattgccgatatttctcaggtctagacacagat

SEQ ID NO: 706779 - DNA, 868 bp, Homo sapiens
  misc_feature (283)..(283): n is a, c, g, or t
  misc_feature (289)..(289): n is a, c, g, or t
  misc_feature (311)..(311): n is a, c, g, or t
  misc_feature (317)..(317): n is a, c, g, or t
  misc_feature (325)..(325): n is a, c, g, or t
  misc_feature (329)..(329): n is a, c, g, or t
  misc_feature (332)..(332): n is a, c, g, or t
  misc_feature (338)..(338): n is a, c, g, or t
  misc_feature (340)..(340): n is a, c, g, or t
  misc_feature (346)..(346): n is a, c, g, or t
  misc_feature (379)..(379): n is a, c, g, or t
  misc_feature (382)..(382): n is a, c, g, or t
  misc_feature (387)..(387): n is a, c, g, or t
  misc_feature (412)..(412): n is a, c, g, or t
  misc_feature (437)..(437): n is a, c, g, or t
  misc_feature (453)..(453): n is a, c, g, or t
  misc_feature (866)..(866): n is a, c, g, or t
gaaccccgaacgtggtcggttggagcaaatatgtccctccggaggcacattgggaaccctgagtatctgatgaaaaggataccacagaacccaagataccagcatatcaaatcaagactggacactggtaacagtatgactaaatatactgagaagctcgaagagattaagaaaaattatagatacaaaaaagatgagcttttcaagagactaaaagttacaacttttgcccagctgatcatccaagttgcttccctctctgatcaaacacctggaagtacangctganggaaaattcaaacggctggaancaaatntttttcancctnacncccctntntgcctnaaccacctgccaagaccaaatgggaaaggaaancanggtgngcatgctccggggcccttgacgcangttcaataacaaccgcacggcgcanggggactccaagccgnctcaacatcttcaagaagtgtcatcaagtgggtgttgggggaactggaatctagacaaaagggccaagtgaagaaagcagagccccaataccaaagacaaacccttatcctgactgccccttcctgctgctagatgtgcgtgatagagattcttaccagcagtgccacattgttggagcttacagttacccaattgcaactctgtctagaacaatgaacccttattcaaatgatattcttgaatataaaaatgcccatggcaagatcatcattctgtatgacgatgatgaaaggctggccagtcaggcggccaccaccatgtgcgagcgtggatttgaaacctcttcatgctttccggaggtctaaaagtcttagctcagaaattcccgggaagacttgattctggttccctnca

SEQ ID NO: 706780 - DNA, 211 bp, Homo sapiens
gcaattgttgtagcgacacgggcttcacggcgttacactcacttttgtgggtccaagtttctcctaattttgggttctatccccgccccatatttagttccgcttacaatccccaactacgcctggggttgaaacccccccctagtaggcctttttaaaagtgggttcaaaaatttttgaatttccatttttttgaggggggccccaaaaa

SEQ ID NO: 706781 - DNA, 198 bp, Homo sapiens
aaggatctcctgctgctccctcttcatccagctttcgctgtagctcctccacttttcgggtaagctcaccctggcctgccacggccttagtagaaaccagaaagaaaccatacactagaaggctgcaatcttctccaggcaacaaactaacccttctcctcacagaggtttcactttcttgagcttccctccctcagg

SEQ ID NO: 706782 - DNA, 677 bp, Homo sapiens
gcctcccgagccgctgaacttttcctggaggcggctggcctcgtgctgcctgctgggtccctggggttcgctgggccctgattgctgccgtttccccgctgcagagctcgccgtgcgccccgacgggccccgtgatgcagctggtgcccctgtgccgagcctggactcagcctggagctccagctagccacatgcaccttacctgggttccgcctggtccctgagtccccacaaaatggctgatggaggaagccccttcctaggtcggagggactttgtctacccttcctcaagccgagacctagtgcctctaacggagggggcagccagcaggagggacagagacgaagagaaaggcgcaggtcaagttttgacttccaggcgcagtcccccaaggagctgatcttgagacgggtgacattgtctacatccacaaggaggtggacaagaacttggctggagggagagcacacggcctgcctgggcaatcttccctgctaattatgtggaggttgcttgccgcacgatgagatccctaagccccatcaagcccccgactaacaggtgctgcagtatggagaggtgtggaccagtacaccttcgagggggacctggaggtggagctgacttcggcaagggaagagcacatctgcttgatcgaaggttgacgagactga

SEQ ID NO: 706783 - DNA, 149 bp, Homo sapiens
cccccccttttttttttagggggggggggttagggccggccccctccttctctttcaaaaacatgtatggtaaaaagaaaaaggacccgccccaccaaaagatcataagccccctgcccccaaaacaataaagaaaaaaggatttttca

SEQ ID NO: 706784 - DNA, 876 bp, Homo sapiens
  misc_feature (377)..(377): n is a, c, g, or t
  misc_feature (864)..(864): n is a, c, g, or t
agcgggttttataatactgtatttgaatctctatttaatttttttgtggaaagatgtgtgcaggatgccagcatgatatacagaccaactttggggaatgcctgtgttctaaaaaaaaaaaaaaaaaaaaaaaaaaaggcaagatggggctggggcattgcgtggactcacacctggtggtctcacgcagtttgtggagggccgaggcaggcaagatcacttgagggccagaatgttcgagaccaaggcggtgccaaccatgtgcaaaacaccatctctactaaaaatataaaaattacgccagggcagtgtgtacacgcttggtcatcccagttatttgggaaagaggctgagggcacaaagaattggcgttggancccggggagggcggagagggttacacttggaggccaaagatttgtgcgcactgggatgtctaggccccagggcaaaaaaggcgggaccatgtctcaaaaaaactaaaaacggcaaagatttcggtgttttcccctttgaaacctgcgtgacgacttgaacttgtttttttcggaacaccattttcatcacttgtggtgcatagggtttccccttttgcttagatccgtggtacttgcgggttgaataataaacttccgtggggggagaggtatttatccccttgttaacctaacttgtgatcgtgcacatcacctcttttcaacgcatcttttcttcaaagctcctgacaaagttctgcttgcacatccttggttggcttacactgggttttcctcaggcgggatgcccttcctgagaaaggctcttgggaagatgaatcccattgaccctttttacatatttgtgtgggaagcccgcccttttgcncggtcgttggtg

SEQ ID NO: 706785 - DNA, 952 bp, Homo sapiens
  misc_feature (484)..(484): n is a, c, g, or t
  misc_feature (805)..(805): n is a, c, g, or t
  misc_feature (821)..(821): n is a, c, g, or t
  misc_feature (950)..(950): n is a, c, g, or t
agcggggaagcggcggcgggagcttccgggagggcggctcgcaggcaccatgactcctgtgaggatgcagcactccctggcaggtcagacctatgccgtgcccctcatccagccagacctgcggcgagaggaggccgtccagcagatggcggatgccctgcagtacctgcagaaggtctctggagacatcttcagcaggatctcccagcgggtagagcagagccggagccaggtgcaggccattggagagaaggtctccttggcccaggccaagattgagaagatcaagggcagcaagaaggccatcaaggtgttctccagtgccaagtaccctgctccagagcgcctgcaggaatatggctccatcttcacgggcgcccaggaccctggcctgcagagacgcccccgccacaggatccagagcaagcaccgccccctggacgagcgggccctgcaggagaagctgaagtactttcctgtgtgngtgagcaccaagccggagcccgaggacgatgcagaagagggacttgggggtcttcccagcaacatcagctctgtcagctccttgctgctcttcaacaccaccgagaacctgtacaagaagtatgtcttcctggaccccctggctggtgctgtaacaaagacccatgtgatgctgggggcagagacagaggagaagctgtttgatgcccccttgtccatcagcaagagagagcagctggaacagcaggtcccagagaactacttctatgtgccagactgggccaggtgcctgagattgatgttccgtcctacctgcctgacntgcccggcattgccancgacctcatgtacagtgcgacctgggcccggattgcccctctgcccctggcaccattccagaactgcccaccttccacactgaggtagccgagcctctcaaggcagacctacaagatggggtactaacncc

SEQ ID NO: 706786 - DNA, 332 bp, Homo sapiens
agtccaccttttacccggtcatgggaaatggttcattaaaccactgctcgaaggtgctacatctcttgaagatggtggacagcaggaagttgagcaacgcccagagctcgggaagcttgtgctgcaacggtgtgcccgtaagcggcaggcggcagggtggccatatagtgcgtgttgagcccctgtgtcagcttgcatgtgcggttcttcatgcggtgaaccgtcgtccacaatcatatacgtccaacggatcttggcgaggatgtgctagtctttgatgatgtacacgtacgtacgtcagcaagacgttgaacttcccaactccgaaactg

SEQ ID NO: 706787 - DNA, 840 bp, Homo sapiens
  misc_feature (372)..(372): n is a, c, g, or t
  misc_feature (693)..(693): n is a, c, g, or t
  misc_feature (709)..(709): n is a, c, g, or t
  misc_feature (838)..(838): n is a, c, g, or t
agcggggaagcggcggcgggagcttccgggagggcggctcgcaggcaccatgactcctgtgaggatgcagcactccctggcaggtcagacctatgccgtgcccctcatccagccagacctgcggcgagaggaggccgtccagcagatggcggatgccctgcagtacctgcagaaggtctctggagacatcttcagcaggtgttctccagtgccaagtaccctgctccagagcgcctgcaggaatatggctccatcttcacgggcgcccaggaccctggcctgcagagacgcccccgccacaggatccagagcaagcaccgccccctggacgagcgggccctgcaggagaagctgaagtactttcctgtgtgngtgagcaccaagccggagcccgaggacgatgcagaagagggacttgggggtcttcccagcaacatcagctctgtcagctccttgctgctcttcaacaccaccgagaacctgtacaagaagtatgtcttcctggaccccctggctggtgctgtaacaaagacccatgtgatgctgggggcagagacagaggagaagctgtttgatgcccccttgtccatcagcaagagagagcagctggaacagcaggtcccagagaactacttctatgtgccagactgggccaggtgcctgagattgatgttccgtcctacctgcctgacntgcccggcattgccancgacctcatgtacagtgcgacctgggcccggattgcccctctgcccctggcaccattccagaactgcccaccttccacactgaggtagccgagcctctcaaggcagacctacaagatggggtactaacncc

SEQ ID NO: 706788 - DNA, 280 bp, Homo sapiens
gctcgacttttttttttttcttcttcttcttctttttcttcctcttcttcttcctcttcttcttcttcttcttcttcttcattattattattattattgacatttcatgaaatatctttaatagcttcatcaaggacaaatttatatatctatgccaacgtaaaatacttctttcctaaacttatacactatttcataaataaaatattgtttatttaatacacaatataaactacaatgtattaaatgggccactttataaatggaaaatagtcgacgc

SEQ ID NO: 706789 - DNA, 319 bp, Homo sapiens
ccgtccgtgttttcaggagtggttgaggacacagggcccccagcccagccctttgcaccccccagcccggccatttgcgccccccagcccctttggagcttttttcttgtcctctccccccttccccaaagtttttgcccaaaacttccttttgaaagggtttttttcattttccatacctcccccaagctctcctccagccccttcccagggctcagccctgctgtcctgagcgtctcctgggccaaaaaaaggaaatgggggtgggagggcctgagtttatgttgggtttttcctcccataaattggggttttctta

SEQ ID NO: 706790 - DNA, 593 bp, Homo sapiens
  misc_feature (204)..(204): n is a, c, g, or t
  misc_feature (206)..(206): n is a, c, g, or t
gccatgaaccccgaatatgactacctgtttaaggctgctttcgattggcgactcaggcgtgggctcgtcatgcctgctcctgcggttggctggatgacatcgtacacagacgagcgtacgatcgagcgaccgatcggggtgcgacttcgaacgagtccgacagccatcgcaggctcgggaatggccacagagactactcgaaancntgtcgagagtcgtgggaccacaggcgcggcccagtgagacgggttccagcgtaccatcgactatccatgcgctacgtaaccggtgagggtcctcagtggcacatcattacggtgggaatggtgactgcacgatcagcgtgaaccacggtgaagtccctagcggcacaagcgatgaaaggcagctggactgacaggcgacgattgcacctgcatactagccatggcgggatgcacaccggtcgaagtgaaggccatccgtgtgcgtggtgcaaagcatacgtatgccgaaccgtctaaccatcgcagatgatacggatgagctgggaccaaagcaccccacgagcctcgaacggaatggttatggctagatcgtcgtgcttggtgcat

SEQ ID NO: 706791 - DNA, 201 bp, Homo sapiens
tactagttcacagaaagaccttttttaatatgaaaagagaaaaacattttgaagcccccacaattgtgggtgtaccaacataatttcaagtaaagggaatgtgattaaaacattttgatttcacaaagcctttcagagggggtttcgacaaacgcaaagcgacccaaaccctggggggtcacatccgggttgctacaaacc

SEQ ID NO: 706792 - DNA, 496 bp, Homo sapiens
agctctttcagggaagggcaggaggtggtccccagattggccccatctgggtgccccgtgggccctgccccaccctccagggggccccaggggcctccccttttctttggcacgccaattgggtggtagtgggaggttgtgccttgaggccccttaaaactccctcttttaaaggccctctcaggaaaaaaaacccggccccggggccggccggggggggttcccggttggccctaaccttttttttttttttttttaaaaaaaaaaaacctttaaaaaacccccccttaaaaccaaacctttttgggtttttgaccaagggattttccaaatttggttggggttttgttttgaaggttagggaatttttccccccataaagccccccgttttttgcccctcttatttttatgtttggggtttgggggggggccggggttttttttttttttttttaaggggggggggcccaaaggaaataaacccggggctgtta

SEQ ID NO: 706793 - DNA, 841 bp, Homo sapiens
gtaaatggtgggacaagcaaagctcatttttttttcttttttctgatcaattggaagtttatttgccaaggttaaggacaatgcctaaaagagaagtctgagcctttctctaaggatgatttagacggcttcgatatttgaaggggaaaagcaggatggaggtgaatgaagaatggtatggccacattactgaatctacaaggtgcaggacaaaaggagcagctagggcaatagtcaattatgtatttttctggagctcagtaaactgacactttacataagataagatgaacatagagtagctacctgtggggatatttaaccttctgcctgtagctatctgcttaggaacaaaaggaaaggcggattcttgtacgactcagctttcagcttttttttttttcccttgggcagagtgaatgggggtccaagcttaatttccctttggagacagaattattacccggtggatcgccggagatcagaaaatttcgggccgcagttccattgacctttcaaagggaactttcaaatagttgcagaaagctagggatttgataagaccctgaaaatttccgggtgtggtaacgcgcctaagaccagttggcccaacttgtggttgttccgcctaggtttcctagggttccctaggggtcttatttctctcttcctctttcccacttctttcggaggagaggtcccattttgggccgcgtgtttagcctggcgagacctctggctcgtccagtgtgtccggggcgcgttccgcttttttatccacccgggttccacgtttggtggggcgcgaaagtcgatagggggccctctgggggcggttcta

SEQ ID NO: 706794 - DNA, 955 bp, Homo sapiens
atggaaataccacctgtagagcttcccccagaagaacctccaagactatctgtcacgctaatagccgatgagttatgaacttctgccttataaaaagatgacaggcgaacagagaaggctacacgacagtatgatgaagaggacgaggattgaacgatgcactcagggggcgaatcaagtactcaggaacgaaatgatagatggacacatacatggacatctagcacgatgcctctctatgtgtcattcagtcgttgcatcttgcttacataggctggatagctgagatcctatgtcagtgtgctgttgagttagctgtcggaatataacgtaactagaaaatcgatagcttgtccgtcgacaatgtctctagcatgcgtgtcattgcgctgtctggtaaaaacggcagctacgcgtagtatgtagctagacgccaggacagactccgagtactagtgacaactcattcggtcacacactgcatgggaccagaggttaccataatctatactgaagggaccgctaagaagccacttagtaaggctcaccgttagttattgactctactactaagttgcgttaaccacacaatttggtccccacacttggtggtagcggcgatcggaccaggagagctccttttgacgcgaaatacgtataagcactgtttttggtcatgcttaacacaatgctccgtctatgtgccctatatgtaacccgatatcgtatcaattcatatattatcccaagattacaatttaaacactgtctgctccaaacttttttccaattcctatctcgcacgcgcggacaaacctcggacttctacgcaactgcggggtctcgtcggttccgatgtttcccttggacctgcggaggcaaacacacctggcaaaccacccaagggggcacctccaagacacgactggactccttaaaccaagtttccagcagg

SEQ ID NO: 706795 - DNA, 138 bp, Homo sapiens
ggcgatctagaggacccaagtcaaaagcagagctcatatagccagaatagctttgtgatgcttgtccatagccttggctgcctggatttccataggtagaataactttgctgctcacccccagtacaagaaccacacg

SEQ ID NO: 706796 - DNA, 161 bp, Homo sapiens
tagaggatcccgtcccaagatagatgaattgcacagtgaggcaaaactaataataacttgtatatgaagaacactaaaagaagtcaaaaagagagataaacattcatacaaaaaactatattttcctctatcatctctagaaaagaaatgcacaccaattc

SEQ ID NO: 706797 - DNA, 110 bp, Homo sapiens
agacgactccctgccgtcgtgtatactcctccagccgacagcagcagaatgtggcccaggcggtgccacgcttgcaagggggaggggctgagcgtgacgggcaccgtgta

SEQ ID NO: 706798 - DNA, 1440 bp, Homo sapiens
gaacgctgtcgggggtgcctaaagatagggtgttaatgatcgaaggagaggacggaggaccttgagtcgaacagggagttgcctattatgaatactacttatgtgagataagaagataatgatatacaaaatattcaaaaaaaataatagttcctaatatagtgtctttatacaataactatgtatatgtgtcaagaggtgattatataaagtagtctctagttgaggactttatttgatgttatactatgcataactcttggcaagaacttgtgattgagaagagctagtctatgcagtgaagagactgatcatgcaattgtggttttctctatacatgatcgatgagctggcgcatggaagattgtcattcatgtgttgtatacatagtgtattaaatatgtacatattgtaggaagagaatcgtaatggtggaactaagttaaaatttcattcccatttcaaagatgaggagcatgtgcctctaggaagaatttaaacccatgtaggggtgtacctctgatatcggcagggtacatagggtctgagttcttagaaaactttggtaccgatggagttaccccttaaattcatgctgaagctgtagacttattctatacctaccgtagaatagaagggccgtagggattgacttgagacacgcaagctttgtacaactttaccaattgatgcggcaagtggaaagaaaccattggccttttgcgggtgtttagaaggatgcttagccattaagtggggaaatgttaacttaatgagggacaggaggggacattaattgagaaccaaggaatagatgttcggcgacaagtgggagatatgggattaggaataacaatattattgggtaggaaaggaaagttcaaaggtttttggaaagaatgggaaatattttggaaactcacgcaggaaagctcactggaggaaagcgtgtaatgaaaaaagaactttagaagaaaagtagtcagggggaaatattaacacacgtggatagaataaaaaatccgtgttttacggacaagaaagagctatcagcgtatattttacaaagactttgtcaaaagagtaggagaagcagaaaaagcaacaaagaaagaaacaagattggtggagacgaagaaatggctaccgggacaagaatggtttacaaaataacaaaatgaataatttgggcaagatgagagcacccaagtaatatataatgtgcaaagagtagtagtcacgaagaaggtataccagaaatgaaaatgtggagaatagagataaaagacaaggtattgtggcaacgtatataaaaatatgaaaggaatgagaagcgaacaagtatgaaagaagatacaacaatgaatagatgttggtgcaagagaggataagtagagagagaggaagaaagaacataataatgaccacagagagaaaggt

SEQ ID NO: 706799 - DNA, 1221 bp, Homo sapiens
agctggtaagccagtcagagtgatacgcagttttaaagggaggaagcatccagccaacatatgctcctgcaagcaaggcccaccagcatcatgcatggcgatttcatcacaggtggtgcaacatcactggcccagcagatttccatccaagcccagtggcattcattgcgtttggccgctcagtctttgtcaagcacagcagcatgcatgtttgcaaccgtgcgtccattggcacctcatgcacaggcacatcagcacactggtccacaggagcattcatgtcttcacagattatcacatggtcatcccagcaagggtttcagcccttatcgagcatcacacagcacagaggcacagcacagcccttcaaccagggcaccaagttcacacagcacagcgcagcgcccagatggtgaaacaccaccacacacacagggcgctacatctctccacgcatcgcatgcacgtgggtccccacaggtgcccctcccaaaaggtgtgggcacccacacagcccagtccgcagcaattcccatgcgcaagcccaaggccacacttggacatgtggctttcgctcgacaacgttcaaagcatacgccttccgaaacgcaaagaaacacacattcgtccccatccgagccagcaacacggatttgggttcgcaaaaagaggcgcaggcaacaggccttaggtttggaggtgctattcgtcaacaggttgggccatatattcacaacgctatttccattatggattgggaggcaacaggggcacagccgaagagaatggttataaccattgggcacagacaagaaatttgtggggagaaaacgacaatatacagtatagtgttcaattcgggtatggcagggttcttattggccgtaggggttcccgagggggaaaggcgtgaaaggtgattgaacacccaaagaccacctctggatgggaataccagaaccatttgcacagagattgagccttctcccccaattacaacaacgttagagtttcatatgagtataagaccagaacgttctgcgcgccctataaccaaagtggcagggcccttcacccgtcatttcaacgcacggtagccaacaaacgggcaggtttctagaccattccctcatttgtgacacgctatggagcaaatgggacccggtggcagcacagtttgtgcaagtccctttcgtagggaccccaagcgacaaaggtgtg

SEQ ID NO: 706800 - DNA, 452 bp, Homo sapiens
  misc_feature (151)..(151): n is a, c, g, or t
ccgaactcatcaacgaaacgcatggttactctccgttttcatatgatcgacgacgaatcgaaagcctgtatttcatcggaatagctgctcccgagcttctgaacggccgcgagcgtgagaacgcctcggtctcgtcgatcttcgccatggnaatccgacatggaccagaacccagtcgtcgggttcgggcatgtccttttccagcagtcggacactgatgatccggcgtacgcactgacgtcgaccttcgccaaatagttttcagcatcagttatctcgatgatttgaccaggaattccaaggcacattttcttcacaccactttcttcagcagatacgtgggcagcgggttcgccgacgagcatgttccacgatggcgggttaccccgaaaggcgttcccgcaccacggacccttcgcggccggtttcttggcaattttaacgattttggc

SEQ ID NO: 706801 - DNA, 397 bp, Homo sapiens
  misc_feature (100)..(101): n is a, c, g, or t
ccttctcccggttttgggggcccttgttggggggggggaatttttttctccaaggggggacccccccttttttttttttacccctttttttggggaaaanngcctttttaaagggggggggcctttttttttgtttaaccccccctggggggggtggggggttttttttttttttttttcccccggaaaaagtgtgtttttgggggggggggaaatttacctttttttttttccccccagggggggtttgcctttcccttttgggggggggggccctttaggggccgaaatttttttttcccttttttgggcccccccaattaaggggggattttttccttttccctttccccttttcccaaaaaaaaggggggggggggggtttttttttttttta

SEQ ID NO: 706802 - DNA, 1267 bp, Homo sapiens
tctgcgcggctccttctttctgtgtctcgttttgtcgctttttctctgtctctttttcttttcctttctcctttctctctcttctttctttctcttgtttgcctctttttcttgtgcttgtcgtcttcttgcttctgctgcttgtcgttgttctttcgtgcttcgcttttcttcttccggttcttcgtttttgcgttcgtttcgtattcttcgcttgtgcttcttttcctctctcttcttgcttttgtctttcgctcgtttcttctctctcttctctggtttttcttttactttttttttcttgttctcttgtttctctctggtgtcttcgtctttttcctcttggtgtctgctctgtgctgctgtgctttgcttgttcttcttttctgtcctgtggtgttctcgtttctgtgctttgtttctctttcttttcgctcgctcggtctttccatgttctgtttgtcgtcttttcctgctttcctattttttctgttttttgtttctctgttgttcttttctcctttgtcttctttcctttctggtcttgcctccttttctgtcctctcgttgctttctcttctcgctctgtgtttgttgtttctcgctagtctgtcgtcttgtttttatttcatgtgcttcgtttcctccgtgtttttcgtgtcgttgtcttttgttgcgtggtgtgttgccttcttttctgtgtcgtttttttttcttttctttttttctttgttctgtgctgttgtgcgtttctggcgtgggctttgtatcttctgcgattgggtggtgtttctgtcttccttgctctattctccttttttctctttggtcatctggcctctggtctctcctgtctcgcttgccctgtgtgtctcgctatctctctgtgttcctatttgatgcatgcccttcttgtaagagtccattgtgtgcccctcaccgtttactcagcaccctgagtattcttggatgcctcatcctgccattgccacggagtcatctggaccatgtgtcattcctgagatatcgctgtcacatctatcagtcagtgtcgtgttgcctctctcgggcccttgggtcctgggaatgctgtctgtcttcaacccctagagccataacgaatggcagccgtttcttaacatgttgagagatgattctttcctggcctggccatctcgggaagcttgatccccaactcctggaaggaattaactctcctggttgctgagtttggtggggaagggaagggtactatagatgttactcg

SEQ ID NO: 706803 - DNA, 412 bp, Homo sapiens
gcaatgttaaaaagtagattgaaagcagaattaaggattggccaaagacaaagctggttttagggaaatgagtgagccactgacaaagccaaaagttaagttttgatgatctaaaaagattccccattggcccgatgtgggtggctcatgcctgtaatcctagcactttgggaggccaagacaggtggatcccctgagatcaggagttcgagaccagcctggccaacatggcaaaaccctgtatttactaaaaatacaaaaattagccgggcatggtggcacatgcctgtaatcccagctactcgggaggctgagacaggagaatcacttgaacccaggaggcagaagttgcagtgagccaagatcacgcccctatactccagcctgggcgacagagcaagactctatctca

SEQ ID NO: 706804 - DNA, 108 bp, Homo sapiens
catggtacgaagctatgcagaggggtcaacgatagatatgggagaggctaattgcctattgctatacttgtcggtctgttcctattactgctgtgacttacttgtacg

SEQ ID NO: 706805 - DNA, 530 bp, Homo sapiens
  misc_feature (13)..(13): n is a, c, g, or t
  misc_feature (139)..(139): n is a, c, g, or t
  misc_feature (156)..(157): n is a, c, g, or t
  misc_feature (159)..(160): n is a, c, g, or t
tcctgcgcacgtnggctcgggggcgccgtggagctcccgaagcgatcgtgggattcagaaacctctcccgggactcccatgggaggaggctgaacccgggccggcacgcgatcgcgggatgggctggagttgtaggaangccctaggccggggccnncnncggggcactggctgcttctgtgttgcaggcgccgcacgggttcgtccgcttacacagaattgtattaaattgtctttttatttccccacccaggaaatgaaccacatcccccaacgactagacggaagcacgcacaagctccttcctcccgaggagcgtttccagtgacttgagcttggttggcccaggtcatttgactagaagctttgtctgcgtgcactgagtgaggatccggccctactgtgtgtatccctactgcgtgctcctggacctgttgggtttgactcttgatttgctgtttttgggtattcactggctgaggacagtggctgtgttcagtggctgtaaataaatggagcttgaactcaaa

SEQ ID NO: 706806 - DNA, 102 bp, Homo sapiens
gcggccgcctactactactactgctgctataataccttctaataacgatctgcgacgacctggacttgatgacccaaactgaaagaaccatgcatgtggggc

SEQ ID NO: 706807 - DNA, 365 bp, Homo sapiens
gtcgacgcacaatgtatgctgtttaattccaagagcagacaccgagagggagttcatttctatggaagcacagatttgagagagatttctaatctgcgaagctatgagtgctgtttttttgtttgttttttgtttttgtttttttttgggggttttttttgagacaaggtttctctgtgtagtcctggctgtcctggaactcactctgtagactaggctggcctcgaactcagaaatctgcctacctccgctccctctgggattaaaggcatgagccaccactggccggcctatggtttgttgttgttgttgttgttgttgttgttcttcttcctcttcttctccttctccttctcctgtcgacg

SEQ ID NO: 706808 - DNA, 223 bp, Homo sapiens
  misc_feature (213)..(213): n is a, c, g, or t
tcgctatactcggcacctcaggtggagcgatcttgggaagaagaaaaagtcttagcattaaaaagcctatattatatgctagaatctattccaattacatctcatgcattactatggttcctcgctagcttatcatacgccagttgctatcattaggtgctgaaattatgaggggcgagttacagacgtgaccttgatccctgtacctcacangcgttcacaa

SEQ ID NO: 706809 - DNA, 147 bp, Homo sapiens
tgatctacgcatccttataacagagtgtgcgattggcatcagtaatcgctgatcagtcttttacgtctctcccccaagagatttttattagatattgcaaggcaaagaaatcaaacccctttgccattgagtcaagccatattcagg

SEQ ID NO: 706810 - DNA, 3795 bp, Homo sapiens
  misc_feature (240)..(240): n is a, c, g, or t
  misc_feature (2452)..(2452): n is a, c, g, or t
  misc_feature (2509)..(2509): n is a, c, g, or t
  misc_feature (3728)..(3728): n is a, c, g, or t
  misc_feature (3731)..(3731): n is a, c, g, or t
agccgcctcgcgcccggtcccgcggtcgcagctccagccgcctcctccgcgcagccgccgcctcagctgctcgctctgtgggtcggtcctctccggcacttgggctccagtcgcgccctccaagcccttcaggccgccccagtgtcctcctccttctccggccagacccagccccgcgaagatggtggaccgcgagcaactggtgcagaaagcccggctggccgagcaggcggagcgctncgacgacatggccgcggccatgaagaacgtgacagagctgaatgagccactgtcgaatgaggaacgaaaccttctgtctgtggcctacaagaacgttgtgggggcacgccgctcttcctggagggtcatcagtagcattgagcagaagacatctgcagacggcaatgagaagaagattgagatggtccgtgcgtaccgggagaagatagagaaggagttggaggctgtgtgccaggatgtgctgagcctgctggataactacctgatcaagaattgcagcgagacccagtacgagagcaaagtgttctacctgaagatgaaaggggactactaccgctacctggctgaagtggccaccggagagaaaagggcgacggtggtggagtcctccgagaaggcctacagcgaagcccacgagatcagcaaagagcacatgcagcccacccaccccatccgattaggcctggctcttaactactccgtcttctactatgagatccagaacgccccagagcaagcgtgccacttggccaagaccgcgttcgacgacgccatcgccgagcttgacaccctcaacgaggactcctacaaggactccacgctcatcatgcagctcctccgcgacaacctcacgctctggacgagcgaccagcaggacgacgatggcggcgaaggcaacaattaaggccccaggggaactggcagcgcacgcggatgctactactgcagtctttatttttttcccatgagttgggggtcgggtgggggagggaaagggagggatgaccttcccagggagaaacccacgacctgtcctgtctttgatcgcctctttgacatttttgccaaaataccactagtggaaagtcaggctagctgtgctggtattggaatagcagcctcacactggcgtctggactgttctgtagattcatgcaagtggagctgtctgtctctaatttaacttattgctagataatagggttttcagatgaaaagaaaacttaaagaggaatggccctcattcagtaagttctgtggttccagtaaggatttttatgtacatacgctctcgtctctcgttttgggtactttctatctcatctgtctcggctctgcatgttttccagggtgtagcctacagacatggaacagtgtaaatcccagactgacagacttagaacctgaggtctcattcatccttatggtttaggccttgccagttttccgaagtctctgattagttgacagtattaacactaaattgcagtttacagtatttctacattacagccatatgtaacatcaagccatcgattgtgtacttttcctttgctagttgtttgggctttaacatccttattcagccttatccaggttggttttgctgttgatcggtctcctaggctaaatgagaatgaaagcgacttcaggtttttggttcataggtgctcggcaggtggctgtgggattttttttttttggtccttctttcctcttaacgtaaatccaccaccaaaattattaatcctcttgagagaaacgtgaaacgccacaaaaatagagaaaattcaggtctgtatgtcatggatcgtgttggtattttcagagaacatcccgcttctgaagctgctgcagctccctcctcagggatcacactgccgtcacccactctgcactggggcgtttcctactgcgcctcgtgctggcggacgcagctgggtgcagaagctgtggggtcggagaggcgttgggagaaggtctgtggtgcagtgtgtgaaaattcaggtgctagaagcctactggtagaaaaacccaaaaggaagagctatatccttaaccattctgtccaatttcgggagccttgtcagtgtgtcagtttttcctccccgaagacactccttccccaagtaattgtaggaagataaaaaaactgttaccagataacaaacactgaactcctatttgaccagaactttttcctctcgagatagttttttctttttaatgaaaaaagcataggaattggagattggcttgtctcacgcagccagtgcacatttggaattgacggaaacaacgttgctatttccacccatttgttttcggcagccttaaggccctcattctcatttcgggtgaatctgtctatctgtgaacgtggcccgcatgtgcattcttttttttatatatataaagtcagtgacgaggnactcccgagacgtgtaatgacaccacacttgttttctttgtttctttgttttatttnggcaagaagaggtgtgagtaattgaggaaaaactgacagatgcttttgctaataccaaaattgagcttacaattaggaactgagtatgtgtaacaggatacaggtgacagtgaagatagaagaaccacgatgaccacagactcaatgtgctctgtaacatcgcacagtttacccagcatgactttccttaggaggccccctcctcacgctagagtaaaagtcccagttaagtgaagcctaccagaagaactagtagaagaagctttgccgcttttgtgcctctcacaggcgcctaaagtcattgccatgggaggaagacgatttggggggggagggggggggcagggtaggtggggctttccctaatttatcttcatgtccagtgagcagtgttgcgtttttccttgtagcatttggaaatgatttactggaattacaaaacctatttttcctttaaatttcagctttggctctggctgctttttagaataatgcaagataaaaatcacacctgagggctgaaaacggagagggaatgggagacttgatatttaagcagcttgaatggtttttcttttctttatttttaaagaaatgcacttgcctatgatactgtctctccagtgaaatgattactcctccattactctattgatacaatattgtgcatgctagtgttgtatttctatacagtagcttgaaattgattaacttatactgtaggtgttatgtattcctatgacaaaaaaaattaagtcttcaaattttttaaaggttttttttttttaatttaatttttcctttggggggtaaagttggctctaccaaatagtgatggtaacaaatggatctgtttgggatgtggctatagtgacatgcagttatatattttgtttttaaaagggggggagcaaaagaaacaccagtgttagcttaatcttaatgtctggtgtttgtcatggtgaaattataactattacagtgttggagaacaacaaatatgttctctgaatgagcctttgtgcttttggtcatgttatgcagtgaactatttttaaggtctaatcagtgattatttttccagctccgggtttctctaaggaattatttcacacacggaccatctttagcagtttcctcagtgatggaatatcatgaatgtgagtcattatgtagctgtcgtacattgagcaaataaacttacagatcttgaaaccanaanaacaaacacaataacatcaaaaaaacacttttgtgggcccctggccccgaaaaattttaaaaac

SEQ ID NO: 706811 - DNA, 121 bp, Homo sapiens
ttttttcccccggggggggggggggagcaaaagctttggcccctttttgggggggggaaaaaaattggaggggtttttaattattttgggggggggaaaaaacccgggggaaagcccccca

SEQ ID NO: 706812 - DNA, 466 bp, Homo sapiens
tcagtgtctagatgcttatcttgtagttaaatataaacagaagtgtaccttttataataaacaaaaagaagttgagtaaaaaaaaaaaacacacaaccctgttagttccaaaaatgacattgctggcttaaaggttctgaagtaaaggcttgtaaagtttctcttagtttggattggaggcatcccgtaaagttgtagttgcagaatcccaaactaggctacatttcaaaattcagggctgtttaagatttaaaatcacaaacattaacggcagtaggcaccaccatgtaaaagtgagctcagacgtctctaaaaaatgtttcctttataaaagcacatggcggttgaatcttaaggttaaattttaatatgaaagatcctcatgaattaaatagtttatgctgtaatagtttatgacagcataaactattccagtctgtcattgatgggcattggggctgatgcc

SEQ ID NO: 706813 - DNA, 139 bp, Homo sapiens
gtgccttcagaaaggtctgtatgttaactggatcactgaatctgtccagtcagcaaaacggttacttggaccagaattgttgaaaaagggagaccagcttcctggctttccatcatggtcgatggacccgggaaatcag

SEQ ID NO: 706814 - DNA, 106 bp, Homo sapiens
  misc_feature (82)..(83): n is a, c, g, or t
acccactcaccttactacagacaaccttagcaaacatttacccaataaagtataggcgtagaattgaaacctgcgcatagtnngtacgcaggaagtgaaatataac

SEQ ID NO: 706815 - DNA, 238 bp, Homo sapiens
ccaacgctcacacaaggttttttcctagtgtccaaagtgctgttcctctttggactaacagttaaatttacaaggtggatttagagggttctgtgggcaaatttaacagttgaactaagattctatctatggacaacctagctatcaccacggctcgattaggttatgtcgacctctactctataaactcttcccacttattttggctacattacgacggcgtgtgcgtcattttagc

SEQ ID NO: 706816 - DNA, 117 bp, Homo sapiens
agaggatccgtcgaggcgtaggtgcgccgtagccctgtggcacaatagtattcttgctcttatgcgatggatggacccgtcctgtatgcacattgcgaagacaccacggcactcccc

SEQ ID NO: 706817 - DNA, 237 bp, Homo sapiens
actaagaccctcctccctaaagcctacaagaaactaagaaagccgcaaccttccttcaagaacgcttcttatggttggctttttaactaaaaaaggtttcgacaaaatctaatattgcaactttatggcccaatcatcattggcaagggggtttaaaattatacaaccataacaaaaaaaaggaagcatggggaattgccacccattggaaataatagggttgaggggagagagaaa

SEQ ID NO: 706818 - DNA, 811 bp, Homo sapiens
  misc_feature (109)..(109): n is a, c, g, or t
ctggtgttacatgtagatcggaccacttatttcacctcgttctccatgaccacaagctttgaggattctgacctgaagtctgatggacgcacacagcatgccgaggacnaatcaccatttcttactagagacactggattgttcttatcattccccctttaaggaccacttattgtttcataacactgcctttcctgtgcttgctaccagactattactacttgctataccagtcatacagccacattgttagtaaaggacagtcaaaaattctgattacacgtcataggaagaccctacaaaatatggatatttattttatttcttattatacaagcatatccatgttatctttgatattgctacttggtccacacaggtggataaggtaccatgcttaccatctgaccctttatagaaaaaggtagctgacccctcgtctaaactatgaagacagaaccatctgtttttttccttattgcactcccacaacaggtgcaaatgggccctaaatgaccctcaccaagtgaatacatgatgcgagaaccgcccaccccccaaccagcgcccccccgtggtcgaccgcccccgccggcgcacctctccgggctctttccggctccagcgccccgcctcgggcgacctcgggaccccgtcgccgcgccagcccgagccgacgacagcccgcacctccccccccccccggtccccccgacaccgcgtcctcccactggcccacgctatctacgcgaccccggcccccccttgccaccggacgaggcccctcggaggggcgggcgcggcggctcct

SEQ ID NO: 706819 - DNA, 130 bp, Homo sapiens
gaccatcattgggtctggagttacatatatccatgggaaaaagttagtggatgacttggaaggttttgcagaaggaggcatgacttgatcaggagactgtaaatactgagtgggaaactgtgaaaagctc

SEQ ID NO: 706820 - DNA, 292 bp, Homo sapiens
tggggtgctcaactctgatgccggacatgggtgatccatggtgctgagaaaagccccaagttcagcagtaaggtaggtgagacaacgttactaatgacagtcaccagttactgaatgctccctaggagccaggcactgacggtactgtgctttccattcattatcccaccaaacccacacagattcctatgaggtatatattattattccccgtttatagaagaggaaattgaggattgaagaagttcagtcacttgcccaaaatgtaaccagatgtgaacctcagcagctg

SEQ ID NO: 706821 - DNA, 739 bp, Homo sapiens
ggtgtgacagggaaattggtgagcggcctccacctaaacgacttactagggaagctatgcgaaattatttaaaagagcgaggggatcaaacagtacttattcttcatgcaacaagttgcacagaagtcatatggaaatgacaaaaaggtttttttgcccacctccttgtgtatatcttatgggcagtggatggaagaacacacaaaagaacaaatggaacgcgatggtgtgtctctgaacaagagtctcaaccgctgtgcatttactgggataggaaatagtgaccaagaaatgcagcagctaaacttggacggaacgaactattggcacagccaaaacatggtatatatctgactcagtacaagcgaaagccacttcatgtcgtctggtacccgcatgtcctatggcaacagtgatgaccatcggtgtgttcctcagcccagcggcataaacagtcatctccaaaccttccaatacaagaagcagtcatcgaaaaagtgctgactttatgccattgcctcagggaaacaaagggtgggctctgctccaatctgactacgatccccagacagttaggctacccgattactggcctgtccgaacggcggtcacttcccactggccagctcacacggcagtggggaagcctatttaatcacactcccctggctggctcgccgactccgaagggcgagcaactcccagagccgggactgggttcctccccttttggcccaca

SEQ ID NO: 706822 - DNA, 285 bp, Homo sapiens
cccttaattgagggactaagagacccattttcacgcttcggtgttgatagtgctagagtttcaacagtgtggcatcatgtgcataacaggcatatgcatgtaaaattcgacatagtattaaaaccagagctagacagtcacagcaagcagtaaaaaatagattttcactccaggaactatgggcaataaagtaagggcattgcagtatagcaactgtgctcagttctgaaaagcacagcaagaatcacaggggggcatcatcaccgaggccacagattgcagtcg

SEQ ID NO: 706823 - DNA, 171 bp, Homo sapiens
  misc_feature (145)..(145): n is a, c, g, or t
atggcaggagtgtaggtggcgacgatatcggctcactgcaacatccgcctgcccaggttcaagccattctcctgcttcaaagaatcataaaaacattacaacagcctggcacaggtggctcatgcctcgtaatcacacgcacttngggaggaggtcgtggggtaggacggt

SEQ ID NO: 706824 - DNA, 175 bp, Homo sapiens
  misc_feature (91)..(91): n is a, c, g, or t
  misc_feature (112)..(112): n is a, c, g, or t
  misc_feature (158)..(158): n is a, c, g, or t
  misc_feature (171)..(171): n is a, c, g, or t
ccaccttcatgcgtgtgccctccttgcccacgaagatgtcatcaatgtccaccaggatggagcgggccaatggcagggataggcgcttccncgagaggaaggccatgtcctncacgatgacaagccttgctcagccagaaattcaggctgaagactgncagtacgccctgnaggc

SEQ ID NO: 706825 - DNA, 690 bp, Homo sapiens
ccccccggctttcctgcagggcctggggccaagcccagggaccttctctcctggaggatccagggatcaaggcgatcgcagccaagccaatataactacagccacggtcctgatccgttcccccatgcagaggaacttggtggtgatccccaagtctgtgacaccagaacgcattgctgagaactttaaggtctttgactttgaactgagcagccaggatatgacccccttactcagctacaacaggaactggagggtttgtgccctgttgagctggacctcccccaaggattaccccttccatgaagagttttgaaactgtgggtgcctggtcgtccccaagtgacccaaacctgtggttcttgcctcatttttttccctgcaaaagtagtatggcctgtgtcactcaacagtggggcaacaacctgtagagtggcccaccaggggcgtgtttagctttatgttggatttcaaaagccccgtcagtaaagtaaaagttttttccagtttgctttgcccttctttttaccccgctggggaaaggacaacctgaaaacccctttttggccaaaaagaagcaaaattttcccgggcaaaaaagggcccccaacgggtgagttttggctgcttggaactggaatcccttcagcaagacttttttttgccccaaaaaaaaaggggttttgtgga

SEQ ID NO: 706826 - DNA, 681 bp, Homo sapiens
tgtgtgttgtgactattcttagtctttagcttgccttttcattttcttaattatgtctttcaaagaacaagtttttcatgttgacgaagcctagtttatcaattttttttatggctggtgcttttgtgtgttccaagaaatcttgcctactcatttaattacctgtgtgcccttgtcaaattcaattttattttggataattcatttattaacttggctaattctttatattaaccgtggtggttcgcccctgtgctcacatattacacgggtatatcgtgtagaatcgtggatgatctatttatgtcatttatctatgtgtctcttcttatgccagtaccccactgtcttgattatgtggctttatggtgtcttgaaattaagtattgttaagctttgcaatcttttccaagattgttttggtataggtcctttctttataaagtttatattaagcttctccatttttctttaagaaaaaatctgtggaatggcactgaatttttaggtcgatttgggaagaattgaacaatattgaacctttcaatcgatggacatggtatgtttctgcatttattggggcttttaaaatttatctcagcaatatttgtagttttagtgaagaagtcttgtatatatcttttgttaaatgtattcctaatatttgtggaaatgtacacg

SEQ ID NO: 706827 - DNA, 141 bp, Homo sapiens
gtggtgtaattcggctcctgtggaggcctgctgggaacgggacttctaaaaggaactatgtctggaaggcttgtggtccaatggccatgttgttgctgtgctatgaagcggggggctccggaaccaaagggagcacacagc

SEQ ID NO: 706828 - DNA, 369 bp, Homo sapiens
catgctattgtgcgcatgacaggttaaaagtctatgcagactacgaagacctatgtcaagtgtcaagatagagagtgagatacagcatgtacatgaatccaaaggccatggaaacacaatggtacacaaaaacatagctgcctcggggaaattctccagtgaccgaacaattaaagaatatgcccaaaacatctggaacgtggaaccttcagatctaaagatttctctatccaatgaatctcacacagtccatggaaattgaactctacaatgtctctagaaaacatagcttcttactgaacttgaacatttttacaacattcactggttttagttttgttagctaataatctataatcgttgagtatc

SEQ ID NO: 706829 - DNA, 212 bp, Homo sapiens
ttctggcttcagttgcattgtctgtacctaatgagttttcatagcaaagaatataaatttgctgtagattttggtatgaattttttcacaaaaagatcctgaataagcatagttttatgaattttacatttttcctcaccatttagcattttctgaacggtaataatgtctaaatctttttcctatctgaatacttgcttgtacattttttt

SEQ ID NO: 706830 - DNA, 848 bp, Homo sapiens
agctcttgggaccaagcttatacatttcaccagaatatctgtaattgagcagcagtcatatcgccacagcttgtgtgagtacacagcgtaacagatgcggtcgagacctgagatgtgctcgtttgattcctcctctcccagattggctccagcaagaaaagtccctcgtgcaacaggcagctcttgtgccggcactacttgcataacatggctactttctaagctacaaaccattagaacataactcaaacaagatggcagaggcaaactccacacgaaggggggctgccctccatcacacagcacgcccgtacccacaccttgagcacacaccatgacagatcacccagcttggatggccgtcacctcggacatcactccagggagcacccgcaggagctgggcccctcagcctgcttcctgggccagcttcctgcttgcggccactcgcatgcacagaggtggggcttcgggcagggaagcggccgattcctcataggtgagtccaaatgacctccagcctctcgcaagtgcatcacagcgcccctctgacgaactcgcactaaactcaccaaaagcttcagctgcttgcccctgcctcgacctccatgggtctcttcggtgttccttcgtttcaccccagacaagtgcgcggcttccccctcgcccatatccgcgccggacaccttgtcgggccccccaaggcgcactactgagaccagcgcttccttgccgcggcgcgcgcgccccacttttgtgcgcacctgtgccacagcgctttctggacgccgggtcgtttcactggcttgccaatcatccctttcgcacatctgtctttgcccgcgcgg

SEQ ID NO: 706831 - DNA, 101 bp, Homo sapiens
tcattcgcaaggtccaaggaggttgtggaggagaaaccacgctacgaaataaaaaagctacctgcgagttgtgcccctactctggccttgcccatatgcaa

SEQ ID NO: 706832 - DNA, 411 bp, Homo sapiens
aagtcaggatcggtgcaggacaggcttgttcgtgtctgcaaaccctgcagtataaaacgccggccgaacaggcaatcacgtgatttgggacaggggtggagatgtgagggagggaaaggggatctttagcttcaatatgtcatctcccagcacgatgagagtctgaacctgtggtgtagctgggtctgcgacaagcaatggtatcagctgctgtaacgatgtgatgatgatcacctgtggtaccatggcgtcttctcccgggtgagtcccgatttcacctgctgtaatgatatgacgatgatcacctgtggtactgtggcatcttctcccgggtgagtcccgatttcatctgctgtcatgatatgacgatgatcacctgtggtactgtggcgtcttctcccgggtgagtct

SEQ ID NO: 706833 - DNA, 285 bp, Homo sapiens
ggtaccgctacgagattacgtgaacgctgttatgtgggaacaaactcagccccaatgcatcttggctgaggatcgcagcgctggcctagttctcacctagccctatgctccacatagggccaaggagggtttgggctgcctctggctccttgggcactgctgcttggctggtggtctccccagctcgacaccaactgagcccagtttccctttgcacaatgcagctcctagaagcgcgttttgggccgtttcggagctaggtccgttcacttaatgccgctagcg

SEQ ID NO: 706834 - DNA, 112 bp, Homo sapiens
cggcctgatgagtatcttcattcttcacctgaggctgtccctacattcaaggtgaagaatgaagaatacttcatcagatgcacaaacagagccaaagggttgatcgagctac

SEQ ID NO: 706835 - DNA, 392 bp, Homo sapiens
  misc_feature (11)..(11): n is a, c, g, or t
  misc_feature (25)..(25): n is a, c, g, or t
  misc_feature (37)..(37): n is a, c, g, or t
  misc_feature (106)..(106): n is a, c, g, or t
  misc_feature (146)..(146): n is a, c, g, or t
  misc_feature (225)..(225): n is a, c, g, or t
  misc_feature (256)..(256): n is a, c, g, or t
  misc_feature (350)..(350): n is a, c, g, or t
tacccgggccnacccagccccagcnaatttttggtanttttaggtagaagatgggggttttcgcccctgttggccccgggctagtgtcaaactccctgaccctcanggtgatcccactcgctttggcatccccaaagtgcctgggntcacaggcgtgagcctctgcgcccagcccccacatgtcaggttaattttatacataacacagtgacttgagttttatcnacatcattatatttaatttcagatatttgcntctgtctcagaaatgtgagactatgtatatcctctgtattttataaatttacccagaaattggatttgctctatacatacttaataaaatgtcntaaaatatatatgtcttaaaatgtaaacaataaattctggaa

SEQ ID NO: 706836 - DNA, 372 bp, Homo sapiens
cgggtgaggggaggcaggcagagaggactcagagtcagaagtgggttggttggagagagtgggggagaggggtagagccggagcagggacatacggtggaggatcatgatgctctggtggaggatcatgatgctgtcgaggagggagaaaatccacggggtcaaaggacagcaggcagtcatcggctgggtctcgtgggtgggagtgacgggagcatgagtcaggttttgagctggtgagcaggatttggacaagtagagcaggagtggcagcacagaagggtggttccggagaatgaacaaacctgaatatcaggaatctcagaccatttctccattgcgatggcaaaagttgtctaagtctctaagtata

SEQ ID NO: 706837 - DNA, 122 bp, Homo sapiens
tcatggcaggcgcagtgagctcatgcctgtatcctagcatttgggaggcgagaagggtgatcacctgaggtccaggagcaaagacccagcctgtcaacatagccgcgggaaaaaacccccag

SEQ ID NO: 706838 - DNA, 354 bp, Homo sapiens
gacttttttttctttttgtttaaaaatcatttgataaaaaaagtcactgcatcctttgcatcattgcaactgcttagactgtgtctccaaatttgtagaaagtttttgtataactagtaacccataattaatttcagatacatacaattcacagaaatcactcaacaagattttacatggtttccaatctagaggaagagttgtgtaggtaagcttagatgttgggatttaaccatagattcagttatttagggccaacattagagctcgtttgaatttaagaaataaggccatgatttttatgaaggctccccctatatccccctttagagcgctaaatagagagtggtacga

SEQ ID NO: 706839 - DNA, 164 bp, Homo sapiens
aggggggggtttttttttagggggggggttttgggaattttaaaggggtgttttacaaaagtcccccttttttttttaggggggggggggggcccctttaccctttgggccccatcaggccccctttttgtttttgtaaaaaaagtttttttgggcccccccca

SEQ ID NO: 706840 - DNA, 183 bp, Homo sapiens
ccagattgactttcttcttcttctccttctccttctccttcttttttttttggagactggagtctccgtcggtcactcaggcgggagtgcaggggtgtgatcgggactcacggttaaccttctaccttccgtgggtttcaagttgagttctccgtgccttcagccttccgtgagttagctgtg

SEQ ID NO: 706841 - DNA, 122 bp, Homo sapiens
tatgagtgtatgagatcatgaaggttaattaagtgtttgaagtttatctcttagcagtggaaaacaatatgttggatgttttcattcttgctacttttttcgtgcttaatctaccattctgt

SEQ ID NO: 706842 - DNA, 424 bp, Homo sapiens
  misc_feature (122)..(122): n is a, c, g, or t
ccggcttcggtcgagggccgttcgtggtgcagcgcgtgcgccatcggttcggcggtggtgtcgccgatcgcgccgagcagtggcggcagacgcggcgccggtcgcgtcgtccacgcgaggtntgaggtcgaggttcactggtgcgctccttccggcggcgtgagcccggcgcgctcgtaccgcagccggtcgcggtgtgccgcggtggccgcgaggtcgggtgtgccgtcggtcaggacgacgccgtagacgtcgagcgcggcgatcgcggacaccttgccgtcgcggacgtcggcggcgacgcgttcgggttcgcggtgcagcgggtcgccgattccgccgccgccttgccaatgggtgaagtagacgtccgcttcggcgaggtcggtttccaggtgcggcgggagggtgtccgcgcggccgc

SEQ ID NO: 706843 - DNA, 223 bp, Homo sapiens
ttagacgatcctctctgccctgaaggaggctctgactgtatcactaattttacgaaatatggcttgcatgtaagcttcttatcaaggtgcaagcttggaagctggtctccgaagtacatcctcaggagctagaggcacaaccaggattaacttgaagagaacccttgtgggttcttccctcttggaacttttgacatgcttggagggtctcttggaagaaggg

SEQ ID NO: 706844 - DNA, 126 bp, Homo sapiens
cccgactagcccgaagcggagagtggatagggagcaaaaatgccagagacacagggcagagatgaaagacagcttgagcgctggcagaaagcaggcattacctctgccctgtcgggctagtcgggg

SEQ ID NO: 706845 - DNA, 693 bp, Homo sapiens
ttcagaggatccccgagttgaaatgtgttggtcacccaagagtctgatggagatgtacaaagagattaatgttttatgtctgctaaacaacatccattctgcaggatccattagtccatgggtcaaggagtaattttgactttcaagtattatttaaggaatacattttgtaaggctgtggctgccatagtggttgttctgtacaaagtaacttgaaaaccttctggaaaggattcatcattctagatgccattaaggacatttgtgattcatgggagaaggtcaaaatatcaacattaacaggagttcagaagacattgacctcaaccctgatggatgatcttgaggggttcaagacttcagtggacgaagtaactgcagatgtggtggaaatagcaagataactagacttagaagtggaacctgcatatgtgactgaatggctgcaatctcatgataaaacgtgaacaaatgaggagttgcttctaatataagagccacaaaagtggtttcttgagatggaaactactcctggtgaagatcctgtgaccattgttgaaatgacaacacaggacttagaatattacataaacttagttgataaaacagcagcgagtttgagaggacgacttcaatttgaagaatgtcactgtgggtaaaggctatcaacagcacacatgtacagataatctt

SEQ ID NO: 706846 - DNA, 1181 bp, Homo sapiens
  misc_feature (587)..(587): n is a, c, g, or t
cggcacgaggaagaaatgttttcagtgtgcagattgctattgtttgaatatccccagcaaaattcttgttgaaacttaatccccattgtaacagtactgggtggggggtctttaagaggtgatcaggattagccaagttcatcagggtggagcctccatgatgggactggtggctttatgaggagaggaagagcaactggaactgggacacatgcttgctctgtcttgccttttgatgcctcctgccatgtcatgatgcagcaagtaagcccttaccagatgcctgcacctttatattggacttcttagccttcagaactgtgaactaaataaacctctattctgtataaattacccagtctatggtattcagttagagccacacaaaatgtaacaagacagaatattgatagccataagtaggtttgctgctctgacatttacataaaaatgtagaagtggctttggaactgagtaatgggtagaggcttgaaaaatctggaagatcaggtcagacaaagcctgtattatctaatggagcattaagggtgattttggccaaggcttagaagagaagactagggaangtctgaaccttcttagagattacaggaggtccttgaacaacttgggtttcaactgtgtgggtccacttatggactttcttctgcctctgtcacccctgagatggcaagaccagtctccctcctctccccttctcagcctgcttaacaaaatgacaaggatacagacctttatgatgatccatataatatagtgaattatatttactaaatataatttctcttatgattttcttaatattttctctagctttattataagaatatagtgtctaatatgtataacataaaaaatatgtgttaatcgactgtttcagtaaggctctggtcaacagtagactattagtagttacatttttggggagttaaaagttatacatggcatgggggttggtgcccatatgatgggactgatggctttataagaagaggaagggagacctgagctgacatgcatgctcttgccatcttgccatgtgatgctttccatcatgttatgacacagcaagaaggccagatacggcccctccacagttcccagccctcggaaccatgagctaaataaacttcttttctttataaattaaaaaaaaaaaa

SEQ ID NO: 706847 - DNA, 177 bp, Homo sapiens
  misc_feature (132)..(132): n is a, c, g, or t
tccctcagacagctggaccccctatacagacccgagtcttcagcggctgggagcgctgttcactgacccgcagagccgcgcttgggaggacccagttgagaaacagctacagcacgagcggagggccggagnaaaagcgcccccgaggtcgctgtcaatggggggtcgggctgtctg

SEQ ID NO: 706848 - DNA, 853 bp, Homo sapiens
  misc_feature (587)..(587): n is a, c, g, or t
cggcacgaggaagaaatgttttcagtgtgcagattgctattgtttgaatatccccagcaaaattcttgttgaaacttaatccccattgtaacagtactgggtggggggtctttaagaggtgatcaggattagccaagttcatcagggtggagcctccatgatgggactggtggctttatgaggagaggaagagcaactggaactgggacacatgcttgctctgtcttgccttttgatgcctcctgccatgtcatgatgcagcaagtaagcccttaccagatgcctgcacctttatattggacttcttagccttcagaactgtgaactaaataaacctctattctgtataaattacccagtctatggtattcagttagagccacacaaaatgtaacaagacagaatattgatagccataagtaggtttgctgctctgacatttacataaaaatgtagaagtggctttggaactgagtaatgggtagaggcttgaaaaatctggaagatcaggtcagacaaagcctgtattatctaatggagcattaagggtgattttggccaaggcttagaagagaagactagggaangtctgaaccttcttagagattacaggaggtccttgaacaacttgggtttcaactgtgtgggtccacttatggactttcttctgcctctgtcacccctgagatggcaagacctgagctgacatgcatgctcttgccatcttgccatgtgatgctttccatcatgttatgacacagcaagaaggccagatacggcccctccacagttcccagccctcggaaccatgagctaaataaacttcttttctttataaattaaaaaaaaaaaa

SEQ ID NO: 706849 - DNA, 401 bp, Homo sapiens
  misc_feature (362)..(362): n is a, c, g, or t
ggatagctgctcatcctgggaaatgccaagctcatccgactcccctgacagctccttgatgaagttggaaggaaacattccagtcttcccgttgagaacaccttcccaccatccttcctctaccttttctaccggcagaaagtcattttctacttcaattgaccttggtcttagtttgattggcttgtctttgaaaatgtctccaaagcccactcccttaactttcttgggctggattgctgcagttgccactgtcccgttggcaccttcagacttggtgctgcttgagtcacccccatcactctcggagcctgtggtttcccttaaacttatcttggatagctgctcatcctgggaaatgncaagctccgagagtgatgggcggtgtatcctctagagcg

SEQ ID NO: 706850 - DNA, 371 bp, Homo sapiens
aaaccccccccgggggggtttttccaattttcccgggaaggtaggttcgctctttcccaaaaaaaggttgggttgggggggttttgggggcccggggggccggctggggccaatgctgggccccttctttttttcaaaaaaaaacccaaacccgggggggggccccccccccccgggggggggggttggggcaggggttttggttttcattttcccccccccccaattgggcctttttcccgggctttttttccccgggggggccccccaaggggggtttatttgggttgggcctcccaaagggggccggtttcccccggccccccctgcccccgggttttgcccttaaatttctttttttttttggggga

SEQ ID NO: 706851 - DNA, 145 bp, Homo sapiens
tataacattaagtaatctatagggttctttatgggaattatctggtgctggatacttacaaattgtatctagctgcagactaattttaactaattattactgttttcctggtaaaagtgtgtgctgattagaattgaccaatatt

SEQ ID NO: 706852 - DNA, 674 bp, Homo sapiens
  misc_feature (130)..(130): n is a, c, g, or t
  misc_feature (157)..(157): n is a, c, g, or t
  misc_feature (220)..(221): n is a, c, g, or t
  misc_feature (275)..(275): n is a, c, g, or t
taaagtcattgtataacgcacgaatgttccctgctgtgagtacttgtgaaagctaaattagtttagcttcccgtccacttagaagtgctgctacactttacagcagcttcctttctttccatggcactgnctagttaacagaagtcttataaaaatntaaaaagacacatttcttacaagttgaatgaggtaaaatggcattagatggctctatattttnnaaagctatgtaattgttcagcgtcacttttctaagtacttatacatatctaaanatgtcttcatggtttatattttcagttatatatgctgggctggattaagctttgttgtgattgtgaccaacattcaggccacgtgagcactgtcttatcacatcgccaattagttgtaataaacgttcaacgtcacaaacgactgtgagtgtgttctggatctctttccaaaagttggtcaaactatgcagagctgctgaaggaagaatgctcatatagttcctcacgtgaaaagtgttgaaaattcctcctccatcttgaatatggtggtggtataagcacacacaagatacatggtggacagatctagaggagtcttcatgtacttcattgcgacaatgcacctggattccatacgtgagagcctatctacacatttattttcaatcattacctgct

SEQ ID NO: 706853 - DNA, 407 bp, Homo sapiens
  misc_feature (368)..(368): n is a, c, g, or t
acaccaccgagtctggagttgctgtagttgcaggtacttcttcccaatagtcttttctaccggcagaaagtcattttctacttcaattgaccttggtcttagtttgattggcttgtctttgaaaatgtctccaaagcccactcccttaactttcttgggctggattgctgcagttgccactgtcccgttggcaccttcagacttggtgctgcttgagtcacccccatcactctcggagcctgtggtttcccttaaactgtaatagcgtctgtggccctccgtctttcccggtgcagctcggtacagaattgtcccttcaaaggtagtctttcttgatatcttggatagctgctcatcctgggaaatgncaagctccgagagtgatgggcggtgtatcctctagagcg

SEQ ID NO: 706854 - DNA, 729 bp, Homo sapiens
  misc_feature (130)..(130): n is a, c, g, or t
  misc_feature (157)..(157): n is a, c, g, or t
  misc_feature (275)..(276): n is a, c, g, or t
  misc_feature (330)..(330): n is a, c, g, or t
taaagtcattgtataacgcacgaatgttccctgctgtgagtacttgtgaaagctaaattagtttagcttcccgtccacttagaagtgctgctacactttacagcagcttcctttctttccatggcactgnctagttaacagaagtcttataaaaatntaaaaagacacatttcttacaatatagagccatctaatgccattttacctcattcaactcttttttgtaagaaatgtgttgaatgaggtaaaatggcattagatggctctatattttnnaaagctatgtaattgttcagcgtcacttttctaagtacttatacatatctaaanatgtcttcatggtttatattttcagttatatatgctgggctggattaagctttgttgtgattgtgaccaacattcaggccacgtgagcactgtcttatcacatcgccaattagttgtaataaacgttcaacgtcacaaacgactgtgagtgtgttctggatctctttccaaaagttggtcaaactatgcagagctgctgaaggaagaatgctcatatagttcctcacgtgaaaagtgttgaaaattcctcctccatcttgaatatggtggtggtataagcacacacaagatacatggtggacagatctagaggagtcttcatgtacttcattgcgacaatgcacctggattccatacgtgagagcctatctacacatttattttcaatcattacctgct

SEQ ID NO: 706855 - DNA, 548 bp, Homo sapiens
  misc_feature (362)..(362): n is a, c, g, or t
ggatagctgctcatcctgggaaatgccaagctcatccgactcccctgacagctccttgatgaagttggaaggaaacattccagtcttcccgttgagaacaccttcccaccatccttcctctaccttttctaccggcagaaagtcattttctacttcaattgaccttggtcttagtttgattggcttgtctttgaaaatgtctccaaagcccactcccttaactttcttgggctggattgctgcagttgccactgtcccgttggcaccttcagacttggtgctgcttgagtcacccccatcactctcggagcctgtggtttcccttaaacttatcttggatagctgctcatcctgggaaatgncaagctcattcgtctcccctgacagctccttgatgaagttggaaggaaacattccagtcttcccgttgagaaccccttccctccttccttcctctacctctcctcccagctctatgatgtcgccaactttcagctcaagttcatcgtcactctcgggcaggtagctgaatgccacctggcaaaagc

SEQ ID NO: 706856 - DNA, 175 bp, Homo sapiens
aggactgggcagcttgttgaaggctcgtccaaaagtagcacttagttatcacaaggcctgcactcaacctcaaaagcgtaaggttaaggccaggcacggtagctcatgcctgtaatcccagcactttgtgaggcagaggcgggtggatcacctgaggtcaggagttccgagacca

SEQ ID NO: 706857 - DNA, 152 bp, Homo sapiens
acagaaaaatcctgctgaaaaaaaacttctgaggtacataaataggattatcccgtatcgaaagggctttttggacaggtggtgtgtggtggccttggtatgtgctttctcgtgttacatcgcgcatcattggtatatggttagtgtgttgg

SEQ ID NO: 706858 - DNA, 100 bp, Homo sapiens
ctcgatataagacggaggtaaagtgggtctggtgcaactagtgtgtaagtcagggagagtgcgtcatatgtgtcctagaagatgataccatcagtaggga

SEQ ID NO: 706859 - DNA, 94 bp, Homo sapiens
acgcgtgggaaatgaagaccatgagtgaacagttgtttcctaacccatggctatttagaatcttttgccaaagaatgacaataaatcccatgaa

SEQ ID NO: 706860 - DNA, 124 bp, Homo sapiens
  misc_feature (4)..(4): n is a, c, g, or t
  misc_feature (23)..(23): n is a, c, g, or t
  misc_feature (88)..(88): n is a, c, g, or t
gtantctgagcaagacaccacanttatccattcagtgcaccctatgtaactgctagatccatttgctttgtataaaacagtcacaccnactgcttcctttgttgaggaggtggggggtagggtg

SEQ ID NO: 706861 - DNA, 698 bp, Homo sapiens
  misc_feature (129)..(129): n is a, c, g, or t
  misc_feature (135)..(135): n is a, c, g, or t
agcgggcattctgggattacttctttaccgtgggagtaaggaagtgctttgaatgaggtactgagggccaaggtgttggaagttcctaatctctttcctacggcttaagccgtgtgaagactctgcggntgttgnggataggccttgtgcctcaaggtcatcaggccaggagaggctactggacgccgcgcacgcacttcgtctgccagcgaggcccaaaggggaagccgtagcggagctcaggtgtggcagctgctggcctctgggccgctacgttgtcaataccatgcgtttcctgtagatatttgtggtgaaacagtaacctcagaaccagacatgaaagctcacctaattgttcacatggaaaagtgaaattatatgtccattttgcaagttgtcaggtgtgaattatgatgacaatgtgttcttcatatcgtaaacagctcatctggacgcagaatacaccttgacccgaaacctttgagaggatagatacagtacaattatggaacttcagactaacaagaaagacaagaccctacagctgtggaactggagggttaaggcaagtgttctttcaggttgtgcatctaatcatccaaagagattcagctctaggaagctgagcgtaaagatagtactttacaatgcatgaaggcttctattcagagaacttaactgaatctagaaaattcctg

SEQ ID NO: 706862 - DNA, 900 bp, Homo sapiens
tggagatggagtcttgctctgtcacccaggctggagtgcgggggcctgatctcagctcactgcagcctcagcctccgcctcccgggagaatcgcttgagcctgggaggcggaggttgcagtgagctgagattgtgccatgtgcactccagtctgggtgacagagtgagacccgtgtctcaaaacaaaacaaacaaacaaacaaaaaccaccaacaacaaaaaaaccatgtttggtatgtctttccagattttatgtttctgtctttttctcttttaaataaaaggggatccatactaacatggtctttaatcttaagggttggtcttaaaaagttgtacctgggagatctggcctgtgtaatatttacagatctgctacattttaaaagggggcttgaaaatcttcgtgtatgtatgtacggtcattaattctgttattttttcccactagtactatcacctacggtaaagaccttcctctgggcccagggaatcaagttccagtaaaggtggttcagatgaacttcccttaattggaggtggtcccagcagctgtttgggcgaagacaacgacaccttcacgggtttccctgattaagtgacttattatgactgtgacagtgactattccccttatgacccaaaggcctgattacatcaaggagattcctttttaacacttccacttcacttgtgcccaacattagccagagtttcccaaaatctacaccagcagcacacatacaaaatcttttgtcgcgaccctctgcgccgcaagaaaagtctttagacacactcgttggggcgcggggccccatagtgttatctcaacatgggtccacagggttccaagaggacaccgcgcatacaaactggtgtgttttcccaaataaaaacgcc

SEQ ID NO: 706863 - DNA, 328 bp, Homo sapiens
ccgtggccggagattacagatcaagcaataggaggcctcatgtacactttctctgagttatcattagtagtagttatcctcttaccagttatctagagacggcaaaattgtcgcttttttgaaattcaggtaagatgtaactcgatgaactgaggatgtgcaaactcttttattcccatgaaataagcatttccgttttgctataggtcaagatcattgttgcctctgactgtgctactcttgtactagagtcaacatcagtggcattaaatgattatgaacaactgtgaactgccgtgtgtgtccagaactctggtgtatgggaggc

SEQ ID NO: 706864 - DNA, 203 bp, Homo sapiens
  misc_feature (34)..(34): n is a, c, g, or t
  misc_feature (69)..(69): n is a, c, g, or t
  misc_feature (72)..(72): n is a, c, g, or t
  misc_feature (85)..(85): n is a, c, g, or t
  misc_feature (143)..(143): n is a, c, g, or t
  misc_feature (146)..(147): n is a, c, g, or t
  misc_feature (189)..(189): n is a, c, g, or t
cccaccccaacagtctaactctaaagggggtaangccaatggctttcctcacaagagctcacggctaangtngctttgctatcanaatctgtatttctgatccgttatgagcattggggcgaggttcagatattcccggaggnagnngcgcaatgcacgttgtggtcgcctattcagcaacagcgggcnctgcgtccagaact

SEQ ID NO: 706865 - DNA, 434 bp, Homo sapiens
tgaggaggaggaaattgatgatgaggaaatagagcggcggcgtggcatgatgcgtcaggacgcacaggagagaaaaaatggaggagatgggagtcatgtggagtgtggaaatatgagggtcgctctgagagagtgagtcagaatcaagagtctgatgtatgagagagtacacagcacagttgaagatgagagtggagcctcgcctataagcccagtcttccattcggaagagaagggaccgagttgaccaggttccaagaaacgttgaaagcccgaagcttttgaaaacgagaaggggcgctgggcgccagggaagccaaaaacgctattggcttgagggaaaagggcgcaatgtaccgcacctcaaacacaatgcgtgaaagagggctcaaacacaaggctggaagaggggggtacccgggctcggaatttcc

SEQ ID NO: 706866 - DNA, 415 bp, Homo sapiens
aaaagatcccagtttctcaatttgcactgccagatgctttaaaaattccaaatctttctattgaaggggtcagcagacctctgtgagttctgaaaactgatttttctctgcattcttaagaaagcaacactctggcggggcgcggtggctcacgcctgtaatcccggcactttgggaggtcgaggcgggcggatcacgaggtcaggagatcaagaccatcctggctaacacagtgaaaccccgtctctactagaatacaaaaaattagccgggcatggtggcaggcgcctgtagtcccagctactcgggaggctgaagcgggagaatggcgtgaacctgggaggcagagcttgcagtgagccgagatcgtgccactgcactcccgcctgggcgacagagcgagactccatctcat

SEQ ID NO: 706867 - DNA, 108 bp, Homo sapiens
  misc_feature (3)..(3): n is a, c, g, or t
  misc_feature (97)..(97): n is a, c, g, or t
agngtattcacatctcatatcttatattgcaagtcccttttgccacttaagagtacaccacaggtatggagattaggaggtggacatctttcagggnccattcttatt

SEQ ID NO: 706868 - DNA, 589 bp, Homo sapiens
catgcggccttgtgggtcacagtgcatgcctgggaagccacagctgaggggcgcagactgaagcatgatgctccacctctccttctttagctcatggggtttgcttggtactgtggcatggcgccactgagttggcccctggtggacttgtatctcatgtgtgcatgtctacttaagttcaccacacacagtgcagcatctttatcccctcatcacctacttgaactacattatcatcattgtgccattgtatgcattatttgtgccatcaaaaccagtgccttgcttgggtatgctgcatcatgtggactgtttgatgtgccttacaaactccatagacacccttggcacatatatcacattgttacttccacttggagtctcttgccatgtgggccataaccaatagtgcgggggatggggtgtgggaaccccaaaaatagaactcaccagtgtggaacgtcttttgttgtgcggatgggtaatggccccagtggtccctttagcactccccaccaaagatttttggtccatatatttttaaccccaacatttcaacgggagcttgtgtgaagaaaagaaaaaaacc

SEQ ID NO: 706869 - DNA, 962 bp, Homo sapiens
  misc_feature (618)..(618): n is a, c, g, or t
ggagtgtgcgagtcgcttttccaggatgccgaggcccaaatcggtgccgggcctgaatgggtcccccgtgccagccctgcgtgcctgtgccgatcatatctgcctgcctgcgtctgtccctgcgttctcggactgatgtgctgccgttgtcggacagtggcatgcaggtgtccagagcctcatggcagccgcgcccatgtgtgccctccgaggtgcccattccaggtgtcatgtaatgcccaggaggtgaaagcttttgaccatccagtgtgcctaactagcaaagcaattgtgttgctatggacagagctagcctagatagtacacacagcacttgctagccggtcaagatgagggctccttaggattggcctagataaattgcaagaaaggccctgaggttaatggaggcagccttcaactccctgtggggctggtgtccacccaggggctggcgcccgagcctagtatcgtccagtccgttcggtaggaaccttgcacagtcccctctgctcgtatccaagcgcgggagagcacgctgtaggtcgccttctgctcaacgcccacttcgcttgtggagtgttgggcttccttcgagcacacttagaccttcgcgtnctcacatttgggttcgcctaagaacaggaattcgatatagctgtagacattggacatatgcaggcttgggagtttgattgttgatttcaaggagcgctcgtcacacgtttgcacggcaccagaaaggtttacacaaagtcgaactggcccaacaggattcgcgcgaacaaacccaattgtgggtctagacgaaagccaacgagaaggggttttggggacacatctccaagaggagagttcctgcaccagaatgaggggacgtattctagggagtgtagctaaccgtttgacagcacggatcacatacaacataggtggtaagggacacgacaacaacataagaa

SEQ ID NO: 706870 - DNA, 949 bp, Homo sapiens
tttgcgtcgtcgtgctctcctccttgtgctgcgcccctgtcattagcccctcttcgacccgggctcgggcctggtcccgggctcgttgcgtcgtcggaccctttctgctgtgctctggcgctctgttgtgggggctgtggtaccctgctggccgaggatggcgtccccctgcccgttccgctttctcggttccctctcggcgttccgtggcggccattggttctgttccctgtccgactcgtcacctgtccgtctgagtgatgttgggcgtgcccttgcgtgtctgttagcgccttcattcctggctgctgttggtccccatcctgcattttgtacgcccctctgggtcccttgttggttgcactgtgccttgagacccggcatcatcgaccgcgaagggcctctgacacatccttagcccatgtgcacgctacaacgcccttacatactcacggaggcccacggtgcgtcccccttccacggcacattccaaccatgttggaacgctacaccgtatgcggagaccatcatcgtgcccaagccttccacgtgagccatacttaccgaatccagagacacgtttcgcgcacgacacacccgcgtctatttgacattgctataggcaaccgtgattcacagagtgagcatcgaaccatgatacggccagcgcagctccatcgtgcatgtgccctgggctttcctagctgtctccgaatcggcgcaagcaagggcctcatgctcatcagccgtcgggctctcatcagctggatcgtctccacgcacagctagcatctcgcgtcacttgcggccatcctccagtccaaagctcctgcctttcggccacttacggcagatccagctcatgcctgccagtggcctcctttaggcaccagctcattcctcacgtcggccattcaggccctgtttttcccttccggcagcctcttac

SEQ ID NO: 706871 - DNA, 359 bp, Homo sapiens
catggcatacttttggttaaatagctgggattcagggttacagatttgattgacccaagggaaaaaatactgccactaatcatttttaagggctatttcaaaaaaatatgcccaaggtttctaagttattgggactttgggactgtcgtagctttaaattataatactaatatcctactatgagaaaggggtaagacacaggtttaacaaacaactacattaacctggggcaacaaccatcatggagctgctgtaacacaggcatggggggggcgggcatcgggctcttacacacaccagggatgtgaactgacatcccgcctttccaaaaacaaacatttaactcaactgttttttgc

SEQ ID NO: 706872 - DNA, 773 bp, Homo sapiens
ttcatcgcgcacgtttaaccggttgtgccctgaccaccgggcaaccaacaatccgggcgctcacgggcccgagctcaccccacagatggtcggactccaagaacatgatggccgccctgcgacccgcggcacggccgctacctgacggtggctgcacattttccgggccgcaagtccctgaaggaggtggacgaccagaagctcaaacggccaggaccaggaccgcagctacttcgtggagtggagtcccccaccacgtgaagacggccgtgtgcgacatcccgccccgcggcctgaagattgtcggcccccttcaatcggcaacagcacggccactccacggaggctgttcaagcgcatctccgaggccgttcacggccactgttccggcgccaggccttcctgcacactggtaccaccgggcgagggaactggaacgagattggaggttcaccgaggccgagagccacatggacgacctggtgtccgagtgacccagccagttcccggacgccccggccgacgaaccaggggagattcgaggaggaggagggcgaggacgaggcgtttaaaacattctccagatccatcgtgcatccctttagtgaacattctgttgtcctccagcctggtctttctacttgtaaactatggtggtcagattttgcctctgttaggaattcaccctcgttgaagtaatgatgtggagactccttttaaaattacagtattgtctgtgaaggtatttatacttattaaaaagcatgtgtaga

SEQ ID NO: 706873 - DNA, 161 bp, Homo sapiens
gcgagtatagcgcccctagcctatacgatgctatttcccctggccatcatcttactctccctgtcacctacactgtcaatctgtcccaaaccttgggccacttcatcctgcccttctgcggtcacagctgtctgctggggggggcgcgttggctggggggt

SEQ ID NO: 706874 - DNA, 308 bp, Homo sapiens
  misc_feature (4)..(6): n is a, c, g, or t
  misc_feature (17)..(17): n is a, c, g, or t
  misc_feature (31)..(31): n is a, c, g, or t
  misc_feature (41)..(41): n is a, c, g, or t
  misc_feature (54)..(54): n is a, c, g, or t
  misc_feature (62)..(62): n is a, c, g, or t
  misc_feature (72)..(72): n is a, c, g, or t
  misc_feature (94)..(94): n is a, c, g, or t
  misc_feature (102)..(102): n is a, c, g, or t
  misc_feature (110)..(110): n is a, c, g, or t
  misc_feature (125)..(125): n is a, c, g, or t
  misc_feature (155)..(155): n is a, c, g, or t
  misc_feature (240)..(241): n is a, c, g, or t
  misc_feature (297)..(297): n is a, c, g, or t
gtgnnnactgggggagnccttagatagcaancccggactcncagcgggaatgancggggatnccccgggcancagctggagctaaaggaagggnaggcccanaggggccnccgcagagccgagtngggcggcatcgtgctggtgctctggccccntggagtggagcaggcagataccgttaagcgctgtgctaccggccccaggcccagccacccggtacctcccgagaggctgtccctnnccctggctggcatggaaatacagtgggaaaaccagtcgggacctttaataaaagancttggctttct

SEQ ID NO: 706875 - DNA, 1243 bp, Homo sapiens
  misc_feature (1243)..(1243): n is a, c, g, or t
ggggcatattggagccctgggcgatcgcggaatttcttccctctgtgttcctggacacagaggaggtctaacgagccagaggtattgcccatgccatccgactatctcatagatctgccctagcattgagtgccttctccgtagcgaggagtcagagctagccactattgcattgcctgtcataccctgtggaggtgggggaagtgtatccctcattccggtgctttcccaatccatgggccagctgtatccaggacattcacttgcccatgccagccctccctggcagcccattgtatctccttcctattatctcagcccccatgaactttcccgtgaggaagaatcatctctgccaggtcaactggagtccctggtgtagctccagtatctgaggtgtcacaagcaatgaacgctatgcaaacagataggagggtgtgacaggggaaccgtagacttcatatatgtaactgactgttattataatactatcgttatattaaatgtgtttactcacacttagcctgctacggagctagagtagtgcctctggattaaggtgatgaataactggagcactttccctcaaccaggccttaagtagaacacagagaataaaaccaagacgtggacggtcccctctaaccctctcagggccagagctagctgactgtgtatgagcctgggagcaatgtgtctcctccacgagtggttcccaggaggttcccatacaatctctatgaagcttccttctcccaagaatggggcttagatcctatgaaggctgaactgttcaccaggacaaccttgggatcccagcacacagtccaagagttctcaacactgagggtcctcaaggccaacagtgcgtgaaaacttgtttgggatggaggtcaatgcgtaagatccgggggcccaacaaaacatcagggacgaacccggggggggtaaaacccgcaatcgggcattcagtcacgaactcctgggggcggactcaacacagtgttcgaagtaagaaggagtctacctactcgacacaagacacaacggagcacgaggacaacaagtgcagaaaacaagtgccggagcactcacaccatggtcgagaacagcacgaggatgagacacaaccagacagacacaccacgcagctacgagaagaaccacgacgcacaaatcgtacagccagaccagaaaaaaaagtctctcgccatctactgtcgtgctacataattctcgatcn

SEQ ID NO: 706876 - DNA, 1167 bp, Homo sapiens
agcggggtgtggggcaccgggtcggggcctgcgggagccggcgccccacggacctgctgctgtcagaccaagccccgggcccccatcatcactgcgtccgcgctttcagtgcgccgagaatctattcgcgtctcccggcatgctccgtgatgacttggccttcgtgctgcttggtaggcggggtccggtcccttccagctccgctcccgccgctgtcgcgaatcgcggttcgcgtagtccattggaggatggaggcatcgtcccctgcgggtctggtgcttgcagccatgccgacggctgtgattgacgctgaccctgggcattcgggcgctgcagtccgtaggaaatcattctcgcgcacgagtgtggatctgacggtggaccgatctataggaaccagccgtctccgtgcctgaactgtcatatgaattgtctttccatgggaacaatgaggaataacgtgtgtgatggccttgaaggatgtcaaagaactctttaggcctcgattgaccagactgggcgttaccctaggattgaactagtgcgatgtggttgacctgacttgggattgaggccatcgttcattttcccgacctggcgggaaagtcgattggcggatttaaacatgcaatctccaaacatcttgatcttcaagtcttcaccaagaggtcctatccgtggtattccacttcctaaatgcacctcaactcttggcaagacactggacggacgaactactagcacttgacacgcccaggttggatggactccacgtccgcaagatggaaacgccctcggcttttggaccttcttcggcagagcgtggagtatttgagacgccgtgggaatttccgttgccacgtaggccaagtggccgaacaaggttcggccatttgctcattggacccacaaggttgcggaaaaaccgcagtcaggttaagccaggaagtacaagtggagaaatctgggttcccctgggaactaggaagtccgttaattacgttgggcaattatttgcgtcgaacaggaactatccttttttcatggaccttaagtaataccggcgactgaggctcaattcgacctaagccttggggcgcgttgccccccaaatggacgaaaacatatgcgttgtcagccacgctatgtggcatttatagcccgaca

SEQ ID NO: 706877 - DNA, 465 bp, Homo sapiens
ctccctgtttctccacaacagcctggggtatgtaccccgctgtgctcacgcgtatctgggagctcagaggccaccttgtgaggaggatgccacgacacttcctactctcggagccctacagacatactaccagatgtgccagacaaataggagtgagtgtatagtgtagtagtagtgtagtgtagtgtagcacaacgttgtgtaatagagttgcagcagattctagttagccgctgggggaatacgtgcatattaataaaaagagatggcgccaagatggtgccaactgtgcaatatgaggccatagggaaaaaatgcatggaactaccaggtaggcaccatttggtctaggagtcgacattaatcatggacacgcctaatctatacaccgattaccataatagaagatccttatggccagattggccccactaacggatgaaggctcctaggcaaaaaatgtag

SEQ ID NO: 706878 - DNA, 199 bp, Homo sapiens
ctgagcggacagcactacgtcttaaacaagggtgggtgacgacagtatcttgccacacaagatggaggaaacagatggatgctggtcaaggaaaacagtgggatgccagttgaagtgtttattggccacatgcaggagtttgcactggatccagaacatccttgtggagccacaggtattgggtatctatgcttcggca

SEQ ID NO: 706879 - DNA, 150 bp, Homo sapiens
gccccgtttccctggttggttttccccccccttccctgggcgggtgccatggccaggaggtaagggcccttttgtgggcccccccctacccctttttttaaaaacctgttttccggaagggtttgattaactccttttctttccggggga

SEQ ID NO: 706880 - DNA, 149 bp, Homo sapiens
tcagcatgtgagtctcactatgtttctcagatggtctcgaactcctggcctcaagcatcttcccgcctcagcctctcaaatagctgggttacaggcatgagcacacacctggccaggatttggttgtttaaatataaacctgatcaccc

SEQ ID NO: 706881 - DNA, 132 bp, Homo sapiens
cccccccgggtttttccccccccgggggggggaggggggccccttccccccccaaggcccgggccccaaaattgggcccttttcctggggggtttcccggggggggtttttttttttttaaaaaatccccca

SEQ ID NO: 706882 - DNA, 762 bp, Homo sapiens
  misc_feature (552)..(552): n is a, c, g, or t
agcggaacggtggcggcggtggcggcgacggcgacagcagcggaggaggtgtctggttagctcggtggtggcagatctcgacggcgacgcctgcgagggacccgggccgagggtcgaggcgggcggccgcctgcgaagggacccgcgtcgagggtagaggtgggcggcgcgcgggggcaggcagcatctgaggaatgcgttaggcgtcccaatggaagcaggccggtcttcccaagcttggtcactgaggaaaagtggtgcctatgcgatgcctcggatcagccctgtggcaagtggcaagatagcgagtccggatccgtcacgcttcccgaccgatgcctaacccatcccaatcaataaatcctggaaggaccggaggcccgagtgtcccttcactcctactgcgataaagcaagggccatccaacaactattctccatccgtacgcctgcaatgcgtgcccgctatcaccggcgctacctagacgattcagcgaaggggttcctgccctctctccgcaattatcgaatcgtggcactcacaagatcagcnacattgcgcaggcgcactttggtggtgctcagaacaaactcgagctaatgttgaaacagcgtttctttaccactgcttgctgacaagttttggccaaatgacgatctccccctgaggatttgggggagaaggtgccgggactctttgttctttgcacttgttgaaacttcgggcaagttgacaagatgggacggaaattccacgtggtaa

SEQ ID NO: 706883 - DNA, 143 bp, Homo sapiens
gttgctggataggtttggggagagtgcctggtaggtggatcctatgcgcttgcggtgatgcataatcaattgtcccggcttatccctgtcggcgatacagcgatcacgcccgatacagcgaccagccccgatacagcgaccag

SEQ ID NO: 706884 - DNA, 605 bp, Homo sapiens
  misc_feature (128)..(128): n is a, c, g, or t
  misc_feature (164)..(164): n is a, c, g, or t
  misc_feature (227)..(227): n is a, c, g, or t
ggagagaagagcaaaatggaacgcttcggatagctcctggatgctcaattcgtcggaagcaagaagccagagtgatcgtttaagaagcgcaggctacgaattaagtacgataacctatagtgtatcantacacgatacgattataggtgacacgtatgagaacntcgaaggatcgcacaagttatgctacaagaaaagcgaggcttgatagaaatcgatcggcacangtaacctatatacggtccgtaatggtacgcgacggcctgggtggcgaacttcggtcatcgagggactacggtcgcggcgacattggccagaatcgtactcaagtaatgtactggtgatcgtacaggtaaatcacgggacccgctatgagggcctcacctctcggaaaaatcggtgacagtaaacttgaatatcagactcagcacgcacaagtagcatcttgctctttcatgtggcaaaaccaagatgaagagacgagatgtggggatctggcactgtggttcctgcatgaagacagtgggtaggcggtgcctcggatcgtacaataccatcttccgctagttcaacggtaaagtccgccatcagaagagctaaggagg

SEQ ID NO: 706885 - DNA, 606 bp, Homo sapiens
agcgggaacaatcactgggtgggagaccaagattcctggaggacagatatcacatctactaaaatggactttaaagccatctaacacggtacttggcttagataggaatatacgaaattctgggtcataatactgatttagagtcattggttcttttcaggaatatctctagagtcatttagagttaatggttcttttcaagaatatctactttttgggaaatgatctacagcttttcagatgtgatttaaaaggaaaagtctagtaatatggttaatttggtgggaatataaaccagttctgtttctacattcatgctatataatgcagtgaaataacacttaggtgaaatgtattccaaaatgtttttctgcccatacaggtcctctaataagtaattctttccagtggaattatggtgaaagaattatttccagagctaaatttaaaagattaaacattaatttttttaaaagggtttctttggaaaggaatgtcttagagttattagagatcattctgagtaatatgtcattctttatttttatgccagatgcaaatgtagtacccttacttaccttgagagtgacatttccttcttaatat

SEQ ID NO: 706886 - DNA, 472 bp, Homo sapiens
aacgtgcgaatatatagccataaagattacatactgcaataaatgcatcatcattaagcccaaaaaaggaaaaacaaggcaggaatttacatccagtttggctacattgttgaaatacaaatatgcagattttatcactgaaaaaattctcaatagtgtgtcttcatcagaacttcaactgaacctagaactttttcacacctcgattagaaagaaaacaaaacaaaacaaaaaaccagaaaaaaataaactataagttgattggctgctgagacagcaaggactttttacagagacctgtacagcatcgcacccaagagggggcgatatctgggaaggagattaaatagctgtgtctcgctctgtgccaggtcaccccacacttgttaactcggtctactataaaaggggtcgctgggaggaggacccactgtgggggatccccgggtatatgcaaagtacaacgtcatat

SEQ ID NO: 706887 - DNA, 319 bp, Homo sapiens
tgctgcaggtggcaacttccacatcaaacttttcaaaaggacggggtaaacaaagggaaaacctgagggctgggtgcagtggctcacacctgtaatcccagcactttgggaggccgaggcgggcggatcatgaggtcaggagatcaagaccatcccggctaacatggtaaaaccccgtctctactaaaaatacaaaaaattagctgggagtggtggtgggcgcctgtagtacccagctacttgggaggctaaggcaggagaatggcgtgaacccgggaggtggaagcttgcagtgagccgagattgagctactgaactc

SEQ ID NO: 706888 - DNA, 556 bp, Homo sapiens
cgttgctgggggcgtggtccgcgcccttcctcggcgggccggactggtctccatgaaatgcttcgggttcatctttcatggctgccgggtacttccatgcctctatgactcatcttcaagagactgggactgctgtagcagtgtcctctattcttgaagagcgtattcttggagctgatacgctcttggtggatcttgagagaatctgggcgtgtgttaagtattggtgagtgggtagtgtggcaccgacgatacagtggggctgagagaattgctacaatgccagaacgcatacactggctacgcgaggttgttccttcagagcgtatataagggttaatggtgcctgtggaaacgtgtggaatcgcttggaacgaattgatttgggtgggtttggtgcgatggtcctcgggaacattggaataatagcgtaaattaaaggggcaaggaggaggatataatgttgacatgagggacgatggacgcccgatttcgtgcggacggttgcgcgaggttggggtcgcacggaagcatcgttctgtggggtccgtatggt

SEQ ID NO: 706889 - DNA, 1200 bp, Homo sapiens
gtaatgaccacaaattgacaatgaaattaattcaaggggcaacgtgaccatcatggatatagacagtcttgtcaacgtatgcatgtaataacaggattcacccatgcattggagagcactctcatttatatgtactgtgaataatgatgcaaggagagtggagtggacccaccgatctgaaatgcagcaggaaaatctctaacttccaaggtcccaccaacagttcagaaacctaccacagataaatgttccaactacagaagtctcaccaacttctccatgaaaaccaccacaaaaaccaccagaccaaatgctcaagcaacacggagatacacctgttatccaggacaaccaagcattgttcattgaaccaagccccaacataacatggacacgtggaaccactttcaaggtacttaacacagttcctatcatatctaggggcaccacggttgttttcaacggttttgacccagggtattagctatggggaacagcttagataacaccccgagtgcgcggccattggccttggaactttataggccccacacaaggcacacgacaggttcaaaggaaaacgacaaacgatgagcacgcgagcccaaggttactaaccacggacgcttggtgtccccttaagatttatcctatacggacccgtcgtaactcactagccgactaacttaggggcaatacacagatcatcacgatttggcccaaactatcggctgcgacatacctgttgccaagttctgttcagcggccaattggccctttttgtcccaacctgtagggtacctaatgcacaaaagcggaactggttggtctacagcgggcaacttttgatcccaactcctcaggcgaaaagccaaacgagtgaatgtcaacacagaaagatagggggcgaaggacaccgcctgggcggcacacattccagacgaagatttgacaggtgtctgacaggcgagccccgacgaggacacaaggtggatgccgacgcacgggcgtcgcccacccccaacgaccactgctagatcgaataacaaagaatcaaccaccccgatcaccgcaacaacacaacaaaacaacacagcacgcacaacgaccgacaaagactcaagtaggatctagactaaaaccacaccatcagatccaccacccgccatacattcatgagtacagaggacgcgtaggaga

SEQ ID NO: 706890 - DNA, 188 bp, Homo sapiens
atgttggtctggtgggttcccgtgcggcggcggccaatggaggaggagacacagttggatgcagctccgtgggctgactggggcttgaggcctcagcagctgcgagcttgagtgctggccgagcctgcggctgccttcccctgctgggtggttgactgaagctggtgccccgcggctgtcatcgtgct

SEQ ID NO: 706891 - DNA, 323 bp, Homo sapiens
acatgtggctgctcgtatttaagttaattaaaatggaacgatggccgggcgcggtggctcacacctgtaatcccagcactttgggaggccgaggcgggcagatcacttgaggtcaggagttccaagaccagcctggccaacacagtgaaaccccgtctctactaaaaatacaaaaaattagctgggcatggtggcaggcacctgtaatcccagctactcaggagctgagccaggacaatcgcctgaacgcgggaggtggaggttgcagtgagctgagattgcgccattgcactccagcctgggtgacagcgagactccatcta

SEQ ID NO: 706892 - DNA, 431 bp, Homo sapiens
ttggaggatctgccgccaacctgattcctagacccttatgcaacgttctctctggtcttctgtgtggatccttcagaaagtgaccttggcatctccgatctccttcaagtcatcggtggaaccattagacaaatcgtctcgaaaatgtctgtcgagctggattagatttcccatgtcaaacaaggttcacaatatccttgcagacctcggtgatgataagtagtgcgaggagggatcagtagtggggggatccgtcatcacatccggcatataatccgagtaagctataccccactatgtatagaagctacacagcggtatgtaccatatatctgtaaggtaaacggtcattgatgaacaggtcgggcccaaacagtaccggcgtgctgaggcatatcatcatcaaatctcacccaagttaccatccacag

SEQ ID NO: 706893 - DNA, 392 bp, Homo sapiens
tcacgttatgtcacaaggcagcgtcagtcttcagccactaagccgagaaggagtcggtcaaagagccttgggccagaattccagggctctgggagtggctgccaggtgagttgaacactccgattttcagcgaggtcctgcacagatgggacatggcttggaggaatcctgggctgcaggcattccttgccctggtggtcagatttctggcacttgtagcaagctcctgggggaagcgggcctggaggaacgcctggccgctgcagttcaggcgtttggaagttcttgtgtgctggagatgtggctggggtttgtctcacagtggaggcaaggaattgcaacttttttatttcattattgtacaccttgaaggtgaggttacttaagtcctg

SEQ ID NO: 706894 - DNA, 248 bp, Homo sapiens
ccttgttgcgcagctcacttttgtaccccctcaccatctgcagacacggggagaaccccggacccctggcactgcatgctgtcggcggcatgcctcccttccacaagcccattctgctgcagagggagcctgtttttgcaacacccattgtactgggctgtcgtctgctgtccgagcagtctcctggctccagtgggaactgcacaccagtccactggcctggcttggccttcccatattcaaggttt

SEQ ID NO: 706895 - DNA, 859 bp, Homo sapiens
  misc_feature (8)..(8): n is a, c, g, or t
atcccagncacacagaggccggcttggtcactatggaggagataggcatcttggtggagaaggctcaggatgagatcccagcactgtccgtgtcccggccccagaaccgggcctgtccttcctgggccctgagcctgaggacctggaggacctgtacagccgctacaagaagctgcagcaagagctggagttcctggaggtgcaggaggaatacatcaaagatgagcaaaagaacctggagaaaaggaaatttctccagtgccccaggaggaggtgaagcgaatccaaagcatcccgctggtcatcggacaatttctggaggctgtggatcagaatacagccatcgtgggctctaccacaggctccaactattatgtgcgcatcctgagcaccatcgatcgggagctgctcaagcccaacgcctcagtggccctccacaagcacagcaatgcactggtggacgtgctgccccccgaagccgacagcagcatcatgatgctcacctcagaccagaagccagatgtgatgtacgcggacatcggaggcatggacatccagaagcaggaggtgcgggaggccgtggagctcccgctcacgcatttcgagctctacaagcagatcggcatcgatcccccccgaggcgtctcatgtatggcccacctggctgtgggaagaccatgttggcaaaggcggtggcacatcacacaacagtgcatttcatccgggtcgtggggctcggagtttgtacagaagtatctgggtgagggccccgatggtcgggatttgttcgcctggcaaggaaaatggcctgcatcatcttatagacgaattgatgcttgcaacaaaagattaatgtcaa

SEQ ID NO: 706896 - DNA, 581 bp, Homo sapiens
  misc_feature (68)..(68): n is a, c, g, or t
  misc_feature (99)..(99): n is a, c, g, or t
ctccttaggatgttcttcccgagcccggagggacccacgcgtgagcggggccaagtacttcattcaanatgagtatctgaggatcagctctgcaggtgnagatgggcgtcactactgctcccctcatttcacatgcgctgtgggcgctgagaacatcccccgtgtgttcaacgactgccgtgacttcattcagcgcatgcaccttcgtcagtacgagctgctctaagaagggaacccccaaatttaattaaagccttgagcacaattaattaaaagtgaaacgtaattgtacaagcagttaatcgcccgccatagggcatgattaaccagccacctttcccttcccgcgagtgattttgggtggcccccttttcccttcagcctgcttagatgttcctggtttagagggcttaaggcggcgttcaggggaaggaaaaaaggccccccccgttccctctctctttctgtggggtccctcttccagcagcttttttctaataaaatgaaataaaagaacaaaatgaaataaatattgtgttgtgcagcattaaaaaaaatcaaaataaaaattaaatgtgagc

SEQ ID NO: 706897 - DNA, 761 bp, Homo sapiens
  misc_feature (8)..(8): n is a, c, g, or t
atcccagncacacagaggccggcttggtcactatggaggagataggcatcttggtggagaaggctcaggatgagatcccagcactgtccgtgtcccggccccagaaccgggcctgtccttcctgggccctgagcctgaggacctggaggacctgtacagccgctacaaggaggaggtgaagcgaatccaaagcatcccgctggtcatcggacaatttctggaggctgtggatcagaatacagccatcgtgggctctaccacaggctccaactattatgtgcgcatcctgagcaccatcgatcgggagctgctcaagcccaacgcctcagtggccctccacaagcacagcaatgcactggtggacgtgctgccccccgaagccgacagcagcatcatgatgctcacctcagaccagaagccagatgtgatgtacgcggacatcggaggcatggacatccagaagcaggaggtgcgggaggccgtggagctcccgctcacgcatttcgagctctacaagcagatcggcatcgatcccccccgaggcgtctcatgtatggcccacctggctgtgggaagaccatgttggcaaaggcggtggcacatcacacaacagtgcatttcatccgggtcgtggggctcggagtttgtacagaagtatctgggtgagggccccgatggtcgggatttgttcgcctggcaaggaaaatggcctgcatcatcttatagacgaattgatgcttgcaacaaaagattaatgtcaa

SEQ ID NO: 706898 - DNA, 745 bp, Homo sapiens
agctgattaaataatctgtacaacaaacctccatgacaagtttatctatgtacaaacctgcgacacatacctctgaacttaaaagtttttttaaaaaaatataaaaggtggccgggtgcgagtggctcacgcctgtaatcccagcactttgggagtccaaggcaggtggatcacaaggtcaggagttcaagaccagcctggccaatatggtctctactaaaaatacaaaaaaaaaaaaaaaaaaattagcccggtgtgggggcaggcgccggtaatcccagcttctcgggaggctgaggcaggagaatcacttgaaccgggggggtgggaggttgcagtagagctggagaatcgcgtcacggtactccagcaggggcaacagagtgaaactccttctcaaaaaaataaataataaaataaaaaggttaccaagtctgggggttttctggttatagcagcagaaaatagactaagacagaaaatgggcacaaagaactggggcatcattgggtcaagcctggtagtcccagctaactggggaggctcagtaaggcttgaggccctgggagttcgaggctctaagtggtgtcatggtcctggcttatgaataaccattgggacttcagcctaggcaaggtagcaagatctcatctccatttaggtaaataattttttggtggacaaaaaacgggtacctagaaagggggctctggcttgtaacaaatacctgaatatgtggaaagtg

SEQ ID NO: 706899 - DNA, 179 bp, Homo sapiens
  misc_feature (73)..(73): n is a, c, g, or t
  misc_feature (100)..(101): n is a, c, g, or t
  misc_feature (150)..(151): n is a, c, g, or t
ggggtaggtaataaacacacaccgggaaagtgctatgctggttttgcagaaagctaacagcggtgtggtcatnttctttacgttctaaacggtctgcccnntttcaaaagaatcaactatgcaagaaaaaggtagccctgtccgtctgtnnaaagtatgcatctataaaagcctgaggg

SEQ ID NO: 706900 - DNA, 401 bp, Homo sapiens
  misc_feature (52)..(52): n is a, c, g, or t
aatttccccttttccttggggcccgggtgttggccggcaggtgttccaccgnccctttaattcctacgactttgggagcaaggtggcgaccctgaggttcgaggaggcttaaagttgccagccggtcttgaactcctgacctcaggtgatccgcccaccttggcctccctaagtgctaggattacctgaggtcaggagttcaagaccggcctggccaactgggtgaaaccctgtctctactaaaaatacaaaaaattagccgggtgtggtggcgggcacctgtaatcccagctacttgggagactgaggcagaagaattgcttgaacagaggcggaggttgcagtgagctgagatttgccactgcactccagcctgggtgacagagcgagactctttctca

SEQ ID NO: 706901 - DNA, 272 bp, Homo sapiens
  misc_feature (206)..(206): n is a, c, g, or t
caattctaacccaaaaggaccaaggctggccattggggctgagactggaccaccgcagtcaaggctgtgcctttgcgggtcaaggctaacccaaaaagtccacagcaggcaaccccgaggagatccagctgggcgaggacgaggcgaggacgagatggcctggagcccaacgaggtcgctggagcagcagagcgtgccagccgagngtttgggagctgaaggaagactgacccgtcctccccctcccacccctcccaatacaagctacgttg

SEQ ID NO: 706902 - DNA, 868 bp, Homo sapiens
  misc_feature (182)..(183): n is a, c, g, or t
  misc_feature (228)..(228): n is a, c, g, or t
  misc_feature (248)..(249): n is a, c, g, or t
  misc_feature (289)..(289): n is a, c, g, or t
  misc_feature (292)..(292): n is a, c, g, or t
  misc_feature (364)..(364): n is a, c, g, or t
  misc_feature (383)..(383): n is a, c, g, or t
  misc_feature (414)..(414): n is a, c, g, or t
  misc_feature (416)..(416): n is a, c, g, or t
  misc_feature (431)..(431): n is a, c, g, or t
  misc_feature (441)..(442): n is a, c, g, or t
ggcccggagcatggactcctcgtgacttgcttgacgtgggctgtgactgctgcagtgagtacctggagctgaagaaggccctgggctacatcgagaggcaaagtgtgcagcagctcatgaaggtcaacagtagcctgagcgacgagctccggaggctgcagcgagagatccacaagctgcanngcggagaacctgcagctccggcagcctccagggccggtgcccaancctccactccccagtgaacnnggcggaacacacacccatggcgccaggcgggagcacacancgnagggatcgccaggcctttccatgtatgaacctggctctgccctgaagccctttgggggcccccctggggacnagctcactacgcggctgcngcctttccacagcactgagctagaggacgangnccatctattcagtgncacgtccctnnctggcctttaccggatccggaaaggggtgtctgactcagatgtgcccttcactccctcctccccgctgctgtacctgctcccaggagggaagcctggcactacgagcaatgctttcccgccacggcagtggagcctgacagtgacttatgatgaacccgcagaagtggggacccagtgctggggctggaagtggaagaggtattctagatgctgtggcaaagaggaagacttccaatccagagctggaaagcctggatggagacctagaatcctgggctttccgagcacagagggatgtcatcttgaaggaccgatgcaggtcaccaagaacattcaggacactgttgcggggccagccacgagttcaagcatgaccaggttcgtgccctgttcagagaagatccattttggtgtgacccgagatg

SEQ ID NO: 706903 - DNA, 260 bp, Homo sapiens
cgactctacaggatcttctgtgaatagtataataacggagatatgtataggagattagtatagagaggtagagttttttcgtgatagtggttcactggataagtgaccttggtatcatcacccgatgaggcaacagccaagaaacgctgaacgcaggcacatacttcctaatactacacccctagtaggctcccttccttgtactatccctaatgaggcataaattattaaccaaagctcccatcttgccttacgaacaa

SEQ ID NO: 706904 - DNA, 417 bp, Homo sapiens
  misc_feature (19)..(19): n is a, c, g, or t
  misc_feature (259)..(259): n is a, c, g, or t
  misc_feature (269)..(269): n is a, c, g, or t
  misc_feature (313)..(313): n is a, c, g, or t
  misc_feature (339)..(339): n is a, c, g, or t
  misc_feature (376)..(376): n is a, c, g, or t
ccggctgccttgggttttnaaattttactggaaacacatccctgtcccatgtgtttatgttgtgctcctacagcagacagcatggttcacaagccctcaaatattcaacatctagccccttcaagaaaaagtctggggccctggcgcggtggctcttgtctgtaattcccagcactttgagaggctgaggcaggtggactgcttgaggcccaggaatttgagacaatcctggccaacagggtgaaacccatctctactnaaaaacattnaaaaatcagccgggcatggtggcgcatgccggtaatcctagctncttgggaggctgaggcacaagaattncttgaacctgggaggcagaggctgcagtgagcggagntcacgccgctgcactccagcctgggcgaaagagcgagactc

SEQ ID NO: 706905 - DNA, 493 bp, Homo sapiens
  misc_feature (408)..(408): n is a, c, g, or t
  misc_feature (427)..(427): n is a, c, g, or t
tcgacatcgagcatcctccaagtgtctcccctccccggtttctggatcctggcaccatgttaaatatgccccccatggttgcaggcatggtcctctaagccatggaaccagatgagctaagtgatggggccaaccacgcttacccatgcagccttagcttatctgccttgtatgatttccctttgactttctagaacctgtgtgatttgtctggctctctgaaaaacagatctctgaagagactgtgtcacttttgggcaaggctcctttagtggaggcaatgtgctagattacctgctattacagcccatgctaaagcacttacccttaaaaaaagtggttctggttaacttctgaatttaaatttcccttactaattaagtactgttttaatcagagacataatangtgccttaaaagaacgtangaccgaatggccatttttctactgatgggacaatattgggactaaaatctggctgcggttgactga

SEQ ID NO: 706906 - DNA, 434 bp, Homo sapiens
ggagatgacttaccctggtgtcagttgggacattgacatggaaataatccttccggtgagagtaggcactcataagttagctgcatcaaagggatcgtgattttttacagcgggtcgccatgatctgctttgatgaactcatggcactcatcacaataactagcgagatagcgcaccatgttcgaacccaaaacttaccaggaaaagctgaacctgctcaaccgtcagctggtggacaacctgctgatgcagctgccggatcagatccgcctgaacctcaaggaagtcaccgatcagctggtgcgttcggaagccatcatccgcatggaacaggtcaacaacgtcgttggcccgatcgagatcccggaagacgagcgcgccgacaaccgcttcatgctcgacctgctggccagcaacctgggccgtaccgcgtg

SEQ ID NO: 706907 - DNA, 556 bp, Homo sapiens
gcggccgcaacttgtgggcggtatgtcaggaaaaaatatgcctgggatacaggccgtagtccccgtgtgggcccgggcattgaggcaacatggtgaaactggcgggtttccccaaggggtcattgatctcagtgagacgctccaaactctttgaacaaatttgcggagacaccccggcgctcgtttctgtgtgtataacaccccagcggggttagtgtggtggcgtccaccccaccgcacatgtttcccactaaaaagtgaagatatagtatgacttgaccacataatactgtgcagtagcgccccccgacgaatataagagttggcagtccccccgaaatggaatcgagagggcccgcctcccttgtagaatagacatgcatgtctgtgttcaatagagtcgcgtggatgtacacgccgattcatacgggctggcgaagaactctccgcgctgcggacatatatgtactttatcggcgccgggtgtcttcgagagcagagagctccaacggcaaagtaacaaaattatggacgcacaatagcacgaacaagataa

SEQ ID NO: 706908 - DNA, 293 bp, Homo sapiens
gcaaaaaagagtgacatatgatgtggtggttctaaccaggaggtaatctgggcgcaccgaatttatctgagtctcgggcggtgaaagaagatattgaaggagcaggaaaacggaatagcctgatagccgccatctgtgcaggtcctactgctctgttgggtcatgaaataggttttggaagtaaagttaccaacagaacctcttgctaaagaccaatgattcattgggggtcattacaactaatcttggaatcgtgtggaacaagacggcctgattcttacaagccgcggggg

SEQ ID NO: 706909 - DNA, 120 bp, Homo sapiens
ccgacggcgtatgcatgcctggagtccagctactctggtatgctgacatgggagaatcacccgatgtctgggaggctcaagactgcagctgagccatgagcctgctaatttgtgtatttt

SEQ ID NO: 706910 - DNA, 662 bp, Homo sapiens
gtcccagagactcgggaggctgagccagaagaattgcttgaacccaggatgtagaaaatgaaatagaggttcctcttcaaagggactttcctcccagtctaattcagaataggtagtaacctctcttagaaccaaaatttactcgaagacctgtgttaatattcttcaattctgctagctgtaataaagaaatcaggccgggcgcggtggctcatgccagtaatcccagcactttgggaggccgaggcgggtggatcatgaggtcaggagatcgagaccatcctggctaacaaggtgaaaccccgtctctactaaaaatacaaaaaattagccgggcgcggtggcgggcgcctgtagtcccagctactcgggaggctgaggcaggagaatggcgtgaacccgggaagcggagcttgcagtgagccgagattgcgccactgcagtccgcagtccggcttccggcctgggcgacagagcgagactccgtctcaaaaaaaaaaaaaaaaaaaaagggaattcaataggccggggggggggactcacgcctgtaatcccagacacttgggggggacaaagtgggggcggatcacgaggtcaggaaatcgagaatatcgggctaacacggggaaacccatttctattaaattccctaaacaaaaagg

SEQ ID NO: 706911 - DNA, 341 bp, Homo sapiens
  misc_feature (245)..(245): n is a, c, g, or t
ttggtccacactgatgcacatccttcagtgagtaatttatctgaggggaatgatctgagtgtttcatagttaattgtgaacatgttatttacagctgagccttggtttctttttgtttaaatggtaatgttgtgtggattgaaggaaagagcatacacagaagtgcagtacagtgcctgggacattgaaattgctcaggaacggcaagatatcgtttagtgctattaacagacagtacaggctgngcgtggtggctcacacctgtaatctcagcactttgggaggccaagtcgtgtggatcacctgaggtcaggagttggagaccagcctgaccaacatgg

SEQ ID NO: 706912 - DNA, 146 bp, Homo sapiens
  misc_feature (3)..(3): n is a, c, g, or t
cantaagctctgcgtcagatgctgcgtgttccacagtattgaaatggtgatatttcaagtttggatgcatgagagccagagttttcagttcagcatgaaaagcatcatctcgagtgaaataaatcaggtcgatctgttccagagat

SEQ ID NO: 706913 - DNA, 838 bp, Homo sapiens
ccagctgttacggccccggagttaaggatgatgagaacacaacagtccgggttgaccactgatgctgctggaccaggagcatcactggtatctatcatgacagatacttgcccgtgctcggtgctacggatggattacaaaggagacgcaaccgtgtttttcattctccctaaccaaggcaaaatgagggagattgaagaggttctgactccagagatgctaatgaggtggaacaacttgttgcggaaagaggaattctttacaagaaagctagagtttgcaatcttcccaagttctccatttctggctcctatgtattagatcaggattttggccccaggctggcgcgatcacgggatcttggtatctccaaggtgggctgacttattccggcaattcaccaagacacgcaaaaacttgggaggcaatccaacaaaggtttcccacctaagggcccaccctttgtgaccgctggattgacggctgggcacccgagtgctgctagcaagcacaccagacttcagcagattcagaatttctttcttctgcccaagaccaaatcggccaatcattcctggcgaattcaaacctggccctttcctttgtggttgatcttttttccacccaatgcacccaggagttgtccatctttcctggggcaaaggtcgatcgaacacctacgaaaacattatgccctccccagtggcttgctcatctgtttccaatgcaggaaggattgtggcaaggggaagggcctgggacgtgagtacgcttctgtggttttaacgagtttgggggaccaaggtatggaccaccgacagtgtccaagggacgtccg

SEQ ID NO: 706914 - DNA, 645 bp, Homo sapiens
  misc_feature (24)..(24): n is a, c, g, or t
  misc_feature (26)..(26): n is a, c, g, or t
  misc_feature (101)..(101): n is a, c, g, or t
  misc_feature (119)..(119): n is a, c, g, or t
  misc_feature (125)..(125): n is a, c, g, or t
tgggaggggctgccgctgcagtgngnggccatgtgggatgccttgggaatctcccctccatcttcacttctccagaggcccttttctcctgcagcctgctncaaggggacagcggttanagagcnggggccctggttctttggaggcagggtggggaggatggcagctgggtgcttctggcttggaccgagccagcctcgttagagtattaagtgcaatgagcagttatttaagagctgatctcttccacctgcacccacccgcggcttccagctctgcctgcctctgaccgtattatagccggggccgctcattcggcgctgaggacctgtggtgggcacagtggaaggtagatgttttggtctgtttatcagactggagtcctaaccctttgtcatctttcttctgcccataaccctgtccccacacacttaccccagacacagcaacaagtggtctgttacttgttacttctcggtttcttaccataaagctcatctgacttttccactggatctgggggccccaaggcagtacctggtgctggacctgtttgccatcccccttcccttctgccattgctttgtactcagttgggctgtgctctccctgtggacctgattgatgtaaggaaataaaaggccc

SEQ ID NO: 706915 - DNA, 163 bp, Homo sapiens
atcaacacactggattgtggcgaggtcgtctcaggcaacgtctactcgaagcgctcgtctcacagcggtgaagctgctcctcgtacggtgtcttcttgtgagctgacgaacgttgagtcctcagaccaggaatggaaggagacccatatgtgtttcagaggaa

SEQ ID NO: 706916 - DNA, 283 bp, Homo sapiens
tgagtaccctcgatagggccaaaggggtgtaatccgataagcctcctggaggcgctctaaaacgttcttggtgacttatcgggctttggacaacgtcggtcgtcttagacaagttgatgggtttctgagaggctcttttaatacttgcgaggagataccggtgaaaatcgtctaaagctccctttctacttgaggaatgtgggtcctggttaggctgggtagagggaaagacatcctcaaggaggtctctagcttcttcttccggtccgttggccttatcgag

SEQ ID NO: 706917 - DNA, 132 bp, Homo sapiens
tatcgattacagaacaggctcctctagagggatataatgcaccgccaggtcctttgagttttacgctgtggctcgtaggcgcgtaagggccagcaggcgcgtacgggccagcaggcgcgtaagggccagcag

SEQ ID NO: 706918 - DNA, 227 bp, Homo sapiens
aggccaagtggtcttcccaggcactggtgaggctcttgtcgcattctccacactcttcctgggtgatgtcatcagggtttctggcttgcaaatcggcttggtctggttctagtacttcccgagtcagtgtatttctccttgatctgtcttcgttttcttcttattattcttatcagtgtcatcctcctcatcggaacccacatcttcactcttgggcttttctttat

SEQ ID NO: 706919 - DNA, 113 bp, Homo sapiens
cggcagtgtaacgacggccgtgtattgacggcagtgtacacgacggccagtgtaaacgacggcagtgtaaacgacggcagtgtacaccgacggccagtgtaaacgacggccag

SEQ ID NO: 706920 - DNA, 133 bp, Homo sapiens
ccaggctgcgttggtagaacagtgctgattagctggagaggcacgcatgctgatagctggagaggtcaggatgcatgctgagtagcgttgagaggccaggatgcatagctgatagcttgagaggccaggatga

SEQ ID NO: 706921 - DNA, 730 bp, Homo sapiens
tggcatagggaacaatttatggttttttaaaatgcagcaatctttttaatgaaatgtttccatcacatagtactgtgttccggtatgaatttcagaactttggagcaataaaagtgctctgcataagtttataaaatatgcttccgggatttaaaatttaacagaaaaatttccaaacaagctcataggtatgatctctaaaatattgatgtacataactatatgcactacaggaggaaatctcctcacgggtagtacacacacagtgtacaattttgaagcacaggtgttaagttaaatttccctttataagggttttcccctcaccattggggtgcataagctggctgacatacattgacacaaacagtgccccatttcatactgtgttggcaatacaaagtagaagaggaacttgtgaggaccaaattttaaagtagaaaatgaaaaaataagcgtggcaaaaatacagctgcaaagtgctttaaaccgagggccctttaataaaatagcttggcttatatccatacttttcatataacaggtgcacactattagcttaaaagcagagcagaccagtgttaccttataatattcggcagataagccattaaaacaaattgtgcccggaaagaagcaggtgcaaactttaaaaacctttacaccataggcctaagaatgcattctcagaagtgggaatccccgaaataacaaacgttatgggaacctg

SEQ ID NO: 706922 - DNA, 106 bp, Homo sapiens
cgcctgtggtagtgctgcgcctctccggaacgcgacatgaaggtgctccattgccgtcggcctcatcgcggggtccgtcttcttgctgctgctgccgggaccttct

SEQ ID NO: 706923 - DNA, 385 bp, Homo sapiens
tcaacttttcctgcgtggtatcaaagtcctaaaatatggctgcctgtaatccccgcacttgggaggttgaggtgggaggatcatctgaggccaagagttcaagaccagaccaggcgccgtagctcacgcctgtaatcccagcactttgggaagccgagacaggcagatcacgaggtcgggcgtttgagaccagcctgaccaactggtgaaaccccatctctactaaaaaatataaaaattagccgggtgtggtggcgcacacctgtaatctcagctacttgggaggctggggcaggagaatcacttgaagccaggaggcggaggttacaatgagccgagatcatgccattgcactccagcctgggcaacagagtgagactgtctc

SEQ ID NO: 706924 - DNA, 181 bp, Homo sapiens
tacgagttacgtatgttatcccaacacaccctactaatttgtatttagtagagacggggttcatcatgtaagcaggatggtctcgatctcctgacctcatgatctgcccactcggctcccaaagtgcttgggattacaggcgtgaaccaccgtgcccagcaagatggagtttcactcttct

SEQ ID NO: 706925 - DNA, 108 bp, Homo sapiens
ccacggtacttaatagtgtcacggtctgtgtgtagtatgtttttgcattaacgtgtagtggtctttcctttctatatttagtcctcctttctaaaatctcttgtaagg

SEQ ID NO: 706926 - DNA, 1044 bp, Homo sapiens
  misc_feature (696)..(696): n is a, c, g, or t
tattcccaaaaaaggattttttttttatccaattaacggcaaatgtagagaacccaaaaagggagccccagggtgtggaacaatgattctgtgggtatacccctctccccatgaaagaaaacaggggaatggagtggtggcccctatacaccctttatatgtggtctcatatctgtcggagctccccttggtctcacttctgtggtgtgcagccctctcctatatggtggcagcagggacccccactatcctttctccgcgtgggaaagcagtgtggtgtataaggctcgagactcactcacagtcgcgtgcacatatgtgcccacgacagtgccctctttttctccgcacaacatagacagagtatactcgtggggcggaaacgggggtaaatctgcgtgatgggccagaaaacacagtgggaggcacaaattagcaggggatatagacacacatgtgtgtgggcgcgcccgtgtgtataagcccaacgtcatggcccatatgtggaacgcgggatgtgtcttcaaacacacaaatgtgcggcaaccctcttgtgacaccacaaataaatagagtacaaaacacacccagatggttgtgtgtcccccaagagaggtctgagatctgtcgtcggctgcaaaccagccagaggggaacacacagctgtgcggcatcaccccagaaatcaccttgtgngcgggagcccacagcgggagagcgacagccaccaccagagagcgggcgacgactcatgtgcgcgacagcgccggggcgcacggggggtgtgaaaagatcctcccctttgctatacatgtcgggggaggtcggcccccccatatattctagtagcaaagcagcaagcgcggcggcgagaaacatcggtgcggcctttaggaccgtagtggcggcgagagaacaaacgcccacacaacgctataaaggggggatacaaagggggggagagaatccacaatcgcgtcccccacaaaaggcccacaaacccccttctccagagcgggtggtggcggccggcccccaacagag

SEQ ID NO: 706927 - DNA, 292 bp, Homo sapiens
  misc_feature (40)..(40): n is a, c, g, or t
cctgagtcctgtgtccaccagctgctgctaaatacctctnagaaactctgcttctatctaaggggacctacttctctcgggaatctcaatacttggaacaagaacctcctagacggaccctttggcataatgaattggaccaactgtaggttccaggactagagagccagcaatgcctccatgaacaatctcacccaattactctgctcaggaaacgaggtaactgatggacagccgaggcagccccttaggcggcttaggcctcccctgtggagcatccctgaggcggact

SEQ ID NO: 706928 - DNA, 359 bp, Homo sapiens
tgcacccagaagcagagaagggaggatgttcaaaggacaaggtatggcggggtcactactcgcactggagagttcacgcgagttaacttatgctgggggcaaagaatggaaagagctaatacacagactaagcaaaagaatgaaatgcgcagcctgaccagagacgtttacaatttataccaacttacaaatatttagggtgcccaccaacttcgagagaacagaccaaactaaccacatgaaggaagacctctgccggggccttctctccctacaacctcctatcaagaatcattaggaagcccaaacagcttcacagttccgggttcccggctgctgtcatatttgccggatttgtt

SEQ ID NO: 706929 - DNA, 419 bp, Homo sapiens
ttgctctaccgcttcatagacgaggcgagcaacaggcttccgtgacaacagcaaggtattgactgccgatccatctggcatagcgtcctatgaccaggcgcgattgcattgtcgcttctccaaatcaggcttcgcacagccttcctacagttacctgtgggctggctcatggtttcctaggcaattcgtgtcaagtgtgcgctctgtcgacagggcactccagcaaatgttaatggcagctcaccatgtgttcatagggaatatctgtgagtacactgtggaagctatggcaggataagctttgggaactctccggctcagaaagtacctcgaacatccaggagtcagctctctctcagaaaagctggagacaggcacacgctagtctcaacgctgcacactaagcagtcctaagatcc

SEQ ID NO: 706930 - DNA, 250 bp, Homo sapiens
agacttgctggaaccctgcaggcagagatgtgccactgcactccagcctgggtgacagagcaagattccagctcaaaaaaaaaaaatttaaaaaattagccaggcgtgtggaacttgcctgtggttctggctactcagggggctgaggtgggaggttctcttgagcccaggaattcaaggttccagtgagtttatgattgcattctctgcactccaagcgtgaagtgataagagtaagacccttgcctct

SEQ ID NO: 706931 - DNA, 835 bp, Homo sapiens
  misc_feature (39)..(39): n is a, c, g, or t
  misc_feature (94)..(94): n is a, c, g, or t
  misc_feature (112)..(112): n is a, c, g, or t
  misc_feature (127)..(127): n is a, c, g, or t
  misc_feature (132)..(132): n is a, c, g, or t
  misc_feature (139)..(139): n is a, c, g, or t
  misc_feature (151)..(152): n is a, c, g, or t
  misc_feature (171)..(171): n is a, c, g, or t
cccaaagcttctcacccagtattacttagttctgtgagnaagcttcttggtgcaaggggactgggaaacagggggacttggtgctagaaagctnccggtaaagcctagtganaatctctatgacagnaagcntgaggancagcacttctgnntgccttccacaactagcancaccaccacaaaatctggcacatcttgtgcatctcgttttgagtatgtagataatgtccaccctgctgagctgatttctggtgacccgcaagtgattagtcatgtatctccaccaaagtcatcaagcttttttgcagagttcgggatggacagtggttttcctaagaaaggaagctcaaactcctcaaaagttcaaattcaggaaacagatgaagcaagaaaaaagtttacgaatgcaaaatcaatctcatcagcccaatattttggtgatcagaacaaagctgatgctgatgctcaagtttcattgcagaaattttctggctcctctgctatatcaagtgctgatctttttggtcacagcgatgatcagactattgatcttgctgcgagtgacctcatcaatcggatctcattccaggcccaacaagacatctcttctctgaagaatattgcaggagagactgggaagaagctcagctccttcgcatcaaccttcatgaatgatcttcaggacaggatcctctgaaattgatgggttctgtgtttgagaattttcaagtttgctacattgcccatcaatatttgtgtagtgtaatgtaaaatgagtccatataaaattctttttgaagaaaaataaaatttaagacttctcagatctttgaca

SEQ ID NO: 706932 - DNA, 1198 bp, Homo sapiens
ggtaccgagcagttcgggtcctcgtcgcgcgtcgcggtcccctcggtgcgggctcgcgagctcgctagcctgtagcattcggcatcgcaccggcttgggtggcggcaggtcggtgcgccatcagttggttggcctcgcgaaacgcggttgcgaatggcaagccaaaatgtaccatgtaccggatagaatatgatacctttaggtgaactagaggtggcaagatgatagaggtattagtggcgcgcgcgagatcggtgaggatgctactgatgaacgtttgatagattggaggtgtagacgagaacggcatagcctaaacaccgcagttattgagaggcttttggcaatgcttgaagcggaagcggccgcatgaagtaaaccaggattatggtcttgatccagagattgctaatgcgaatagagtgaaggcagcgagatgaggtagctgaaggtaaattaagtgatcatttgcctctaggagggtatggaagagctggatcaggaagcgtcagacaaatatgaatgtaaatgaaggtcattaggcaatagagcaaattgaaatgtgaggaggtgaacttggaagcaagatacctgtgcatcccaacgatcatgtgaataagaagcaagagcatcaaatgagtactttacccagaggaaatgcacattgctgcatgcaaatagaagttcatgaagtactgttaccaggacatacagaacgttagcatgaagctcttgactgcaaatccaaaagagttcgcaaagactcaaccagatgagacggtacccatactccaagatggcagtgcactgaaatctggggccaggaattcaggggacacgtcacaaagtacaatacggcaatgacaagcatcaaagcagcgcgacagacaaaaaagtaatagcagcccacaaactgcagcccgccggctgcacacgttaaactcaaaaacgggagccaaaagggggatgaccaagagggaccgcaaaagggagacaacaggacgagccggaaaaaagcaaaaacggcgtcaagaaacaggagaacgagaggacaaacacacacggagagcacaaaaaacgacccgagagagaccaccgacgaaaacgcagaagaacaacgaagagagaaaagccaaagagagacaaagacacacgaaggaacacgaagccagcacccaacaaacagcaagaaaagaga

SEQ ID NO: 706933 - DNA, 410 bp, Homo sapiens
  misc_feature (18)..(18): n is a, c, g, or t
  misc_feature (32)..(32): n is a, c, g, or t
  misc_feature (75)..(75): n is a, c, g, or t
  misc_feature (97)..(97): n is a, c, g, or t
  misc_feature (122)..(122): n is a, c, g, or t
  misc_feature (153)..(153): n is a, c, g, or t
  misc_feature (173)..(173): n is a, c, g, or t
  misc_feature (240)..(240): n is a, c, g, or t
  misc_feature (256)..(256): n is a, c, g, or t
  misc_feature (352)..(352): n is a, c, g, or t
ggtagcggtgtagctgcncacgtcgcgccgcntaccgcacccaggttcggcccgtagcgtcatggcagcccggcnccatcttcatcgagcgccatgncgcagctgcggccgggagcgcgggntactgcttgctcctcggcttgcatttgtttntgctgacctcgggcctgccntgggctggaacgaccctgacagaatgttgctgcgggatgtaaaagctcttaccctccactatgaccngctataccacctcccngcaagcgtggatccatcccacagttgaaatgtgttggaggcacagctggttgtgattcttatacccaaaagtcatacagtgtcagaacaaaaggcntgggattggtatgatttacaattgggaatgtaagaccggacttagatattgcatacaa

SEQ ID NO: 706934 - DNA, 652 bp, Homo sapiens
  misc_feature (180)..(180): n is a, c, g, or t
  misc_feature (628)..(628): n is a, c, g, or t
aacaaaactctgtacttcagtcacttgtcacatctcctacagacaaatctactcctcaaagaattcttaataataaatgattctagtattaatatatggcaccttattatagacccacgggcaccattgcgcaactttcttctatcttgcagcctcatatacactcactcatgcaagaanctcttgtgaccggtagaccatctacttatttgttccccatgcttacaaaatcaatggaacactgaggcatttaagctcgaaggagttccgcttgcctgtcttgcaggtgctgaaatgggtacagcccaggattccagcctaggtcccattcttcactggccacagtacgtttgtgggcaagtcacttcctgttttctccccacagtttcatcttccagcttacctgttgcgtgccatgttctcctcaggcttgtccttggggaatctccacctcccatcctccaccacattgatcccatttctcttcctttttccattggcacaatttagcgcagtcccagctgtctcaacttgtggcttcctactcttactatttcaaatatgcaaaagcctttatcctgaagtggactattctcagcaagcaaagatacctcaattaccaaccaanatccatcctcttgagaagggcaga

SEQ ID NO: 706935 - DNA, 749 bp, Homo sapiens
agcggcttctccgcccggtcgcccctccccccgagcgccgtggcggttgaagccggacttcgctccgagtttcaggctcgtgctatggctagcgccgtcgtcgtctcccgttcatgtcggcatcatgatgtatctaccgggacctcatcagagcactgcatgagatgttgctccgatcatctacaagatccgggagatcgctgacgggttgtgcctggcggtggaggggaagatggtcacttaggacagaaggtatatggatgactcgctcattggtgggaaatgcctgcgctaaatgtcccgagggcgaagagtcccgaaagcccaggtaactcagctggatgtctactaattggtctgtgaaagaggcatcatctgtcacgaactaacgtttcagcaaatagaaggcctagcgaggaacgtacattcaacatgagttgcactgagcagtcatagtcaacacgtggagagctctggaatagaccatgatgatccgcagagagagatgtaccttcactctattgatgactaggggcgtgccagagacaaagtcaagcaccgatcctttgacgtgaactttcagagaagacgtaaccacggttctataaattcgtggtgaccggacattgaactccgagattgcgcatgggttgtcctctataaggactcaccgtagaagagagttggtgtagagacccatagtactgatttctcttttaagggcactggttaaacaacttgcgatcacc

SEQ ID NO: 706936 - DNA, 253 bp, Homo sapiens
atctttggaatctattgctcactttatgacactatggtgattattgttcctaacagaagagtctaacctaagaatatcgcccaattacgtgaaaaagctaactgaacagtaaacaatgacatttaatctcattgtaaaagaacatgaagcatagatgttccataatggggaagtcttgatctttcctgtagtttttggactgccaggtttgttttgttattgtttagaagatgtccttcatagattgttaccg

SEQ ID NO: 706937 - DNA, 311 bp, Homo sapiens
  misc_feature (6)..(6): n is a, c, g, or t
  misc_feature (15)..(15): n is a, c, g, or t
  misc_feature (58)..(58): n is a, c, g, or t
atctcnttttggganattttacttgccccacttgtgtttgaaaaaggtatcattaacntattagtattgtcttcacctgaaggatgtattatctaaactttgtttcttgttttgcttactttttgtcttaaaggttaaagatacacaggtggatataatatccgaagagttcatcatattccatagctaacattgaagtttatcatttttcactgtggttcttctttttattacctatatatgtttttctctgcaggccagatacttgagcattttttggttatatttatttttctcttagatgtatttat

SEQ ID NO: 706938 - DNA, 626 bp, Homo sapiens
tggtattaagttttaattccataatcataaacttaactctgcaatccagctaggcatgggagggaacagggaaaactgtggaacccaaggggaacgttgcagcgagagcacaaagattctaggatacttgcgagcaaagtgggggtggagggggtgcctcctccgtgagctacagaaggaagtgactcgtgggtggtataagataaaacacaagttcaacacttattccgagttggctccacagtctaagcaatggggtgaatcatatataggcggggctctgtgccattctccgtggcacccgaaaggcgcctcacaggggccctccaacaattaattacagtgccttctctttacactttgggccaaaccacacaacatgtgtcttgtgcacatttccaaaacacacctttcaggctctgtggggacaggtgtgtcacagatgtggacaaacaaacgtggggagaaacccacaattgtgagtgttgtggggtctcacacgacatttttgtcgcccaatgggggaacaaagagagtgtcccagcagacctcgcggatatgtgcctttacacgggcatgtagaaagggtttccctcatatcttttcacaaaatttttctcttccca

SEQ ID NO: 706939 - DNA, 612 bp, Homo sapiens
cagagtctttccgtctgaagccaccacctctgcttaccactttctcttccgatacaggcttcccgctagtcggcggagttcgtagagagaagagaactggccaccgtctaaaatccccccatctctggcctcactgtttattgggtcactgcgactatgcagattatatatttcggataaattattagcattcatctgagtgcttatttagggtcctgttgcaaatgtttcttgaatattttaaaattaaggagatgtttaaattgagtacactgaaatgtggatgactgttaatgtgaatgaactgctttcagaataagaacatttatttacaagttctttaaattgcaaagcttattataccattgaagcatttcatgtgaactttctgttttgaactaatctttaaattttatttgcattcaaagcatatttcctcctgatttgcccatttctcattgtttgattatcattttaaaatctgtaatgtctcattcaccttttaatttttccccaataaggaaatacagtttatgaggcacgcatagatactcttcctaataaatgattaaagagaaatacatgcatatatgcttcatatatctgtatgta

SEQ ID NO: 706940 - DNA, 114 bp, Homo sapiens
tgggagtgattcaaactcctcactgtaaaattataatatccttataaaacagatgcttgaaggcagcatgtgcgataagagtcatcaccactccctaatctcaagtacccaggg

SEQ ID NO: 706941 - DNA, 506 bp, Homo sapiens
tgaccttgatctctggcgcataatctgtgtcgagtggtctctgacattgatacaagaagtcatgagaggacccctccctgtccctcgccattactaccttaaagtactgatcctctctgagttaatctgccaggcctctaattttctccctgtgcgcccatttcagaactgtcttgagtgacaagttcctgatgccttctagatattttgcactattgaaagtgttccataaagtatattacatttgctccttttaaaggtatatacaaaacgacctcatatcaaaaactgggagaacagacgaaaaagaaatcatgccataatcttccagctgtaatacaatcacaggcagcattttggtttcttttcggtcacttatgtttcctctcctagctcctttcttacattgccttgaacttggttatttgggcacctcgggaacctcctcccctgccaacactggctagcactgaagcccaagcactgctctgttgcttcttcctgag

SEQ ID NO: 706942 - DNA, 190 bp, Homo sapiens
ttgcaggcggcagatgcaagcctttctgcaacccaaagttgtcctcgtaaaagcagaatggtgacttatggagcttggcccaagaaacatcccttgaccatggatctttccgggctggcccggctttgctcccgaactcttgcgccacttcaaatggcaccacccatgacgtcatcgaagaaccaattag

SEQ ID NO: 706943 - DNA, 114 bp, Homo sapiens
gggggggccccccccccccattgggggtttttttttccaatggcctttttgggggttttgaaccaccctttcccccctttaaaccccggaaaaaaaatttccggttggaatgga

SEQ ID NO: 706944 - DNA, 757 bp, Homo sapiens
tggcggctcaaactttattaaaatgcaccaggagccccaggggcccactagggaaggtaggtgaggggtccagggccccgccgggagcaccaggaccaggggggccacctccaggatgccaaaacccggctcctccagcgccaaccgtgttttccaggaggcggggggccacaggcgggctccggggttgaacccggctgggagaatacgtaaattataaaaaggtgcgggaggccccgtcccaccccggcccggggtccgcagccagcacgtggccacccctcccaggggggctccggaggcccgtgaagccaccgtggagctagggccttccagaaacggggtcccggggggctccaggcacctggtccctccctccctctctcccagctatgggggcagagcaccgaggctgggtgggtggggaaaggcagctgtggggtcgcggccatctccccgggggcgtcctttgggcagagaagccgggcggggggcggcctacgcgcagaggtgtcggcctggaccactgggcatgtactgggtcatggcgaaggtcaggcccaggattctgcaccaggccgtgcacagcccaaagatgcccaaggcagaaggttctcctgaagccacaccttcaccgtctcgtaagcacggggacttccaccaggttgcgcggggggtgaagcccaaagtctccatgaattccaagaagaggatccggtacccggggggttgacccctcgaacactcggggatccga

SEQ ID NO: 706945 - DNA, 180 bp, Homo sapiens
caagggaaaggtgtttggactaagactagaggcagtgcctacctccctaccaagagtgaggatcaagcaggtatagcaatgaacagagccctggtctgagctctgctggccgcaggctcaggagccagggttaaggccagagataaatgaagatttgagccattgataaatgccaatata

SEQ ID NO: 706946 - DNA, 822 bp, Homo sapiens
ggccgtcatggcgccccgaaccctcctccggcaactctcgggggccctggccctgacccagacctgggcgggcccccaccccatgaggtaaaacaccacatccgtgtcccggcccggcagtggagagccccgcttcaacgcagggggcaacggggacgacacgcagttcgggcggttcgacagcgacgccgcgagccagaggatggagccgcgggcgccgtggaaagagcaggagaggcctgagtaatgggaccaggagacacggaatgtgaaggcccactcacagacggaccgagagaaccaggggaccctgcgcggcaacaacaaccagagcgaggccggttcccacaccatccagaaaatgtatggctgcgacgtggggtcggacgggcgcttcccccgcgggaatgaacagcacgcctacgacggcaaggattacatcgccctgaacgaggacctgcgcccttggaccgcggcggacatggcggctcagaacacccagcgcaagtgggaggcggcccgccgggcggagcagttgagagcctacctggagggcacgtgcgtggagtggctccgcagatacctggagaacgggaaggagacgctgcagcgcacgcggtaccaggggccacggggcgccttcctgatcgcctgtagatctcccgggctggcctcccacaaggaggggagacaattgggaccaacactagaatatcaccctccctctggtcctgagggagaggaatcctcctgggtttccagatcctgtaccagagagtgactctgaggttccgccctgctctctgactcaattaagggata

SEQ ID NO: 706947 - DNA, 225 bp, Homo sapiens
  misc_feature (172)..(172): n is a, c, g, or t
  misc_feature (185)..(185): n is a, c, g, or t
ttggcggactcatggctgcacttgcaacagccagctcaggctgaactcatagccactgtctgcgcctgccctcagcactcagaacgggatgcactgccaggagcacgcaccacccacagtatggctcctgtgagcaaggcagatgcacagtccaggtgctgagcacaggaangcacaggaacctncagaagtgtgctctgggtcatgacatacaggtgctcaaag

SEQ ID NO: 706948 - DNA, 599 bp, Homo sapiens
ggccccagagttccttgcatactaatttcacccccaccccaccctccaggttagggggagcaggaagcccagataatacagagggacagaaacaccagcttgctaccccctcatacccctatacacctacctgcttataacaaaccatctactacggtgacgcacaacaggacccacagaaacaacacatggagatagcgacgtaaagcctagttgtcctcctcagactgaaaaagctcagtacagaagaacgaccacagccaatcgcacacacagtcgtcacacagcgcacacactcacgggcgacccaacagctgacgacaacgtactactcaacaatcaagtcgccatagggtccaccaagttcgtggaacgcatcctaccgtcgcgacgtcgagaaaaaaacccaccgagcctccgagtacagtgccaccacctagccaacattacctcgcgagcgagcaccatagcgacacacacgcttccagcacccctcccccttagtccgtctatcaggcagcaacaggaggcatagttcgagggagcggctgcaggaatgtgcgacctgaacctcgctcaagcgctccccatcaagaata

SEQ ID NO: 706949 - DNA, 100 bp, Homo sapiens
aggagattggaagcaaatttattaagaatgatggtgggggtggggggagggttttggttttttccaaagtggaccattgaaataaaggaagtgttcctta

SEQ ID NO: 706950 - DNA, 340 bp, Homo sapiens
  misc_feature (162)..(162): n is a, c, g, or t
  misc_feature (308)..(308): n is a, c, g, or t
gagatggagtttcactcttgttgcccaggctggagtgcaatggcgcgatctcagctcactgcagccactgcctcccaggttcaagtgattctcctgcctcagcctcccgagtagctgggattacaggcatgcgctaacacacccagctaattttgtattttnagtagagacgaggtttctccatgttcgacaggctggtctcgaactcccacctcagcctcccaaactgctgggattacaggtgtgagccaccgtgaccagccaatgtggccttcttatagtgtctactcaattggtcttttgttctngcccagttggttaacaaatgggataacgcctg

SEQ ID NO: 706951 - DNA, 359 bp, Homo sapiens
gacatcttgcaaaaaggacaaaagttaggagatccaatttcaaaacgtatacaaagctatagtaatcagaatagcatggtgttggcataaggtatagacatattaaccaatggaatagagtcgtagatcctaaaatatatctctacctctattaccaattgttttttgacaaggtgtatcaagacccattcaatgggcgcaaggaatcatctcttacaacataattgtgtgcttggtcgaccggatatccaacagtgtcatcacagatttaaattgcttccctgcttcacatcttatacccaaatattaactgataatataatcaatcaatctacattttagatctaaaagcttaaaac

SEQ ID NO: 706952 - DNA, 656 bp, Homo sapiens
gggttggggtgtgagaggttttctcgctctagggagattcttcaagcgatcactatgtcaacagacaccaggtgtttcccttccttcatatgaggaaggatcagggatcaaatactcattcgaaaagctaaagaggagacattcggtacccgttggaatagcgggttttgcagcaatagttgcatatggatttatataatgctgaagagcaggggagaatactaaagatgtccattcatctgatgcaccacatgcgtgtggtagacacaaggctatgttgtaaggagcaatgactgttggtatgggcgtattcgcagtgtatcgggaatggctgggcaaaagctaagccttagaagaagagatgctgtgttgggcttgtggaggagcttgctttagttagatgtcttattattaaagttacctattatcgtgggaaataaactaatttgatgggtttaggatggtaacatgggcattgtgaatatgggctttgctttgcttgcaggcgtttgagtttgactaggtgagcgagttactagtgagtaggtatactaactaggtcattcagggaagtgcaagttaacttatacatgtcatctgaaatgcacgtgatgggtgtggagaatgtccagcttcttaaatttttaagatgaact

SEQ ID NO: 706953 - DNA, 436 bp, Homo sapiens
tacgggatatcgtcggaaccacgcgttcgcctaccccccagggcagcaatgtattccggggctgtatgctggggtctgagggcactgggccattctgagaaatggagctgtagctatggcctagccagcagcccccagtgctcgctcagtgggaaatatcagccctaggctggtgtttttacaaatctctctcagatatattattttcatgacgaaaattaaggagcttgtaaattttgtaaaaattatgaatcgtatcaagtagttgtttacatttgacaaaataggaactatgccggcagagtccaaccgaaaaccccctaggtgagataggcagtaactgggcctgctgtctgcgcctttcgtagtgacagatgtggctgtagtgtttaggtgttggtcttgcttcttgtatggcattttttcaataaacttt

SEQ ID NO: 706954 - DNA, 322 bp, Homo sapiens
tttttttcagggggaattttcaatttttgggaacccccttgctcccaggggaggggaaaccttttttatttaacattgtagggggcaaacttttgttcgccccctttttaggaacagacccagaaaggggccaaaagggtttcttttttcctgcctgggattttggggttggcctttgaattggaggaaggttgggctttgatcagtaaatttggtttccccctcccttttttaaaaaaaaagcaggagccccagggccggctttttttttttcatttcacaaaaactttttttggtgtttttgtaaaaaacgttaatggga

SEQ ID NO: 706955 - DNA, 850 bp, Homo sapiens
  misc_feature (43)..(43): n is a, c, g, or t
  misc_feature (53)..(53): n is a, c, g, or t
  misc_feature (850)..(850): n is a, c, g, or t
cccttcctaatcctctcccccgccttttcaccccatccccccncctaggtggngacattcagctattttcttgactttgccgaagtcctaggcactcccatgccctcagagcctcattttgaatccaggcacttaggggtgctatttttccacatcaaacagctccctcccagtcaaagaattctcggtgacagtagtgaagataattttcactcctgcttacagaatgacacagcaaaatcatagaggagacgaatgaagccaagacaaccacccgaaaagactgatggctccttaacaatgatcttgataaaggaatgtatggatgaggcgtccatctcctatatcacctaccttactgtatgcctagtgataaagtatacacaaagttgcacctcgagcgcgaaaactccacaaccccccccccgcacaaaccatgctattacaccccacgcctcctatttccctcacgtccgccgactcctacccaaagacgtcattccccccctgacacgagtatatttattaataattatagcgactattacccatcgcgtaaaagggttatcatcaccacccagctctcccccacaccaccacctcctgccacccccccccccctcaccccgttactacacaacctcctcctaccttctatattctttgactcccaccacccagccagacctcccaactatacacacctcgacccccccacatatccccaccaaccataatatcccccactcgtattccccccacatcctctatccctttcctctatgcgcctttttcggtccgtttatgaggacccagatcctacatgttgcaccacccagacaaagcaaan

SEQ ID NO: 706956 - DNA, 822 bp, Homo sapiens
cctgcacaaaaaacaaaaacaacacagaaacaagcggtgtacacgataggaggagcggggtgagtagacgtacgagcgggctaggcgcgggtgggccttccagacgggtgtccgaggccggggtggccgccaacagaggggcgtcccagacgagtggtccgccgggccccctggggccctctcacccgggaattggaaaggcttcttagccggcatggtaaaaacacctggctccgccggggggagcccttggcccttgtgtcggtgaaggcgctcttacccgcggttctgccctgcgccccccccgggatgttcttcaccggcgcgcccccccttgtttagtctccgatatgggggccccccctttcgccaacagtccggtgctcgcttcagcgcccccggaactgtcccctcccgggcggggacgccctctcacacgccgcaggccttcggggtacacttcctcccgaacgcgccacgttcgtgcgctgcgggaccttccccggactctacccccggggagactaggagcccctttcgtctttagatatcttcgtggagactccctttattaatgtctttcggccgtgttgaacatgcagggaaacccctcaccgggggatacctggcgggcctccactcaaggggggaaccctccctcgccaccccgatgtccgcggtgctatctcgcttgatggcaacactgtccacgggggaacacgccttctcatatagtgcgcctgagcgcctcctttgcccgggcctgttgtaggttctgcccccccctgcccccccgagacccctgtttttcccccacaaaac

SEQ ID NO: 706957 - DNA, 258 bp, Homo sapiens
agtggcagcattatgcacaatgactgcgccggcgacgcttcagggggttcggatgcgaatggctgtagctacgagggctatgtggctgattgacgagtatgcaatgagcgattttaggtctgtatgttagaacctgaaggactagagaaggcaacaacatacaactcccatacatatagtccatcaggtggagaggtttctgaagaattatccctgaaactgccaacaaatgtggtagaagactctgcccgagcttct

SEQ ID NO: 706958 - DNA, 1237 bp, Homo sapiens
  misc_feature (1086)..(1086): n is a, c, g, or t
  misc_feature (1237)..(1237): n is a, c, g, or t
ccgaatggcccgtgcgcagtcctcacggagtggttttggccaaaaggcttgtggtagggggctctgacaaccacggctattaacttcttaaaggaacttaaaagaagggattccaacgcttatattgggaaggtggaaataatggcggccccgggacattgggtgagaatctttaagccagacacctacaaggcaaattccgacaaccaactctcacaccaacgatagacgcgcactactctcaggaacatacagggcgttggtcctacatgggttccatgaacggaccatgggaccccaagtccgacgacaattccctgtggccatctcggtgcgcagtggccgcgtcctgtgtgacaggcgcagctgtggggtgtcctcaaccttgccccgggttgggatatcccttgtgtgaacccctctccccaagtttgcctgcttccttgggcccttggaaagtttgcgacatcccaagttgcccacccaagccttttgccttaattacaacattcaactgtttggatcccacaaaacaacaaacacccaaacacaccacaacaccacaaagacacacccaccaaccacagacataacgaatcacacactacgcacgctcctccacgtaccgatacacaactactcaactgatagcgacgcactaacctctccagggggtgtgccccgcgataccgacatactcggccccctaatcgcgacggccggattatcacaaattcctcgtgggcgcgcgttatactccacagcttcgcgcatcgtcgcaacaccctcttgcggtttcccaaccaatactctgccctggtagtatagttcctcccttttagccagcctggtgctactcaccgacatagtccggctcctgattgcccttcccaacatgttgtgccccccttaaatggcaattggccattagtacgcgtcactattggtaaccatccggtccgatcggcactctgcactatacccaatggcgaatcggcagccgttaatctagagaaccgaacagttaggtgtcctcgtgccagcccttcaacggcacgccggggacgcatggtactagtaccccanttggggtgacctcagccatagaagagagaggaccctttatatttctgccagcctacgacacactcgcatgatgctgatacttacactacacgatcatcagatcatcttaatgatgtgctccactagctacagtcggaggacgcatctacgn

SEQ ID NO: 706959 - DNA, 757 bp, Homo sapiens
  misc_feature (423)..(423): n is a, c, g, or t
cggttcaccttcggtcaatgaaccagatctggacacacgtccgccaccggggtgcaagagacctgatcggaccgggacctgccggccggcttcaatggccgtggaacagtggaggacgaagagcgggacccgagccctgttgcaggaccagctctgccccctaattataaaagcagtagttcagattcatcagacagggatgaagacagtagttctttgtacgaagaaggaaatcaagaatctgaagaagatgacagtggtccaactgcaagaaaacagaggaaaaatcaggatgatgacgatgatgatgatgatgggatttttggaccggcccttcctacaggattcaaaaagcaggatgattcttctccaaggcccataataggtcctgcattgtcacctggtttcattgaatctacacanaaaagtgacaagggcagagatgatccagggacacaagaaacagacagcactgaagatgatgatatttattgacccatgcctggaaaagggccaggtaactataatgtaacggccggaagttgaaaaaaggggccccaaaatggaagaaaactgaccaaaggggagtatgattcatctaaaccccatgggagagagccatggttgactggacttcctccacaaatgaagacatttggctttgggccaggactttttaatagagaaagcgtgacccatttggggacgaacaatttgagaaatcttcccttgtttggggaggggaggtatgtaaaca

SEQ ID NO: 706960 - DNA, 674 bp, Homo sapiens
  misc_feature (113)..(113): n is a, c, g, or t
  misc_feature (143)..(143): n is a, c, g, or t
  misc_feature (253)..(253): n is a, c, g, or t
  misc_feature (270)..(270): n is a, c, g, or t
  misc_feature (332)..(332): n is a, c, g, or t
  misc_feature (347)..(347): n is a, c, g, or t
  misc_feature (356)..(356): n is a, c, g, or t
  misc_feature (388)..(388): n is a, c, g, or t
  misc_feature (589)..(589): n is a, c, g, or t
  misc_feature (593)..(593): n is a, c, g, or t
  misc_feature (618)..(619): n is a, c, g, or t
  misc_feature (626)..(626): n is a, c, g, or t
  misc_feature (635)..(635): n is a, c, g, or t
  misc_feature (646)..(646): n is a, c, g, or t
  misc_feature (648)..(648): n is a, c, g, or t
  misc_feature (654)..(654): n is a, c, g, or t
  misc_feature (666)..(666): n is a, c, g, or t
gaccgcgttataaagtaaaggaacccgagatctgcgcagtgggtcccttgccgatttctctcacctcacctttcaaacctaaactcgagcctactgttcaccggcctagcatngctctcgccatggctctcagcgatgctgancgtgcaaaaagcagataaagcatatgatggctttcattgaacaagaagccaatgagaaagcagaagaaatagatgcaaaggcagaagaagagttcacacatagagacacnggtcggcttgtgcaaancccaaagactaacagattatggaactattatgagaacgaacacgagaaacagattgagcagncagaagaacattcangatgtccanatttgatgaatcaagcgagactcaaagtcctncagagcaagagatgaccttatcacagacctactaaatgaagcaaaacagagactcagcaaggtggtaacaagatacaaaccaggtaccaaagtgctcgctggatggactggttctccagggtttgtgttaccagttgctggagccccgatctgattgtccgttgcaggaaacaaagatttccctctggtaaaggctgcagngcanaaggcaattcctatgtccaaaattnncaccaanaacgatgtngatgtccaatngnccaggngtcctacctgcntgagacat

SEQ ID NO: 706961 - DNA, 732 bp, Homo sapiens
  misc_feature (526)..(526): n is a, c, g, or t
  misc_feature (732)..(732): n is a, c, g, or t
gacagataaagatggtgaacaacctcaaatactgctggaggattccagtgctggggaagacagtgttcatgacaggtttataggtccgcttccaagagaaggttctgtgggttctaccagtgattatgtcagccaaagctactcctactcatctattttgaataaatcagaaactggatatgtgggactagtaaaccaagcaatgacttgctatttgaatagcctttgcaaacactttttatgactcctgaatttaggaatgcattatataagtgggaatttgaagaatctgaagaagatccagtgacaagtattccataccaacttcaaaggcttttgtttgttacaaaccagcaaaaagagagcaattgaaaccacagatgttacaaggagctttggatgggatagtagtgaggcttggcagcagcatgatgtacaagaactatgcagagtcatgtttgatgctttggaacagaaatggaagcaaacagaacaggctgatcttataaatgagctatatcaaggncaagctgaaggactacgtgagatgtctggaatgtggttatgagggctggggaatcgacacatatctggatattccattggtcatccgaccttatgggtccagcaagcatttgctagtggtggaagaagctttggatgtcttattcaggcagaaattctggatggcccaaatcagtattttgggaacgtgtagaagaaagtgtgtgn

SEQ ID NO: 706962 - DNA, 572 bp, Homo sapiens
  misc_feature (113)..(113): n is a, c, g, or t
  misc_feature (143)..(143): n is a, c, g, or t
  misc_feature (253)..(253): n is a, c, g, or t
  misc_feature (270)..(270): n is a, c, g, or t
  misc_feature (332)..(332): n is a, c, g, or t
  misc_feature (347)..(347): n is a, c, g, or t
  misc_feature (356)..(356): n is a, c, g, or t
  misc_feature (388)..(388): n is a, c, g, or t
  misc_feature (487)..(487): n is a, c, g, or t
  misc_feature (491)..(491): n is a, c, g, or t
  misc_feature (516)..(517): n is a, c, g, or t
  misc_feature (524)..(524): n is a, c, g, or t
  misc_feature (533)..(533): n is a, c, g, or t
  misc_feature (544)..(544): n is a, c, g, or t
  misc_feature (546)..(546): n is a, c, g, or t
  misc_feature (552)..(552): n is a, c, g, or t
  misc_feature (564)..(564): n is a, c, g, or t
gaccgcgttataaagtaaaggaacccgagatctgcgcagtgggtcccttgccgatttctctcacctcacctttcaaacctaaactcgagcctactgttcaccggcctagcatngctctcgccatggctctcagcgatgctgancgtgcaaaaagcagataaagcatatgatggctttcattgaacaagaagccaatgagaaagcagaagaaatagatgcaaaggcagaagaagagttcacacatagagacacnggtcggcttgtgcaaancccaaagactaacagattatggaactattatgagaacgaacacgagaaacagattgagcagncagaagaacattcangatgtccanatttgatgaatcaagcgagactcaaagtcctncagagcaagagatgaccttatcacagtaccagttgctggagccccgatctgattgtccgttgcaggaaacaaagatttccctctggtaaaggctgcagngcanaaggcaattcctatgtccaaaattnncaccaanaacgatgtngatgtccaatngnccaggngtcctacctgcntgagacat

SEQ ID NO: 706963 - DNA, 829 bp, Homo sapiens
agcgggctgtacccgacccgggacgccctgctctcgcgccgaggggttcggcgcgggatacgtgcagaatccggactagctgagaacatgtagaatttccggacttggagcatacctactgtcgtcatctgcttcccgtgcgtgtgtagatgtggacaatatttctgcctacaaaggctgggactgacagatgactggtgaaatgtattggtttggaaaacttggttgcacataatcacagctatatatgaatagccaagtgcctaccttcctggagctactctatgggaatatgggcgtcacgaccacgcatggacaagtccaaagaccgacactttggcttctcctctgggtattgtggcgtcgcagacttcagcatccattgaatgccccaatggcgaaggaccgaacatagcgtaggtcgagtgtcggcgagtcaatcgcttgatatgtggccaaccggctctcaatcctcgctgcacgtgggcgccaagtacaaagggtggatcggttctagctgggcttgggcgtgggttctatacttggttagagtagacctgttcctttcatttgatcaatccagttgtgcgagaatcctacgacagaagtaacccggatatatatagataccaagtgcggatcttggcgcgaggcctttaatctcttcaagtccccatgggtaacgctaggagatttctgtggctttgcattcggaagggtggatccagagctgtctactaggaagatcattgtagagcaccagccgatggatacatagcgcatgcttgcttgaccgagaacttagaataggtaaagggccacagaccaa

SEQ ID NO: 706964 - DNA, 754 bp, Homo sapiens
ggcaagcagcgagcgtgccggtcgctagtcgcgggtccccgagtgagcacgccaggagcaggagaccaaacgacgggggtcggagtcagagtcgcagtgggagtccccggaccggagcacgagcctgagcgggagagcgccgctcgcacgcccgtcgccacccgcagttagccggcgcagtctgagctcaccagcgcagcgctgcctagtggagcgccagcgagcaagaagtctgaggggtcggctcgatgcttggccgtgggaggagcagtgcttggctccctgcgagtttggctgacaacgactggagtctgtcaatgccccccagaatggtgatcgaggagttctacaaccagacatgggtccaccgctatggggagagcatcctgcgccgacctactgcatcaccagcgcgtcgtggtccctctcagtgggcatcgttttccttgttgggggcatgattggcatccttctctgtgggccttttcgttaaccggtttggtgcggcggaattcaagtgctgatgatgaacctgcgtggccttcgtgtccgccgtgctcatgggcttctcgaagctgggcaagtccttttgaggatgctgatcctgggccgttcatcatcgggtgtgtactggggctgacacaggcttcgttgcccatgtatgtgggtgaaagtgtcacccaaggcctcgtgggggccctgggcaccctggaccagctgggcatcggcgccgggatcttcattggccaggtgt

SEQ ID NO: 706965 - DNA, 348 bp, Homo sapiens
attcattcatgaaaatttgactgagtattcatcataagacttggattttgtcagttaatgcttctaaaattaaacagctgcatgacaatttttcttctttctcagaattttaattgaattatgttgtagctagtgttcaaaaatgattaaactcccttacctcctcttgcacacacacacacaaatggtaactgtgtggtgaaggatgtgttaattaatttgatcatggtgatcattataaaatgtacacatatatcaaatcatcatgtcatacaccttgaatatatacaacttttatttgctgatcatacctaaataaagctggaaaaaaatatagatttgcaaagc

SEQ ID NO: 706966 - DNA, 168 bp, Homo sapiens
catgctgtcttcagtgatgggtgacagagtgagaccctgtttcaaaaaaaaaaggttggtggactcatgctctaatatataatcccaaatagggaattagatgcagagcagaattaaaacgaagtaaattcaaaaaagactatcaccaaattaaaatgttgatacaat

SEQ ID NO: 706967 - DNA, 371 bp, Homo sapiens
gcggtactatgcgttgcgctgggtatgcactggctctgcggtgggatacccgcacttctcccgcatgggcaggtatgccgtcgctgcacgtgggatcacggtagaagggcaggcacgcaaggcggctggtgtgagtgtgggcccaggaacggggagctgctcaggtcactgctagtgaactggacttcatcatccgaaagctgcatccggttctttaaaggaggggggtactacggactcttgcttacttgcgccgatgctttctcccatcgtgaacctgcgtccgtggtcacttgtgaagcagggttgctcactgggcaagtcgcgcttctccgattctcctccatagccactgtctgtgtccgtgtcgc

SEQ ID NO: 706968 - DNA, 170 bp, Homo sapiens
cacgacgacaatatttgacccgcaatctgcactgacacacatcactgtgctaaaacataacttgaccatcgtgattaaccgctccaactccaccgctgctaccactgacgttcctgaggccacagtgttttccaagtctcccgtgatactgggtcagcccaatatcctca

SEQ ID NO: 706969 - DNA, 180 bp, Homo sapiens
ccataaaccttgactaacactgtgggacacttacaaagtgtctcttgtgatactgaaaatgttcccaagaagcagagaaaagtcatgagattacatgagaaaggtgaattgcttgatatgtaccagaagtctgcagctgtcacttcaagataaatgaattcagtgtaagaaccattgttt

SEQ ID NO: 706970 - DNA, 974 bp, Homo sapiens
tgcactccagcctgtggcgacagagtcaagactccgtctcagaaaataactaaaaaacaataaaagtaggtgaaaattccttataaatccaggattggctctgagcagaactggcgtaagattcaggaacgaacaccaacacttccgaatccaacacaggttaggatgacaattggggccacaaattttagggaggagatgtcggatgccggagaaaacttaaacgtcgtctaaactgctatactcagaggaggaacatagtacgaaggtcacgtgacacggtcttggcggtaggcacaacatttcaagaactgtccattgcaatggctggtgggagtgacagactgcccttagcctgggtcacgccttcctgggccataaatggggcatccgctgctgctacggctacacctgtgggaacacaaattgacagcttacgagcagccaatgggttgcaagataaggcggataaaaaacacctacaggcgtacggggtcccactgaaggttccaagcaccactgacatctttcctggatgtgcggtaacgcaaacacgagcacagagaacgcagagagttactgaccgactatgcaagcactatgccccccttcacttaatactactacacatcgtctccccctatgactaatcacaaccaagtactaaataaccctgcagcgcactctgcggcctcgaacttccttcgggcttgatgacaccattgtcgccacgctgcaggcgttatacccaacaacgtgacaagcggctaggcccaagtacatgacccctcggcccttccccaccattcgagaaataatgggcacgcccttatacatcacatcggcttgaagaagggcaaagaccattgcatcataacaatgccttaccgacaagctgacgcttaaccggggtgtactcatgccgaaaaagacaacatgcctgacatactcagcatggtacccagaaaaacgca

SEQ ID NO: 706971 - DNA, 277 bp, Homo sapiens
gctgacgccgcggtgactttagaggtccccatctcatgctaccagtcgaagcacagatgtaagagtactgcgacacaatgactattagcgagattatccgagctcaaacaagatgagtgatagatcgcgggaagttgcttcgccacagccataacaccatcaatgttgagcagcagcatatggaggcttacttactacgacttcaggctcacccgttgagctctcgccctcgtcatcaatgacgactggtagcatgagatggtccgcctagcagttc

SEQ ID NO: 706972 - DNA, 439 bp, Homo sapiens
  misc_feature (33)..(33): n is a, c, g, or t
  misc_feature (174)..(174): n is a, c, g, or t
  misc_feature (426)..(426): n is a, c, g, or t
catctcagagggtcctaggaaggaccttgttanataatgaatttggctttggtaaaataatttgggaagggtctcaggaagtgaggatttgctctggattgagtgctgtcagtaagtggggacagttttgtgattgggtatcttaagaaatcttatcttgccgggcgcgggtgntcacgcctgtaatcccggcactttgggaggccgaggcaggtggatcatgaggtcaggagatcgagaccatcctggccaacatggtgaaaccccgtctctactaaatatacaaaaaattagcctggcatggtggcgggcacctgtagtcccagctactcgagaggctgaggcaggagaatggcatgaacccaggaggtggagcttgcagtgagccgagatcacaccactgcactccagcctgggcgacagaancgagctccgtctc

SEQ ID NO: 706973 - DNA, 768 bp, Homo sapiens
  misc_feature (24)..(24): n is a, c, g, or t
  misc_feature (95)..(95): n is a, c, g, or t
  misc_feature (114)..(114): n is a, c, g, or t
  misc_feature (118)..(118): n is a, c, g, or t
  misc_feature (181)..(181): n is a, c, g, or t
  misc_feature (206)..(206): n is a, c, g, or t
  misc_feature (216)..(218): n is a, c, g, or t
  misc_feature (220)..(220): n is a, c, g, or t
  misc_feature (222)..(222): n is a, c, g, or t
  misc_feature (233)..(233): n is a, c, g, or t
  misc_feature (278)..(278): n is a, c, g, or t
  misc_feature (292)..(292): n is a, c, g, or t
  misc_feature (295)..(295): n is a, c, g, or t
  misc_feature (310)..(310): n is a, c, g, or t
  misc_feature (312)..(312): n is a, c, g, or t
  misc_feature (369)..(369): n is a, c, g, or t
  misc_feature (371)..(371): n is a, c, g, or t
  misc_feature (380)..(380): n is a, c, g, or t
  misc_feature (395)..(395): n is a, c, g, or t
  misc_feature (405)..(405): n is a, c, g, or t
  misc_feature (458)..(458): n is a, c, g, or t
  misc_feature (462)..(462): n is a, c, g, or t
  misc_feature (470)..(470): n is a, c, g, or t
  misc_feature (480)..(480): n is a, c, g, or t
  misc_feature (485)..(485): n is a, c, g, or t
  misc_feature (516)..(516): n is a, c, g, or t
  misc_feature (560)..(560): n is a, c, g, or t
  misc_feature (605)..(605): n is a, c, g, or t
  misc_feature (648)..(648): n is a, c, g, or t
  misc_feature (732)..(732): n is a, c, g, or t
ttattcgtttatttttgttttttntgcattttaatatagaggtggccattacaggtgaggaaatgaatttttaagttaatttaaattcaaatgcnacatttggctcgtggcttntgtnttggacaacacagctgtaggccctgacctggtccagggcactttggtttaaaagctaactttnaggagagcaagtggtagaaacagcncttgggtttnnntncncagagagaaanggcagctgcagctgttggaaagggcaagaattagagtgggggganacttcgggggcgcnggntaaggttggccagcngnttgggcaggccacttgtggggggttttttgatgtggaaggtttgggtgaggagattntngaaggagcngtaggaaaggggcancaaagtgcangtgaggcagatcacgttgtagggcatgctgaagtttggtgttgggaggtttancagnaggggctntgtgtagagntgcanaaagtagttagagcgattagagattgggaanaggctgttgaagaggggactctcttcccagtccactggcttggntgctaccatgctgggcacaagggcgctgaggacagatgggctganatagaagccatggttaggatctggcgtgtactcggtccacttnagcagcgcccgctcaaactggatggaaaccttggtgactgagttggccggcagctgaatcagcatctccaggaggtggggttgnagccggtcctgggcaggctggtaatggatgtaactt

SEQ ID NO: 706974 - DNA, 903 bp, Homo sapiens
gaacgggccgatcatgcggtataatgtcgacgccaagaggcgtaagattgaggcgaaccacactctggtgcgcctttctctgtgaggcccgtaggctgggcaaaagtgacatcaaacggcctgttaaccgagagtaacggcccaccagaaggccaaaaactcggcgccagagtgacacacacgtccagagggctcaagaaaccacacagtccagcggcagcaagggcccagctctggaccctggcgctgaagggcccatgggacaccccccagctgttttgtggttgtgtggccccccagccaacccagcgcgttctttggccgagcgacgttctcccaggcccctgtaaacggcgtggaactcgccacaggccttgaccaaggaatatggtgtccccgtcctgggacaatggacacagcaaggatgacccacagcggtctttccgacagaagtatgggacacgcccctgggcacaaccctgcctggatgcaaccccacagagagattaagcggcaaaaaccccggtggcctccttatggggagaagaaaccatgacaaactcccctggatggcgcacacaagtatgcatcagaagcagccttgacatagacaaacgttcaattccaataaggctaacaaaggagaatatgttctcccggatgtatcacagggagcaaccctaacacatgggtgtgaacaaaaataggccgcgtgtaaatccacggcttctattcaatcactgacttctggacagatcagggatagaggcccattctgattacacaaaggcagtgccccgcaaaccactgatacaccctaataccaagcgtggtgttcagtgacccaaaacagcagagaaagatagttctaaggactcgcaaaaaaaagcacgcacccagcac

SEQ ID NO: 706975 - DNA, 561 bp, Homo sapiens
atccaggcgaccccggtaaacatatttctgctttcttgtctttcggatcatccgggaagggatagagacccaagaatccttaccatcatggcatagatgctctctagtagtcatggagtcaggaagacgggtagaatcccacatagtcattcaacagatgtatgcagctctatatctccactactatcacaacggctagtgaccatgccctaactcacaggtatgactatctaggtgctccggtaataggcgatgtggagacaactggtgcgtatggtgctccatggtcacaaggtggcactgccaacagtctaccacccggcacagtttgtgctcttcacactagcgctcatctcgcttcttctctaggttgtaggtgagctcatagtctgaattcacaaacagaatattttcaggcttgaggtctgtatgtagtcagcttgttatcatggaggaacttgacagcctggcacagctggaaggccatgtggcgcacttggtggatggggtagggcaggtagtagttgtctttgaggaactcgaaggtgctagggcccagaa

SEQ ID NO: 706976 - DNA, 383 bp, Homo sapiens
  misc_feature (11)..(11): n is a, c, g, or t
acctcacaaantccttagagcaaataagtcctcaatgtcaataacttgtttgcccagttgctcagcacagtgtatatacatgcctgtgttcctgactgcttaaaagctggctgtgtgtggtggctcatgccgataatcccaccactttgggaggctgaagcaggtgggttgcttgagcttaggagtttgagaccaccctggccaacatggcgaaatcctgtctctaccaaagatacaaaaattaggtgggcatggtggtgcatcctgtggccctagctactcgggaggctgaggtgggaggatcacttgagcccaggaagtcaaggctagagtgagctgtgatcacaccactacactctggcctgggtgacagtgagatcctg

SEQ ID NO: 706977 - DNA, 148 bp, Homo sapiens
cctcggcatcacttccttcatgggaaggtgttggcgctgatgtcgctcatggacggatcacactgcgaaccacacacgaacgctcacgtgggatgtggaggtcagaccatctcacgagactccctcaagctcagcaacacacccagga

SEQ ID NO: 706978 - DNA, 518 bp, Homo sapiens
atataaagcagctgacagggcctcacgggccacatgtagaataatgtgagcatcgataacaatgatcataattgattataaaccacctgactaaataaaaacccatgagtccatagtgatcgtcacagacagatatttattggccaccattagaggcgagtcataacaccaagtctttgctgtaaacatgggtcattatagtaccttgccaggaatatcacctaggtgataaaattaggacaattcaccattttggcacctttcggtaaattaatccaggcaagaaatcatcaagggttatgcacacagtgcccaggtatctctccgaaggctatgtgctcatggccaaaaacacaccttccaagggagagatcagaatgaccacccttggccgctgatcagacttagcgtcactaacagttggacacctggtgagacataatgggttaagaagcacccagcattgcctggcaattgttaaataagcttgagctgccgggtgacgtggctggccagct

SEQ ID NO: 706979 - DNA, 229 bp, Homo sapiens
  misc_feature (8)..(8): n is a, c, g, or t
  misc_feature (72)..(72): n is a, c, g, or t
  misc_feature (82)..(82): n is a, c, g, or t
  misc_feature (112)..(112): n is a, c, g, or t
  misc_feature (197)..(197): n is a, c, g, or t
  misc_feature (222)..(222): n is a, c, g, or t
ggcggcgncggcggcagtggcggtcccactggcaggcgggcaagaggggagtccgggcggcggcagcagtgnggagccgggngaccaccatggtaaagaagcggaaaggccncgtcagtgatcgactcaggacacagaggacagcggcagacagagaacctggatcaggagctcttgtccctggcaaagcgaaaccnaggtgactcttgaggagaaggagcngccttgt

SEQ ID NO: 706980 - DNA, 428 bp, Homo sapiens
tcattaggaggtgttcatcaacacgtgggttggaaagaaaatatggtacatatacaccatagaacactatgcagccacaaaaaaagagtaaaatcatgtcctgtgcatcaacatggacacagctggaggccgttattctaagcaaattaaagcaggaaaagaaaaagcaaataccacatgttctcacttataattgggagctaaacgctgggtactcacggacataagaatggcaataatagacactggaactactagagaggggagagagagagggagggatgagttgaaaaactaactgttgggtacgatgctcagtacctgcataacgagattattagaagcccaaacctcagcatcacacaacatacccacgtaacaaacctgcacctgtaccactgaatctaaaacaaaagttggggagaaaa

SEQ ID NO: 706981 - DNA, 213 bp, Homo sapiens
agtattcgttcaggaacgagaaaggtatcattgaggaatgctagtgtctcaatacatatgcatgtgtaatcacgagcccatgaacatgaataacgtgaacatgaggccaggaactgactgagaacattatgtcgtgcgacatttattgtatgcatgactgctatcaaagcagttgcccctgtcagcgtatgactgactacgcttactcgtggt

SEQ ID NO: 706982 - DNA, 199 bp, Homo sapiens
gccggacgaggaccccagaaactattatgcatctgatgagtctcaagggtcgtgtgtatgaagtgagtcttgctgatttgcagaatgatgacgttgcatttagaaaattcaagctgattactgaagatgttcagagataaaaactgcctgcactaacatccatggacatggactcttaccctgtgacaacaatgtgttc

SEQ ID NO: 706983 - DNA, 744 bp, Homo sapiens
  misc_feature (305)..(305): n is a, c, g, or t
ccttgacctgtgggaaatccttccgcaatttacacataggggaaaaattcccaactggtaaagaaaaaaggcaataagtgactggttgtcttacctttaaaatgccccataattcttaataccatatgggctaccaccaaatttaaactggagagagtttactagagcatgtttgtatctaaaataatgatctagtaggagaatcaggcattgatgatgtagaaagagaagagttagggaaaagagaaagacccttagagccttaacagataaggggtgatggacatcatacatagatcccacanagtagagaaggcatgtacatagataatattgggttgtatccctgtatacagaaagaactcactctttgttaaacagccctgaagccgtaataaacctttatcaaggactaagtcaccaataaatctccaatatctaaaggtacagatcacatggtaatccaaccagaatcagtatgaaaagacagccaactccatctaattacatggacattataaaacagttttctaaacaactcttggattaaagtggaaatcagtactagaacacagactgtttgaaattacccatgaaccacactccatttcaaagcttatgggatacaacccaagtcttaactcaaaggaaaattcagagctttcagtgatcttcttaatatatacggaagattgaaagtaaatgatctaagcacccagttcaagaaagtttaaaaaaattaaa

SEQ ID NO: 706984 - DNA, 141 bp, Homo sapiens
ttacctcctcctccaccctacctacttcccctacctcatcctctctctacttcctacttgtagagcacaggcatcttggctcgtgcctgagggaaggaggcggcgtgattaatgagtacaaaaatatcgctggatggaatg

SEQ ID NO: 706985 - DNA, 1300 bp, Homo sapiens
ggtcctcacgttggtgccgcggcgtctgatcctcgtggatatgctgaagtcgatctagggacggaatacagtccggcggtgagcgtgctactctctagctgctcggaagcgcctgtcgccagttcttgctcttccgtgctcgtcaactgcgtccggagaactactctatgcgtcgagactgttgtccctggcatatcagggaatacctgtcagacacacggattcatggtaggcttacgcatccctttcttgaaagatcaacccactgaagctggccatgattcggcacgttccattacttactaccgaccggtgtggggacacgccaggttaaaccagacgctggctacaatattctgtatccttgccacggacgctgacgtaactacgctaacctgctccttctggaggcttgccttattctctcctgaggccgacgcaatgatgttgaggctctctgggaaggcagatttcacctcggacaggcgtctctcggcagtaaactagcgcctcgacgtggaggaattccgccggagggctcacggatccgattgtcccgtgcatagcaatggcgaaacatccatccgatgggccgcgttcagaacgccatctccatgtaccaggcaagacttcccaaagaaatgccccgactggggacgaattggaggcgtggggtcacatacaacgcccgcaaggagcggcctgaatgggacataggctggcactatatgggttccccttggggaaggaggaatggtgtctgaaaacccatgggtacccctaatcttcgggcaatccttctcttttgaccccgtggcgggatcttctcgggcccgacaaaccgcggaccccagcggttccttcgtgatggaaccgtattccatgggaagaatctccgatcgttccataggaagttgaacgtgcaaaggtgtggaaacgcctttgttgagagttacagggttggagggtggacgcgatctgtggagaaaagccttccgaatgggggtgtggttgggggggcacagtggacgggctttgtgcgttggaggcggaagctaatcctccggaacaaagaaacgcgtttcaggctccgtccaacggcaaccgaacttaaaaggaaggcacttgctttgacgccccgatgggggaacctttcttggagacgcggccccctttggacggaagcctaattaaggggagttgctgtggccataaggctgtttttcacattctacgggcaatttggaaaggcatgtctgttacactattcgtatacgctagtgcttggggcacacattgg

SEQ ID NO: 706986 - DNA, 588 bp, Homo sapiens
taggaatctgtacctcgggatcacgtggctttgtgtaccaggcgtccagggagcaattaggagggcaatctgttaagtcttttgcctcagggcagagccattaggtgtgctgtgtatgtgcctcaaggggtgtaaataactaagctattcatgtactcatcagtttcctttcaaggcatctgtgaaacctttaatctgtggaagaatcagagaaagttgacctattgtattattatcctccctcacctgaatattttgataaagtatattttagaatttacagattggacattaagcacatgaactttaaattccactttccattttgatgtgaatgttctaaaagttccctatgatttaaatgtaagcagatctttaatgtctacagaagagatttttttttttttgttgatttattatctttcggagtgaataaattccatttactgatggctgagatttctcactgtcatactacagaaatgagcagcattccagtttgtttcctatattaattttggggcattattgaaaagaaataatcattcgtttccctttctaccattgcgcataaatgccatttaaatg

SEQ ID NO: 706987 - DNA, 461 bp, Homo sapiens
  misc_feature (110)..(110): n is a, c, g, or t
  misc_feature (117)..(117): n is a, c, g, or t
gccgtggcggtgaccggagcatgccgcccgacatgaactcgctggaacaagcggaagatctcaaggctttcgaaagaagacttactgaatatattcattgcttgcaaccntgccacntggacgttggagaatgcttcttatagtggtgtctgtctgtacagctactggtgcctggaactggctaatagatcctgagacacaaaaggtgtccttcttcacgtcattatggaaccatccgtttttcactattagctgtataactctaataggcttgttctttgctggaatacacaaaagagtagtccgcaccatcaattatagctgctcgatgtcgaacggtattagcagaatacaatatgtcctgtgatgatacaggaaagctaattttgaaacctagacctcatgttcaatgacagtccgcactgttgctagagaacctaaaccagtcttttctcaagtga

SEQ ID NO: 706988 - DNA, 1110 bp, Homo sapiens
  misc_feature (825)..(825): n is a, c, g, or t
ccacttattatttttttttctctttttgtgttttctgttgtggttgtattgtgtggttggttgtgtttgttgttgttttgtcgtatatgcttgtgtccacacaccgcacgcggggcggctcgcgagaggagaaagagagagggcgcaggaatgcagcgctcactatcttatgtaacctgctgtcgttctttcgcctcgccgctgtttttcttcgtcgccgcaggttgtcttacatattcattatctgttgggccttacacagtaggctctgtctcctctctctccaaggtgacaccctggtcccttttcgggctcccagaggactgccctttgttcccacagcaggacccccaagggggacccccgccgccagatggcgttccctggtccaagtggccactcccaggcctcgatccggtcaagccaagtcgccttggactggcgtgtccccactctaaagactggcccctaccccgtccgccctgcccccgagttgctcttcagtattcacggagacctgtgggaacgaggctttttcctccatgcggctggcaaattcggaggtgacttcctggtctatcctggggaccccctccgcttccaccccccttatatcgctccgtgctgggcccctgaggacaccactcccccgtcccagaacctggttgcttcgtgggcgcccctggagaccacgcgttacgaaagagccctcgctcctctggtctccgccacgcccgatggtaaaggtggtctacaccctcccctgccatgggccagcctgcaatggaactcacgagacctaggggatgtggctgtgtcggcacncagagcccttttggatgttccccagctcttctctgggaggtctaggacatcctcctacccttctccccgggtagtttttgattcacggtgtttcgaacaactaacatcttttttaatgtttttccttgtttccaaagcaacttattggctgtgtttttgtaggtacctaatttcaccctgtgagctttcccgagaatggggcctgggtttgattcatctgtttttctaaccgggtttaaatctcacggaggtttccataaaccttggtaaattaaaatgttccta

SEQ ID NO: 706989 - DNA, 2126 bp, Homo sapiens
  misc_feature (485)..(485): n is a, c, g, or t
  misc_feature (543)..(543): n is a, c, g, or t
cggacgcgtgggtcgacccacgcgtccgagcacgttgattttttacaaatgtaagtgtgcttgggaattcccttaaattttgtgcaataaactattttttggataaagcaacaaaaaaaaaaaacaaaaaaacaaaaacataaacaaagagagagagagagacagacaaacaaaaaaaataatacccacacagagagagagccccaatatgttctcacacagaagacaccacaagatatataatgtgagacacgcaaaaggagcgagggcccaattatgggaggcgacgccaggagtctgaaaagaggcagacagcacgagcaggcacgcgacgaactcgtccaaacaagcccggcgcgcagcaccgcgtgggacacacacaccggggcgcagacccaccggggcagcatacatcacgcgcagcaagaagacgaaccacccggcaacaacaactacaccagacgagtggcgcagtcgcacacaancccaaccacataaccgtgctcgcggcagcgacacgaagagagaaaacacgacagcagncaatcacagcgaacgcagagaactctcaaaaacagcacgccgcccctcacacacagacagcgccaccaaacaaaacaatgctgctcacgacagaacccccgtccacaccagacaggacgtgtaacacacaaacagagaggagagcctaacacacaaccccagcacagagaacgacaacaaacagtatacgtggactagaacaggacagaagcgtcacgagagggaacaaagaaattcacactcacgcagccgacgaagcaaagcaagagaagaaagcaaaaagaacacacccagagacagcgcacacagagacaacgacatgtacaacatagatacgacagacacacgcacgaggcacgaaacgccaaaacagagcgaaagcacaacaaagagaacaacaacaaaccacagaacgacgcaaacacgacgcggcaggaaacaccgctagaaccccacgcagcagcgacacaccacaccgacacggtaagcgaggaaagcgagccgggagagcggagcgagaaaagctgacagcgacggagatcagacagcgaggaagaggaggcagaggtacggaggaagagagaaagagagggagacagacgacgagcgggagagcggggagaggagggagagcgagagaggcagcggcgaagcgagcggagcggccagagagagcgagacgggagaagagcgacaacggagcggagaggggcaggagaggcgtggagtagacgagatagaggaagcgaggggaggagggaagcaggggggcgggaggcaggagccggcgagggcgacgagagaggggaccgagagaagggacagaagaggcgtggacagagggagcgtgtgggagcagcgcgagtcggaggagaggagcacacacaagggacaggaggaacaggaacacgagacagaggcaagtgaaggcagagcaaaacgagcgggaggcagcaggacagaggcagcagggcatgccaacgcaggagaaccataggaagacgaggagaaagagaaggacgcaaaagggaagggcagacgaagccagagcaagcgacggagagagaggcgagcagggaggggacacgacaggaggaagaaggacagcgacgtcaggagacagaatcgcagacaaggcggaacggaccggaagaccggagcgagacagagcacagagacacaggcataatgagagacagcgtagggaagtgacaggaatgtagacaagagagcacggtacagcgtaggcggagacgcgagacccagcggacggagatgcacaagcagatgaaacagggagcgcgacaacgagaacacagagacgcagatgacgaaagaacgagcacagatcgagtgagacagggagcagacgaagacgacgagtacggactaacgaagaacgaacgaagactggagactacacggatgagacaggtagagccgagtaagccggaacaacagaggagaacagtgagagacgcggacgagagaggtgaaacgcaacgcggaagagagacgagcagaccagctacaagcgaagagacgaaacagcagagaacaaagtgaacgaagggaacagacgt

SEQ ID NO: 706990 - DNA, 1346 bp, Homo sapiens
gcaggaatgggaggcatccaaaacgagaaggagaccatgcaaagcctgatacgaccgcctggcctcttagctggactgagtgaggaggcctggagaccgagaaaccggaggtcgtggcgagcaaaactccgtggcagactacattggtaccaagaagggacgcccgatggtcattacgtaggctttggcagccattcactcttccaatcatccacttccgtatggtaccttgcagtgcgcctcataactcattcgggcgaaaactacgtgtgggcatccaagtgcaccgcagtcgtatcgtgccacgtattgacgatatgcccgctcattgtcgtgctgacttcgacattgtgatgacagttcgacaagctattgtagacggagaccttgggtcgctaatgcctgcctaggatcctgtgtgatgaagcagaatctactcccatggggtcttctcgggcattaggggtcaatatagagttgagcaatcgcgaagtaatcagcaatcggacgttgcgaggcgttggaggtaacgagtaggaatccgagggcgtcgtcaaaaggggagggaagcgttgctcgttgcattgcagacgaaagaaaaccgagctgagcaggagggaaaggtagaacagggcccttacagagcccgcaagaattgccccaagctcgtgggtttggaccccgtgagaagggatcaggattgccaccgcaagatctcgagtgacccctctgcccaaacagaatacatttgagcacagaacaatacccagtgagccccaaaattattgaacagaaggcctgggctctgcgaaacgacaaccctgtaggaccgtgatgccttatggaccaatgtgtcacttggtgttcttcaaggccgagggaattctaggaagggacggagggcaacccactaagagtgggtacaacgacgaccagtcaggggttcgttgcatcgcaggggttttggagaacagcctttggcgtcgaaggaccgaaacaggcttcaaacaatggaaggcttcgaaaggagacgggtaacaaggatccgcaagggttaccctttgaggaaaggaagtcacgaagaccctgtgcaccattcccaattcgacgaacacaatttctttgaacagggggacccaaagacttttggtgaaggaaaaccatggacctttggacgggcgcaacgttaggagagaggcccagggcatctaacagcacccgctttcagcaagacattctggaaaggcacacagacgttcaaacgacggggaagttcccttttagctttgcacagcccttttggaacgttcagcaaaaagacctttggggaaacaaagagaacaccg

SEQ ID NO: 706991 - DNA, 224 bp, Homo sapiens
gtagtggctcaagagtggctgactcccttcttccaaatcagcccatcatagaacacctattgctgaatattatatgccataggcttacactggatccctcataattggagactttaaagtgttcaaaacttcaagcctggcctttgaagtaaaatccttttttttttttaagtacaattgcaatctttaaatatttctccataggctaatatttattcaatcct

SEQ ID NO: 706992 - DNA, 115 bp, Homo sapiens
ctcgctcttcagtctcaatgttggtcagacagcaggcttgctgggtttcagatacatttcttaggtcttccaggtcttggagtagctgcgtctctcgcctaagttcagagccagg

SEQ ID NO: 706993 - DNA, 700 bp, Homo sapiens
  misc_feature (10)..(10): n is a, c, g, or t
  misc_feature (12)..(13): n is a, c, g, or t
  misc_feature (260)..(260): n is a, c, g, or t
  misc_feature (265)..(265): n is a, c, g, or t
  misc_feature (299)..(299): n is a, c, g, or t
  misc_feature (320)..(320): n is a, c, g, or t
  misc_feature (406)..(406): n is a, c, g, or t
  misc_feature (433)..(433): n is a, c, g, or t
  misc_feature (540)..(540): n is a, c, g, or t
  misc_feature (549)..(549): n is a, c, g, or t
  misc_feature (557)..(557): n is a, c, g, or t
  misc_feature (641)..(641): n is a, c, g, or t
  misc_feature (651)..(651): n is a, c, g, or t
  misc_feature (669)..(669): n is a, c, g, or t
  misc_feature (683)..(683): n is a, c, g, or t
gcacttgcananngcggcctctttgggacggggatggtttgaggaaacacttttaaagaaaaaaggaagacattgaaaggttttagtttcttccctatctgcatgtcatctcatatagaaagcccagaattaggggctagaactccaggagagggtctcccgactcatctcttgctgacggtcaccaggatgcagaaatagggagatggttagtgggggccaaaagatgccccctcccaaggcttcgtggttccctcctnccgcnccctggaatctttggaggagtcagtgcctcactncagcaagtgagtgcctactgnatgcaggtagtcagccaaggcaaaagagagactaaccggtctcatgggggaacctcttgcgggaggccaggtagctgggagcgaanggttcccggcttgccctttgcttgctnggttggaattggaagagggagacttcttttttgttggtttttaattttaaaaacacaaagggcctaaaagaaatacgtatcttataaattttttttaattttttgangacgttcanttaaatgnattgtgcacgaatgaattctatatatataaaatatacatatatagctctataatttgggggaggggcactgtctcttttttccnctcatttttnaaattgaagtgttgttgncctttgtatgtggntcaaccatccagctccc

SEQ ID NO: 706994 - DNA, 316 bp, Homo sapiens
  misc_feature (19)..(20): n is a, c, g, or t
  misc_feature (36)..(36): n is a, c, g, or t
cccgccttttttacaaaanngggccccccctggggngggaaaattgggggttttttttttgggggggggttccccccccccgggcccccccaattcccgggggggggttgggggaaattctttttttggcttttaaacttttttttttggcccgggaaagggccccccctttttcccccggggtttttttttttaaaaaaaggggttttttttttcggggtttttaaaaaccctggggttccccccgggggggattggggttttttccccccaggggcccccccctgaaaaaaaaagttttttttttcccccccca

SEQ ID NO: 706995 - DNA, 277 bp, Homo sapiens
ctcctacaagcatctgcactctaggtatcagtactggagagtctcacccatggaccccacgcagcacgccacgtactccctcccaccccgagatcaagacacggaaaccactgccgatgggtgcaacgcactgcgcccgttttctagagccttccccgtccatctacaggcaggatgcggctgggaaaaagacaactgccaattctcgaaggctgatggtccgcacggatgatgaatctaccagaatctgttggctcccaagttgcgcgggataaga

SEQ ID NO: 706996 - DNA, 253 bp, Homo sapiens
gaaaagcgtcaggaatcagaaagcttattatcctagtgagacccaaggttccatttgctacagaagcctatgaaataattcctaggacaaagggtcactaagaagtcattcatcttttgggtaatagttgaaggagtcagaaaacagtcacaccagtagtttagggaaggattatagctgattgcgttatttttttttttttttttttgggggggaaggggggggggcccagagaggggaatttttttttttt

SEQ ID NO: 706997 - DNA, 535 bp, Homo sapiens
acgccgaccgcgctgtcaaaaggatttggattcctatcttaaaactacgatcgccagtcacttacctagtctgatctgcgcagcacctacgaggtatccaatgaacctgggaatcgctaccactctccagctacatcaatgccctggtgctctatgtcgggactcaggccattgggcacatcctaccacaagggccgcgcattttcaatgagcaccatcactccactcaggacacatgggataatcttcccagaattggggttgtggcactgggcctgccagcgggtcgatatctctatttatgaaggccaattgaaaatcagctccggtccccgaaatagccgacacttgcatacttcagtagcaccaggctgtaccttatattgcagagggcaaatacgggaagccaatacagagcacagatcacaagaagttctctgtgggcccgggtcgccttgtaacatgggccacatcctgggcggtacgaccataataacgcttcattgcgctgtttaaagacccagcgtttagtttc

SEQ ID NO: 706998 - DNA, 388 bp, Homo sapiens
atgtgtgggtgattagaggattccaaacgcagagaggaagtagttatacgtttccggtcaaccgatcaagcacgttactccggcacctcgagttcttggcacacgttcagctcgagtgatgctccccgggctccgatccagcaaagcttcggggaggagttccgtcagcacgacggcatggtgacgatcttgatgttcaaccgtcgcagggcttcgcctaagcaccgttacaatatgaccgaggtgtaatatcgtggaggggggcccgcacatggctaaggaacaatcacgaagatcaacttgtgtgtctatggggtgccccctacccccgtatacaaaggagtggaggaggggagggtcggccctctctatgtcctctctgcgtttg

SEQ ID NO: 706999 - DNA, 301 bp, Homo sapiens
ggcagcaggatcaggtctctctgcactctgtgctctgaggccctcagacgtttggttgccagacctctgtgcttcatgccccgccgtggttaatttttacacaccctatgcgacctttctccagatcctgtgctggcgagaccaatgatccttaaagaaggtgtggagtcttacccaaactgaggatttctgcaaggttcacaggttcaatatttcaagcttccgaagcctgtgaggttcccaatactgtcagcaacaaccttaggagaagacttaaaactatctgaatacatatgccgag

SEQ ID NO: 707000 - DNA, 929 bp, Homo sapiens
  misc_feature (438)..(438): n is a, c, g, or t
  misc_feature (515)..(515): n is a, c, g, or t
  misc_feature (547)..(547): n is a, c, g, or t
gtgaaggatactagtcagcagtattaaccaactcaacgctgaagacatggatgaaattgaaaagattgactattgaagaaagaactttattgcttgtgcacgatcctactccatgtgagaatgactcaccaggttcatgaacgcaatatcttcggagccgatgctctttgagacagaaattgtcacagaaggcgccattacgtgtcgcggtagctaggctctctgacacgaggacttacataaaacctaatcacataagcgcctctgtcaaccttctctcctttccccgtcccgcctgtctaacttccacaccaccctagaaccatcgcccactccccccttcccaccttcctgctaccccctcccttcattagtcctcatctccaccggctgcctccccaactttatctaatccccacccctccacacctcgcagtnccccggtacgccgcgttccttatacatccccaaaattggcgtactcgactcactctacgcccctattagtcgtcagncataccgcgatcctaatatgggacacattganatcgtgcacaggccccgacacgtaatcgtcacactcacccaccgacacgactacgcatcacttcgcgcttgtttctctcacgcctgcccctcccgcgcgcacaacacttactcagcacacctcgtttgcttacctgctatctgtgatggcgaatgatgttatctcgcatgtaacatcgctaaccacacgtcttcgccacccattgaagagatccatttctacgaagcgtaactgttttcaagccgataggcacattatcgcggacacctcggaggcgcgcactgccgccatttggtgatgagagagcagcgtctctccagctgcttgcacacctagcgaggcacctctcctctccgtgcgcgagaagtgcgctatgcccgcg

SEQ ID NO: 707001 - DNA, 996 bp, Homo sapiens
gctgtataattatatatggatatacacacatagaataaatcttagaattgtatgatatattatgcatgtctatgtgattacttacagtagttaatctcatgttgtttatgggacatttatattatttatagatttttgtatattacaaataaagctgctgtaaatacttgaaaaaaaaaaaaaaaaaaaaaaaaaaaaagaaaaaaaacaaaaactaagaaaaaagataaaaagaaaaaccacaaaacacaagagacggcggcggctctactctataaatccatgagtacgccgaaattacgcctgcctgcccagttttttaagacaacaaccacactccaagcagactggactacaatacataaccaccccccccccctacaacaaaacacagaagagcgagacaagcaacatcaacgagtacacaattacacaccaacacaaacaaccttgagggggaaccacacatagaccgcccccaccaccccccaaaaataacacacacccctcagcccaacacaacaaccatcccacgtatctacgagatccagtcgccccgccccccaccacaccgacgacagcgcaaaaaaaaggctcgacccccccccgccagctgacagacacacatacatcccccggccacaacacaaacatcacgcccccccagcaccagcaaacacacgcacgcacccagcaccaccccgcaccatccccccaaccacagacaacagccacccaccaacgcaacccacaacacaccagcacacgccagcaacacacgccaccacgaacacaccgccaaacaacaagcaacgccacacacacaccccaaaccagaccaccccgacaaccacgaaccaccaccagacccgacaccaaaccaaaagcacaccgaccgacccgcacacccgcacagaacgcccaacaacacacaaaacacgaccacaagcacgcgcacccaagccacccaccacccacaaacacacccagcaccca

SEQ ID NO: 707002 - DNA, 406 bp, Homo sapiens
  misc_feature (9)..(9): n is a, c, g, or t
  misc_feature (52)..(52): n is a, c, g, or t
acctcgggngagccctagtcacaccgagactagggggagggctgttttaatngtgggtttggccgactgacgactggagtgccctcctcggctgtcttagttgtagtcggaggtcatgtaaatcgaccttaaaagaatgcataagccataaattaaaataaaccctcatccaagggctgatccatacgtagacaatatccaacctggacaaaacgggcttcccttgcgagccgacctaaaccgcatcccccaaagaatagagactaaatgcaaagtaagtttcctagcaaatattttgttttcttgaaaagtgttgggttgattcgctgtgtgactgagacgccacagtgttcggagcgcttcagtgtcacccaggctctgggtgcgggaggtgggaggagaggaa

SEQ ID NO: 707003 - DNA, 238 bp, Homo sapiens
cacgccagataggcctatatctggctgtatgtctcttctgactagtgtgtactaagacagtgttgtgggtgttggtactaacactggctcgtgtgacaaggccatgaggctggtgtataatgcggccttgagagtgtgtattcaagtcggcgcacagtcaggtctgaacaggactccccatcccaaggaccccagacacactataggccgtgttctatagcagcttactgcagtgtcc

SEQ ID NO: 707004 - DNA, 126 bp, Homo sapiens
  misc_feature (18)..(18): n is a, c, g, or t
  misc_feature (99)..(99): n is a, c, g, or t
ctcacccaccacatcccnaacacaaaaccctcattcacccgacaaaacaccctcatgttcatacacctagcccccattctcctcctatccctcaacccncccccctgataccgggttttcctctta

SEQ ID NO: 707005 - DNA, 355 bp, Homo sapiens
ttctgcacgatccccggccgcacagcttctcaatatcatgaacaatttattaaatattactgctgttagataattgaattactcctacatgatgtattggtatatttcatgtggttgttttgcatcggtggtagtccgacgttacgtcggtgtgcattccgtgtataggccgagcaaagtgttgtgggaagtaaacttagatttactgccgactcatattttatatcgaacatggattttggctgtatgttctcggtctagcgtgtgtagcctgtagtaatagggtgaaatcagcttaattacagcccccctatgattgcataatacagcctcctattgtattggacatatttgg

SEQ ID NO: 707006 - DNA, 451 bp, Homo sapiens
ggggtgcagggtactgggtatacgagtaaatactggagactcgtggtcactggataaatttcctttggggactaggtcgcacagttttggaaacaattttaaaccctcccccttcacacacatacttatcaggtggtttcctagttaaaaacccaagtagctcagatcctacttttaaggtcggtgcagatttggcattggaatcaggccagtatgtttttcctcattttaaggcggtggggctctagttttaaagtggatataaagaactcagcaagggtttaatttcctactcatacttggggtgtgggaaacactaccactagttatcattaatcacctccaagggtctccggaaacaaaaagggtacctttccattaggggataatggggagtgatagtagtggtgcccagaaaacacttcctcacaatggtgcttcccaatcacca

SEQ ID NO: 707007 - DNA, 258 bp, Homo sapiens
  misc_feature (16)..(16): n is a, c, g, or t
acctcctaccccacgnttgcagctgcagctgccacaagtttaccttgcctctgttgactgctccagctatagggttttcctctaaaaagaaccagctgtattggatcagagctgctactgtgcatctcaccccctgtgcctgaggaacagagggagccagccattgccagagaaagagtccaaccatcaagaggtgcatttaagccaggtgaggtgtcttcctgccagcacaatcccagcactttgtgaaatcaaggc

SEQ ID NO: 707008 - DNA, 182 bp, Homo sapiens
gtccatcaggtattctatacattgaactttgttgtgatcaagaacagcagtccaagacgtgtcacacaatgagctggtttgatgggaactgatgggagcaagactggccatcttctcccatcagcattactaataagtggctcctttaacctctccacccttatcacagcacaagaacacct

SEQ ID NO: 707009 - DNA, 155 bp, Homo sapiens
atgctggtgcttgtcatcccagctactcgggaggctgaggcaagaggattgcttgagcccaggagtcaagaccagcctaggaaacacatcatgaccccatcctgaaaacagaaaggtgctagcagatggaatgctatctcttctgcattatcttc

SEQ ID NO: 707010 - DNA, 141 bp, Homo sapiens
  misc_feature (42)..(42): n is a, c, g, or t
ttatgtgagtttgggatagggtcggttagggtcccgtgggtngggcgtttcctctaattagtggtttctcatctgtttgtgaggagctagctaaaaaggattgggaagctgagaaagaaaagcttcatcagttcatatatt

SEQ ID NO: 707011 - DNA, 504 bp, Homo sapiens
tgccacccaggcgggagtgcagtggcacaatctcggcctactgcaacctgtgcctccggggttcaagcgattcttctgcctcagcctcccaaacagccgggactataggcatgcaccaccataccgggctaattttggtatttttagtagagatggggttcaccaaatcggccaggtatggtggcatcggtaaacagcggtgtttgtcgatgccaccgtctcaaactaacaggcttagtgatgtaataatggttagcagaggtacacttgtgaataaagagggtgggggggtatagatgtcgcgagcagcaacacaaagctttggcatatggcatactattaaacatgctgtacatacttttggggttcatgtggaacggaatgcacagatgaaggtcggtagggtgtactgttgaagagtttggttataaaactttggggaaaagaataaaccaagaatggattgggcccatcatttcaagaagtcccctctcctccacattt

SEQ ID NO: 707012 - DNA, 472 bp, Homo sapiens
ctagcctgtcccttatttctggaggcatgtcactggacacaaatcaaccatcacagtctagcgtgtcatgtggccaccatataaatttcttaaactgtacttaaacttcagataaaaacaataggatacctgggccaggttgcagagtggagaaatggataattattgtttaatgattaaagtttctgtttgggataatgaaaaagttttggaaatagtttgtggttatggttgcacaacactaagttattgccactgaatggtacacttaaaagtggtcagaatgataactgttttgtattatatgttttactacaattattaaaaaactaataatgtaatataccaaaaaccattgaactttaaataggtgaattatgtggtgtgtgaatcatatatgaagttgttttccattcagagaaatattagaatacaaagttgaagaagtctcccagaagtagaacaacaacag

SEQ ID NO: 707013 - DNA, 330 bp, Homo sapiens
gacacacctaggctgagaactatagtctatctccagggtcagcagcaacagaagtccccctgaaaaatactggccccaatcgctgcagactgacaacttaaaaggaactggttgaagaccaagacgagtttcctaaactggggcaagcggccccttcctggccaacaaaccgaggggcaaaggggcagggaccacagcagcagcagcaattccagaacttttcagtctcctccccttaggaaaacctaaagcccaaaaacaaacagaattcctaccaatgctggcccccttggaagggcagtctttttggcccctggcagcccctcatcc

SEQ ID NO: 707014 - DNA, 213 bp, Homo sapiens
  misc_feature (19)..(19): n is a, c, g, or t
  misc_feature (70)..(70): n is a, c, g, or t
tttagcaagtaccaatttnatggaccaagtattcacaataaattttatatcaccacaaaaaaacatcttnacctttgaaattgagaagaaaccgtggggagcataccttgtggagcatctctggtgtactagtgattagtattttggcttttgctcaccccacactccacttctcctctctcaatgatgcactaatcttcttccactgcgatc

SEQ ID NO: 707015 - DNA, 327 bp, Homo sapiens
ctgccttctgccttctgcctctcctctcctctcctctccctcaattctgcagcgttcttcagctttctcttagggttgagtatgcacaccccgctgtgcatacctgcaggtgccttgggtacacatgtgctcgtgttttgtgtgtgcacccctgcatgcatgtggattggtgtgcatgcacgcatggtgcttctgcgtgcaaatgtgcgtgtgttctctgtgtgcacatgcagatggaccagtgtgcatgcatgcatgcatacagtcatgcacggtgccttgtgtgcacacatgcatgccttttccgcgcgatcgcgcggtcgacgc

SEQ ID NO: 707016 - DNA, 332 bp, Homo sapiens
  misc_feature (14)..(14): n is a, c, g, or t
  misc_feature (83)..(83): n is a, c, g, or t
  misc_feature (113)..(113): n is a, c, g, or t
  misc_feature (123)..(123): n is a, c, g, or t
  misc_feature (131)..(131): n is a, c, g, or t
  misc_feature (133)..(133): n is a, c, g, or t
  misc_feature (143)..(143): n is a, c, g, or t
  misc_feature (151)..(151): n is a, c, g, or t
  misc_feature (159)..(159): n is a, c, g, or t
  misc_feature (193)..(193): n is a, c, g, or t
  misc_feature (197)..(197): n is a, c, g, or t
  misc_feature (205)..(205): n is a, c, g, or t
  misc_feature (208)..(208): n is a, c, g, or t
  misc_feature (236)..(236): n is a, c, g, or t
  misc_feature (247)..(247): n is a, c, g, or t
  misc_feature (253)..(253): n is a, c, g, or t
  misc_feature (280)..(280): n is a, c, g, or t
  misc_feature (285)..(285): n is a, c, g, or t
  misc_feature (294)..(294): n is a, c, g, or t
  misc_feature (316)..(316): n is a, c, g, or t
tacagattgctgtngcctttttcccctacattttttaaatgttctcatggttacaatatccagcataaagaggttgttcagcnattccacgttcgaacataaagcagacgagngccattatcngtatatantngaaataatanatatatangaaatctntaggaacaacagaagtttataaacaacagcaatngccngaggaaanaancttggagtaaagagttagttgcatccanatattctcccnaaaganaagcttctacaccaatgaaaagttgtntctgnatatgagtnccgaaaaaatcaagaggttccnctttatagtatttcct

SEQ ID NO: 707017 - DNA, 277 bp, Homo sapiens
gctgctgggagcacaggaaggacaagtggccaacccagcagggatccaggatggctaaaggaagaggggagcaagtccactaggtgataacagccagaaatgtactggggaaaatgggtcaaggaagaatactctcagtccagggaacagcatcatggcttatttttatcccctttggacctcagtacaagagtaatacttactttgcaggaaagttatgagcaatgcattagtagagcaaagtcatgagcgatgcatctataaagaaggagaatga

SEQ ID NO: 707018 - DNA, 107 bp, Homo sapiens
caaagaactgtacagtcattatattcttcctgagaataatttatattcccccaaaaactaaagggagggtatattttttcaaaattaaccgaatgggtggtatagct

SEQ ID NO: 707019 - DNA, 411 bp, Homo sapiens
gctccttattataatgctaattattgctatagggtatgatatccctggtatattcgctcttgaaatccttataaaaggacgtactaggcataatactaatcgcactgggataatactaatcagaattggaccatgtattaagcttagaagtgagcgaactagacgaggcgggcgctatggggagtggatgtcttggaggcgatgcgcgccgcgcggcgcggcccggaccgcgcgcacttttattttatgattgattattatgataaacctggaagacctgagatggattgctttatgatgccattttatatgggggacgactgggaggagggagcgcttgagctttgcccgacggcccaggcacggggccggagggcggccctgcttgccaacaaaccgctaagccttcgc

SEQ ID NO: 707020 - DNA, 247 bp, Homo sapiens
gtgtctactaataaaaaaaaaaaaaaaaaaaaaattttggggggccgggggggggttttaaaccccccctttttggagggttgacaaaaaaaatcctttaacccgggggggggggggttccaaagacctgacttaaaattccccctttgtcttcaaccgggggaaaaaaagggaattttttttaaaaaaaaaaggggggaaaaaaagaaaggaattttttccttttcaaaaaatttttggggggaaa

SEQ ID NO: 707021 - DNA, 236 bp, Homo sapiens
aaggccggcgacgttttctcgtaaatggattccaattccgacggcagcatcagcctggacgagatgtcgaaggcgctgaagagcggctgtcacggtcaccacgcgcaaggcgccagcggttcgggcgatggatcggattccttgttgtcgtcgagcggcgggtggacctcgaccacgacgaccgccgccgacggctcgaccaccaccaccgtcacctatgccgacggcttcaagat

SEQ ID NO: 707022 - DNA, 122 bp, Homo sapiens
tacgaatcgagctcgtaccttgagatcagtaggcggactcacgtagcgtagcacctcctcgcctcctcttcttccttcacgcagccaacacacatacccccagcaggcgtgaccgctccgcg

SEQ ID NO: 707023 - DNA, 180 bp, Homo sapiens
ccgtaagctggagaagagaaatgaagggtttccccacgcccagcgaactcttgggttcagctgtggcccatttactcaaggtcttgatgcatacagacttcaggtccccaatgtctgccttcagtctaacaccatcgttcaggtgttgtcctggtggtgatcctctcatttctgaatccc

SEQ ID NO: 707024 - DNA, 733 bp, Homo sapiens
  misc_feature (32)..(32): n is a, c, g, or t
  misc_feature (136)..(136): n is a, c, g, or t
  misc_feature (211)..(212): n is a, c, g, or t
  misc_feature (243)..(243): n is a, c, g, or t
  misc_feature (259)..(261): n is a, c, g, or t
  misc_feature (271)..(271): n is a, c, g, or t
  misc_feature (285)..(285): n is a, c, g, or t
  misc_feature (298)..(298): n is a, c, g, or t
  misc_feature (346)..(346): n is a, c, g, or t
  misc_feature (355)..(355): n is a, c, g, or t
  misc_feature (358)..(358): n is a, c, g, or t
  misc_feature (361)..(361): n is a, c, g, or t
  misc_feature (364)..(364): n is a, c, g, or t
  misc_feature (367)..(368): n is a, c, g, or t
  misc_feature (373)..(373): n is a, c, g, or t
  misc_feature (376)..(377): n is a, c, g, or t
  misc_feature (379)..(380): n is a, c, g, or t
  misc_feature (385)..(385): n is a, c, g, or t
  misc_feature (388)..(388): n is a, c, g, or t
  misc_feature (392)..(392): n is a, c, g, or t
  misc_feature (394)..(394): n is a, c, g, or t
  misc_feature (410)..(410): n is a, c, g, or t
  misc_feature (412)..(412): n is a, c, g, or t
  misc_feature (415)..(415): n is a, c, g, or t
  misc_feature (430)..(430): n is a, c, g, or t
  misc_feature (443)..(443): n is a, c, g, or t
  misc_feature (461)..(461): n is a, c, g, or t
  misc_feature (548)..(548): n is a, c, g, or t
  misc_feature (623)..(623): n is a, c, g, or t
  misc_feature (707)..(707): n is a, c, g, or t
ttctgccgctaggaggaggttgactaattggngggactagggcggggtgagacattatagtgttgcagttaaagaacatgggctctagatttagacagacttgcatttgactccaaatactagaacttaatagccncgaaactttggataagttaaactaattcctcaaacctgtttattttaaatctgtaaaatggttctggaaataaannttacttctcaagagtggtttttataattaantgggataaagtataannngtagttatcncagtacccaaagcnaaatacatttgtnataaataattggcttcaattactgttcttaccctaattcttgtcaganacctctttntcntcnttnctnnttctngtnntnntgccnacntctncnattgccgctgctactncnacnactattgccattccngcgggggtatggnggggggggggaatcagtnagcctgacatcagttatactttgaaaaggaaaatagcacagctggacagttaaacggcagagagaagagccaacagtaaattcttgntatgatccagccaagagatgtggagagctttagaacaatggctgtgataatgaaaaaaaaaaaaaaaaaagtaanccgggggcgggatagtgaatagcaattactttcctagagcgtcctttaaaaataataacaaacaagctacctagaattcacttnatgtctttttaaccacaaccattcta

SEQ ID NO: 707025 - DNA, 527 bp, Homo sapiens
cagaggatctcacgagtgcaacacacagaagacacatatcaaaaggagtgtcgtgtgtgtggataccaccagcgctgtcacactgcccatatctcaatgacttttaaaacaaaaaaagcgaaacggtggccagaggctgctcctttgttattccatgctttctaaatccaagtcgaatgactgctttggtcacacttttttagtcacagtaaaaaatcacgggcgccctctggcatgcatgacatgcgataatcagaaaaggtaccactcccgtgtatctagtttctgaatatgtctgttcacggaccacaagggcatgggtcaccaatccgaagtggatgggactaaaccattgcgccttagaggccctcaattcaactacgaaccctttaacagcaacagcattaatatacgcttttggagctggaattaccgcgggtgctggcaccagacttgtcctccaattgttactcgattttggatgggtttaaatatcccccattgaaaacgacaatgcaaaagcactg

SEQ ID NO: 707026 - DNA, 216 bp, Homo sapiens
ggaggggggcccctgattttgtttccccctgtagcagcattttttaaaaaacatagggttataaacaatgctttttttctgtatatttttttttttgggtgccccccttttttccgcccccaaatttttaaataattaaagtgccctgcagttagggttaaaaaaaagttaaaatattttttttttccataataaaattttggttttattttttta

SEQ ID NO: 707027 - DNA, 428 bp, Homo sapiens
  misc_feature (198)..(198): n is a, c, g, or t
  misc_feature (204)..(204): n is a, c, g, or t
  misc_feature (212)..(212): n is a, c, g, or t
  misc_feature (237)..(237): n is a, c, g, or t
  misc_feature (268)..(268): n is a, c, g, or t
  misc_feature (271)..(271): n is a, c, g, or t
  misc_feature (297)..(297): n is a, c, g, or t
  misc_feature (299)..(299): n is a, c, g, or t
  misc_feature (327)..(327): n is a, c, g, or t
  misc_feature (330)..(330): n is a, c, g, or t
  misc_feature (353)..(353): n is a, c, g, or t
  misc_feature (378)..(378): n is a, c, g, or t
  misc_feature (381)..(381): n is a, c, g, or t
  misc_feature (394)..(394): n is a, c, g, or t
  misc_feature (402)..(402): n is a, c, g, or t
  misc_feature (422)..(422): n is a, c, g, or t
catgcatgtagtccactccagaaatcatgctcgcttcccttggcacaccagtgttttcctgccaaatgaccctaaaccctttgtcctgcagagtcagggtggcttttcccctgactgtgtccgatgccaaggagtcctggcctccgcagatgcttcattttgacccttggtgcagtggaagtcagcacaaaacagtgncctggntgtgtccntggacgggtggacttagctaggganaaagttgaggcagcagccctcgaggccctcncanatgtttaggcaggcctcattttatcncncagcatgtgcaggcctggaaaagcaaanccnaatttcagggaagtccttggttnatgtatttgggtttcctttggagcnctntgccctcctgtcncccagtanagtaaataaacttccttggntcctga

SEQ ID NO: 707028 - DNA, 648 bp, Homo sapiens
tggaactttaaatccccccaaaaattgttttttatccagttaattttggatcccaaggggtttttgggaagaatttttggtacaagcgggggcccaggcttcaaaattttgggagacctccgaaagccagaacagagtgtgtatatataccagaaagaggcaccgggtaaaaacgggcgaatttgagagaactatgtctttaaagcacctccttcttatgaagaacgccctcaatcaacaaatattttccttgggataattaggcgcacaccagggggtttggagaaatttgagcctagccgaggatacgtataatatcttgggcactgagttagcagccacaccacccctctttaacaccggagaaccagcggatcgttcttcgattacccgcacagaggaaaaaaagatgcgcactactttttggccgggaaaaaaaaacaaacgacacatgtgagttttcccacaggcaagtcttggacaactgtgaacgcgcgatgcgccgacttctaaaaaatatcatttaccggagggggccgccctcgttcaccacatttgtgatatgaaacaccactatgtgccccgcgttatgagcaacgtggcagcacaaatgtgccgacccgtatctcttactagcggttctccgaa

SEQ ID NO: 707029 - DNA, 638 bp, Homo sapiens
  misc_feature (61)..(61): n is a, c, g, or t
  misc_feature (87)..(87): n is a, c, g, or t
  misc_feature (117)..(117): n is a, c, g, or t
  misc_feature (152)..(153): n is a, c, g, or t
ggctgcagagccaggccccatgtcggggaaagggatccaagcccggcccagggaccccatngtaggaggttcgcagctacactaagngctgtcagcttcaaagggccatggcttggnacggcggtcccactggagtgttctccgttcgacgnnggctatccacgtttccgcctcttcgccgggtgcaggcgtgagatcaatctgctgtgtacatgtgtgccgtggaccatttgttacatcccagggaggcccccgggggtcccaccttggccccccagggggcaccgtaagacatgcgatgggtttgcggatttgccagggacgacatgacatgaggccgggcatattcactgagagtgcgcaaggctggagtgtcaggacccaggtaggggggcacttgtagccaccgacttgcccggttcaacatggagggcgatggggcactgggcccagagatgggcattccaccggagcacggcctcctgagccaacttcacgctgcgttcaagctcgcgctccttctcgcgctcgcgctctttctcgcgttcccgttcgcgctcgcgctccttttcttcgcgcgctcgctgctcggctcgcgccgaccttctccaccaggtcggccgcttcttggccagttg

SEQ ID NO: 707030 - DNA, 172 bp, Homo sapiens
gagtcttacgcaatctgcaaaatcaaagccaagtatattgctgagcacggtggctcacgcctgtaatcccaacacctagggaggccgaggcaggcagatcatttgaagtcaggagcttggtaccagtccggcaaacagtgtgaaactccatccccactaaaaacacaaaaag

SEQ ID NO: 707031 - DNA, 574 bp, Homo sapiens
ccccatataaaaaaaaaggggccccgcggcggggggggccccccccccccaaaaaaaaaaaaaaaaaaccccccgtttttttttttcttcgccgccccccctctttttttaggaaaaaaaaaaaaaaagtgtcttgtttttaaataaaaaaggggggggcccccccccgggggcggggggggggggcttcttccccaccaacttttttttgtaaaggggggggggccccccccccaaaaaaagggggggcgccacacaaaaagggggggccccccccccccccccctctttataaaggaaggggggggtgtggtgggggccccccccctcccccccgccggggaataattataataaccccccccccccctatataaaaaaaaaagggcccgcaaaagaggggggggggaaaaacccccgcccccccccttttataaacagaacacaaaaggggcggttttttaaaaaaagaaccattgttccccccggtggtggacacagggggggattgggcccgaacctttttaaaaaagtaaaccggccagttaaaagccccatggacctccggaaaaga

SEQ ID NO: 707032 - DNA, 966 bp, Homo sapiens
atatagctctgttcggcagatatctcctttagatgtgtgcagcagcatgttttgctggggggcgcgcgccgctatcaaagctttgtgggaccagcggttgtttagaaagatgtgctgatcaccgcggctaatagccgcgtgtgtcattctgcccaagtggcgcggtgagggacttacacaacacacctggtggcccatacccttctgggggaaagcttcgctcgcgcacaaaattcataaggcaattttacaggtgaaaccaacagtgtggccgccgtgaattatagggcaacatatcctgcgtcgctcctggggtttatacgccccgtggggcacccaacgtgtccagagccactggcccgcacacgcggcaccaattggggggagtgcccctatataccgtgttcccctaaggagatccccttctgacaaaaggcggttgtgtagaaggaaagaactccctcctcctctcccggaagtcttttttatggaaggcgcctctccccaccgttgtttgatattttctaagagggcctccctcaagtcatcctgtgtcaaagacgcgcggaatttgctaataatgcttcgcctgaattacgccgctcgagtggcccaccaatacgcaagcttaattttgtcgagggaagaaaatatgtggggtagacaagcacacgggggtgcccacacacgccgcgcccccagatgtgggggcacacaacgccctggtgttgccccgacgccgagccgcgggctccagggggcacccaaataaccctacacaagccgcttcctggcgccagcacagtttgtcctccggcacacacgccctgtgccccaggcaactaaacatggcgtgccacccaacaccgcacgcgggtgctccctccgcaggagggtatcaccaaaggagcccgacccacacgggggtaaaaccctccttataaaaaaaaaatccgcaacatgaca

SEQ ID NO: 707033 - DNA, 191 bp, Homo sapiens
aaagaacaggatgtcttcccctgttggtgatcaaccaacacgaccgaggttggctccaccaatcaccatacacaaatggcctgtatcaaattggataaagtggattatcgtgccagtccctaaatcaatctgcacagtatcgttcaccttgtatgacaggatctgggtagcgagatggttccgagcatcat

SEQ ID NO: 707034 - DNA, 151 bp, Homo sapiens
gccaagagcaagactgaatgtatagcagagtgccttgttagagtggtaacctagtcttggaagcaattcagtggatgtctcataaagaggactagaacttaagaagcttctgtgctggctgaggtgagccctttcgggatatgtacatact

SEQ ID NO: 707035 - DNA, 250 bp, Homo sapiens
cggattttagcccgactagtggccatccccgccagttgcgtcacttgaccacccacgcactaactttacaagaccgtttcagcttgatcgttggcatgatgtgcgacaaatgggtctgcgtttggtatttggcacccaatgcctaaaaaaatcgataacgcaccgcgcgcctggttcaaacacctcttgtcggaatatcatccactcacatagctcaatttgcgcctgatattgttgtgccactctgcaa

SEQ ID NO: 707036 - DNA, 162 bp, Homo sapiens
tcttcagtgtcggcgcatgagctggatgtctaggcacagctcttagcctccattattcgagcctgacgctggcccagccaatgcgatctacagggtaacgaccacatctaccacgttatcgtcacagctcatgccttggtaataatcttcttcatagtaata

SEQ ID NO: 707037 - DNA, 149 bp, Homo sapiens
  misc_feature (34)..(34): n is a, c, g, or t
gtgaaatatgtgagggagggatttttgagttttntggagaggttagaaaaagagacgtattgctaatacccatttgaatcgtgagtcagcgttccatagcgtgttcaacattagattagttcaggtccattggatgcagatggagacaa

SEQ ID NO: 707038 - DNA, 247 bp, Homo sapiens
  misc_feature (49)..(49): n is a, c, g, or t
tgcgtccatggcgaggtgcacagactgtaagtgatagtcgcatatcctngtctataaaaaaaaaaaaagtggatcaaacatttctttaccagtggtcttttttttctaaattcagtctttctctggcttttttccccggctatggaggaagtatttggccttccctactcacggagaagtatggccttcggggtacactttctaaagcatttctgattggaatattttgggcacattcctcccaagg

SEQ ID NO: 707039 - DNA, 501 bp, Homo sapiens
  misc_feature (266)..(266): n is a, c, g, or t
  misc_feature (485)..(485): n is a, c, g, or t
  misc_feature (495)..(495): n is a, c, g, or t
attactgaattacttgttatgtagaactataaccatgggaaggtttcccttgaggaataacaaagcatgattcacagcttttctaggatgctttagactcttagtactaagtaaaattctcagttcagaatacagcccaggccaattcataattaaacctctatttgttctgatgatgcttccaaaatagaattgctaagttaaggaagtttggtatgttaatttacaccagtgatgaactcagctacgcagggcactaaccctantgttgcacacgctgggttcctgatcttggtgcgatgttttggttacatggcatctggcaggctttctgccatttgggtttcagaagaacatgaacagtatattattatagctcctttaattcttccacttttaaaaccaacatgttttttcacaagtgttggtagtgtttgtccgggtgcctcagttgtaacttgttgtataatgactgtctgtacctnatggcctccntaaatt

SEQ ID NO: 707040 - DNA, 155 bp, Homo sapiens
gggcgaattcctcctcctcctgggcgaattcctcctcctagagatatgtgtatatatcctattcatagatatgtggtgtatatatcacgtacatcagcagctcatatatcatatcacatgatatacagcaaccatatgtgtgtgtgtgtgtgtgt

SEQ ID NO: 707041 - DNA, 199 bp, Homo sapiens
ggagagcttacttaaacgcttaagagccccgtttgtgcaattcctggggatttggggagcgaaaacacacgccgggtagtggtgtgcacgagaatcttcataatgccccacctacccgtggataaatcgtccagacagcccgggtgcacatcgggtacagcccggcgcgcccagcgcgcccaacataccgccgtcacag

SEQ ID NO: 707042 - DNA, 502 bp, Homo sapiens
tggaattacctaccgatacccagcacgcagccgccctcgcccggcagcatgagccacgcatgaacggcaaggcgagcatgaaggcctatgccaagaagcctttgcgccatgccgtggagattcgcaactagacttttgccgtgccggagtacatccaattgctggataagcacggtgtggcgctggtggtcgcggacaccgccggcaagtggccgtacgtggaagacgtgaccgccaacttcatgtacctgcgcttgcacggcgacaagcagttatacgccagcggttatagcgccgaagcgctccagcgctggggtgaccgaatcgaacgctgggcccaaggcaagcagactgccgatgcacacctaatcgaccctcaccacacaccccgcaggcgtaaacagcgcgatgtgttctgctttttcgacaacgacatcaaagttcgcgcccccttcgatgcacgccaattgctgcaacgtttcgggctggaccaacacctgct

SEQ ID NO: 707043 - DNA, 394 bp, Homo sapiens
  misc_feature (137)..(137): n is a, c, g, or t
  misc_feature (376)..(376): n is a, c, g, or t
gatggctctaatttctggcttatgcaactgagtggtgccattgagagagactctctctcttgccttcttggttggcacactggggagaagcgagctgcagcgttggagaggcccatgtggcaagggactgagagcancctctggccaacagccggtaagcaaccagtgagcaaccgaggccctcagtcccacagcatgtgaggaactgagtcctgccaatgatcatgtgatactgaaggagggtctttctttagctgatcctacagatgagaatctagcccttgtgctgcctcatgagagacctggagcagaggccccagctgagctatgcctggattcctacccacagaaactggaagacaataaaagtgtcgtntatgtttttttattctgg

SEQ ID NO: 707044 - DNA, 165 bp, Homo sapiens
actgatctggcagggacgggaagcttatcggaggagcacggtcggggcgctgctggacggcatggcgtctgcctgggccccgtctctcctgtgggcccagctgtgtgaacctggaaccagcagctcccctctgcagtctgcgtgtgatcagtccgttcgcatgtt

SEQ ID NO: 707045 - DNA, 110 bp, Homo sapiens
acaacaaggccacaaacaacaagccactagggcgaaaacgatatcataatgtggcagggcgtccattatccgaacgatcgagcgcagcgaagctggtagcgaggaagcgg

SEQ ID NO: 707046 - DNA, 980 bp, Homo sapiens
  misc_feature (2)..(2): n is a, c, g, or t
  misc_feature (53)..(53): n is a, c, g, or t
  misc_feature (88)..(88): n is a, c, g, or t
  misc_feature (127)..(127): n is a, c, g, or t
  misc_feature (167)..(167): n is a, c, g, or t
  misc_feature (197)..(197): n is a, c, g, or t
  misc_feature (231)..(231): n is a, c, g, or t
  misc_feature (247)..(247): n is a, c, g, or t
  misc_feature (283)..(283): n is a, c, g, or t
  misc_feature (291)..(291): n is a, c, g, or t
  misc_feature (348)..(348): n is a, c, g, or t
  misc_feature (360)..(360): n is a, c, g, or t
  misc_feature (362)..(362): n is a, c, g, or t
cnttttgctgcatgaacaatgaaaattaacctctgcctttaaatggaaaaatnactttctgtagattgttatacagctactatgaagngctcttaatgaagaggaagtggcagtggtctatatgtanactgaaaaaatatcattaataaagttcaaagactgatggnatttcattgcccttaaagatatgaaccagntctgttttatgcttttctccaattatactaactngcagttgaaaaggatntgttttggagagtgttattttcttaccaagagaccnggtcaagnatccctatacttttccaccaaaaaaagattaaaatgaagccatttctataaatttantggcactttatntnttatatagaggaatggcttctgtttgattttctggacaccatgtcagtcaagatctactttctgtgtaaaaatgaataagtcttgcacataatccattcgtgttgcataaggttgcaaaaacaattaagtgggaaatgactcctaacttatgtgtctactctgcctagaaagaaagttttgaaggcatctatatatatttcataacaatgtctgttctttatggatttgatccataaatatttatctatctgaaaactttgatacttggaatgttttccttagagcatttggtgctccaagaaaaaacatttggtgctaagagttgcagcactgatgcctttccctaagttaattctattttaaaaatttatatttccttcccaatgagatgcagagtaaaatttgagaccctccattgactagggagcagcatctgtcatctatggttaattactattttgacaaaaatatagaaggtttaaacccccatgtatttcagattgttagagaaagaagtagtttgcttatatttcccttgaactttattctaaccatttaaataataaattattcaatatttgttataataaatccttactagatacaagaaaaaaaaa

SEQ ID NO: 707047 - DNA, 158 bp, Homo sapiens
  misc_feature (40)..(40): n is a, c, g, or t
  misc_feature (97)..(98): n is a, c, g, or t
  misc_feature (151)..(151): n is a, c, g, or t
tgttggcgccttcattctcatcccgttagccgcgttcttncttacggccctgctgtcaataggacatccttgtggagcaccgatctgtgcaggacanngcaccaggtgctgggctgggcagcagcaagaagaggggtccccgcaggctagnccacatt

SEQ ID NO: 707048 - DNA, 216 bp, Homo sapiens
  misc_feature (1)..(1): n is a, c, g, or t
ntgttaggtacacgtcctggacttcgtcaacgatgttagcgggccagcgcttcgatacccaggaggcgcaggatgtcttgcggatcggccgggccgtacacaatcatttcacccttgttcaccacctgaccgtcatgcaccagcacctgcttgtctttggcaatcaggaactcgtgtttttcaccgtccatatcggtgatttccagacgctgctta

SEQ ID NO: 707049 - DNA, 163 bp, Homo sapiens
cctcctgcgttcaaacaattctcctgcgttcatctatcccatagtagctgtggattacacggtgcccactcaccaagcctgtgctaattttttagtattttttgggtagaagatgtgatttcaccacgtttggccacacacctctggcctcccaaagttgctc

SEQ ID NO: 707050 - DNA, 939 bp, Homo sapiens
gactgccggtacggaaaactcgctgctgccccaaccgtggcttgacagggcttggtctctgcaagtggctctcagccccttcttctttcctgcctcaccttccaattcgttgccgtcgcccgtcccgcagctgactgtttccggagtttgcaccttccccatgttccggggcagggagtccgcaaaaggaagaatcggcacgacggttccctcatcattgtccgaagtgactaaaagaagctgatgggaagcattgggtgtggggcacaccaaggagcaggccccgggatttctcggacaccactttttctggcccggctggaacgcaagggatattggctcatagattgcaccctgaaagctccttcagaaacaaggccagaaacgagtttttccaaaacctacggacccaagaagataactggatacataccccgattcacttttcttggaggcaatgttgactgacacgccatggacctgtgttgtccagattccttgacatataattaattctccatggacgacataacattacagattccggaaggggaatagggactccagattatggggccaatttcttcaacgaaattttctccttggaatcagggctacacggtgtccaagaacatctttgacgtgtttaacaactaaaatgattgaagcgcagtcaacattaataatgcagacggggtccttgtaccgtagaagggactcaggttgtcacggggcgtaggagacccaaggtacgcacagttaactcctatcaaggcgttggcaccaaggcatcatggagtcatcctggccagatgtctctcataataatggcaagataatagggactaaacatgtgacaagggcacacggcaggggcagcaccgcaccgcacgccaaaccacacctggttgcgaaatgcacgcgctcacacacccggga

SEQ ID NO: 707051 - DNA, 354 bp, Homo sapiens
tgaagagtatgataggccatgttcataagataaaacttctgtactgacctggaatatgggctgcaccccacagactggactggaagacatggagcattagatcagaatcgccatgtttctcacggactccaacaacatcaaggaagtacttctgtttccatgccatgaaacccgaagacaagacggagaatgtaacaaccactgatacactggaaagcacaacagttggcacttctgtctagaaaataacaattgcaagttgtataactcaggcgtctttgcatttctgcgacagatcaaggtctgcaagggaattcttgtgtgctgctttccatttgacaccgcatgttcgct

SEQ ID NO: 707052 - DNA, 371 bp, Homo sapiens
caatcatgaactcccctcttcgctttccagatcttcagcaaggacttattcagactccaggtccaaggtgatctacatggagcgaacccggggagtgtgatctccctctatcataaatccaagatcgccgaggcagttaaaagacccgggcacacccaaccagttcctgagggacttcctcaaaggcgaagtgcagtttggctcctggttcgaacacattaagggctggcttcggatgaagggcaaagacaacttcctatttatcacctacgaggagctgcaacaggacttacagggctccgaggagcgcatctgtaggttcctgggccgtccgctgggcaaggaggcactgggctccgtcgtggcacact

SEQ ID NO: 707053 - DNA, 705 bp, Homo sapiens
gcacaaacaagatgtggaaggaggagctgaggcatgggttatctttagctacttggctatcgctcctgctagatgtacgagaccttaggtttctctttgaactgcattctactagccatcagtaggctgggtgggtgatggaagggtgtctggatccatagatagcagttagcgatatgtttgtcttgtagctcaacctggttagtggcctcctaatcgctcatctcccctatggtggcagaggtagcagctcacatggaaggctcaattccaggtctgggcacatcgcctggcaggcccagagctatgggcatgtatccgccaggctattccagtgcttacagtcacagcaccttaactttagcatagagttcgaatccttatccacttaaaattggtagaggagtattgtttgcctgccagttactcgaatcctggctaatatacgtattatggattccacaggagtggtatactagtaaccgtgccctcaatagactggcgcttacttagaattagtcactgacctacagctgcatttgcatgacaaaacgtagaagtctagctccacgcgaaaaggaaaactcgcacagacaggtagaggcgacaaagacacacacagcgtgcagcgacaacagacaaaggaaaagtcgagaaggagcacaacgcacgtacggaccacgaaaggggcagcaaagaacaaca

SEQ ID NO: 707054 - DNA, 427 bp, Homo sapiens
ggccgccacagtttctcggccggcgtcgtctcccattttgggaggattctcaaggttctcagatgctccaatgccacctcggctctgctagcgtggccgccgagcttgcgtgccgtgactgctgcccggacatcgcctcttctggaggctgaacaagaggtgactcgaggttgcgcgcacacataaggcgccggggctgcaggggccgagaaggacgtagcctccaaaatctggaagctcactttgcgcgcatcgagtcgttgctgggctctcacatttcacgggcccctgggtcctggctgacgggctcttctcggttgctggatactcagtattcatgggtggtgcccctgcgtgcgtaagtatttgcacagcttccgtggtggcgttcctagggtggggacagagcttgggtgcagagagggct

SEQ ID NO: 707055 - DNA, 193 bp, Homo sapiens
taaaaaaaaaacccccccctttttttgaccccccttgaaaaaaacggggggggaaaaaaggggttaaaaaagctccccccccggggggggggggaaaaaaaaaagggggggcccggggaaaaaaaggttggggggggcccccccccccaaaggacccccccccggggggcccccccccaaaattcaaaaaatg

SEQ ID NO: 707056 - DNA, 236 bp, Homo sapiens
gcgtactctgctctcggacggcggctgcatccggatccacagtgctgcagcactcgcgtcctgcagaacgcgcataagacgctcctgctggcaccggaggaggcatcgcagaggctgcagaaccaggaagagaacatgcagaaagcactaagcttcctgggcccctcaaccccagctggaaattaagaacctgtcgcccgaaacaccaagtgacggccatagcaattcccctagca

SEQ ID NO: 707057 - DNA, 798 bp, Homo sapiens
gatacttgactggacaacaacgacaacaacgcccgacacacagcaactctcgcacgtacactgttaccttgtcgacacaaaacttccggaccaagacctaccccttgttttactgttttccagtacttctgacacaactacccacgatgtgatggcacgtatctcgacacgactgttacccataaaacctgactgacaccttgacccggcacgacactgttcatgccgatatattctgactccactcgaccaccttgacttgagacggagctgatcgacacctactccatcaccgatgggggggcattacaccacacgttggcctattactgtctacttgacctacggccatgggacgacggtaaccacctacaatttcacattggacgactgtacacgtatggatagggtattatcgattctcggattctagcgattacctatacggacaccaccactactactactacacactaactactacactaccgactacttctactccggctacgtccgacactaaccttggcactaacacactcacacaacactcgaccggagctctttctcttacgcacgggaccccggacacccaacaaacaaatacatatcctaaacatggtttccttctgcacagcgacactaccttacgcttttacattgggtggccaacctaggtcacacaaaccgttactaatcacatgggacttatccctggatgggcttggaacacctatcatcgaacacgcacctaacggggaccttggagtactagggcacacggaccacacaaaagag

SEQ ID NO: 707058 - DNA, 1666 bp, Homo sapiens
  misc_feature (6)..(6): n is a, c, g, or t
  misc_feature (845)..(845): n is a, c, g, or t
  misc_feature (1089)..(1089): n is a, c, g, or t
gtcttntttcttttcttcttctctttctcttcttctccctctttttcttctttttgtcttctttctgctgtcgcagttgctgagagcagggggggccagaggagggagggaagcggaggggcgcgaaacgatagtcctctagcagatagatctctcttgttgcggaatataactcacgataatgttctgttggttgtcataatacagtggttgtagagcgtcgtggtccgtgagatgatcaggtgttctccgacccgcgtgccgtggttggttgatatggtcggtctcgtcatttctttttgttcgtggtgctagcatattcctccagccattcccgccaatgtgggtggtgggtttcttccccctctcctccccccccggtgggtggtgtcagcctcctctgcttctccccgaaatagatatagtgtgtgtggggggttcctccacccccgcaccgcgccttgtgataagtttgctcctttcctgtggaagagtgatggtgagaagaaagaattttttgagaagaaaagggcgcagcccatgcacagaaacatttggttcgtttcacgaacacagaaagactgtgtgttcctttatgtataatccgtcctgtgtggaccacacccccggggttgttttccgccccgcccccgccgtggtagaaaaaggatgggggttgtatcccccctccccccggggggggaaccccacgggggacatttgtggtccccccaccccccgacggaaataagggttttaaaagtgggggattcggaggaaccaaggtgaagcccagccatcccatgggaagagtttttgtaaagaatgaccccgcgcattttggncatttggatgtggaatctccccacaatatctctcggctttgggctcggggctctttttttgaaataatttgggataatataggctcttatacacccgtcgggaccacctcctgttataggcgcccccgcgaattagttttagagggtttttatataatataatagaggttgaaacccactggggacacaactcggatatctcttctctgtgataaaatatgtctcacactctctgtgagatggnctcgtgctcccccctcagatttgagatagtttatatctgtgagcaccgcagtttggctcccacaccagagttagactctctttagagagagaggcctcgggcccaacatctatagagagagtgggggggagcacccagcagagaaatattcttcttgtatacgccacacaacactctcacaccattctctgtggcctcccacgcaatttgtgtacacactctctctccacattctctctcttgcccacactccaaaaagcccttgttttaaagaagttagatttatacgcccgctcgccattatagattatacactctcccgcacaattgtacacactacactctctgcgctttatggaaaatttgtggggagaaaatttatgagaataatatattgaccacggagttatattggagaaatttgttatatatgagatgagaacactctttgtcacataataagagattcactatttatcttcttaaataccacatttgagatataaagtaaaggcactggttgtggttaatctggtttatttttgttcccccagttaaataaatcataaaaccttga

SEQ ID NO: 707059 - DNA, 190 bp, Homo sapiens
taggtgttataactcatagaggaacggagtccactgctcatccgagatgtagcagaacatgaagcgccgaacgtggtaggcatgcagcagaccacaaaggcgatgaccactgcacgtaggacacgcacgccgtgccgcaagggcctgtgaccctgccaggctcgatggaccatgctgaatgtgctgtgct

SEQ ID NO: 707060 - DNA, 275 bp, Homo sapiens
  misc_feature (231)..(231): n is a, c, g, or t
caagagttcctctctaatctaagaagcattgtcaaatctagggtcccagcctgccatgaaaagctgattcgctactatgggagtgaaaagcccttatggagcttttacttattacggagactgctcataaagtgccttcacctcgcttgctatcattagccagtcctagctccaaattaccaccaattgctccttttcagagagtctttatcccgcctaaagtccctaatnactcctatctactctgcttttcagatcaagtaaccagctaacct

SEQ ID NO: 707061 - DNA, 111 bp, Homo sapiens
atcatcggctgagcaataaatcagaatttcgtcccgaatgttactcacctgttagtcgctgccctccaacacaggttcgctgtggaaatcactgccatatatacccatcta

SEQ ID NO: 707062 - DNA, 271 bp, Homo sapiens
ctgtaatcaccatttctaccactagatggcgcaggtgagcttccctggttcaatgcatcaagtgttaagagacggggttggtggggacttaaatttctctgtctctactaaaaatacaaaaattattcaggcgtggtggcacatgcctgtaatcccagctactctggaggctgaggcacgagaatcacttgagcttgggaggtggaggttgcagtgagctaagatcacgccgctgcaccccagcctgggcaacagggtgagactctatctc

SEQ ID NO: 707063 - DNA, 177 bp, Homo sapiens
  misc_feature (150)..(150): n is a, c, g, or t
cccgttataagtatatcacgcgtgcatcattatcttcatcatcactggctcatctgcttcattgtcactgtcgctgctgtccgtggctatgttgccatgcgtgccccagaagccaccgtttgaagaagttgttgccgtaaggtgtctcgntgtggtaagggtactcttcgttgtcat

SEQ ID NO: 707064 - DNA, 1875 bp, Homo sapiens
ggctgggtcacgcctgtaatcccagacatgcctaggcacagtaggaatccttaattgtagtcctttgaaggatgccgcggtcgctagatcattgcattcagtgccacgaaacttgacaggcttcacacggtctacagtggttgagtccgtctgtgcttactagtaaataaacgcagaatatattgacgaagagggaaagaagaacagagaaaggcgagggcctcgaatgggcgggtggtcgcggagagaaagacagggtgaagtcgcagagaggagcagcgatgggtcaccactaagcgtggtctgccctgtggagctccgaccgatgtgtgctcgcggtgagcaaagagcgggcgataaaaactactgggccccgggtgaatcaccacgccacttcggcggaaaagggtgcagggatcggacagtccggcgggaaataccatcgcaaccgagggcgactatacagacgcggtggaccaatgtgtaacgagagaacgaaactcgtccgcgaagaaaaagaggagccaggagggcgttaacaacggtacacacaattacacatacacgagagaacaattagagagcgacaggaccccaccaggaagggaaaaccacccaattaggccagaacggggaccagagaacacgaaggcaagaggaggaaaccccccacagaaagagagacaccagcaaggaccggccaccaagcggggccaacgaacaatagccacacggcagagggccaattatgaaagccctaggcaagcaacagagagagtaccagcacccaaccagaaatgagcaatccgccatttatggaacgacaataatccaaaggaaccacaggacaggaacataccacccgagcagcattgcaacgcggcacgagcagcataggacacaaaagcacgaggaatatccaagacgaaagaaccacataacactaaaacagaatcacacaacatacaaaacacacaccagccgccagaaaccacatagaagcgaaacaaaacacaaaccaatcaggaagagagaacacaagcagaccatccagaacataaaacaagaaccaagaagaacacagcagaacgacgaagtcacaagtaaacaaccaaagggaagagaatcacaataacatagagagacacacaaaaagaacaaatagaacgacgaacgcaaacacgaacaaaagaacgattcagcacccagaaccacaacagccgcaacacaaagacaacagcccagcaacacacacaacaagacaaacaaatacacacgagaatacaacagactaccatagaggacatacacaagatataaacacagcaaagtacacagaagcatcacggacgacccgagacaaggcagaacaaacccaacatacaccccaaggcccagagaagacacaacagaaccagcaacacaggcaagcccgacacaacaagaacaaaaaaatcaacacaggagaacaacgcagccgcaacaccacacaagacaactaacaggaacacacacagaccacacccagcaaagcggaagagagaccacacaacagcaggacacagcacaccaggcacgaagcgcagaccacaatgagcgcgagcagcacaaccaaacaccgcgcagcaacagcgagcacagacagcgcaaatcggcgaccaaagaagcgacgacagacaacagggcaacacacagaggaacacacacaactaaacgcaggacataagacgagagcgaaaaaccagcagacatcaaccagggacaacgcaccaccagaacatagaacgcaacaacaggacaggcacaccgcaccatcgcggcaaacgcccgcgaccacaagtaccaccgagcgcagcacacaagtacgtacacact

SEQ ID NO: 707065 - DNA, 100 bp, Homo sapiens
aagctcggtaccgtctgctggggaattccttcagtgatacacacaaccaaggaatttctgcctcaatagcttcattaatggcagcagcagcagcaggacg

SEQ ID NO: 707066 - DNA, 611 bp, Homo sapiens
tctggagaatctatcgtggctgctggttggtggtgatgtcgctgttcgtggggggcactctgggggtgttgtctgtacgtcctgctcctctgcaagcgctgctggagactgtccaccagcgcctcaacagggccatggaggaagcggagaagaccaccaccacctacctggacaacggcacgccaagccagcccaagacccagagttccggggagaggaccccagagtgccaggatgcgggagacggaacgccttccatgtaccacacagctccacgggccagacgggtcatccttcaatgaagagcggcgcatgtaagaagcagagccgcaagaccgcaggaccagggtcgacggtacacactgacggagggggacatagcaccaggctgaagacatgcccggatcacgacagctgaaactgcacgaaccctcaaagaataggtcagccataccacgagttgtgaactacagaggcgaagccaagactcaaggcaaccgacgacacccgaacacgagacaacagtcatacccaagagacactcatgggccaatcgttccaggccccacgggtgaagggcccaaagcgagacgatacagagaggagcaccc

SEQ ID NO: 707067 - DNA, 174 bp, Homo sapiens
ccttccccaaaaacccacccttagcctcggaaggtagatcccaggttaggggtttttctaaatgggggtttttaaattttcagggtttgctcctgggaggcagccccaaaaagggcccttaaatgtactagctggatgtgacccagttttaataaacaggttttttaatcccga

SEQ ID NO: 707068 - DNA, 180 bp, Homo sapiens
cgggtacttggcggccacgccatcccacggatcgctttcaagctgcttcatgccgaggctgatgcgctgcgtgtcctggttgatgcggatgatctggacccgcaccgtatcaccgatcgcgatcacttccgacgggtggttgacgcgcttgtagctcatgtccgtcacgtggagcaggcc

SEQ ID NO: 707069 - DNA, 347 bp, Homo sapiens
gcgtgttacatcgtgtgcccagtgtcccttcacacttagtagccccgggaccagattatagccggcaggtcagctctctgcgcgcgcgatgtgctcgtgtgatggctttgtcccctcataggggggtgtccccccagaggcaatgctgcagagcaaattccatgccagatgctctgggctaggacaggctgaggccgggcttgagaggagagcgctttacatgccaggagagaacccacgcacatgcacaccacaaagagacaagagaactcaactcacaccacagcacacctcaccacaccacacctgaactgcaccatacctcagcaaatctcaccacaccacag

SEQ ID NO: 707070 - DNA, 948 bp, Homo sapiens
  misc_feature (34)..(34): n is a, c, g, or t
  misc_feature (36)..(36): n is a, c, g, or t
  misc_feature (71)..(71): n is a, c, g, or t
  misc_feature (143)..(143): n is a, c, g, or t
  misc_feature (152)..(152): n is a, c, g, or t
  misc_feature (187)..(187): n is a, c, g, or t
  misc_feature (203)..(203): n is a, c, g, or t
  misc_feature (229)..(229): n is a, c, g, or t
  misc_feature (239)..(240): n is a, c, g, or t
  misc_feature (249)..(249): n is a, c, g, or t
  misc_feature (258)..(258): n is a, c, g, or t
  misc_feature (286)..(286): n is a, c, g, or t
  misc_feature (299)..(299): n is a, c, g, or t
  misc_feature (309)..(309): n is a, c, g, or t
  misc_feature (328)..(328): n is a, c, g, or t
  misc_feature (339)..(339): n is a, c, g, or t
  misc_feature (347)..(347): n is a, c, g, or t
  misc_feature (349)..(349): n is a, c, g, or t
  misc_feature (358)..(358): n is a, c, g, or t
  misc_feature (366)..(366): n is a, c, g, or t
  misc_feature (369)..(369): n is a, c, g, or t
  misc_feature (380)..(381): n is a, c, g, or t
  misc_feature (387)..(387): n is a, c, g, or t
  misc_feature (389)..(390): n is a, c, g, or t
  misc_feature (395)..(395): n is a, c, g, or t
  misc_feature (398)..(398): n is a, c, g, or t
  misc_feature (400)..(400): n is a, c, g, or t
  misc_feature (433)..(433): n is a, c, g, or t
  misc_feature (442)..(442): n is a, c, g, or t
  misc_feature (445)..(445): n is a, c, g, or t
  misc_feature (466)..(466): n is a, c, g, or t
  misc_feature (470)..(470): n is a, c, g, or t
  misc_feature (472)..(472): n is a, c, g, or t
  misc_feature (494)..(494): n is a, c, g, or t
  misc_feature (503)..(503): n is a, c, g, or t
  misc_feature (517)..(517): n is a, c, g, or t
  misc_feature (521)..(521): n is a, c, g, or t
  misc_feature (561)..(561): n is a, c, g, or t
  misc_feature (603)..(603): n is a, c, g, or t
  misc_feature (610)..(610): n is a, c, g, or t
  misc_feature (624)..(624): n is a, c, g, or t
  misc_feature (626)..(626): n is a, c, g, or t
  misc_feature (631)..(631): n is a, c, g, or t
  misc_feature (639)..(639): n is a, c, g, or t
  misc_feature (646)..(646): n is a, c, g, or t
  misc_feature (649)..(649): n is a, c, g, or t
  misc_feature (676)..(676): n is a, c, g, or t
  misc_feature (679)..(679): n is a, c, g, or t
  misc_feature (690)..(690): n is a, c, g, or t
  misc_feature (702)..(702): n is a, c, g, or t
  misc_feature (705)..(706): n is a, c, g, or t
  misc_feature (723)..(723): n is a, c, g, or t
  misc_feature (738)..(738): n is a, c, g, or t
  misc_feature (836)..(836): n is a, c, g, or t
  misc_feature (936)..(936): n is a, c, g, or t
taaaagagaggcaattttattcttccaaaaaatngnagcaaagagggtgagcacaggagcaccctggcacntccccatcctaagcagggtctgagatgaggccaggcctgacgtgggcttgggagaagctgacggagctcccngtggccttngggagggaaccaggcagacctggaagtggaacttngttgttagcaccaggngccgcccacagctgggctcggcaacngggcagcacnnggccctgtngcctccccntgagagtctggggaggggctggtggcanagggctccctgcnggaggtcccntgaatgactctcagattcncagaccccctntgcccccncnacccctgtnaacctganaangggctcgtgannccctcnanncctcnggncnagatgagggtccgagatgtgtggctgggcttcnggcggcccnggngctgccgggctttctcctgcntganangctggtccctggtccccccgcnggccaccgncttccaggcctggncatnggggccggtgtcgtgtagtggcttcggggcttctgggccnctgctgccttctcgggcttggcctgcccgccgccctggttgngccagcngttgtcttctttgntncctgnccgggtgnggctggnagngtttgttggggccgttgtcggccaggntanagacttgggcngtgtgggcatcntcnncttcacatcctcatccncaatgtcaagagccngagacttccgggctttcttgatggggctccgcgccgccccggcttcctcttctgcttctcgggcctgatgtcgtcctcgatgatgagttcgatgcccncctccgaacgccgcccctccttccagtcctcctcccggtgcggggtctgtggccggggcttccggggtccgttcttctcccgggcgttcttgaacggggntggcgtgtgggg

SEQ ID NO: 707071 - DNA, 384 bp, Homo sapiens
atgagagcagataccaagaggtagagatggccaaaaggttttaagttccctctattctcttgtacaatgcagtgccaagtaataccctggggttactcacactgctatggcctctagttgaagataggagtgctgtggtttttttcttggcaagaaattgtggaccaggggtgatatccaatcacagtcctctggcctcatttgggacacagagggcaagtatttttttaaccctattattttacaaaaatattaaaaggcaagcaactggacatggtggctcatgctgtaatcccattgtttatgggaagctgaggtgggaggaccacttgaggccaggaattcgagatcagcctggacaacatggtgagaccccatctctac

SEQ ID NO: 707072 - DNA, 939 bp, Homo sapiens
gggagcgctttatgctggccggcggcgctgggaggtggagtcgttgctgttgctgttgtgagcctgtgggcggcttctgtgggccggaaccttaaagatagccgcaatggctgaaaactggtgatacatgaaacagatggctgccctgtgaggccacaatatctgtcatcaaattgagtattattttggccgacttcaattttgccacgggcacaagttctctaacaggaacaagataaaactggatgaaggctgggtacctttggagaataatgataaaaattcaacaggttgaacccgtctaaacaacagaactttaactgtcaacttgtggaagcattgagcaaatccaaggcagaactcatggaaaatcagtgaaggatacaaactaacaatcagaaaggtctccaagcagaagccctacctgaagtgactgatgagtactaacaaatgagtgtaacacaaaaccaggactctgtcttatattcaacaaggcgttcccaactgatgcacatctcttgattgaccctacacacgactcggttagcaacataacagcgtccaggtactacaattattcaagattgacgcaagaaccatttggcttaaagccactctaacggggaatcaaatacaggtggcggtaagaataaggcacttgaaattcgtgctaaacgaaaatttggtatgaagcacccctgtcgccaacaagttatcatggaacaaggacctgctaaatactttctacaggcacgatttcgctttgcccacacaacacttgacgcacgggaaacccacatcacgggcgaagcctaactatagaagctaacccacgggccagatggccaccatatgttcgagagctgctggctggatcctcaacaaaacgatgacctcgggaatcgcgggagacagacacccgtgcaacatatacgttct

SEQ ID NO: 707073 - DNA, 393 bp, Homo sapiens
agcctttccggcgggcatttcctcaaggcctccggaggctcccctccagacaggcatttcctcaaggcctccggagtctcgggctccagacaggcatttcctcaaggcctccggagtctcccctccagacaggcatttcctcaaggcctccggagtctcccctccagacaggcatttcctcaaggcctccggagtcttccctccagacaggcatttcctcaaggcctccggagtctcccttccagacaggcatttcctcaaggcctcacgagtctcccttccagacaggcatttcctcaaggcctccgtggtttcccctccagacagttattttctcaagtcctccgaggtcttccctccagacagtcattccttaaggtccttggaggcttc

SEQ ID NO: 707074 - DNA, 167 bp, Homo sapiens
tgtctcttagctgactagccttttcaaactttcgagagtctttcattatcatcatctggaatagtcacctgaatgagttaaggtcttcaacacctgactgcagtagtattaacatagggtgatgaactttctttatctagggagggctcttacgaggaggtgctctc

SEQ ID NO: 707075 - DNA, 1072 bp, Homo sapiens
ggctaggaagccagatgaccctgagagcaacgaggaagaaggtgacagttcaggcggggaggacacagaggagagcgacagccctgatagccactcgtgacctggaatccaagcgtggagagtgaggaaggaaaacgagaatgccagcataaatgatgcaagacggcatgactcctggtgaaaggtggtttgataagcggcaaggaaagacgctggtaaagctaccagagacagagctgccctatcactgttcggcagcccctgtaatcctatgaggaaactgatgatctctgttgttagtgacacgaatcgacttggcaaaggaagccacgcctttttggtgcttgagctggaagccggaagtttcatcgagtgttgcgaaaccaagcccgcaggtctccgaacacggaaggcgtaaaccaaacgacaaatatatttaacacacacaacctgcttatgcgcttctccattttttagcgacgtaacggattaggccagccaatctcttgcgcctacacagcatgaagcgcaaagaacataggaaccctaccacacaagtgccacttatagaattcacacctattggtatatagttgccaaccatataattaattcaattccatctatggccccaccaataggttacacccttgagagatccttggacaacgattgacacggctatgtcaccaaatgtagaagattgaactctagcgaaaagagttcgcagagttgctaattggacatatggtgaccaggaaacaatgcatcttcggacgcaccacaagcactagtgcccggtcgttggtcgaactttgggccagtggcgggtgtggcaaaatcggtagcctacaagttttgtaattagctggaataaaattcgaaacatagggcaataaggtatgagtaaacccacagagtatatacagacaagtatcatagatgcagcaactcatagtttggtttaagcaaaatatggagcccataaagatatgatgagacttacaacggataaagagcatagattccagccaagcagttagcgacacagtcgcggttagaacacgacaag

SEQ ID NO: 707076 - DNA, 105 bp, Homo sapiens
ctgctccacaggcttcctggccgcacccctgtactcgtggcagcgagttcctctttgccttctatttgtggtactgcccggactccccgtgtgactcctctacga

SEQ ID NO: 707077 - DNA, 126 bp, Homo sapiens
gcggcgactctgaggatcccatgtacatttaaacaggatacgcacaataatagagaaagtcagcgggtcatgttttacaggaaatataaaaaacaaaacaaatgaaaacatttaaacattaaatgt

SEQ ID NO: 707078 - DNA, 198 bp, Homo sapiens
ccttcattacactttctaagtttgggggactaaagcatggggaagggggggcatgaacgctcatcattcataataaaacaaggtaaaaaagtattacggcgaagattatgaacagtttgcattacataatttacacgaaagccatgctagtcacctccccttttgttggactggcgacaggaactgggccattctcct

SEQ ID NO: 707079 - DNA, 792 bp, Homo sapiens
ccggagggtgtatgtgaaggccgccgtggtgcgtggtcctcggcgggtttcccctcgttgtgggaagtgttgtggagaggtggtgtgcttgtttttgcgggcggtctcttccaggggggtgctttaccgtgtttggcgccctccgcctcgctcaccgtggtgagagagtggggtctgtcgcccccgcgtccccgctactggcttcccgcattttggttttttcgcgtctagggcctgccaaaatggggtcggaggccggcttccctggccgccccgcccggaaacctatttcaaggtggggccgtggaattggccatttgataacaacaaattattgttgcgtataaacgaggcattttagggggcaacaagagtgcagtagcaaaacacttgtctctacgcgtgtcacccgctcattgagcacccaaagggacgtcgccccactttcttactacccatggcatttattccccattattgaccttctttaccaccatcgcgtattcacacactaaatctacggtcaagataattattctttctttttgataacacacagaatttataaagaggcaaatcttttatttggtaagccccccacaagatatacaacataatttcttttcgatttcggggacctctgcagtattcaccagacgcccgtagtaaaatcagtacttgttattacaataaatagagaggagaataatgcagatgttactcgttagtatttcggggtgacattccctacattagaagagaatatatctaacaaaatcaatagacaggaaa

SEQ ID NO: 707080 - DNA, 983 bp, Homo sapiens
  misc_feature (12)..(12): n is a, c, g, or t
  misc_feature (24)..(24): n is a, c, g, or t
  misc_feature (871)..(871): n is a, c, g, or t
tacggtaggtangaggctggggtngaatcggacgaggccgaggaaaaccgtgtactattagccatggtcaaccccaccgtgttcttcgacattgccgtcgacggcgagcccttgggccgcgtctcctttgagctgtttgcagacaaggtcccaaagacagcagaaaattttcgtgctctgagcactggagagaaaggatttggttataagggttcctgctttcacagaattattccagggtttatgtgtcagggtggtgacttcacacgccataatggcactggtggcaagtccatctatggggagaaatttgaagatgagaacttcatcctaaagcatacgggtcctggcatcttgtccatggcaaatgctggacccaacacaaatggttcccagtttttcatctgcactgccaagactgagtggttggatggcaagcatgtggtgtttggcaaagtgaaagaaggcatgaatattgtggaggccatggagcgctttgggtccaggaatggcaagaccagcaagaagatcaccattgctgactgtggacaactcgaataagtttgacttgtgttttatcttaaccaccagatcattccttctgtagctcaggagagcacccctccaccccatttgctcgcagtatcctagaatctttgtgctctcgctgcagttccctttgggttccatgttttccttgttccctcccatgcctagctggattgcagagttaagtttatgattatgaaataaaaaactaaataacaaaaaaaaaacaaaaaaaaaaaaacctccggggcctttttgtcgggggggggaaaaagggttttgaaagggccatggtctatgttgttccggcccctttttgtcncaaggggaatcgcgggccccaaaggggcgataatcgaacccgtacttcttcttcttcacacgtccaacgacacagcagccccaaagagaggaaaaacaacgaaacacaccac

SEQ ID NO: 707081 - DNA, 224 bp, Homo sapiens
agccaatgtgcctgctgggtgtgcatagcgggctgctgcttcatcccacttctgcgtggatgccctgcaggacagtggaccattactgtcaccaactgcatgagctctcctggtgcacctacaagcgtagtgtagagactcagccagtacgtggcagggagcctgggtgcctgcaggaagctcctttccactctctcatccacgcttcacgccatggtggcagg

SEQ ID NO: 707082 - DNA, 898 bp, Homo sapiens
  misc_feature (786)..(786): n is a, c, g, or t
  misc_feature (788)..(788): n is a, c, g, or t
  misc_feature (796)..(796): n is a, c, g, or t
  misc_feature (800)..(800): n is a, c, g, or t
  misc_feature (804)..(804): n is a, c, g, or t
ccacgcgtcgcggacgcgtgggtcgacccacgcgccgggaaaaccgtgtactattagccatggtcaaccccaccgtgttcttcgacattgccgtcgacggcgagcccttgggccgcgtctcctttgagctgtttgcagacaaggtcccaaagacagcagaaaattttcgtgctctgagcactggagagaaaggatttggttataagggttcctgctttcacagaattattccagggtttatgtgtcagggtggtgacttcacacgccataatggcactggtggcaagtccatctatggggagaaatttgaagatgagaacttcatcctaaagcatacgggtcctggcatcttgtccatggcaaatgctggacccaacacaaatggttcccagtttttcatctgcactgccaagactgagtggttggatggcaagcatgtggtgtttggcaaagtgaaagaaggcatgaatattgtggaggccatggagcgctttgggtccaggaatggcaagaccagcaagaagatcaccattgctgactgtggacaactcgaataagtttgacttgtgttttatcttaaccaccagatcattccttctgtagctcaggagagcacccctccaccccatttgctcgcagtatcctagaatctttgtgctctcgctgcagttccctttgggttccatgttttccttgttccctcccatgcctagctggattgcagagttaagtttatgattatgaaataaaaactaaataacaattgtccaaaaaaaaaaatcgagngntcaattcngggngggnaaagggggttgaaatggcaagggcaaatgttcctggccccttctgtcaagggggaactccggcccaaagggggaataataaacggaggtccgca

SEQ ID NO: 707083 - DNA, 891 bp, Homo sapiens
  misc_feature (813)..(813): n is a, c, g, or t
  misc_feature (823)..(823): n is a, c, g, or t
gaacctaggctaggtacgaggctgggtgttcacgcgaggaaaaccgtgtactattagccatggtcaaccccaccgtgttcttcgacattgccgtcgacggcgagcccttgggccgcgtctcctttgagctgtttgcagacaaggtcccaaagacagcagaaaattttcgtgctctgagcactggagagaaaggatttggttataagggttcctgctttcacagaattattccagggtttatgtgtcagggtggtgacttcacacgccataatggcactggtggcaagtccatctatggggagaaatttgaagatgagaacttcatcctaaagcatacgggtcctggcatcttgtccatggcaaatgctggacccaacacaaatggttcccagtttttcatctgcactgccaagactgagtggttggatggcaagcatgtggtgtttggcaaagtgaaagaaggcatgaatattgtggaggccatggagcgctttgggtccaggaatggcaagaccagcaagaagatcaccattgctgactgtggacaactcgaataagtttgacttgtgttttatcttaaccaccagatcattccttctgtagctcaggagagcacccctccaccccatttgctcgcagtatcctagaatctttgtgctctcgctgcagttccctttgggttccatgttttccttgttccctcccatgcctagctggattgcagagttaagtttatgattatgaaataaaaactaataacaaaaaaaaaaaaaaaatcggggtctttattcgggggggaaagaggtttggaanggcatggctngtgttctgaccatttttgtcaaggggaactgcggcccaaggggcgaaaatcgagccgactataaaagg

SEQ ID NO: 707084 - DNA, 451 bp, Homo sapiens
cgacatctacgtgtgggaagaatagggggtgatcttctcgggagaaaaaaagatgaccatcatggtaagggagaaattggtaatccatgcaccaggaatactactggtacgtgaatgtgctcgagcccagcaccgtacactgaacaccaaggctctcactcttgagtctagggcaccatatatataaaggagtccggaccttgtcacggcaatcctatggtacgtagtcaaatcaaactgaaatccggaggcctggtgtgagaacctcacgagcggacaccgggcatataatatctatggcacacccacacagccagggccaaagtggtcacggcactctcctaacagagccaggctcttctgagtggcactcctttctgaaggaccatttatcacttgcacctccatcagaaaattacctgagatctagtgagcgcagaggttacgggtt

SEQ ID NO: 707085 - DNA, 809 bp, Homo sapiens
gctagtacgaggctgggttcgaatcggccgaggggaaaaccgtgtactattagccatggtcaaccccaccgtgttcttcgacattgccgtcgacggcgagcccttgggccgcgtctcctttgagctgtttgcagacaaggtcccaaagacagcagaaaattttcgtgctctgagcactggagagaaaggatttggttataagggttcctgctttcacagaattattccagggtttatgtgtcagggtggtgacttcacacgccataatggcactggtggcaagtccatctatggggagaaatttgaagatgagaacttcatcctaaagcatacgggtcctggcatcttgtccatggcaaatgctggacccaacacaaatggttcccagtttttcatctgcactgccaagactgagtggttggatggcaagcatgtggtgtttggcaaagtgaaagaaggcatgaatattgtggaggccatggagcgctttgggtccaggaatggcaagaccagcaagaagatcaccattgctgactgtggacaactcgaataagtttgacttgtgttttatcttaaccaccagatcattccttctgtagctcaggagagcacccctccaccccatttgctcgcagtatcctagaatctttgtgctctcgctgcagttccctttgggttccatgttttccttgttccctcccatgcctagctggattgcagagttaagtttatgattatgaaataaaaactaaataacaattgtcctcgtttgaaaaaaaagtcgagcggccgttcacttagtagtagta

SEQ ID NO: 707086 - DNA, 486 bp, Homo sapiens
ggtgactctacaggatctttaacggtctgttacccacccgctcaccctgctgacgttgcaggcgcacttgcaggtaatggctggcgccaaaaaagatcgagccgcccacccgcaacacaacgcttcaccgtcgcgccagtgttgcacctgtggctgcgaggtgcgcttgaggtagaaaaacagcgacgccagtaccccggcatagatcgccgtttgcagctccaacaacaaggtgacgacacaggtcaggctcatcaccacaaattcggcgcggctgacccggaacagcgcacgaatgccgcggtggtccaccaggccccagcagatcagcaggatactcgccgccatgctcgggatcggaatatgcgcaatcaacgctgcgccaaataacgcaaataacgccacccacagctccgaaaacaaccccggcaatggcgaacaggcacgggaacagaccgtcggggtaccggagctctgattccgtat

SEQ ID NO: 707087 - DNA, 890 bp, Homo sapiens
agggccggggtaatcggcgaggcaccgccgaggaaaaccgtgtactattagccatggtcaaccccaccgtgttcttcgacattgccgtcgacggcgagcccttgggccgcgtctcctttgagctgtttgcagacaaggtcccaaagacagcagaaaattttcgtgctctgagcactggagagaaaggatttggttataagggttcctgctttcacagaattattccagggtttatgtgtcagggtggtgacttcacacgccataatggcactggtggcaagtccatctatggggagaaatttgaagatgagaacttcatcctaaagcatacgggtcctggcatcttgtccatggcaaatgctggacccaacacaaatggttcccagtttttcatctgcactgccaagactgagtggttggatggcaagcatgtggtgtttggcaaagtgaaagaaggcatgaatattgtggaggccatggagcgctttgggtccaggaatggcaagaccagcaagaagatcaccattgctgactgtggacaactcgaataagtttgacttgtgttttatcttaaccaccagatcattccttctgtagctcaggagagcacccctccaccccatttgctcgcagtatcctagaatctttgtgctctcgctgcagttccctttgggttccatgttttccttgttccctcccatgcctagctggattgcagagttaagtttatgattatgaaataaaaactaaataacaaacaaacaaaaaacaaagaaaaaaaaaaccgggggtttattgggggggggagacagggtaagcaaggcctgggcaaggggtccggaccgtttggcaaggggaatatgggccaaagggggaaaaagaaacggtac

SEQ ID NO: 707088 - DNA, 430 bp, Homo sapiens
tcggatggtgcgcttccctcctgccaggtaagacgggccacgagctccgggaggtgtgtgacatcagctgcggaagcgagcagagctcagctgaccagggtgatgtgaatgatgccttcttcagctctagacctcagctgtgcaggcaccctgcttgcctaggccccaagttgcagtcctcagagcagagcaggcctcatgtgagcctctctaggcctggtgccaccctgaggctgggcagccccatataggagagaaagcgcgaagaaagaaggaaagaagaagagtccaaggcctggccaatgtgtttggtcttcccaaagggaagaagaagagggtcagcccagtcacgagccgaggccaccggtcgaaaagctgatggccgccccccagtgagaataagcgcgtgagcggcagtgagcggggcgca

SEQ ID NO: 707089 - DNA, 776 bp, Homo sapiens
aaactttaggctaggtacgaggctggggttgaatcggccgaggggaaaaccgtgtactattagccatggtcaaccccaccgtgttcttcgacattgccgtcgacggcgagcccttgggccgcgtctcctttgagctgtttgcagacaaggtcccaaagacagcagaaaattttcgtgctctgagcactggagagaaaggatttggttataagggttcctgctttcacagaattattccagggtttatgtgtcagggtggtgacttcacacgccataatggcactggtggcaagtccatctatggggagaaatttgaagatgagaacttcatcctaaagcatacgggtcctggcatcttgtccatggcaaatgctggacccaacacaaatggttcccagtttttcatctgcactgccaagactgagtggttggatggcaagcatgtggtgtttggcaaagtgaaagaaggcatgaatattgtggaggccatggagcgctttgggtccaggaatggcaagaccagcaagaagatcaccattgctgactgtggacaactcgaataagtttgacttgtgttttatcttaaccaccagatcattccttctgtagctcaggagagcacccctccaccccatttgctcgcagtatcctagaatctttgtgctctcgctgcagttccctttgggttccatgttttccttgttccctcccatgcctagctggatgcagagtaagttatgattatgtatttactatcttatggtttttcttttccc

SEQ ID NO: 707090 - DNA, 438 bp, Homo sapiens
  misc_feature (29)..(30): n is a, c, g, or t
  misc_feature (34)..(34): n is a, c, g, or t
  misc_feature (53)..(53): n is a, c, g, or t
  misc_feature (65)..(65): n is a, c, g, or t
  misc_feature (77)..(77): n is a, c, g, or t
  misc_feature (147)..(147): n is a, c, g, or t
  misc_feature (192)..(192): n is a, c, g, or t
  misc_feature (201)..(201): n is a, c, g, or t
  misc_feature (214)..(214): n is a, c, g, or t
  misc_feature (240)..(240): n is a, c, g, or t
  misc_feature (243)..(243): n is a, c, g, or t
acgaagtacttcgtggtgggtatagcgannatgncatgattaccggtcatcgntttattgacatntggcaggccatnaaacctcaacgaattggccgtcaagaatggcctgaggtcccgatggacgaagacttcaaactcggcaccntgaagcgtctgggcctgcctcactcgacccaagctgacgtcggtnaggcctggnaggccatgctggnacgagtgcgcgactggcacgatttanacncccgctttaacacggagatggagaaacttatcgatttcgtcacgcgtgaccattttcacgagctggacaatggggagatggcatgagtattgacgtcgacacggtgtctgacctcatccgggatgtgagtgccagggttatcgatccccggttccggaccctccacgatcatcaaatccaccagaaaaagcccgg

SEQ ID NO: 707091 - DNA, 947 bp, Homo sapiens
  misc_feature (30)..(30): n is a, c, g, or t
aaggcaatgacttacggctaggtacgaggnctgggtggcgggaaaaccgtgtactattagccatggtcaaccccaccgtgttcttcgacattgccgtcgacggcgagcccttgggccgcgtctcctttgagctgtttgcagacaaggtcccaaagacagcagaaaattttcgtgctctgagcactggagagaaaggatttggttataagggttcctgctttcacagaattattccagggtttatgtgtcagggtggtgacttcacacgccataatggcactggtggcaagtccatctatggggagaaatttgaagatgagaacttcatcctaaagcatacgggtcctggcatcttgtccatggcaaatgctggacccaacacaaatggttcccagtttttcatctgcactgccaagactgagtggttggatggcaagcatgtggtgtttggcaaagtgaaagaaggcatgaatattgtggaggccatggagcgctttgggtccaggaatggcaagaccagcaagaagatcaccattgctgactgtggacaactcgaataagtttgacttgtgttttatcttaaccaccagatcattccttctgtagctcaggagagcacccctccaccccatttgctcgcagtatcctagaatctttgtgctctcgctgcagttccctttgggttccatgttttccttgttccctcccatgcctagctggattgcagagtaagtttatgattttgaatataaattatatacaacaaaaaaaccacactcaacaacaaaaaggcgggcgctctctacatttacccgggggcacactccgcccacttttttcacaaggcgccaaagaacattacacgaacggcgcacaaacgagcggaaccgctcgtctgcgaagcacactggggcacggaccacagacagcggaaaatgtctgaccac

SEQ ID NO: 707092 - DNA, 743 bp, Homo sapiens
  misc_feature (13)..(13): n is a, c, g, or t
  misc_feature (16)..(16): n is a, c, g, or t
ggcagagatcgtncancagtgcttgctgttccttagaattttgccttctgtttgcagacaaggtcccaaagacagcagaaaattttcgtgctctgagcactggagagaaaggatttggttataagggttcctgctttcacagaattattccagggtttatgtgtcagggtggtgacttcacacgccataatggcactggtggcaagtccatctatggggagaaatttgaagatgagaacttcatcctaaagcatacgggtcctggcatcttgtccatggcaaatgctggacccaacacaaatggttcccagtttttcatctgcactgccaagactgagtggttggatggcaagcatgtggtgtttggcaaagtgaaagaaggcatgaatattgtggaggccatggagcgctttgggtccaggaatggcaagaccagcaagaagatcaccattgctgactgtggacaactcgaataagtttgacttgtgttttatcttaaccaccagatcattccttctgtagctcaggagagcacccctccaccccatttgctcgcagtatcctagaatctttgtgctctcgctgcagttccctttgggttccatgttttccttgttccctcccatgcctagctggattgcagagttaagtttatgattatgaaataaaaactaaataacagaaaaaagacccccaaaactatttagtaatattggctgatctaggatataagttttttcaag

SEQ ID NO: 707093 - DNA, 492 bp, Homo sapiens
caacgatggtccttcagctcggcatgttgagtaaagctaattgccagtcctgggcgggggcaaatcctcaagcttgatgtgtagggaagggagggggcctgaataatccttgaggagtagtagaatagcagatggaacactgagaagttatttccttgaggatagatttccacaattgaaaggaaatgggaggttctaagaggcgggttagtggcttgtactatagcatagcctgcccttgctgatgtgtggcgattaggcctggtggaactgccatcaataaatcaagcgtgatcagggtgaggaacagggaagaaggaaatgtggggaaatgggatgaacatcaggtggatcagagagaggcagtcatgagggtcaggtgtggtatctggaataatgtgggaggctggattgaagtccgggccaggaacaatggtaattgtgggacttaacaaagagtgagtacagctgaggaccatcgttggggttacg

SEQ ID NO: 707094 - DNA, 442 bp, Homo sapiens
ctcaaactctaaaattcctgggctcaattgatccccccgcttcggcctcccgagtagctgagaccacaggtgccaccaccacatccagccaatcttcttattttccgcagagacagagtcctactacgttgcccaggctgttctccaacactgggctagtgatcttcctgccttggcctcccaaagtgctgggattacaggcagtttggttgagcccaggagtttgagaccagcctgggcaacatggtgagacctcatctctacaaaaaatgcaaaaattagccaggtatggcggtgcatgtgtgcctgtagtcccaactactcaggaggccgagacgggaggattgcttgagctcgtgaagttgaggttccagtgagccatgattgcaccactgcacactacagcctgggtgacagagggagaccctgtctccaaaaaaaa

SEQ ID NO: 707095 - DNA, 680 bp, Homo sapiens
  misc_feature (9)..(9): n is a, c, g, or t
  misc_feature (542)..(542): n is a, c, g, or t
  misc_feature (559)..(559): n is a, c, g, or t
  misc_feature (564)..(564): n is a, c, g, or t
  misc_feature (566)..(567): n is a, c, g, or t
gaagcttanggctaggtacgaggctgggtggtgacttcacacgccataatggcactggtggcaagtccatctatggggagaaatttgaagatgagaacttcatcctaaagcatacgggtcctggcatcttgtccatggcaaatgctggacccaacacaaatggttcccagtttttcatctgcactgccaagactgagtggttggatggcaagcatgtggtgtttggcaaagtgaaagaaggcatgaatattgtggaggccatggagcgctttgggtccaggaatggcaagaccagcaagaagatcaccattgctgactgtggacaactcgaataagtttgacttgtgttttatcttaaccaccagatcattccttctgtagctcaggagagcacccctccaccccatttgctcgcagtatcctagaatctttgtgctctcgctgcagttccctttgggttccatgttttccttgttccctcccatgcctagctggattgcagagttaagtttatgattatgaaataaaaactaaataacaanaaaaaaaaaacacaaanaaaanannaacaacaacacaaacaccacacaacacacaacacaacaaaagaaacacaccaaaaacccaccctacaacaaacccgcggcgcctccttctcgggggggcgaccacacagatgg

SEQ ID NO: 707096 - DNA, 951 bp, Homo sapiens
  misc_feature (640)..(640): n is a, c, g, or t
  misc_feature (951)..(951): n is a, c, g, or t
ccacgcgtcgcggacgcgtgggtcgacccacgcgccggcaagtccatctatggggagaaatttgaagatgagaacttcatcctaaagcatacgggtcctggcatcttgtccatggcaaatgctggacccaacacaaatggttcccagtttttcatctgcactgccaagactgagtggttggatggcaagcatgtggtgtttggcaaagtgaaagaaggcatgaatattgtggaggccatggagcgctttgggtccaggaatggcaagaccagcaagaagatcaccattgctgactgtggacaactcgaataagtttgacttgtgttttatcttaaccaccagatcattccttctgtagctcaggagagcacccctccaccccatttgctcgcagtatcctagaatctttgtgctctcgctgcagttccctttgggttccatgttttccttgttccctcccatgcctagctggattgcagagttaagtttatgattatgaaataaaaactaaataccaaaaaaaaaacaaaaaacaagaaacaaaaaaacactctgtgtggggcgcgcgccctgaggccctccagagaaaggctctttcagagacaccctctgcgcggttggggccgcgcgggggcgccgncgagttggtgtcaggtgtacacaagtgggcccaacgagcggtgtgttcccataaggagagagactccgggcgccaacgagactcaagtgggcgcttgggtctttcctcccccctattataatagagaagcgccgcgcggcggggcaccaccgagagaggggggtctcttggtggacacaattctccgagagagtgggccgactcccgagggggggcccactcgacgggggccctttatctaccgcgggggggtccccgaggggaggaactctccgaagattcaaatttgtgccgcgctcccggggtggtan

SEQ ID NO: 707097 - DNA, 525 bp, Homo sapiens
  misc_feature (15)..(15): n is a, c, g, or t
  misc_feature (36)..(36): n is a, c, g, or t
  misc_feature (52)..(52): n is a, c, g, or t
  misc_feature (75)..(75): n is a, c, g, or t
  misc_feature (101)..(101): n is a, c, g, or t
  misc_feature (118)..(118): n is a, c, g, or t
  misc_feature (131)..(131): n is a, c, g, or t
  misc_feature (152)..(152): n is a, c, g, or t
  misc_feature (184)..(184): n is a, c, g, or t
  misc_feature (317)..(317): n is a, c, g, or t
  misc_feature (460)..(460): n is a, c, g, or t
  misc_feature (475)..(475): n is a, c, g, or t
  misc_feature (494)..(494): n is a, c, g, or t
ttaaaggagcactcnctgaaattttacctcaatatntattaatctaaacctnaaactaaaacattaaatggaaantaaacactggaaatgaaacttgttcnaaaattgcaatagtggnatgtgtgtgtctntggcccagcattggaggctanatgaagataactattccaggaggtcaagcttnagtgagctgtgataaatcactgcactccaccctgggcaacagggtgagatatcatagctgtaattccaacgctttggggggctgaggaaggcggatcacttgaggacaggagttcaacatcagcctggccaanatggtgaaacctcgtctctagtaaaaatacaaaaattatccgggagtgtccaggagtggtggcaggcacctgtaatcccagctactcaagaggctgaggcaggaaaattgcttaacccgggaggcagaggttgcagtcagctnagttcgcgcactgtnctccagcctgggcaacaanagtgaaactccgtctgccctccgtctgtctg

SEQ ID NO: 707098 - DNA, 292 bp, Homo sapiens
  misc_feature (150)..(150): n is a, c, g, or t
  misc_feature (180)..(180): n is a, c, g, or t
  misc_feature (259)..(259): n is a, c, g, or t
  misc_feature (292)..(292): n is a, c, g, or t
ggatccacgccttttttttttggaagtaaagcagctaaacatgtttctataggtgagtgtggcctcacaccctcccttcctgtactttgtttgggtgcggaaggacccatggagcccatagggattccttaaaaaacaacagctagttcncacgcaaaccccagaaaccatgatcttgtnaatactgtgttttgagttgggcattttcactcttctgccttaaatccctgaccccatgcagctgacattttaatacgcntcaggggaggggaaacattgtaaataaaatctn

SEQ ID NO: 707099 - DNA, 228 bp, Homo sapiens
  misc_feature (186)..(186): n is a, c, g, or t
aagagatggagtcttactatgttgaccagcctggtctccatctcctggcttcgggcgatcctcccatgtcagcctcccaaagtgctaggattataggcatgaggcactacaccagccaacagaagtttttatattaaaatttactttttctagctgggcacagtggctcacgtctgtcatcccagnactttgggaggctgaggcaggtggatcaccggtcgggagttt

SEQ ID NO: 707100 - DNA, 666 bp, Homo sapiens
tgggtcttggtccaaaattttataaaggttcttaaaaagcgcaacatccaagactcccaaaatacaggtggccaagggaagaccctggtaatggctggtggagagagatcggggtctggggcgctatgggcagggcggttctgggtcttcccacctctttctggttctgagcaatggggggtggggggcgacaagatattctcatctcttggagtgtgttcacaaacaagggcctcaccggttgtgtacaggcgcagagggcgcttcttataggcgcgccaattcttatacaccaggtttgaggtgctccacagaggccacgaaaatagatatctaacacctgtgattcgcccacaagaaaacaccatcgtggtgctgagacacaaccccggtgggcgcgcacagcgcatgaggcacagagagaacgacagtccaacccaggggcacccccgggagagggagaccaacacaggcgccaacacaaaaaatctcacagggattaaaagccccttggggcaccgagagaaggatacccacaagaacaccaaaaaccttcagaaagcttggggcgcccccaattcttccaaggaagagaacaccgaaagaaaaacacaaaaggagggccccatccgaaaaagagaaaagcccctccatagaaatatcggg

SEQ ID NO: 707101 - DNA, 137 bp, Homo sapiens
tctgaggtcgatctgaggatcccggaagctcataaagatggctgatatcgcagcctgtacggtcatcccgggctcgatgccggaaaaacaccttgggcccgccggaagggcaggcacatgggcataggtgagcggaa

SEQ ID NO: 707102 - DNA, 857 bp, Homo sapiens
gggaccctgggggtctggacgcgacgggggggagatgaacgcccctccagcccttcgagtcgtctggctcttcgagggcgagaagaagatcacccattaacaggacaccaggtacccaattgctgtttatcaccatcaacaaagaagcccacacatgggaaacttcattaactcacaatcataaagacgccgcaggtgctatgtgtggctacaaagtcccccacccttttgacgcacaagatcatcatccgagtgcagacacgccggattacagcccccaggaagcttttaccaagcgccatcacagacctcatcagtgagctgtcccttgtgaggagcgcttcggcggtggccaataaaagacaagcgccccaggaacacagacggatctcgatgtagggcccagaggggggctctgctcgggcccttggtttggaacgcccccccggggttcccactctttaaacccccttttttggttttcgtcgcccccccctttttttgttcgggaacaacccccgcccccacacccatctgttttgctcttccgccgcagaggaaggggggagggaccccattactattgcttctccacccaccaccgcaaacaaaaatgacaggcgggggggggcgcgaggcggaggcagcactcctttatttcatcaacacagacacgcgcgacaccgcgcaccccagcacacaacaaaacaacatacgacacccgacgctacgctcccacgaccaatcacacaaccactacaagcaccgctcgtcgccacctcagcgcagcacgcgctcgtcagcaactagcgtgccgaagtcgtacgatggacctgcaaacactaaaacccaaaccg

SEQ ID NO: 707103 - DNA, 366 bp, Homo sapiens
tatcagtacaggtggagcgaggacaacactagagcgatcctccagtagccgagcgtgcatacctgcctgccggtcagacgtgtatgcaccactgcaacgcatgcctccctgaacaagttccggcgacacgttgagcacagtgctgagcttccaaatatcgtaaagctggagcctggtcgacgtgtatcactcactgcggtgcatgcctccctgaacaagatccgtcgacacgtgagacaccgtgctgacctccaaatatcgttaagcatggagcctggtcgactcttggaggatcctccagtacccgagcattgcattgcatgtctgcaggtcaacgtgtattcaccactgcggtgcatgcctccc

SEQ ID NO: 707104 - DNA, 1137 bp, Homo sapiens
  misc_feature (538)..(538): n is a, c, g, or t
ttttttcaaacgccctgtgaaacataatacacaaaccccctcttgggagggagactttattctcgcaaaatttggtgccccgcgaaattttgggcgtaaatagaagtttttccctgaattcctctctacccaccctttcccggatatcttggaggttgtccttttgggcttcggggaaaaaccagtgcttgtccagaatgcttccacaaaccggaacacattgactccacgagacttcctttggtgttgatatgccccgggattttttttttcccagccaggcttatttaaaactggtccgaaaccaaattccccagaatatggatcccctttcttccggtttttctcccacttgtggtcaacacaacatcgtgttggatgaacaagaaaggaagtttacccccagtgccccacaaagagcgacttcttttggaaaaattcatccaatttttccaaaacattggtttttctttccacccaatatgggtccccagcaccaaagtattccagaaggcgtcttctacaccaggcgtgaacncagagctttttttgaaaccctgtgcgcgggtattaatagcttttgcgcgagattttcgcgcccgcttatgacacatgggctcacagaattctcgggttttaagaaagagtccagatgtctttatttgcgaaaatttttctacgtgagaggtgtatggaacccagagtgttacattcttgtccaccaccagagggaacttggacaacacgcgttcttctacaccacatgcgtggactggagaaaagttctcagaacccttggtggatctctcccgacttccaaggtgaacccgagggataacccactcgaccaatgtaccccggtttggattcacgtgcacaatatctgcaagccccttttgtccagcaccccgctgatgaggcaccctgcgtgccacacaccgatgcaagccccttgtgtttccgggctttttttaaaaagaaaaattgtagcacctgggcgtggtgcacagcctgtaatcccagcccctcaggaggcttaggcggggaggatcccttgggcccaccagtcccacctgggccaaatagtgagagacccttgtattttgtaaagtaataattaaaatataaaaatattta

SEQ ID NO: 707105 - DNA, 1665 bp, Homo sapiens
  misc_feature (951)..(951): n is a, c, g, or t
  misc_feature (1108)..(1108): n is a, c, g, or t
ggtttacatcacctcaccccattattctttttagttcaactaactttaccatgccaacgtaaccagaactggcagcaaattgcgttgcactctttaagcgcagatagagtcagcactacgctacgctatcactctatggctcacactctaaatgctgggccaccaagaaaaccacttatgaagcccacggacttgctgacactgcaccctcactctccacgagcacaccctcttaagcacaatctctcctctacactgactcttcactacttgacacccattctctaccaataccgccgcctgcacttcgcccctctagcacttcctcccacactctatactcacataaagcactgcctcgaacctacaacacagcagtccaacccactctcatctacacccctcaaagtctcctccactacataactcgtgctacccaaacagtcaacacacgcacactcaggcctctccacaacctgagcctcacatcaacacaatacaacctggccacccctcgaacactataatggctcataactcgttcgaccctctatcaaacgactcccatccactaacgcttggccttaaattattcaaacacatttgataatctgttgctctcaaaccgtccttaaaccactgcgacacgactttatacccctttataacgcactaacaggcgatcccacatcactcacggactcacccccccaatactaagccaacggtacaacacactacaccacacacgtaaatacacacccactaataccttcgcacacccactccctggctccgatcacgctacacacgccctacccccaaaaccgagcatgcgacaagcacacaacgagcccatagaggacgcacacaccacaccctggcacagcccacacttgcctcccacacgccgcgcgcacacgccaatcacgcccacacgcccacatagancacacgcgcacaccacacacatccgaactaacaactcacattctcacaacccggaagctcgcacccaacctcgcccccactcggcaaacttcacacccctctaaaacacattgacccatatctcatctatctacagacctcacctctacactatcgngaagcgacgaccccatcaatccatctcaatctcagtcaatattcaacttcatcacccagcatctgcgcactctcatacaccccccccagcttccctacacgctcttcccccagttctttggcccagagccacacatctatcaccctctcgacacagtgttctcacaccaccacactatattcaccttcacactatccctcggtatctcccactacaggcctaacattgtatccccagaccttctaatatcccccatccattccaaacgacaactatatcaacatctcaaccccatctatatcggacaacataccaacccatcaatatcatctccacccatttcacctaaatatataccagttaccccacaaaaatgatctattcatcttcaaccacttcctctatatcgtagacactactatcatacacctattaatacatcatacacctataagaggctcgacacaaagacataatctagcgcactcaaccaagcattacaccacataatactattaacatcataaatccatcaccatctctacatcgaaagccat

SEQ ID NO: 707106 - DNA, 105 bp, Homo sapiens
tcatggtacatggtaggtatacaactttgggattgtcattattcttactgtgtacttgtttgtggctattgctattcaggccccttatacttgggaaacggtgat

SEQ ID NO: 707107 - DNA, 890 bp, Homo sapiens
ccacgcgtcggtcgtacaactacgtggtaactggctccagagagcccaccgccgtgatcggacgtgcgtgaccgtgagcactttatcttcgtgccgaagacttaaacctgttgattgccaacaacacgagattagagatctatgtggtcacccgagcgaggggcttcgggctgtcagaatgagagtgggcattgtactgggaagactgagccgtgttcagtgggagcttttcacggccctaaaggtgcgagaagcagaggaccctgctgatttattcgttgtaacagcggaatgtacaagatgcctgcactccttgggacgttactaatacatgacgttcggctgacagtcgcagtagagcatcaattgacagcgatgccctcgactgtggcaaaattggtactcaagggaacgcgtccactttgggcactgctccacttcaaagaaggaacccgggaaagttattggggcaatcaatttgaaatcgcgcttgtatgcttgccacgggaattgacttgtgggactcctagccggttccttcgtaattggaatgggggcgcttatatttcaaagcggagttcactataccaaagcataaaagtacttccggccgagataaccgttaaaatggataagcctctacagagaggacacgttatccataagctacaatccccggccccttgtgaagggtgaagcctggacactgtctcagattctaggaattgtctccaaaagggtctccccttaactaattgggctatgtcccatagagacaaaccattaacgtaaattctgacagattgggatcttaaccccatgcggacacccttcaagagagggctggacaccgggtaataaaacccctaaatgaggggtggatcctcatc

SEQ ID NO: 707108 - DNA, 789 bp, Homo sapiens
agcggaggggccagcgagcgccggccgcctccagccatggagtggcgaactcaacttgctgctctacctggcgctcttcttcttcctgctcttcgttacttttcctcctgtctcttcgtggtcatcacgcagctgaagacactccggtggccagacgacgtgccgcgggcgctccagcccgggctgcctctcggctgcaccgcgagccttggggcttctcccgatgagcaaggcggtgtgatcccgcagtgctgggcacttggcgggagggcgccgagctgcgcgggcgctgggctgggtctccgcctcgattctccgtgctcgcgggctcccagcttccagagccgagctgctgcccttgactggtgctcaggggaccacagctgcaatgacagtttggcgtcctgcagaaaagaatggctggaacaacgggagtatggacagctttctgcaaactgcagcaccacgtggtatccatgacagtttaacctgcccatcattcttcctagacaagcacactattgcaagagtcagggtgttcagaactggcttcagatcttatcaggacaatcttggttgttgcactaatttccaaagcttgtaagtgcaatggatctgcagttctacttggcaagataaccattgcaagcttgaatgagaaatgacatcacacttcacacctgcaaaaatctaaacatgtctaatacagtagattcctatgttctgaacttcaattatagggcacaggtggtagaatgcagaactgatgccatctgagtgccattctac

SEQ ID NO: 707109 - DNA, 1057 bp, Homo sapiens
gtctgggcctaaggaataaggaatgtcgccataccgatagtccggtgctgcggctgtccaggaaaacgtaactgaggatgaagattcaacctagaattaagctatatactttgtgtttacctatgtacctgattaccactttcacaaactctacagacagatcaaatgtggatgagaacgtaatcgctgatcgtcagatcaaatagacagttatgaaatgtgccgaagtatcaaagggaagacaagacttgaaaacaaagaaaatagctagtgggggcgacacgagtagacactcagtaaaagatatcattccacaaacgcatacgaggagtagtagagcgggagagtccaccatttagtgggacgccatcactggggagtacatgccgggggatacacacataaggggagatgctattggtactggacatgagaacgccaggggtgggcagatgcttgccgcggaaaaggataacaatagcgcacgcgagaggggccactacacgccggaaagagctgcagaagcaaccacaagaacccggatgggtcgaatactaagttggggggcacttcccaaaggaggccacacaggtgggaatggacgagggaagccttcacagaggaagccaaagccgtatatacatacaataacaatgagtcttctcggtcaccatgtgtgtggtatttaccaccccagcggaacgccttaaaaaaagataaagaaaagttccaaacataggttagcccccatggacacattaaaaaggtgtgcgcgtccccatatcataaaggtggcctaaggtaaggttggggtaggaggcgtgttagagtaggacttttgccaaacaagcaaggatggccataatcacggttttatcgccctaagcaacaaaagcaaagtaggagcataacaaagattctacccagtaaaaggcacatttgttggggcatggtccaggaaccatttaagcctacgtgtaaggtggttagaattagttgaaaaaaaggggttggcagaaagaacgagatatgtttatagacggccacgcatagaatt

SEQ ID NO: 707110 - DNA, 439 bp, Homo sapiens
ctagccacatgcaatactgtgaggtgggtctgcactttctcagtctttttacttccagtgacttctataccagatcagctaagcagttagccacgcccttgagtatggagccactcttttagcacgccacagggattgtcagagcagtgctgggagccctgcctcatgatcaccgttcttcacaatcagctttccctccatgctctcccagccgtctcctgagcgtagccgtctgacagcgcctgccaatgtttggcttatgccctctcccgaactcattgatctgtaaagcagctcagatctcttctccttcttcagctaaaagtacaggactcccacattgccacaggcattagtgcaaggagggtccggggcagagaagtcttgtatggtttgggcacctaccatgcagttttctggtgccctctggtcctgcctg

SEQ ID NO: 707111 - DNA, 211 bp, Homo sapiens
gatggtacgcaatgtgacggactctcaccggagacaacaataggattgtgatcacagagacaacatgcaagaataagtcagtaggcatcctagtttccctagtgcttaggtcggttttgtccagattgtctaatacatttccctaagtgggactaagttctggagagaagctcaaaagcaagaacctttctcccccaggcttcagagtcct

SEQ ID NO: 707112 - DNA, 825 bp, Homo sapiens
  misc_feature (361)..(361): n is a, c, g, or t
  misc_feature (416)..(416): n is a, c, g, or t
tggccaaagagcaaattaaagcaaggcctatgtaaaaacagggactctcaaaatcctggtacacggtttcgccaattcaaaggggcccaaaattacaggacgcaaccgtaaagaaccatcttgcaccaaaaagagtgtgctctgagagactccgaggagggccaaactctcgtgcataggatgaagccagctcagtcacattggacctcggcatttcatactcgtgattagaggaagcacgatgagaagaggagcgctttcctgcgaacgaagattgaacaaaccccaagaggcgtgggtgctcccataaaaaaaagcagatggcgtttcaaaagaaaacagcataggagaagacccacangagcgtgtattataatttttcagataaacaattaactcattattgccaccggggngaatttgacccattttctaacactcattaggtatgaccttcaattctcttccagaaatactggggacaacgttggctcaaaggcgtggtttaaaataattataacttacacgtgtcttggggcaaaaagcttctttctaactcgttgggccctaagggggggaaactacagttccctccccatggtttctaatggtgtcacaacaaccaactcgtttctttacagctggacctctcaaccaaccaagggtgcggttaaaaacaccacgaaaggttggcttgaatatgggtggctttatataccctttaaaataccaacttctcccataaatttcaaagggctaatacgaaggtctcaaaagaattaataaccggtgttcccacaattttttccccttaagggcgcggga

SEQ ID NO: 707113 - DNA, 186 bp, Homo sapiens
atgtctcctcctcggcgggatctacccccacggctgtcccacgggctgcctcggtgtctggagagcagggcacgcctcccaaggtccagctgcccctcaacgtgtgagctgccctttgtgtctgtcggggtcctgtgcctgcagccctccctcctgcctgggctgacctgtccacgtgtggtttcc

SEQ ID NO: 707114 - DNA, 238 bp, Homo sapiens
gtgggcggattacctggggccgggagttcgggaccagcctggccggcatgccagagccccatctctactaaaaatacaaagatggccgggtgtggtggtgcacgcctgtggtcccggctactcggggggctggggcatgggagtcacttgaacccaggaggcggaagaggtggaggttgcagtgagccgggatcgtggcactgactccggcctggggaacagggtgagaccctatccc

SEQ ID NO: 707115 - DNA, 300 bp, Homo sapiens
ccccccggactctctggttatgccgcccccttttcatgtaaaagcagcagcagggtgggttttctaatgggccacctaaatagttcgggggaaaaagggcaaaagttggtctctgtgggaaaagtggtattccctcacaattccaccaaaaaaccggggccggaacaaaaaaatgtgaaaccccgggggcgcccagggggtgggcccacctccttaaatgggggttgggctccctgcgcggcttttcaagcgggaaaacacctcccgcccacatgtctataatagaaagggcccccgccg

SEQ ID NO: 707116 - DNA, 267 bp, Homo sapiens
atccttaggcgaagatgtggatggtcaggggcttgaacacagcatcactggcggaggttcctgttgagatcgcagattttcttttacaatccagatgactttgacagtttcaaaccggaatttctgagaaccagaataatctggagccatggccatattttttccagtccatgcccgagggaccattcttggccttggatcctattaatcacgggtttgaagggtggcggtggcatccatagaaggagaactttcgtggatcctttc

SEQ ID NO: 707117 - DNA, 291 bp, Homo sapiens
aatgttgaaataatagattagttgggttttcacatgcaaacattcaaaatgaatacaaaatttaaatttgaacattatggtgaatttatgttggggagatggggattttaccttaaatttatttaaatagggggattccttagaaatggtgtgttacctgccaagccatccttgtttccccaatggtttttccaaggaaacacccttccctccttctgccattactatggccacttaagtgtatctgcagctcttcatttaaaagggggaaggggaattacctgtctctca

SEQ ID NO: 707118 - DNA, 191 bp, Homo sapiens
cacccgatgccccgagatgtccatccgcacagtgttccggcagagcaaattccggcatgtgtcggtacagccggtcacgaacgaacagtgctataaggacatacgcgtgatccgtgttacctgggacagcaccttctgcgccgtcaaacccaagcttctggcggtgattgtggagagagtaccgagctcga

SEQ ID NO: 707119 - DNA, 649 bp, Homo sapiens
atcctccgagccaggtgcggtcttagtaatctcgtggtgcagccgttattcttaagccggtcggaaaagcgcagtattctgagtgggagtgacccgattttcgcagatgaatgtagaaatggtcttactatacatagactgcagggtatggaagaagatagcttggtaaaaaggtcgatggagaagagtgaagaagatagttcagaaaatcggggaagatttgtacatgcataatggtccatagactaaatggcatgatgtataagagttttcctgtagcctggattctacgtgacaagattatatgcagtatcccacagaaagtaaggcggaagtctcttaagagattgtcgttgcttggcatcataagcgcgagatggtccccgcaagcatgttccgttatgacggagtgcctgggtcagaacacaataatacaattcgcctttgataagtacaaaggattctgagaagcactggctcgttcccacgtgtcaggagttctggggagagattacttgggaagtggctctttgggattcaggtatcttttggatgaatgattccaccgtagattaagatgatagactagggtgagtagccattttggcctttgggttattcaagaattcatggtggctttggagaataa

SEQ ID NO: 707120 - DNA, 381 bp, Homo sapiens
  misc_feature (44)..(45): n is a, c, g, or t
aattagggtttttataaaaccaaaaagaacttggcaacaccccnnaggtaccctttagaagcctccaattgctacagcctgtgaaggattggcctgtgaccaatcagaggctgaagtggagtcttagctcatggtcaagcagaggctgaagtggaaacttcttgtctttttatcacaggcatgaggatgtggcctgcatgctgcctgatcttgcctagaaccggctgcacctgctgttctcttgtttatgcaaactggctgcacctgctattcctttgcttatgcccctacccctggctatcctaattccctgttctcctgcctcactattactgtattctctacttctaaataaaaataaaacaaaatacaaaccgttaa

SEQ ID NO: 707121 - DNA, 186 bp, Homo sapiens
ccatatgggcacagtgccggatgaagtgtggagcattctgcggacagcattggtggttggacgactcactgtggggacattgaatactaccctagagagaggtgatactgtcaaagaaaaactctgcatgatgctggggtgacacaaagactctgcaaagtatgggatttactggggtcctcatca

SEQ ID NO: 707122 - DNA, 1090 bp, Homo sapiens
  misc_feature (627)..(627): n is a, c, g, or t
  misc_feature (737)..(737): n is a, c, g, or t
gaatacttggtttgctctgactcaagtaaatgggtttgtgagcacgctgaaagcctctacgcctggagaggggggctgcgtctggagtcccctggcatctacagaggcgcctacgatggtgaccgggggagagagcttcaatcctgcttccaaccaatcgctgcacgtatcaaccagagaacgaccgtcgcaagatttgcaatgggcactacagacgtcgtatggaagaatgccactagaaaggataggcgcataaggttcgcgtgtcgtaggagacagcacaagaagggtgcgaagtgtgcgctgtgcggagaccacagaagtaatgacactgatacgacgtgatgtgatctcagctccaggatgacacgcgtgcaagtagactaggatggtacagtctggaggcctgacggcatggaagtccaaagagactgagcaagaatgggactggagacggaagtaacaccactctagatgtcttgctgagacagggcctctttgcaaccctcaatatgccaagcatccacctacgcaggaatgattctacacgacgttcactcgatgcgagagcatcacctgtcatgaagaccgtgacgtgtgccatggagatatctgtctgtgccctgnctttagtgggggctagtgccgtgagtccaatcttagcagggtgtgtgtcgctaagcagcgaggggtgtccaataggcagggcagagcatggcgtggtcaagctgcgtaanctcacttggagcggatcacagtcatgtcgtgtcatccacggaagcgacgctacagagctttctccgccgatcatggtggacgtgcaccagtgggtcaagcacttggtgcagcttgccagtcttgcaggatgccaccatggggacagttgcctctacaattgaccaacggatgccgagcttgacacggtgaagcataccccgagaagttgggaagaatcaacaggtgcacttccgccagtgatggcaatagtgacggggacgggggaccactggtgcaccattgacactgcgaaggtcgagaaagcgaagcaaaccaggatgtacacagagggcaatgctgggatcaacggatg

SEQ ID NO: 707123 - DNA, 884 bp, Homo sapiens
cttgttgaacaccgtgcgtgttcattaaccccccagaaatattttgttcaagagagacaccttttctccaaagcgggcaaactttttttacccaccctacaagataaatctcccccccccttttggaaatttgcccccaattccttcgtaacccccggcccactcccaactccggtccgccatgagcgaattggccgcgcccccccaaccaattgtattgcccacgccgttatctgttttagacccgtcctttatcggatttaatcctcctagaatgtccaagtatgccactcctctcccaggtgggcgaaaacccacggaaggaaagggtgatgagtccacattttccgcgccggtcgattccccccacgaaccttctgtgcgacaccaacagtgaccctgtttctgggcaaaacaccgcctatggtggagcgtgcagctaccttttggcaggcgtctgttatccccgcgaccttaaaattgattgtctcagggttgtgagcaagagtggactcgataggatttatttggcactccgatcatcactccccgactacgttaatgattgctgcccaccaatcgtataccacgtcttgtgttctcgccccccctaaattccttctagcggctatgtctttactgcccgcgaatgcctttacaaagctctcttatcacgagttttcatacttaaattgttttagctcaccaaatgttttgtgtcacaatacactccagtgttagcctcctaacacactatttctcaggcccaatcgacgccaaaaatccttcgggtagtttacaacgatttcgaatgccttcattttgacccgaccccacttagtttctcccctctgggataaaacaaataaaatttcgcgacatgc

SEQ ID NO: 707124 - DNA, 288 bp, Homo sapiens
cttttggggtctttgcttttttttcagttttggcagcttttgttgagatatcttgaagctcagagattctttccatagccatgtccggtctactaataagcccatcaaaggcattctgcatttctgttacagagttattgatctctatctacttcctcttttttttttttttttttttttttcccggaaaaaggttttggttttgttttccgggggggggaccaggggttaaataaaagttaatggggccctaattttctgggcttaaggttccccacaaaaacccca

SEQ ID NO: 707125 - DNA, 243 bp, Homo sapiens
gtcgctcgtcgaaggcgtgtcaccctgacggacgtgatggaaaccatcgccggctacctgccggaggccggcgaagaggtggacgcacgccacgacattcagcaaaacgaggacggtagctggatcgccaacggctatatgccgctggaagatctggtgttgtacctgccgatgccgctggaagaaaagcgcgaataccacacgctggcggggctattgatggaacacagccagcgcgtgccg

SEQ ID NO: 707126 - DNA, 101 bp, Homo sapiens
gttttcttctgccatctgtgacagcttcttgatctgtccccaggggtctgaatggcaaggagtgagccccaggatgacccaggacaagcggcagcaacagg

SEQ ID NO: 707127 - DNA, 1004 bp, Homo sapiens
atctactaaatgagtcgccagacgagccacatcgctcagacaccatggggaaggtgaaggtcggagtcaacggatttggtcgtatttgggcgcctggtcaccagggactgcttttaactactggatacagtggatattagttagccatcaatgaccccttcattgaacatcaactacatggtttacatgttccaatatgattccaaccatgagcaaattccatggacaccgtcaaggctgagaccgggaagctatgacatcaatggaaatcccatacaacatacttccaggagcgagatccctccaaaatcaagtggggcgatgctggcagctgaggtacgtcgtggagtaccactggacgtacttacaacaacatggtagaaggctggggctacatatatgcagggtggagagccaaaagggtcaatcatactactgcacccctctgatgatgcccccatgatacgtacatgggtgtgaaccatgaagacgtatgacaaaaagacatcaaagatcatcagaaactgacatcacatgcaacaacaaactgcataagaaaccctggaaaaggtcaatccatggacaaaataaggatacatcagtggacaggacatcatgaacaaaagcacattgcacatcaaatgacacccagaaagaatgatggaatggacacctacgaggcaaaaaggtggagtgaagaaacagacaagacaacataccaaaaaccatcagttcacctgaactcaaaaaggacggctggaccaagcgctgaaacaaaaaggaaaaacctgaacattaaacgagacacaccaacacaatgtgaaaacgattacacaatggacaaagaagaaactaaatgaaacaaacacgtaagaaaaaaaaaccatagaaacatagaagacagaaaacagagtaaaacagaaagaaagccaaagaaaaaaggaaaagaaacaaagaaccaagaacaaaaaagaaacaaaaaaaataaaagagaagaaacacac

SEQ ID NO: 707128 - DNA, 252 bp, Homo sapiens
ccagcagggcttgggggcttggccctcgaagccatgtggtgggcaaattcagaaactgaagccagcctcggcgggaccgaggtcccggagccaagctgtacccatgctgggcgagtcccatatttgaggagctttctggggagaacatgcgttgtgcggcgtgaaactggggctagagggaaggaggagcctgttgtccctgggaggccggctgatgcacgtctgggaatgaataaagaagccttctggtta

SEQ ID NO: 707129 - DNA, 100 bp, Homo sapiens
  misc_feature (62)..(62): n is a, c, g, or t
attcaaagcttctaaccgatgtacggcggacatgcgttgtggttaatttggtgttatttttngttccacaagttaaataaatcataaaacttgaaaaaaa

SEQ ID NO: 707130 - DNA, 163 bp, Homo sapiens
agcctgggcgacatgagcgagactcctctcaagaaaaaaaaaaaaaaaaagggaccaatttcttgataaatgcaataaccaaataatcctcacaacctttcccttgaccaaagcagcccaaacccaaaaaattccttccccaatgattccaaattaggttccc

SEQ ID NO: 707131 - DNA, 647 bp, Homo sapiens
  misc_feature (533)..(533): n is a, c, g, or t
agggacatatatctgtgcattaatactatgaaagaaaataggccaggcacagtggctcaagccagtaatcctaaccctttggaagaccaaggtggatgaaattgcttgaggccaagagttcaagaccagcctgggcaacatagtgagaccccatagctacaaaaatgttttttttttcgagacagagtctcactctgtcgcccgggctggagtgcagtggcacgatctcggcttactgcaatctcctcctgcggggttcacgccattctcctgcctcagcctccctagtagctgggactacaggtgcctgccaccacgcccggctaatttttttgtatttttagtagagacagggtttcaccgtgttaaccaggatggtctccatctcctgacctcgtgatccacccgtctcggcctcccaaagtgctgggattacaggcatgagccactgctcccagccgctacaaaattggttttaaaaattagccaggcacagtggtgcacacctgtagtcccagcctcaggagactgangtgggaggattgcttgaagccggaggtttaggcttcagagagctatgattgcaccactggactccagctttgatgaaaagatgcaggcctgcctccccacaccctccccccggg

SEQ ID NO: 707132 - DNA, 163 bp, Homo sapiens
tatctagaggatccctttcttgccacgactcggttactgtgaatccaccaggtgcagcccatgaaggggccacctgcctgagccagagaccctcgggctgtgcagcctgaagcccacatctgcctctggacctcaggtgcgctggggaaaggaaggcaaagtg

SEQ ID NO: 707133 - DNA, 170 bp, Homo sapiens
ggaccgtatctctaagcattacgcaggtaatatcttttaagaatatgcactatcagatttacgcacgtaaagccaacggatacaggcttcagatttactatctgagtccaaaacaatttgtgctatcccaggtgggtgatccttctagaagtcagactctgcagggcatg

SEQ ID NO: 707134 - DNA, 238 bp, Homo sapiens
atagcctacccctcccttgttctatccctatcatgcttcattctcgcaaactccctctgcctacgagaaagagacctcagatcgctcattgcctcctcttcggtcatcccctataaccctcgctgctaagcatgcattgctcgtccaaagccccgctgaagcttcacctggcgcagtcattctcataatcgcccacggacttacatcctcattactattctgcctagcaaacccaaaa

SEQ ID NO: 707135 - DNA, 2515 bp, Homo sapiens
gggttagagcccaccttcgccttgataagaaagatgaatctttgttggtccaacactaagtaaggaggaaaaagagttggaaagaagaaaagaattaaagaaaatacgagtaaaatatggtttacagaatacagaatacgaagatgaaaagacattgaagaatccaaaatataaagatagagctggaaaacgtagggagcaggttggaagtgaaggaactttccaaagagatgatgctcctgcatctgttcattctgaaattactgatagcaacaaaggtcggaagatgttggagaagatgggttggaagaaaggagagggcctggggaaggatggtggaggaatgaaaacgccgatccagcttcagcttcggcgaacacatgcaggcttggggacaggcaaaccatcctcatttgaagatgttcaccttctccaaaacaagaacaaaaaaaactgggacaaagcacgagagcggtttactgaaaacttcccagaaactaagcctcaaaaagatgacccagggaccatgccttgggtaaaagggactttagagtgaaggctaatcatagaaaaaaaacctctagtttttttaaaaatagaatttggaaacttattttttctccccaaaagaatcagcagcacaggggaactatgtcacagtttacctcttcctgattcagaaatgtgtatggtttgcagcttttaaaaaccatttttttaaaactaataaatagtgactgaaccaatttatgcagtaaatagactaaagttcacagggcacggatgagtttatcaaacttcgttattttatcttgtcatttacaacatccatataagcaactagccatataagcaaaattcatagaactactaatgacttaagtgtacatctgttcttgtctccatatattcatgtaagatgcacaacaaaagaaacatcagaagtttataaaaataaatctgactatatgcatcctcatttattccctttagaacctaggtaaaaaatgttgcgaaaacatgggtagtggcgcatacattttgttatccttgaaatagcctaagtaatgttattgaagaactaatgaacaggtaacatattgtagaaaattagtctttcattgttttcttctgtgaagaatctgttgctatgtactgtatattcagcatttatatttggtttgtttcatagctaatgaggtatttagatatgaacaactgaatacatattgaaatagtgtgctggcttttgtagttttgataaagaccattgcaggcaatggaattgtgccagagaaatctgatttctagtacaaaaggaatacttagccagggcctcaagctcaagatacttattgaaaacatcctcaattgcaataaaaacattataacatgaaaaagagtgattttttgaaccggtgatttaaatgtattgatctgctttgaattttcaagcagccagaattttctagtttaaattggcagagttataacaaaggagagcctcaaatattagacaattgcagtgcggctttctgggcacaggtgtcactgctctgccacctatcactattctttttctgttcagtttttctctcaggtgtttgctgggaaattaacactggaactgacccttttctggcagtgaatgtaagctctagctcccccatctactataaagaaatgtcttcgagatgtagaaataaggaatattctgaaaataaaaattatacagtagtaaagataattcagaaagaaaaagctacctgttagaatttccagtctaaatggcacagggtagttacggagaaaaggggatggagaaggagaaactatgactaaagatgagaggtatgaacgagttgtcaggttcctatgggcttaagctaggacaatcaggccctaaactccaaatttggataaaatatctctttgcattcttcttggccacctgcatagtctgacacatacgtatgtacagttagacttgcaggctgcaggagtgccctgcattgttttcttttaattagaaataaaaagtattagtctaaatgtggttctggtgctggtgccctgtatatatgtaacaatataggacccctccaaataggttttgcttctggtgaatcttggtcattgggttagtatatgactgtctataatattttccatttgtattattatattggggaaaacattttttatcattttctattaagaaaatggaaaacttaaatatggtgttaaaaatggaaatatatgtgatatttgcattattaaacccctttgcagatctaaagtctcagggttccactattagtggttaaagtactgaataatgtctgggtctatttccatctgtaaaataagaatatttgtctcacgtgtctgtcatgaatagcaaatgagaaaatgtatataaaagcactttgtaaattgtaaaagtagtacagatgtgagcttctatttgtttagaagcataaatgtgaattatatacagtttgaaaaaaaaaaa

SEQ ID NO: 707136 - DNA, 366 bp, Homo sapiens
gggaggcgaagattccagtgagccaagatcacaccactgcactccagcctgggtgacagaatgagactccatctcaaaagcaaaaaaattcaatatgcgtttatcataagacccagcaaatgctcttctgggcatttatctcagagaaataaagtaaaatcttatgttctcaaaaatacctgtatatcaatgtctgtagcatcttgcaattgcccaaactggaagcggccagatatccttcaacaggtggatggttaaacaaactgtagtacgccataccctggaataccattcagcaataaagattaaaaagctattgatacatgcaacaactttcagaggattatgctgcaaataaaaaaacag

SEQ ID NO: 707137 - DNA, 2492 bp, Homo sapiens
gtttaaacatatccattgcctttatttctggttagggtggaatgacatactctgcagcatctaaatgaaatttggtgatgctagttaaggagcactctattttctgtaaagtaggctgtacttattgacaaggcaagacaacatagaaaaatgaatgtaagttccatgtataaaggtatatatattcctgtatgtatttgatgcatctgacaggtttttcttttgcatcaatctttaataaatcaaaaaattgtagagtcctaagttggacacagcagatttcaatgtgtttagactctaaaataagtcctctgctcaacttttggtaacagatccagcttcagcttcggcgaacacatgcaggcttggggacaggcaaaccatcctcatttgaagatgttcaccttctccaaaacaagaacaaaaaaaactgggacaaagcacgagagcggtttactgaaaacttcccagaaactaagcctcaaaaagatgacccagggaccatgccttgggtaaaagggactttagagtgaaggctaatcatagaaaaaaaacctctagtttttttaaaaatagaatttggaaacttattttttctccccaaaagaatcagcagcacaggggaactatgtcacagtttacctcttcctgattcagaaatgtgtatggtttgcagcttttaaaaaccatttttttaaaactaataaatagtgactgaaccaatttatgcagtaaatagactaaagttcacagggcacggatgagtttatcaaacttcgttattttatcttgtcatttacaacatccatataagcaactagccatataagcaaaattcatagaactactaatgacttaagtgtacatctgttcttgtctccatatattcatgtaagatgcacaacaaaagaaacatcagaagtttataaaaataaatctgactatatgcatcctcatttattccctttagaacctaggtaaaaaatgttgcgaaaacatgggtagtggcgcatacattttgttatccttgaaatagcctaagtaatgttattgaagaactaatgaacaggtaacatattgtagaaaattagtctttcattgttttcttctgtgaagaatctgttgctatgtactgtatattcagcatttatatttggtttgtttcatagctaatgaggtatttagatatgaacaactgaatacatattgaaatagtgtgctggcttttgtagttttgataaagaccattgcaggcaatggaattgtgccagagaaatctgatttctagtacaaaaggaatacttagccagggcctcaagctcaagatacttattgaaaacatcctcaattgcaataaaaacattataacatgaaaaagagtgattttttgaaccggtgatttaaatgtattgatctgctttgaattttcaagcagccagaattttctagtttaaattggcagagttataacaaaggagagcctcaaatattagacaattgcagtgcggctttctgggcacaggtgtcactgctctgccacctatcactattctttttctgttcagtttttctctcaggtgtttgctgggaaattaacactggaactgacccttttctggcagtgaatgtaagctctagctcccccatctactataaagaaatgtcttcgagatgtagaaataaggaatattctgaaaataaaaattatacagtagtaaagataattcagaaagaaaaagctacctgttagaatttccagtctaaatggcacagggtagttacggagaaaaggggatggagaaggagaaactatgactaaagatgagaggtatgaacgagttgtcaggttcctatgggcttaagctaggacaatcaggccctaaactccaaatttggataaaatatctctttgcattcttcttggccacctgcatagtctgacacatacgtatgtacagttagacttgcaggctgcaggagtgccctgcattgttttcttttaattagaaataaaaagtattagtctaaatgtggttctggtgctggtgccctgtatatatgtaacaatataggacccctccaaataggttttgcttctggtgaatcttggtcattgggttagtatatgactgtctataatattttccatttgtattattatattggggaaaacattttttatcattttctattaagaaaatggaaaacttaaatatggtgttaaaaatggaaatatatgtgatatttgcattattaaacccctttgcagatctaaagtctcagggttccactattagtggttaaagtactgaataatgtctgggtctatttccatctgtaaaataagaatatttgtctcacgtgtctgtcatgaatagcaaatgagaaaatgtatataaaagcactttgtaaattgtaaaagtagtacagatgtgagcttctatttgtttagaagcataaatgtgaattatatacagtttgaaaaaaaaaaa

SEQ ID NO: 707138 - DNA, 2461 bp, Homo sapiens
gggttagagcccaccttcgccttgataagaaagatgaatctttgttggtccaacactaagtaaggaggaaaaagagttggaaagaagaaaagaattaaagaaaatacgagtaaaatatggtttacagaatacagaatacgaagatgaaaagacattgaagaatccaaaatataaagatagagctggaaaacgtagggagcaggttggaagtgaaggaactttccaaagagatgatgctcctgcatctgttcattctgaaattactgatagcaacaaaggtcggaagatgttggagaagatgggttggaagaaaggagagggcctggggaaggatggtggaggaatgaaaacgccgatccagcttcagcttcggcgaacacatgcaggcttggggacaggcaaaccatcctcatttgaagatgttcaccttctccaaaacaagaacaaaaaaaactgggacaaagcacgagagcggtttactgaaaacttcccagaaactaagcctcaaaaagatgacccagggaccatgccttgggtaaaagggactttagagtgaaggctaatcatagaaaaaaaacctctagtttttttaaaaatagaatttggaaacttattttttctccccaaaagaatcagcagcacaggggaactatgtcacagtttacctcttcctgattcagaaatgtgtatggtttgcagcttttaaaaaccatttttttaaaactaataaatagtgactgaaccaatttatgcagtaaatagactaaagttcacagggcacggatgagtttatcaaacttcgttattttatcttgtcatttacaacatccatataagcaactagccatataagcaaaattcatagaactactaatgacttaagtgtacatctgttcttgtctccatatattcatgtaagatgcacaacaaaagaaacatcagaagtttataaaaataaatctgactatatgcatcctcatttattccctttagaacctaggtaaaaaatgttgcgaaaacatgggtagtggcgcatacattttgttatccttgaaatagcctaagtaatgttattgaagaactaatgaacaggtaacatattgtagtattcagcatttatatttggtttgtttcatagctaatgaggtatttagatatgaacaactgaatacatattgaaatagtgtgctggcttttgtagttttgataaagaccattgcaggcaatggaattgtgccagagaaatctgatttctagtacaaaaggaatacttagccagggcctcaagctcaagatacttattgaaaacatcctcaattgcaataaaaacattataacatgaaaaagagtgattttttgaaccggtgatttaaatgtattgatctgctttgaattttcaagcagccagaattttctagtttaaattggcagagttataacaaaggagagcctcaaatattagacaattgcagtgcggctttctgggcacaggtgtcactgctctgccacctatcactattctttttctgttcagtttttctctcaggtgtttgctgggaaattaacactggaactgacccttttctggcagtgaatgtaagctctagctcccccatctactataaagaaatgtcttcgagatgtagaaataaggaatattctgaaaataaaaattatacagtagtaaagataattcagaaagaaaaagctacctgttagaatttccagtctaaatggcacagggtagttacggagaaaaggggatggagaaggagaaactatgactaaagatgagaggtatgaacgagttgtcaggttcctatgggcttaagctaggacaatcaggccctaaactccaaatttggataaaatatctctttgcattcttcttggccacctgcatagtctgacacatacgtatgtacagttagacttgcaggctgcaggagtgccctgcattgttttcttttaattagaaataaaaagtattagtctaaatgtggttctggtgctggtgccctgtatatatgtaacaatataggacccctccaaataggttttgcttctggtgaatcttggtcattgggttagtatatgactgtctataatattttccatttgtattattatattggggaaaacattttttatcattttctattaagaaaatggaaaacttaaatatggtgttaaaaatggaaatatatgtgatatttgcattattaaacccctttgcagatctaaagtctcagggttccactattagtggttaaagtactgaataatgtctgggtctatttccatctgtaaaataagaatatttgtctcacgtgtctgtcatgaatagcaaatgagaaaatgtatataaaagcactttgtaaattgtaaaagtagtacagatgtgagcttctatttgtttagaagcataaatgtgaattatatacagtttgaaaaaaaaaaa

SEQ ID NO: 707139 - DNA, 160 bp, Homo sapiens
cactcatcaggtcctggcttggaagtactggctgatattatcttatcctctcatctctgtggttttctctgcatagtcaaatcatcattagcttagtggcatacgtagtagcatttcactagttgcatgatatgtcattccttcttttgatttcccattc

SEQ ID NO: 707140 - DNA, 745 bp, Homo sapiens
gggttagagcccaccttcgccttgataagaaagatgaatctttgttggtccaacactaagtaaggaggaaaaagagttggaaagaagaaaagaattaaagaaaatacgagtaaaatatggtttacagaatacagaatacgaagatgaaaagacattgaagaatccaaaatataaagatagagctggaaaacgtagggagcaggttggaagtgaaggaactttccaaagagatgatgctcctgcatctgttcattctgaaattactgatagcaacaaaggtcggaagatgttggagaagatgggttggaagaaaggagagggcctggggaaggatggtggaggaatgaaaacgccgatccagcttcagcttcggcgaacacatgcaggcttggggacaggcaaaccatcctcatttgaagatgttcaccttctccaaaacaagaacaaaaaaaactgggacaaagcacgagagcggtttactgaaaacttcccagaaactaagcctcaaaaagatgacccagggaccatgccttgggtaaaagggactttagagtgaaggctaatcatagaaaaaaaacctctagtttttttaaaaatagaatttggaaacttattttttctccccaaaagaatcagcagcacaggggaactatgtcacagtttacctcttcctgattcagaaatgtgtatggtttgcagcttttaaaaaccatttttttaaaactaataaatagtgactgaacca

SEQ ID NO: 707141 - DNA, 944 bp, Homo sapiens
  misc_feature (279)..(279): n is a, c, g, or t
  misc_feature (944)..(944): n is a, c, g, or t
gacgggcgtggactcggactccgtatacatgaatactcagatacgagcatctgcggggcacttcgacttgctactagttactagattgtggctcgggctcgggttgttactgcaggggacgagaaccaactatcgttgtgtgggccacggtcgaccgttgtcgggtgaacttgatacggcccacacttcacgtcggcggccgacggtgcacgagccacttctagacgcggtgacttctagtggtgacttgctcgttcgctagttgtgcagcatgtacangggcaatgtcggcatagctgagtctagatggaaaccgcggagacgctggtcggcgtgcgtaggctcgaaggaacggcagtagtccgcgcagtcgcgatagccgctgaacgttgacgcgttacgcctcgcctccgcgggtggtgtctccccacgatgctctggaacgcttcgggaagttctcggcatcgtggccactgtggatgactacaagtaaagtagggaacgaccgttgcacctcgcattagaataggccccaaggcgtatgcgtagaaaggacgccgagcttgtacattgtgctcgcgagcgccatggggtaagagtaatagtcgtgtgagcgtgtccccctaggctaagaaggatcgttccatactaagcggtgaaacgggcgggaggtccggaggggttggacaaccgtttattccaccgttggaacttattgcgaacgccaccgtttgtaagatagtttggggcaaccccaacttcagattgtggcgtcgtgacctcctcagtaagacaggtcggattctgatgataccgtacagaaagtcaaatatgtgccgtctttactcggccatctcaggagagcgccggccttagattcgagcccaaagttacatcccataaagccggacgtaggggttcaaccccttccacaccttgtgacn

SEQ ID NO: 707142 - DNA, 434 bp, Homo sapiens
  misc_feature (273)..(273): n is a, c, g, or t
accttgcacgtcatcatagacttcatactagagagaagccttacaaatgtgaagaatgtgaaaaagttttcagtcgcaaatcacatcttgaaagacacttgaggtgacgttgcccttgtttttgagaatgccctactgtgtaagtggtagtgttctttctttttttttttttttaagacggagtctcacctgagcgagcctctgcactggccttatttattattgttattaattttttgtttttgagacggagtttcactcttgttgcccagnctgcaccgcattgccgcaatcttgtttcactgctccctctgtcttgccgccctcgcgcttctcttgccccagtctcccacgtatcttcttctttcactttcctcccaccccttcttgcttcacctcctatctatcctttcctgccccctctctttcttccc

SEQ ID NO: 707143 - DNA, 563 bp, Homo sapiens
tagacctgtacgtcaggtcatcagagcagttgtaggtatcgtctgttttctgagaacaccaaactttcttcaagatgttgatcaatatgactagtgctcagaaaaaaaaaatcccagcactttgggaggccaaggcaggtgaattgcctcagctcaggctggtcttgaactcctgggttcaagcactccacctgccttggcctctccaagtgctaggattacatgcatgagacatcacacccagtgcttctttttttaaaaaaaccaaacagctttgtgagatctttattttattttattcatgtatttatttaagagacagagtcccgctatattgaccaggctggtattgaactccaggcctcaagcaaaagttaccttctatgtatagaaaaattaaacaatatttcttcttttctgagacactgtctcactactttgcccaggctggagtgcagtggtgtcatcactgtctgcagcctcaaacttgggatcaagccatcctcctgccttggtcccccagtagttgggactacaggtgtgcaccaccacacccagctaac

SEQ ID NO: 707144 - DNA, 1255 bp, Homo sapiens
gtgacgcgtgggaaacacaaatggtcggatgatgccggtgcagcagtgtggtgggccctggggtgccctgtgtggccctgggatggggaacctgtggtggcttcctgctggaggtttcgggcagtggcatctgtgggccggggtctgcgtgcgtgtgacggggcctggggccatgaggtcgcggagcatcgctgtgaggcaatggcctgaggataatggagttggatgccctgtacaccaatgttgggccgccttgtgtcaacggacatgacagatcaagtccctggaggagatctactcgtcttctccactgtcccaattaacggaattcacgacgactcattgactttcgttcctggtgggcctcatctcaacggcattgaaggtatttcggcaagacttatggccatgtgcagacaggcaaggacacctgttaccgggacccaggctaacaaccaggggtatcaaggggcaatacatgtatggctactcgggggacctacgaatggggcccacccgttcgggtccttggctgttgttacaccgtggcattccaatgggaagtggtgagcacaacccggaccaattcccatgttagtgtgggcaattacattccgtgtggccaaaggcactccttccaattcagatcccgcccggttgctgcgcaagacaggggctaccttggggaggaacacacgcggactccggggcaaggcgacccgaaggagtgtgtgtagcgcgtttgcaaacggagttgaccaatgggcccaggcattggctgcgatactgattggacatggggtcagcaggcacgtttcaatttacggcattggcagacccaaagtgggttagcatacttttgtgcaatatgatacttctcagaaaagactttggtggacttaaaggaaaaggttggctacaattgactcgggtatgggatattcagaattgacacgttgtagttaacacgacgcattcaacgcaacccgtgtggtgcacattgatcgtcattgggtcaagccaccttgtgagcaaaacatatcgcggccgcagagggaacacagcccgttattggagttggccccgatcgacattaagtgaaccttatacagggtttaccttgtaaagcgccccggaaaccaatactgtggcaaggcgtagcaacattggtgcatttcgacgcgagacggattgtacagccactatataaacggcaagtatacagattgacgacagccgttggcgaccgatgaac

SEQ ID NO: 707145 - DNA, 257 bp, Homo sapiens
cagcaattaaccaccaatgccagctattcaagaaaaagcaaacagcagcagcaacaagcaatgatgcagaaagcaaccacattactccattaatttttgaaatagatgctgtcaactgatggaccgtggcaagattgaaggcttttgtaaaacctatcaggtgaataagcccatgaacaaccagaagcaaaagaaagaaaacccgaaacatagaaaagaatttaacaacaagattactcagctaaacaggtcgacgc

SEQ ID NO: 707146 - DNA, 241 bp, Homo sapiens
acgaggagatagcaccatgcacaccagccttggtggacagagcgagattccactcaaaaaacaaaaaagtgggttccttcttatctaactaatctgtgtggagtcatcggcaaagctctccagagtcacgacacagggatgatctggacaaataagtgatggggagtaatgatgataatcacataactgctaagatccctcattacgcctatataccagcccggtgccctgcctcaggtga

SEQ ID NO: 707147 - DNA, 497 bp, Homo sapiens
cgtcagctatggtgatgctgttgagctaacaggtggctgcaaggctcgagactgcttcaggaggagggctagctgccagagaaagcaaccacatttttttttttgttaaacggagttgggctcttgtagcccaggctggagtgcaatggcacaatctcagctcactacaacctccacctcccgggctcaagcaattctcccgcctcagcctcccgagtagctggaattcacagggatgtgccacaacgcctagctaactgttgtcacttttagtagaaccggggttccaccatgttggtcaggctagtctcaaactcttgacctcaagtggtccatgtgcctcagccttccaaactgctaggataacaggagcgagccaccgaacctggccccaaccacattttttggaggcttgggacttacagcctcacctgctgaactccaggaggcacaaggaactgcagattgacttaactaccattggccagtgatttcct

SEQ ID NO: 707148 - DNA, 102 bp, Homo sapiens
catctgctcactacctcttccctgtgctgttacacagtgtcattgtgatgttaaattacagtcatattcttgcttctctccaaaaaaaaaaaaggggtcccg

SEQ ID NO: 707149 - DNA, 778 bp, Homo sapiens
gaaatggcggatgacgccggtgcagcggggtgggcccgggggccctgtgtggccctgggatggggaaccgcggtggcttccgcggaggtttcggcagtggcatctggggcctggggctctgcgtgccgtggacgtgggcctggtgtgccgatgtgccgcggagctcgcggaggcaatggccgaggataaggacgtggatgcccagtcaccacagttgggccagcttggtcaacggaccatgacagatcaacgtccctggaggagactctatcgtcttctccctggcctattaaggacatcagagatcattgatttcttcctgggggacctctctcaaggatgaggttccgaagaattatgccagttgcagaagcagaccccgtgcacggccagcgcaccacggttcaacggcactatcgtctgactatcggggactacacactgcgccacgtagcgtctcgcgcgtgtcaacgtgctccaagggaagggtgagacaacacggccatccacgtggaggccactcaactccttgggccaaagctcttccagatcagtaccccagatgccgcaagaggcgtactgaggggcaaacaagaatcgcgccaaggccccgacgacctgtacgcttgcacacggctgaccacagggacgcgctctgccggcctcttgactgactgagaacaggacatcaattccactcgaagcccacgggggcactagggcatcagggcttccgacacctgctgcgctaggacagcgtgcctcatggatggaatgg

SEQ ID NO: 707150 - DNA, 332 bp, Homo sapiens
tcttcccctacagttataaaaagaaaaaatatatagaattattccaaaaaaattatttttccattttttattgtggtaaaatacatgtacttaaaatttaccaccttaagcatttttaattatacagttcagtgatattaagtacattcacattgttttacaaccatcaccaccatctatttccggaacatttttcatcttgcaaaactgaaactctatacccattaaagtccatattcttccatcttcccagcccctggaaaccaccatctactttctgtctttgtgattttgactactttatgtatgtcatgtaagtgaaatcatacagt

SEQ ID NO: 707151 - DNA, 86 bp, Homo sapiens
aagctgttaactcaacatctatttcatctttttagctcccttcctttttctctgctcaataaatattttaaaagcataaaaaaaaa

SEQ ID NO: 707152 - DNA, 127 bp, Homo sapiens
cggtccctgggcttagctagagaaggataaagggcatcctgtgaagctcgtgtggtgtttgtttttggtcctgattagaagctgaagctgtctatcctctacccagctaccactggcagacccaggt

SEQ ID NO: 707153 - DNA, 335 bp, Homo sapiens
aagttttcgtggcagaaatattaggaattgtatgcactgtaaacactgaaaacccactagtggttctgtggttcccacgttgtggttttgacaccaggagcatccttgccactgtcaaacgccggagatccgcagatctgtgttgtaacaggacctccccctgaccctgatgcatggcagttgaagaagtctttccgtgtaagcgaaaagacttggaggaaaaggtggagatatgcgttgtatcaacatccttttgctctggaaccacgtagagacttgggagccagttgggtggagcattcgttggatgaggttgctcgggttaggaatatcaa

SEQ ID NO: 707154 - DNA, 126 bp, Homo sapiens
ttttttttactttaaaaaatatctagagatggggtcttgctatgttgtcaggcttgtctcaaactcctagcctcaagtgattctctggtctcagcctcccaaagcgtgaggattacagcgtgagac

SEQ ID NO: 707155 - DNA, 1773 bp, Homo sapiens
ttggtgtgtgtggaggttcgtttgtcgctgttgagatgctgtgcctctgctggctgttacgttcacgttcagtcgctctgcttggttcgctagttacttttgccatgcggtggtcgtctcgctcgtgtttctatgatgtacatcacacctgttctgggtgccgttatgtgttccagacccactcgtctatcttgtggtctgtcttatccacagcgtttgttggtgcgcctgttgtttggtcgggcccattcatgttgttctgcgctgttctcccgtgcccaagtggtttatggtatcaccagtgttccccgcctctcacttgctaacctggttgtggggcaccttcccggtacgcgccttaggatttcttgtggctcccccccagaattgttccagtcgcctgctgggtcgctacttttggtggagtcttttaccaacactccgcttgttggatgtgtctccaggtggttatctcttgtcgttgtgtaattgtggtacgtgatacaatgttgtcatgactgtgggaacatgtttgtgtcgtatgcatacaaattggacgttggttttgtgtggggcgacaaagtagacgcttgttagtgatggccaaacgggccccaaatttggggtaatggaaaggaataaggagccttttttcgtgtgtggcacttcccccctcgtccacctgatgtgtatcctcgggcgcttgttcatcaaaacgttggttgtatagccacattggagtgtccccacacatgtgtgtttcgcctgcatgttcctctgtcaggtgggtgtgtagttgatagtggtctgtctgtgctcctgttttggctgtttccacccccgggtgtgccgcctccgtcgcagaccccccgtcgtgtttgttccccacgactgtcgtttggtcacaatgacctccctttgtgttgattagactcctctcggttggccgccggcgtgtagatgaggcctcggtctcgcgggggggcccccatcgcaggggtggtctccgtccctgtggtcaccccccagctcccggcgcccactgttcgtccccacaccgcttccggtgagaacccccccccgtgggttgtactcctcctgcggtccacgcttgtctttggtgatgcgcctctcatcgcgcaggggggtgaaaagacccacttgtttcggggagaagtgctcccccgccggaggatcctcccaccggggcccccctcatatttttcacccaatatcgcccccctctaatttgtccacgccaccgcgaaatagcaccgccccacagagattgagtttctcaaccgcagccgccccgctcttgttgtcactctgtgtgtaaaaacctctataagttatatagaaaaataaatgagaatggtgttatagccccccccactctgtccccctatatttgtgccacgaacccctcacccaccttttgaccacacacttggtgcacgaagttgggaaaaatttccacccacggggcctcgaggctctgtcgagagaaaacacttcccgttcacgcgcacggtgtcccacaggcctataacccctctggctggcaccttaaattccttcacttatcacgcacgcccaacaccacccgcccccacccccacttttcacccaccatcccacgagccttctcctgcccgcggagctgtaaactggtccacgccctgtatagcgcggaaagggggctctggcacctagctggtaccccctctccgccaggtctttttccccctaaaattctgtgttgccccttga

SEQ ID NO: 707156 - DNA, 1367 bp, Homo sapiens
ggagggccgttggccgggtgcctgcggtgacgtccgcttcagtgacgggcagcgccattgcggccacccggcttgtctgtccttcctgtggcgccacgtcccccagagcgatccgagcgcgtacgcgccagagtaacgctagtccacctgattcctgtctcgtggtctcttgtgcgtgcttgcttctggagcagcgctcactcctcttatcaagccagaaagctggctgggtcacttatgagtcgcaaaaaatcacacacaacaaagtacatgacacacgctgtgcagcgagggctgcctcaagacattacggcagcgcacacgcaggcataatcatggtgggtgcgcatacagagagttctctgtagccgttcacatggtgtgtaaaatgcggtgcaacatgtgagcaaggttagccctatccctgtacaagaggtcgcgcaaaccgggggatgtatcctaccaggaactcgaaagagcaacatagctagctacttgcggagacacgcccacgtacaccgcaccgatcactcgattgggacactttggcgcaccagaaaaccgttctagattagtcgttgaaccgccttttcggtgggcaacccatcatcgaggcaaaccccatcaattggcaaacaatttgcacccaacccacgaacttagacaccttcgaggcaatacgtgcaaggtgccacacgccagccaaacaagctgtgggaatctcccctggcagtttcccttcgagacgcaacttagagcggccgcacgaatcgggaggacagccacatttcgctagagaacgaacacccacacgtaaacaggcaaaaagcaaggttcaagccaaaacaacaagttctccaagcggcaagaggccctatttggccttgcggaaggggttatatcgggccaggcccccaagacaaggcccgcgtacttttaattatggggggacgccctgtaacccaggccaccctgtcccataggtcggagtacaccaagacattacaacttgggtttatcaccccctggccacttttgccacatcatgtggggtcgagacattagaacccttccgtgggaaatgcaagagggccagtaggaggccccataggagggtaccccccctagacaccaaggagtgggacacatgcgccaaactttggcttccgaaaagttggcccccaacacaagggcattcggttaattaatttcacttttaccttaatgcaagcggcaccacaggggtcgtagaacggtttcgcacatctgtgtcctttatcccccctttcgcggaacggcgcaatccaactttgccgcacataatatacacatctctcatcagagcaaaatatatacaccggagcccc

SEQ ID NO: 707157 - DNA, 139 bp, Homo sapiens
tagtaaatgtaacaccatataggcccacaccacaaaaatccatgagaaaggttcaaattgaacaccatatgtgcattattttcaaatctgtgttgtgagtatatactagtatctgcgttgtaccagatacatgcacaaa

SEQ ID NO: 707158 - DNA, 995 bp, Homo sapiens
gtaacctttctaagctccctaactcgaggccagaacccacagctgaccttacaagcttgctccctctatgacacaaatgaatagaccggtaggaggagggtgcacataacccttacacctacctctgccagaaaagtgggggctgtactgtggactgcatcggatgatcttccttagtgctacttctttcagtgtaccctgtagcgacagcgtctagatatctgacatgccttccgttgacatctgtaacctcttcacccctttccctcttctcttgagcctaggctatctgtggtttgtcggtacgaagtgtgattactatatagcttaattggtattgatgtacaaatattgtggggttaggggcttcaaagccggcaattttcggataacaccatagtcatttcagccgaggtaccgatgagaacagaagtgtactgtatctatgggtagtctagaggccaccattgaagcgattgacatttagggattcatctagcctgctgcgagaaagtcgaaaaagatggacgaccagaggtcttaatgatggaaagtacaagctacaacgagaagcgagaaccgtgaccattgcctgagcaatgctgtcgaaagcccgagctgtctaaattctgtctgaagcgggagcacatgtcatctactgcccccctaatttgcaggcccacgttggactgcagtcggtttttcgtaccccatggcggcacgaaaagaccgcttgaaaactgtgtactcatacttctatgagggaggtgaagggtaatgaccccatcgaaagcccccagggcttcacaatctctgaaatgctgttgccgtgccaaatctgtctaccccaaagaagtcacggttggggagcggaagctgacattcgcatgccggggcgaagagcatcaaagcgggcgcgctgcaacaaactgcgagttgaaggcctaaacccggagccgggagacaatccaccttcggtttatctaaacagtcgt

SEQ ID NO: 707159 - DNA, 474 bp, Homo sapiens
  misc_feature (22)..(22): n is a, c, g, or t
  misc_feature (110)..(112): n is a, c, g, or t
  misc_feature (119)..(119): n is a, c, g, or t
  misc_feature (122)..(122): n is a, c, g, or t
  misc_feature (230)..(230): n is a, c, g, or t
  misc_feature (233)..(233): n is a, c, g, or t
  misc_feature (243)..(243): n is a, c, g, or t
  misc_feature (249)..(249): n is a, c, g, or t
  misc_feature (253)..(253): n is a, c, g, or t
  misc_feature (302)..(302): n is a, c, g, or t
  misc_feature (333)..(333): n is a, c, g, or t
  misc_feature (377)..(378): n is a, c, g, or t
  misc_feature (384)..(384): n is a, c, g, or t
  misc_feature (427)..(427): n is a, c, g, or t
  misc_feature (454)..(454): n is a, c, g, or t
  misc_feature (469)..(469): n is a, c, g, or t
  misc_feature (473)..(473): n is a, c, g, or t
gcatcattctctgtaatctatnagccattataagcctgaataatttcagtctcttcagagcaaaacatagtattttattccactagcagatgtttctccaataacaatannnaaacctnttnatcctcatatactacccactctcatccctgaaacataagttgccatattccagtggtcctgaattttaacatgttttgctctacattatttcaagaaatataatgagntanagctttgatnatgagnttanctcctttgctgtaattatacttactctataattcaaactatttagctgnagtcagttaacgagtaaaaaccgcggatacngctcaaactgctcttaacttctttaaatgtttactgttctatcnnaactcngacccaagctgcacaggtgtaacttgaggcactaacaatcttnctaccagacgttattgttttatgtgtncttaagctgggcgcntatnc

SEQ ID NO: 707160 - DNA, 231 bp, Homo sapiens
caagccctgggcggaggggctcagaggaaccagccctgcccacacctggatctcagacctccagcctccagggctgtgggagaatcaatgtgttttgtttctaagccgcccagcctctggtattctgtgacagcagcctgagatggactaagacatctcataagaagaggagatgacgacacagacacccacggaaggaccactccttgatggcgcagcggagaagacagc

SEQ ID NO: 707161 - DNA, 1007 bp, Homo sapiens
agcggagtgcgcagaggacgcggcggaagcatgttccaggctcctgagctggagcctgggccgaggcttcctgcgtggcatcggggcggcggtgctcgagggcttgctccggctgcgccttgctcccggaggcctggcaggacgcgtccggaggccctgagagtgcatcgtgtgccgccactcccggaggtcgcgccgcaacggtccggggtccatggacctgctgccagccttcgtggcagacgcatcgccctgagttcttcgaggtcccgcgtgctggacagatggatggatgcgcagcatcagtggacgtcccgcacagtgtggccgctgctcgaggacgcgggctggacgattgccgaagggcgagaagaatcattcctagcctgtcgtgaagctgagccatggtttgagccattattgacctgactagagccaataaggaatgcttgaggttatactttccgcagttgatctgctcgttcgatctcgcctaatcacgtactgatttagcacacgaatggccattctaccttacatcttagttgactttgactcggccaacttatgcacttttattaccggggctcgaagcttgcaacaagtgcttgatacacatcgttttgtgtaagagcgaactacattgacggttcacctctccgttgcgcaaggggcgctatgcaaggcacgcgcagtgagcaagtgccaatacatctgacaatttcccctataagcttggcccaggtagtctaatggcatgtgcgcacgaaatcagcacaggacaactttgcctgtctgctaggcgtactgaagtttcttgccatttccaaacgttcttagaagcgcaaaaagaactttgagaacgaggaacacacgggcctttatcggggaagaaccattatgtcaggtgggaagaagaaaaggccaaattattcccaacttccttctttggggcattttgccttaagaacgccttgtgtctccgggtaacccttcttgtttctcca

SEQ ID NO: 707162 - DNA, 303 bp, Homo sapiens
tgcaatggctgtgactatctggacaatacagtggtagtataaagaaagagagaacacagccgggcacagtggctcaggctgtaattcccggacttgggaaggccgagcagatggatgatgaggtcagattgagaccatcctggctaacgtggtgaacacccgtctctactaaaaatacaaaaaattagccaggcgtggtgacacatctgtagtaccagctactggggaggctgaggcggaagaatcacttgaacctgggaggcggaggttgcagtgaggcgagattgagccattgcactccgg

SEQ ID NO: 707163 - DNA, 1065 bp, Homo sapiens
ggatgcttcctcgtgtgtgccccaccgcagccgccgctccctgagtgctgcgggagtgccctgctgccccgcggctcgctgtgcgtgggagtggcgcgatgcgaacctgcgtgggcgatgtgagcctgttgcctgatgcctgcttgaagatggatgcttgggtgctgcctgtgcctgccctggcctgcggctccgtgccctgctgtgatctgcctcctgctcctgtgtcttctgcctgtgcccctggctccccctggcgatgattgcctgtgtgggcgatggatttggctcaggccaccctgctgggaactcgtgcacggggcattcttcggcccaaagagtggacggttacaatccttgacttgggacgaacgaaacgtaccgttgacgctactttcacagggcaaaatgcttgacacgtgacaccactagacttgctcgctacgagttgggtagcaatcaggctgagagccgagaaggttttccgccgttttcgagttacgtctgtggacagacgccgttaacagctaaggtacgggcggttgacagcagtttctccgctttggccagctcgaacttccacgcggcattacagtgcgtgtggcacccgccgtgaaagtttattaacccgttggggcaagggtgcacgtcgacacggcgggtcttagggcccctagacgagacgcgaccagaacgagagagccagccgaggttggttccccgttgccacgcgtggtggggcgcaccaggaacgttcatttacgggacggaacctcggttacgagccagccgaaagctatgggtttggaggtggccccgactcagacgcggcgcgccggacagcgctctcggccgacctgtagacgacaggcagtcggagtcgctcagcaggaggaacggataaaacggccgcgacgaggtcgggtcagaacagcagagcaccagaggcacgagctcattcgacgagcgacagtggcggggtgccccgcaagggagcgaccaagtggggcggcggtagacgagtcagaacagcggagtgtcggaggatagcggagcgaagcacgg

SEQ ID NO: 707164 - DNA, 100 bp, Homo sapiens
ttttagcgggactttgcgctgatccatacagatatcgtggcttgctaagatatgctctatgtatttcatccaatttgtgtgggggtgtgcgtgtgtgtgc

SEQ ID NO: 707165 - DNA, 343 bp, Homo sapiens
  misc_feature (55)..(55): n is a, c, g, or t
tccccaaagttgggtttttaaccaaaaggccctgggcccgggcagggcccccaanttttttttcccatccaggagcccccaccccaatttggcctttttatttttatttaactaaaaaattcttttccccccccgtaggggcccccccttttttttgggggccccataaacaaaagtgggcggggggttttttttttgccccccccaaaaaaaatttccctccccccaaaaaggggggctggcccccccggcccaggttattgggttttctcccccgtgtttttcccttttttgtgggtggggttttcttttttttgaataaaaacccctttttccctggtta

SEQ ID NO: 707166 - DNA, 390 bp, Homo sapiens
  misc_feature (234)..(234): n is a, c, g, or t
  misc_feature (247)..(247): n is a, c, g, or t
caagtcttgagctcccccatggagtttggagtgccccccacacttgggccggtcaacctgagttgtactgtccaacctgtgggttacaattacatgttagacagtaacctcccaagccgacttccatgggcagaatttagtttttgtcttctaaccaattgtatttcatctgggtatttgattgccagataccctgtgctggttctgctctctagctgctaccattgctgtaanggccatgtgaaangggggatgggaaggaggcaattgtttgctgaatgttgcaatccttgagccatgcttagcagaaggaaacctttaaaccacctccccttccccaggttatatgaagccactaggctaatataaaccttatagttcaaataatga

SEQ ID NO: 707167 - DNA, 869 bp, Homo sapiens
agcgggaaggcgctgagctgatatcccagcaatgccagctctaaaggaagggtgtgaaagcagggcagatagaggctcccctgccctcatccaatgaactttctctttaacctctaagtttattttttaaacgctaattaaaggcttatgtgtatttatctgcatttatctatatacatatatatagctatctctcatgcttaagccaaacaattgggtattttccctttctgataaagttgaaaaaatgtttttgagagtcgtagaccttttattaacaccttatgttaaattcattctgttagacgtctggaggattataacagctttggaggaggctcttttattaactgtcttattccaccgaaaggggcatcctcgtttgaatttgaagaggtttaacagtaatatcattcatcctttcgtgtttccgttagatttcaagtcctctctccaggtgtgatggaaggggagaacttaggtggagatgaaagggagtcgctcttggttagaaaattggaagaattcaattctcagggagagtgacactgaatgggaacgagagccaagactgtgcagggaggaagaggcagaaggaaagagaaggaaggagaaatagcgccggtctcctaaggtgttgaaggcagagctggaatcttgtggaacacagcctggctgttgttacagatttaacacccacagattgtattgtcttacctcatctagtccgtcacacagcaaaacttggactacacggagatggggcttggggatctaatcaaaaatgagatgtaccttaccacctggtgctctgaaaaaagcctgctgtttggggcacattttgtaatatgtcactattatacttaaaa

SEQ ID NO: 707168 - DNA, 786 bp, Homo sapiens
gaaaaacttccatagaatctcttctcgtgaaagttttttctgctggaaaaaagggcatcgctgtagcaggcgtaagatgtctcagtcactgactataagtacaaagggcccagaagctggaatctgaagacaaacatggctccactacattttactctcatgcctgggaaacattacttaaaccagaagaatctatgccctctttacttcacagtgctacagagaggattacatgagccaagtatatgtgaagacccagagaggacagttgacctgacaagggacatatagctaggaaatgaagctgctaagtgattctaggcctgattccaaggtccttacgtctttctatttatccacagcatatcagtgcaggagattatgatttagagcgaaatggctgttaagagtggatacaaagcatcaaaagtggttaagacttgaaagatgttttaatatcgatcaggggcatgcatttcttgcaggtctcacctccgttgtaatgataaacgaattatttgcttaatttgtcttaaaaatcccgttggtaaaaataatcgacgtttaaatggatatgttgcaaagcacgaggcatttgcaaatttttgtcaggagttaattttcctgatgacacctcattgtgctaatgcacaatactgcccctatcagcacagagtattacaggctttccagtcaaatgggagcaagcagtggagggattgaggtagtatttataccttaattccctgggctgcaggttaacccaggaaatatctcaatatgaaa

SEQ ID NO: 707169 - DNA, 575 bp, Homo sapiens
caacgtgggctccattcgcatctactttgaccgggacctgcacacaaacagcccaaggcacagcaagggctcctacaatgacttcagcttcgtgacgcacaccaatagagagggcgtccccatgcgtaagggcgagcacctgggcgagttcaacctgggctccaccatcgtgctcatcttcgaggcccccaaggacttcaatttccagctgaaaacaggacagaaaatccgttttggggaagccctgggctcgctctagagtctctttcctgagtatggctgctaagggatcttttccaaacagagtgagggtctttttaagagggaggcccatgaggccatccaggaaagggcctgcctcaacgtgggatgggagcctgaccaaggaggacttgaatgattcggtttcaacctgttccagaggtgcacacaagaaggtggcgaaagcccccgtcttgccccctaaaccttatcccgttcctttttgccttacaaataacaaagtgcaagcctgtaaaagatcttaaatccaattgggatacttttttaaacaactgttataaaccggaagaaac

SEQ ID NO: 707170 - DNA, 859 bp, Homo sapiens
  misc_feature (208)..(208): n is a, c, g, or t
  misc_feature (223)..(223): n is a, c, g, or t
  misc_feature (232)..(232): n is a, c, g, or t
  misc_feature (306)..(306): n is a, c, g, or t
  misc_feature (502)..(503): n is a, c, g, or t
  misc_feature (527)..(528): n is a, c, g, or t
  misc_feature (538)..(538): n is a, c, g, or t
  misc_feature (545)..(546): n is a, c, g, or t
  misc_feature (563)..(563): n is a, c, g, or t
  misc_feature (569)..(570): n is a, c, g, or t
  misc_feature (582)..(582): n is a, c, g, or t
  misc_feature (592)..(593): n is a, c, g, or t
  misc_feature (613)..(613): n is a, c, g, or t
  misc_feature (688)..(688): n is a, c, g, or t
aaatcgcataggtgcgaggccgggggtgcttgttctttttgtctgaatgaatttaaaaggaaatatataataaaaatgttaaccagaaggtaaacttgagtgtaatgtcagacagacacacttttccaccagtgtatttgaattttagaccagtgaccctcgtttgtggcattcatgcaaacacatgctgagggctttgttcatctgngtcatcgtgtccaanatttcagtncatgtttgtagcacagattttggaagctattcatactttctctttttaaaactgtatttcctttgtgtttcaancagttaactctaaaaccagagatgtctatgggcagctctctcgtgatgtttgtctaatgatgttaaatttcagtctcctgtgtgttttatattttcttgtctgtatgttctacagattctattgttgcacacaaagcgtgggcatatgaaagagaacatgttttcgagaagccattggggcctaagcacatgcggnnggacggtctttcaaatgcgtgatnncagagaatcncttcacnnctttgctgaaaagtgangctcanngatccagcaccnatgttcctcnnctgacccatcctgtctatcnttctcagttgagtttttaaatctcactttgggtttcctttgtgaagttggaggcgaagtttattaatagcctaancactaccccacccccaactaggaggaacctctgttttcaagagagatgcctgtcctgtgcttggatagtcagtcaattattcgtgtatgaaaccaatgtacaaatcaatgtttgaaaatactgatctcagactttctaagttaaaattttaacattttgattgtttgcata

SEQ ID NO: 707171 - DNA, 209 bp, Homo sapiens
  misc_feature (57)..(57): n is a, c, g, or t
  misc_feature (117)..(117): n is a, c, g, or t
  misc_feature (140)..(140): n is a, c, g, or t
  misc_feature (146)..(146): n is a, c, g, or t
  misc_feature (174)..(174): n is a, c, g, or t
  misc_feature (184)..(184): n is a, c, g, or t
ctggggcagggtggggggccatgttcccagaaccaagaacataaaccctccaagggntctgcttgatatcccaagttggaagggaccccagatacctgtaaggactggttgtttctnttcggtggccttgagtctcagantttttnggggtctcccatgatttggggtgatttntcaccctctntccttcccccagcacaaagcactgg

SEQ ID NO: 707172 - DNA, 411 bp, Homo sapiens
agagcacccccttgcggccctaatattgagggcttaaaatcacaagaagggtacttcaacactggctacgcattgtgcttgtcccagtgctagagcgtaggaatagaccctggcgtccactgtgagatgtacttcagctaccagagcatcaagtctctgcagcaggtcattcttgggtaaagaaatgacttccacaaactctccatcccctggctttggcttcggccttgagtaatcggcatcatctccgttaatggtgactgtcacgatgtgtatagtacagttatgacaagcctgggtccatacagaccgctggagaacattcggcaatgtcccctattgtaagccagtttcttcttcaagctcccggagagcagctgctactggggttacaccatcatctatgagacc

SEQ ID NO: 707173 - DNA, 191 bp, Homo sapiens
ttttcttcctccaaatgcgcagggtttccaaacatttgcaccattttaggaatgttaaaaaaaaaatttaactttgaatggttttaaattaaagaaataattaagtcaaaatatccacatgtatgtagttcttttggatgaccgaataccttaaaatgaactaaataactgaaataaagtgttaaaatgtt

SEQ ID NO: 707174 - DNA, 771 bp, Homo sapiens
aagggctaggagcaggctgggtgttaatcggacgagggtctatggtcgggtctctgcgtcagctgctccggactgagctcgggtgtatggggcctgtaggaaccggctccggggtcccgttaacgggccgcccccacagcaccccgggctggctgtgagggtctccacttgatctgagaatggctacctctcgatatgagccagttggcgtgaaattggtgtcggtgcctatgtggacagtgtacaaggcccgtgatcccacacagatggaccacttttgtggccctcaagagtgtgagagtccccaagtggaggatcgcggtggagtgaggccttcccatcatgcacagttcgtgaggttgtgctttacttgatggcgacttggaggctttttgagcactcccaattgtttgtcctggactgatggacgtactgtgccacaatcccagaactgacctgggaagatcaatggtaaccctggtgttaggagcattgtatgaccagtgacctaaggacatatctggacaaggacaccccaccaggcttgccatgacgaaacgatcaaggatctgatgcagccagtgtctaaagaggcctagatttccttcatgccaaattgcatcgtacaccagaagatctgaagccagagaccattcaggtgacagtggtggaacagtcatcttggtgactttcggcctggcagaatctacgtaccaatggcacttacaccgaggtgtcactctggtcgactccgagtctctgcccattgac

SEQ ID NO: 707175 - DNA, 288 bp, Homo sapiens
aatcagcggacggtcagattcagcaggacaaagtccgatacaaactgggctagacaagccaggcaacaaaaatgcccacgatgggacggtggactggaagatggtccatctcagggtgaggggttcggagcccctcatgcctgacatggcatgtgtatctctgctcttctccagaaggcaccaccacaggtgcccacttctggaacgttctgtctcctgctgctctggtctccacaaagccggtgtcctgagtttggtcctcggcatcccgcttgctggaaatggtga

SEQ ID NO: 707176 - DNA, 629 bp, Homo sapiens
  misc_feature (104)..(104): n is a, c, g, or t
  misc_feature (228)..(228): n is a, c, g, or t
  misc_feature (238)..(238): n is a, c, g, or t
  misc_feature (275)..(275): n is a, c, g, or t
gagtccagatcaaaaatggcggtagttggtgtgtcctcggtttctcggctgctgggtcggtcccgcccacagctggggcggctatgtcgagtggcgcccatggngaagagggctcagttcgcatgtggaagactctcaccttcttcgtcgcgctccccggggtggcagtcagcatgctgaaatgtgtacctgaagtcgcaccacggagagcacgagagacccgagttncatcgcctanccccaatctccgcatcaggaccaagccgtttccctgngggagatggtaaccatactctattccataaccctcatgtgaatccacttccaactggctacgaagatgaataaagagaatcttggtaccactacccgggcaccagggaccaccagacactggtttggaccgttactctgcacatggaggcagaaaaagtatatgggaccttgagctcacggtgtctgttgactttgtatcgagaagtgatgacgtggtatactggtcgtcacgcatcccttatgctgtgtggcaggagatggcttagatgaataacttagatttgagaatgacaatgttagaagaagtaaggaaagttgttgaggatgtggggggccaaaaaaatttataaagg

SEQ ID NO: 707177 - DNA, 316 bp, Homo sapiens
atcgcaggttgtacttcattaaattccttaaacagatatttatcgctcggtggctcacgcctgtaatcccagcactttgggaggccgaggtgggtggatcacgaggtcaggagattgagaccagcccgaccaacatggagaaaccctgtctctactaaaaacacaaagttagccaggcatggtggcgcatgcctgtaatcccagctactccacaggctgagacaggagaatcgcttgaacccgggaggcggaggccgcggtgagccgagatcgcgccactgcactttacctgggcaacaagagtgaaacttgtctc

SEQ ID NO: 707178 - DNA, 110 bp, Homo sapiens
tagtgatgacttaagattcaatagctatgcaaattgggctcaacagaaaatcaagctagatcataattagaactcgatctgttctttctttacaatcctcacaaactcct

SEQ ID NO: 707179 - DNA, 367 bp, Homo sapiens
aagggtttttttgccccccctgacttcaaaggtaaactttgtttgggacatcaaaaaggggggtttgggggccttttggttttttaaaaatttataaaaaaaaaaaaaggtgggggttgccttggggaattccccggggatttctgggcccatgggggggattgtttaacccggggccctgggaaaatgggggtttttatgttccttaaacagggaagggaacagttgggccacttttaaacaaaggaaataacccggtccggattggttctggtccatttggttttttttttttggcaaaaacaaacccggcttcccccttgggggaaaaaaagattttggggaaaaaggaaagtttttaatttca

SEQ ID NO: 707180 - DNA, 107 bp, Homo sapiens
cattccagggatgggaggggccagggatcatgttttactcatttttgtatcgccagcccctggcaaagtgtttggcttatgttatgtgaataaatgaatgcttgcca

SEQ ID NO: 707181 - DNA, 490 bp, Homo sapiens
ataatactaatgcatattaattgcctttttattatcaagtgcaatgaccttatgcaaaatgtgatttttaatttaagttacgacgaaggagcattttgccttctcgtggttgcatggggttttcgtgcacaggtaaaacatataacaccaacattcaaaatcgcctcatcttgttgctatagtactctaatggtgatgtgtaagaaattaaaatttctgggttttccagtttgtactgcggaggtgaagaaagagctggggattggacatcctctctgggacaatcgttatacttcttacctttctctgagctgtcaccgattcggtcttacaccaaagaacaagaataacaacaacctttggagcacacagggtgagggcagaacacgtttcaaacactggacttctgagtatgactccttgccaaaaacactgaagtactgaacgtggcaatgattaatgctgaagtattgcctttgacagtgatgac

SEQ ID NO: 707182 - DNA, 335 bp, Homo sapiens
  misc_feature (45)..(45): n is a, c, g, or t
  misc_feature (75)..(76): n is a, c, g, or t
  misc_feature (119)..(120): n is a, c, g, or t
gccggccgcccgagcagcagaccgcggcctggcgctgcatttcgnaacgcaccgccacctcgacgctcttgagcnngttgacgttcttggtttcggtgcgggttccgaactgcggtgcnnacggtttcagcgacacgttggcgtcgcagcgcatggagccctgatccatccggacgtcggatacacccaaggtgcgcaacaggtctcgtaaagccgtcacatacgcccgggcgatctggtgcccgtctcccgcgccgacgatgggtttggtgacgatctcgatcaacggcacaccggcacgttgtagtcgatcagcgacgtcgtcgctcgtgaat

SEQ ID NO: 707183 - DNA, 87 bp, Homo sapiens
ctagaagattcagcaaagtacttttgtgctcttggggaaggccttccccgggctgtcggtactcgtagggacaccgataaactcact

SEQ ID NO: 707184 - DNA, 1491 bp, Homo sapiens
  misc_feature (1491)..(1491): n is a, c, g, or t
ggtaacttttgcaaggagaggggttgggtgatcgccatcttagggaaccgatgttctcgtccggggcgcactctgggcgcgggggaagctccatgtgaatgaacgccacagtctggagagtgggtgcacgagtggtcctcggggacgctcgcgcgagcagtttcacgcgcagggcccagcggggccagcaccgcgtgcgagcgtcgcgattcatggtcaggccgtccggccgctggaaggaggtgcagatgtgtggaacttatggcctaccgagcagagctattgaatggcagctgctgttgagtcttctggctggaggtcttacagtgggtggtcgtgacggacacatgactgatggttgtgctacctgggtattgtgtacgtgagaaatggagccgtagtggcgatgtgtgggacactcgtcgaatatagtgacataaggggctattatttgtcataggggatgtcgtcaagtttcataagggtatgaggaggcagggacttgggttgttctcgttgggttttttcgcgattatatccagagacttggggcttcaccgaatcgttatctctcatttgggcgttacattcacaagtggtcacggtggacaatcgtagtgacatggtctaatgcggttaatatatattgagagacgcttctttgtaacagagtcgtctggtaagtagtggaaattatttgacttctgagacggaaggggacggaaaacgtaaactattaattcttacatagagtccgtctagcgaatacgaaacatgaaatagtaacggtggagatagctcctacttggacgcatggttggccttggaatttctcctgttagtggtctggggacaatatgggggcccgtggtgcctttcgcttaatggggaaataggcttggacttagaagcgggtttcaggacaatttgcaaaaaaactcctcaggggcacggttttatttggctctaatgtcaccttttttgggagggtgacttgggcaggagttgcctgaatacacttgtttttaacgggcatagacacagggtcgcttaaatagaggacaatttcctaaacaaaggggggaggtggggaaggccttccctttctggtggagtttgcatgccacccggggtttgcgcaatatcccagccccttattggaccctgacaacagcgttcccgcgacctggtggcgtttggcgaccgcgcgtcacgctggtgtggaaagcggaacactggtacaaccgcggttgtggggggagagcccgttaaaatgccccccggggggttggcaatgtgttccaaacggacggagaggagcggatggggatggtacgaccactctggttcgccaggcggacaatcaagcagggaagcgagcttagagcgagacaggtatgaccacacagcgcgggagcatcgtggcgaccactaggcgagatagaaaacaaagagcggcgggggagtctgacttcggagacagcggcaacn

SEQ ID NO: 707185 - DNA, 103 bp, Homo sapiens
gtcaagaggcagctaccagtgaaaaatagtgactatttccaagacattaggcagtggggaggtcagcgagaagtcaccacagaaagctcccactacctaaatg

SEQ ID NO: 707186 - DNA, 110 bp, Homo sapiens
gcattacactcatatcaaaatttcagtatgatcttcccggaaaatgtctgggacaaacactctaccactccatagcaaatgatgagcatggtcgtggcgctagtggctca

SEQ ID NO: 707187 - DNA, 459 bp, Homo sapiens
acgcaagcatggttactacatcatgactgcatcatgagatctatgaatcctgaatagatgcaattgtatatcatgctttttccctaattacaggctataactattatttttctgagacagagtctcactctgtcaccaggcggagtgcagtgtgcatcttggctcactgcacctccgcctccgggtcaaacgattctctgctcagctcctgagtgttgggatacaggtgctgcaccatgccagctaattttatatgttaatactgatggggttcaccatgttggtcagggtggtcttgaactcctgacctcaagtgatctgcctgcctctgcttcccaaagtgcaggaaaaatttttaaaggaaattaaagatgttgctctagtgaacacacaaattatgagaaaacagaatagccttattgctgttatagagaaagttttactagtctacttagatga

SEQ ID NO: 707188 - DNA, 795 bp, Homo sapiens
  misc_feature (357)..(357): n is a, c, g, or t
  misc_feature (374)..(374): n is a, c, g, or t
  misc_feature (426)..(426): n is a, c, g, or t
ctggctaaggaggtatggctggctgaccacgtttgaggaaggctacgtgctgagcctggccctggattcttctgtctctatatggagtgagagacaaaacaccagaccctgagggcagagccctgggctagacctggctggtcggaaccagctctgtgggctcaggaggttcctttaccacgtgggctctgggcttatggtctataaaatggtgagggtggctgtgggagaatatttagttcagccctgctaatgtttaagtgccttctgtgtatcaggaatcaggctttagggtatatcagatatgtcagttctaacatcctgttgttttcatctgcgcccatttcctcttccctntggttcatgtctctctnctgaatcttttctttgcttactcctcactcttttccccatcccacacccctnttttctgtaacaaattacttttaacaaataatatgtgttcaccattggaaaaacataataaaacaagaaggaaacaaaaatcacccaaaatcctaccatgcacgtttcatgcattttgtttcctgggatttgttgtcatcctgtatggtgaggtgacagatacagacaactgccttggaagaagagtttgttcccgagaggaggggacatccatgccatgcagggccacacggggaagcagccagggtccttcaggaggcagaagtgaaggagaaagcaaagcgcagcgccttagtgtggttttcgtggaacggagtaggtgaggcagggtaggcaagttaggatacagtagggagaggggatcctcta

SEQ ID NO: 707189 - DNA, 409 bp, Homo sapiens
  misc_feature (24)..(24): n is a, c, g, or t
  misc_feature (40)..(40): n is a, c, g, or t
  misc_feature (45)..(45): n is a, c, g, or t
  misc_feature (47)..(47): n is a, c, g, or t
  misc_feature (105)..(105): n is a, c, g, or t
  misc_feature (130)..(130): n is a, c, g, or t
  misc_feature (132)..(132): n is a, c, g, or t
  misc_feature (165)..(165): n is a, c, g, or t
  misc_feature (184)..(184): n is a, c, g, or t
  misc_feature (209)..(209): n is a, c, g, or t
  misc_feature (231)..(232): n is a, c, g, or t
  misc_feature (261)..(261): n is a, c, g, or t
  misc_feature (271)..(272): n is a, c, g, or t
  misc_feature (309)..(309): n is a, c, g, or t
  misc_feature (328)..(328): n is a, c, g, or t
  misc_feature (333)..(333): n is a, c, g, or t
  misc_feature (336)..(336): n is a, c, g, or t
  misc_feature (354)..(354): n is a, c, g, or t
  misc_feature (356)..(356): n is a, c, g, or t
  misc_feature (382)..(382): n is a, c, g, or t
taataactgattggtgtccggaancgctcaaaccgacagntcggncntgataaagagatccgggagaagaactggcattgtgagatgtttggatccccgtgccgngggacaaggcgaaacagtgcagccngnctgggaacaggatcctgtgaaagctgatgcccntgtgccctgagagctgccnctcaatccctgtcccaagccggcangctatggcattaatgtcaccanntgttctcaccctctaggccctgtgcctgnaggtgcctcnncagccgaccagcagccaccccgcctgcttcatccgcntcaggagggtccggtgagnctgcngcngtggttaaggaagtaacncnggcgtgtattaaggaattttaaacgnaataaaatgtatgttggagatacggtt

SEQ ID NO: 707190 - DNA, 112 bp, Homo sapiens
agtctctacacgatccccccctcaaacccagtaacgatttgagtggttacgctaggataaaggattccagcgaacgagcgagtgcatgctgctctaggatcctctacgcaca

SEQ ID NO: 707191 - DNA, 135 bp, Homo sapiens
tcactcgcttgtcgcgctcggctccctcgatcacggcgcccgatgtgctggccattcggttctctttacactgttcttcagtcagctcgtctggtttcgggggtcttagctttggctctcctcgctcgctcttac

SEQ ID NO: 707192 - DNA, 384 bp, Homo sapiens
gggtaaatagatgtgcttcatgctcactgaagagttttttttgatacacagggtcactctgtagcccacgctgtggtgcagtgtcatgatcacaggtcactggtgtctcaacctcctgggctcaagtgatacttcaactctagactccccaggagctgggaccacaagcttggaccaccacacccaggtgaattgtggtgagcatttttttttggggtgatgggggtttgccaagttgtccaagcttgtctcaaactcctgggctcaagcaatacacatgtctcgggtttccgagctgggattacaggcgtgagccaccattcttgggcctgaaggatttgggaatgcttaaggaattatgatttattttacaccttggctggt

SEQ ID NO: 707193 - DNA, 197 bp, Homo sapiens
aaaaactgatttcaaaaactcgggctgctttgggaggtttaattacttcaggggaaaagaagacaaaacgagtttttcattcggggggaacttttttctttaattttaactgatttaaccccttttgggaattaaagaaatgataaagacttttatgggagatttccttatcccagaaataaaatatttcccaatga

SEQ ID NO: 707194 - DNA, 971 bp, Homo sapiens
gccgtgcgcgcaagccggatcggcagtgctgcggggaggagagaggacgaggcggcggcggcagcaggaggtggggtgaccgatcgcgccgggggccgaagaggaacgccgccccgctgccatctcgctccccgcactgctcctggctgcctggccccacgcttgctcgcccacaggatcgcagctgggttcacgcttggagctggtgcggaggcaccgggccctgagctgggtcggaggtcctctccgcctgctgcgcgccccaagcagagggatccgccgcggatgaacctgctcccggactggagtgcgccctgcggcctcgggtgcagtccgatgctgccagatctcggccttgatggactgcctggtgtggaccgatgagggaaggaacgttgccccccagacccaagaggtgacccctgagccagccccggaatgacccttgagacctggaacaatgcggctggccttgcatgttctcattccatcctgctgttcggaggctgcagggcctccatcctcgttcatcagccttgcagggaccctacgggagctcgacacaccacaagcaggttgcaaggaattaaaggttcaaacatcaggccaatggcaggcccaccaacagaccttccacacaaggcgggtcccaggactggttgacttgaagggaagcccagctaggagagtggtcaactcggggatttattccagtgggggcccccgaatggtggccggcaatcttgggcaagctgctttgacccaggccttcaaagcccccgggttggcataacggggaaaaccccagttatttgacagggcttcccgcacaagacgcctggaacgccagacttggctcattcaacggaaaattgcccaggatcgtgagcggacaattcccgggggcaaggaggcttccggaaatgcgccctttacaatcctgggccgggagaaccctgggaaccagctag

SEQ ID NO: 707195 - DNA, 118 bp, Homo sapiens
gaagacttgctcccctgtcctatgaaagagaatagtttggaggggagaagtgggacaaaaaagatgcagttttccttgtatgggaaatgtgaaaataaaattgtcaactctttcagtt

SEQ ID NO: 707196 - DNA, 442 bp, Homo sapiens
taacctggcgacccttttccgacatacacctgaggtgactcttagtactgcttacattattggctaaaactagtcatgtggccacacccctgaaaagaggtaggggtagattaagggatacagacattggataaacaggtaccttttattttggaggaggaggaggttcttttttgttttttgggtttttttaaaatttgagacagagtcttgctctgtcacccaggctgaagggcagtgacatgatcttggctcactacaacctccacctcccagactcaagtgattctcctgccttagcctcctgagtagtcaggactacaggtgtgcaccaacaggcatgcaccaccatgcccagctaatttttttttttttttttttgggaaacagagttccgctcttgtcacccaagctggattccaagggtgcaatctcagctcac

SEQ ID NO: 707197 - DNA, 465 bp, Homo sapiens
ccattacagagattatagcgcggaaaatattctattagtgtgattattgggtatttgacaatgtcttattaattacatagcatcttttatatctataacctcagctttcagctcctcattcattccttaattcatttacttaattcataattaactttttaaggaatgaaactggatgacagaggagtgaatagtgtatcaattccaggttcagaccttgggttgggctttatttttcattccttacttctcacttcctacctgtctaccttgcctttttgactgactggtagagaaaagcattcaaaactgataatagaaaataggacgtactatgggagtcttggcattggcagccatctcacaatctttctgctgctgttcactttcatctatttgagcatgagttaatctgcacagacggcactgaatctatattggtaagaccatgttgcatggtctggg

SEQ ID NO: 707198 - DNA, 354 bp, Homo sapiens
cgtctacatagtgttctaaatctggtagcagtggtctttgggagggaataaactagggccatcaataaaattcccttagtagaaaaaattttctgaaattaaataaaattctggctaggtgtggtggctcatgcttgtaatgccagcactttcggaggccaaggcgggtggatcacttcaggtcaagagttcaagaccagtctggccagcatggtgaaaccccgtctctactaaaaatacaaaaattagccaggcatggtggtgggcacctgtaatcccagctacttggaaggctgaagcagaagaatcgcttgaacccaggaggcggaggttgcagtgagccaaggttgtgcc

SEQ ID NO: 707199 - DNA, 451 bp, Homo sapiens
  misc_feature (387)..(387): n is a, c, g, or t
ttttttttttttgatgattatcaacagaaactttatttctcatcggttcaggaacaatcggagggtagatggaaatttttttttttggaaatatggagggaggaaaaatcctccgaaaaggaagggccatactgattgagaagaaaaacattttcggtgcaaaaggttaattctcaagtggggaatgccaaatgaagggttgcttacatgggggcacaaaattccaaatcagccacattgggttgaggtgattatgagacgcagttggttttaatgaaggaaatttagtaccactttaggctacaggaccctggggttcttctgtcagaggattggggttcaggtttcaggctttagggtgtaacatgggggggcccaatatgctantgctggtttcatggggatgcccagccctccccaaggcccctctttttggggatctcctgacgag

SEQ ID NO: 707200 - DNA, 100 bp, Homo sapiens
  misc_feature (46)..(46): n is a, c, g, or t
  misc_feature (58)..(58): n is a, c, g, or t
ggatttattgtcctttcaagtttaaagaagtatataatctggacanagtgtttcacanaattcaataaaaattacaactggttgttctaaataaagttga

SEQ ID NO: 707201 - DNA, 172 bp, Homo sapiens
catgaggggtagcgctgggagtttagaagtggcctgcccttaactgttttcactaaacagctttttctagggggagagcaaggggagagatctagattgggtaaggggaccgggatgtcaggaggcaaagttttttgtgtaactgtgtacaataacgattaaagtcgaaaaa

SEQ ID NO: 707202 - DNA, 137 bp, Homo sapiens
ttcttgcccgaaactgccgtggtagggcgaagaacattggtaaaattgtagctgattttggcctgtagtcaggtttgatgacatggtgacacctactacagcccatgcttggagccaatgtttacccacattcaata

SEQ ID NO: 707203 - DNA, 163 bp, Homo sapiens
aggaaacagctgatgacaagctctagtaagagggactaccacagcaatgtgtccatccagctcactaccagcctcactatccagacagcatgatgattttggggtcattttcaagccgctcatccagctcatggtagctcatgcctgtcttgcagcacatctc

SEQ ID NO: 707204 - DNA, 1049 bp, Homo sapiens
  misc_feature (448)..(448): n is a, c, g, or t
acgagcggtcagggaggtgtgcgtgttggtggtgtgccggcacgtccatgttgatggacggtgttgttggggaggactgacatgggagtggatggttgcgtgcatgttgtagctccacgcgtgaggcgacatagagtgggttgcaggaggtgagcgtgccgtggcagggttcagggcgtcctcagaaggacggttttcgcggccatacgtgcaggcagagcctgcggcgcatgatggattgctgtgtcctgcctcgtcacgtggatagactgaccaccgaaagacgtgcatgacagtcgtcagacgcaacggggaaaagtatctacgattcatgtcctagtaggaccacaagttacccaccggtggggtcctcgctttccttgtggccttgctggtatggaaagtcgattttcgacgatgaatcatggtcgtgagtagtccaggggtntagcgtacaaagatgggcatcgaatgatacctgtcgtagtaagttcacccgggtcctatgaaagcccaggattaccacgcgaagtattcttgttctcaatagtcaccccttcagatctggacgtggtgaatgcattctcgccgcaaggatgatcttcagatgatgtctgtgatactttactgtgtgaggatgaaccagtgtgatgtccttagggcaagagagttgggggtgcctcccgaggtgagagaccttggacagttaggtaatcgagattcttgatgggacgtgtatctcatgaatgaattggacattatgggattcatccaagctttctcaaagaaggattgagtgaggccttccgagattgtcgggagttcggaatattcttgaggctgtgggaggcagggtctgaaaagcataaggtcgtcggggattgtgttgaccggttttccaattgggaaaagtggggttccacaaagagggaattgggttagttaaaccaggtggggggggggaatgtaaaagggggggcgcaagagaggcgaatgtggaggaaaagtttacaaaagcgggataatagaaacgagagaggaggtataaa

SEQ ID NO: 707205 - DNA, 239 bp, Homo sapiens
caacatagcatgttcattgtatacgtagaataatcattattattattatgataagatatacctgaatgcaagacttcgaaacctatccttccttccctttcttctacccttcacttacctttcttctttccttcccttcactttccttctctccttcccttcactttcctttcttccttctccccctctgcctcttcctacctcctctacctttctctctctcctctttcaatttcaca

SEQ ID NO: 707206 - DNA, 710 bp, Homo sapiens
  misc_feature (487)..(487): n is a, c, g, or t
gctcccaccggaaaactctgaggacatgaatagtcgccaggcttggcggctcttgctctcccaaggcagaggagatcgttgggtttcaaggccccgcgggcatttctcgccggccctgcggagagagttcttcactaccacaaccaaggagggatatgataggcggcagtggatataactcctttagaacaaaggaaattaagtttgtgatacccatgcagtggttcaggactgtggaaactcatggatttgacaaaaacacaagcagaaacaatgtgtatcagcgttaaactgctttatcaaatgtcagcctggatactatctataaagagatggtcactcaagctcaacaggaaataaccagtacaacagctaatggctcatttggatgctatcaggaaagacatggtcatcctagagaaaagtgactttgcaaatctgagagcagagaatggagaacatggaaattggaattagaccaagttangcaagaattaatgcatgaaaccagtcgaatcagagcagataataaactggatatcagttagaaaggagcagagtaacagatatgtttacagatcaggaaaagcaacttatggaaacaagtacagaatttaccaaaaagggatactcaaaccaaaagtttatttcagagaccagtataaaatgtgcgctgaaatggcttctttaaaaacactgatggatctaaa

SEQ ID NO: 707207 - DNA, 1155 bp, Homo sapiens
  misc_feature (932)..(932): n is a, c, g, or t
gctcccaccggaaaactctgaggacatgaatagtcgccaggcttggcggctcttgctctcccaaggcagaggagatcgttgggtttcaaggccccgcgggcatttctcgccggccctgcggagaggtgaggcaaggtgtcgtgtcatcagattgcctgagtgctctctagcggaggacgatgcccgtgggggtcgggcggcattgttcggagcggatcgggaatgagaaggtggccacgcccttccttccctgtattcacgccttgttgcatggggcgactgcctggtggccttggtttgaccacgggatttggccccaagttcggccccctaaggggggcgggaagggggatctgagggaacagcaactgcgcctttcttgttatttgaagggtgaacctttgggaaggtgccatgggctctgcgcccggctatctttactacaagaccagtttgtttcccggtttttgcgggtgacaaaggaggggggctagttggctctgcggtccagggagcccaaggggtaaggattttctttcatgtaccataaaccaaggggggcatatgaagtaggcgggccgaggggattattaacgttcctttagaaaccagaggggaaattaaacttttgtgataactcgttgcgttgtgggttccagggactttggaaaacttcattgggattttggacaaagaagcataagggcaggaaaccaagttgtattcaaggggtaaactgctttatcaaatgtcagcctggatactatctataaagagatggtcactcaagctcaacaggaaataaccagtacaacagctaatggctcatttggatgctatcaggaaagacatggtcatcctagagaaaagtgactttgcaaatctgagagcagagaatggagaacatggaaattggaattagaccaagttangcaagaattaatgcatgaaaccagtcgaatcagagcagataataaactggatatcagttagaaaggagcagagtaacagatatgtttacagatcaggaaaagcaacttatggaaacaagtacagaatttaccaaaaagggatactcaaaccaaaagtttatttcagagaccagtataaaatgtgcgctgaaatggcttctttaaaaacactgatggatctaaa

SEQ ID NO: 707208 - DNA, 930 bp, Homo sapiens
  misc_feature (170)..(170): n is a, c, g, or t
  misc_feature (707)..(707): n is a, c, g, or t
gctcccaccggaaaactctgaggacatgaatagtcgccaggcttggcggctcttgctctcccaaggcagaggagatcgttgggtcgcgccttgctcgagcgaacgggaagagaaggtgccacgccctcctcccggattcacgcctgtgtgctgggcgacgccgatgcctngtgccccgactttgcccatgttcgccccaaggtggcgagggactgaggaaagcactgcctttctgttcttaaagcgaacctttgaaggcctgggcttcgcgcgcggttctttctcagccgtggttcccgttttcggtgacaagaggctagtaatctcgtcaggagccaacgtaagagttcttcactaccacaaccaaggagggatatgataggcggcagtggatataactcctttagaacaaaggaaattaagtttgtgatacccatgcagtggttcaggactgtggaaactcatggatttgacaaaaacacaagcagaaacaatgtgtatcagcgttaaactgctttatcaaatgtcagcctggatactatctataaagagatggtcactcaagctcaacaggaaataaccagtacaacagctaatggctcatttggatgctatcaggaaagacatggtcatcctagagaaaagtgactttgcaaatctgagagcagagaatggagaacatggaaattggaattagaccaagttangcaagaattaatgcatgaaaccagtcgaatcagagcagataataaactggatatcagttagaaaggagcagagtaacagatatgtttacagatcaggaaaagcaacttatggaaacaagtacagaatttaccaaaaagggatactcaaaccaaaagtttatttcagagaccagtataaaatgtgcgctgaaatggcttctttaaaaacactgatggatctaaa

SEQ ID NO: 707209 - DNA, 1025 bp, Homo sapiens
  misc_feature (65)..(65): n is a, c, g, or t
  misc_feature (67)..(67): n is a, c, g, or t
  misc_feature (71)..(71): n is a, c, g, or t
  misc_feature (100)..(100): n is a, c, g, or t
  misc_feature (193)..(193): n is a, c, g, or t
  misc_feature (269)..(271): n is a, c, g, or t
  misc_feature (273)..(273): n is a, c, g, or t
  misc_feature (281)..(281): n is a, c, g, or t
  misc_feature (290)..(290): n is a, c, g, or t
  misc_feature (299)..(299): n is a, c, g, or t
  misc_feature (305)..(306): n is a, c, g, or t
  misc_feature (317)..(317): n is a, c, g, or t
  misc_feature (324)..(324): n is a, c, g, or t
  misc_feature (333)..(333): n is a, c, g, or t
  misc_feature (338)..(338): n is a, c, g, or t
  misc_feature (340)..(340): n is a, c, g, or t
  misc_feature (352)..(352): n is a, c, g, or t
  misc_feature (357)..(357): n is a, c, g, or t
  misc_feature (364)..(364): n is a, c, g, or t
  misc_feature (369)..(369): n is a, c, g, or t
  misc_feature (389)..(389): n is a, c, g, or t
  misc_feature (406)..(407): n is a, c, g, or t
  misc_feature (409)..(409): n is a, c, g, or t
  misc_feature (412)..(412): n is a, c, g, or t
  misc_feature (420)..(420): n is a, c, g, or t
  misc_feature (426)..(427): n is a, c, g, or t
  misc_feature (433)..(433): n is a, c, g, or t
  misc_feature (436)..(436): n is a, c, g, or t
  misc_feature (448)..(448): n is a, c, g, or t
  misc_feature (469)..(469): n is a, c, g, or t
  misc_feature (494)..(494): n is a, c, g, or t
  misc_feature (502)..(503): n is a, c, g, or t
  misc_feature (506)..(506): n is a, c, g, or t
  misc_feature (512)..(512): n is a, c, g, or t
  misc_feature (517)..(517): n is a, c, g, or t
  misc_feature (540)..(540): n is a, c, g, or t
  misc_feature (546)..(546): n is a, c, g, or t
  misc_feature (558)..(558): n is a, c, g, or t
  misc_feature (569)..(569): n is a, c, g, or t
  misc_feature (572)..(572): n is a, c, g, or t
  misc_feature (574)..(575): n is a, c, g, or t
  misc_feature (577)..(577): n is a, c, g, or t
  misc_feature (597)..(597): n is a, c, g, or t
  misc_feature (621)..(621): n is a, c, g, or t
  misc_feature (646)..(646): n is a, c, g, or t
  misc_feature (689)..(690): n is a, c, g, or t
  misc_feature (700)..(700): n is a, c, g, or t
  misc_feature (748)..(748): n is a, c, g, or t
  misc_feature (765)..(766): n is a, c, g, or t
  misc_feature (949)..(949): n is a, c, g, or t
  misc_feature (970)..(970): n is a, c, g, or t
cgacgtaaaataacaggctcaactgtgtctagcctttaactattaatgggggtccccctaacttnanggtnaaccgacagcgagaccaagtcaaacgtangtacatcaatcttaaatggtttcattaagagctatgtgaattctgtcagtgcattatgaggaacaatgtctaagaggatattctatggttgtntcacaggttactactctgttgtatatccaggctggcccatatatccacgtaacaaaaacacttctctctttctcannntnaattcagnaattctaanactgtctgnaataannaccaaaaaggnacagcanaaaaacccnaattnanttctttaggacnaaaanaattcangaaanaaaaaacccaaaaaccaacnacaaacacataaggctnnanttntaaccaanaacaannaggtanacntctatattaaancatttcagaaaaaaaaataanaaatagcaaaacactaacacaaaanaaaaaatnnccnaactcnaacanaaaaacacaacttaagtaaaaanaagcantatttgcagganaccacaagagnacntnnantaagtaacctaacccatgtntcagcttctaaatctgcaaaatgngcaaggtacagtagcacatttttangtgattcttagtaactccagtagccttcattagttaaaaacannattatttttngcatgctgcttcgactctcaatatctggttttccctgtctttttggtntactagttccccaaatnnaaaacagaggagtaactaggggatctgattttagaggccttaattttctgttcatggactgttaaaagtaaaaccaaactttcaaaagggataaacctaaatatttacttgttatcattagagagggaacatcaaatgctgggacatcattactaaccaatagcatcagacactggaattaantggataatcacaatggtcgtnatgtatacaaagacatatataccactttctagtataaatttttcaaaaaatacaa

SEQ ID NO: 707210 - DNA, 644 bp, Homo sapiens
  misc_feature (24)..(24): n is a, c, g, or t
cggacgcgtgggcgaaccacgcgntccgcctcttttagatcctaagtctcttacaaaagaggagtactacaggaagaccctagaggaaggggacatccgaggctgtatactgggggaggccggtaagaaagacgtctcgattaggggaacggggttgctagaagcagagctggttacgtcgttaatggttggtacacattcggagggtatacgcatggtagcggacgggcaatgttagttaaattagagtatgaaatgaatggaggaggaaaatggcacgggaaatggggaccagggaagaaataccaccaccccagtgggtagcagaccaaaacaggacagtacagcgcactaacaccaaggaaccccacgctacgagagacacaacatggagcaccacccacacgaccacccgccaggcaacatcctgtcaaaagcacaccattcggcgcctacaccaagcccgcactatatcaaaaaccaaacccccaccaacccacgatcaaaccaagcgagcgtgcgcacgagaacacgactgatccccaccgcccaacacccgcccccgatcacgccgccacacgcccgacctcccaccgcggcccctctaaagaaaccgaccgcgcgccacaaccaccagacaacaa

SEQ ID NO: 707211 - DNA, 1061 bp, Homo sapiens
ctgacgcttgtctgccgaccagggattcctcgccgagacgtcatgcctacaattccagcatgtgactagctatttgtaatactttgacccctattatactactctgttctgctggttcaccatggcgccctcagattttacattagacctctgacactgtacctcccagctatcaaactgtctccgctacgctgttctacgagccacaatgagaacgaaattaaatcttgggtcgcatgacccgcaaaaatagtaaatcgaaagtgttttgatggatgcgctcgcgatcgggatcgatcacgctatcttcccgaatgtctcttagctggtcctgaggcttggtatccagctaataaatatgaaccttagatttgtccatctagtgcaatgtttcgtggattaaatgacaagcccagtttgtaccccgttttttggtggcaggtcagagatgctgctggtgccttgcaccgaaaggtagcttgattaatatccctctgtgggggatgaaaacgatttaatgtctatgcgtaatgttgaaaagagcagagtcgttctgtttgtgattgagtatcaggactgcacgcatttgagaaaggcatgagtctttcctcatagactagcattgcttgacatccatggctgtcacctgtgggttttgtaatcttttgccaatcaattcattaaccacttggtggttggggttgactctgatttatggtgcaaatgtagatggtggatccgtcgaccagtgtcggtgtaagagtttgaatggcggattgtgcgctgatggcgtataggctaacgggctttgagcaacaacttggttgtctgcatctcagataacgtgcgtcatcttttgagccagggagttgccattatcctcttaagtaaccgcttaattttcgtgaagaagctgaatactcccggcggttttgaggtttttccaccccttaaacgctggggccccattttacaccgcctggggccccctttgtgttctcacctgagcccagaaatataaacggcctcacaaaaacgataaccccgaaaaaccccacgaa

SEQ ID NO: 707212 - DNA, 1669 bp, Homo sapiens
  misc_feature (1199)..(1199): n is a, c, g, or t
  misc_feature (1214)..(1214): n is a, c, g, or t
tctgagcacgcgattgataacagagatgatctctgttgtttagcctaggggagagcgatagttggatgcttgttttctccgggagcaaattaatttttgttttagcctccccgtcaagaggggggataattctgtgcgctgtctttgaataacaacgatctgttgggggggggaattatcccgcggccccgccgttgaccacgagatatgcttggggccgccctcctaagtctcccgcgaatgttagctggggggaaccaagccccccccggaggggagaccctttctccctggggaccaacaaagggctcgggaccctcacccgtggtggagaacaacgcctacacctgcggcaagagacacaacaaacattactccggggggtttttgggaagagaagtgcttttcacacaccgaggccacagcacgcgccgcaaagttcttaattcccctatgaagggtgtgtgaaccctcgtgcgtgggtgatatgctccgtgcgccctataggtgagctccctctacggtccccccctgtggcgatggtgctacacacaccaagaaccccatcccccttgggggttcttaggcctttcttttgatgtgtaaaaatcggggttgttcttcttaaatgctccacacggggcgcacgaccacattttggaagagaagttccaacactcgtgtgtgttttttctcccgggaaaccctgtgcccaccgcgtaaatggaggtataaagaacttgtgggggttgggtgtgtttcccaccacacgcgcctctcgagtgttcccacgaacaattgtggagagactcttgtgacacccttttcccacagaaagcccctcgtgtagaattctctgggagaacacacgctgtttctctctcgcgagattgggaaagaagcgttttaaacaacacacacgggcccaacacaggtgggagagcacacctcacaggcgctctgagccgagagcgcccctctgtcacccacacagtgggacaattgggagagagccccccccgggtctctgagaaatactctgtcacacacagagggcacacagagatcgtctgctgagcagggtgggagagattctgagggggtctttttcgcttgctctgtgggcctctcgtgctttcttctcactctggggggccccgcgcgctcgttgtccacttctatactctctcacgcgaganatccacgcagaaagngagcacacactctctgggagactttacacgcgccccaccacgcgagttttctctcgaggcgctgagaaggtgaaagaatgagccaccacattcacaaggagaagaacccttttgcgcccacagcgttttgcacaggagatgaaaacacacgtgtctccccgcttggcgttcttcacattctttctcacaccacagaggaggagccctgttttcccggaacctggtgtgctaactggttcacgcacgcttctgcacgaaaaatgtgcctccccttgtggctgcctcacagctcgtaacctttggcctgaaagtcccacgcacttaaatggcacagcccctcaatcttccaagttttgtgctcccctttacctaatagcttcctgcctccccagcatctgtgactcctgctgtggcccaccaaacccccattaccattattaaaaggttttccaaac

SEQ ID NO: 707213 - DNA, 372 bp, Homo sapiens
gatgtgaaaacgagagtgtcattgatacacagcttttagatttacaagatgaaaatgttctgcagatctgttgtacaacaatgtgtgaatatactaaacactgctgaattgtatacttaaaaaacattaagatggtagattttatgttatgtacttctttatcataattttaaaaaaacttaaatgtagctgggcacaggggcttatgcctataatcccaacactttgggaggttgaggtgggaggatggcttgagcccaggagtttaagaccagcctgggcaacatggagaaaccccatctttactaaaaatacaaaattagctgggcatggtggtgcatgtctgtaatcccagttacttgggaggctgag

SEQ ID NO: 707214 - DNA, 381 bp, Homo sapiens
  misc_feature (3)..(3): n is a, c, g, or t
tanacggtcatcaaagcaagggaaagccatgcgtgctgggttggctcaaatctgttactgcaagaattcttgtatcaccaccaagagttctgtatgtgctatttataacaatcccttcaaagccatcacctaacttggcttggaagtccatagtccacatatgtatttcaaggtgagagcgctaagtatctctgagaaccagacagtgcaagtttgttcatgatgcagggtaactcaagaacttacaagttcttttcctaggtttcatgtaatcattgaatctatcctctagactgaaggagtggcattccgtgatttcaacgatcttttgctgtgcaagaatgataaacttgggtagcattgctgaccaagacttcgatg

SEQ ID NO: 707215 - DNA, 725 bp, Homo sapiens
gatgaccaagaagaggaagcctgtagtgaagtaagatcgtgacgccgtgcatcttcctaggcgtggccgagggatgtgtgaggacctcacgatctcaaggagaacacgttcgacgagtgcagatagaaaaaaagcgtttccatgaaacgtgacgtgacaatgggcaatgagcgcctggtaaggccgacaaagatcggccaacaccaagcgacaaaggcccgcctgatcaaggggggtagcttcagtagcgacactggttcgcaacgggaggcgggatggactgtctaccaaaaattcggcgagcgtggccggagggtagtcactacgtgaaataagcgtgttgtccaattcttgggattaccgccacatggtgaagctgccttaggagccttttcgggggcgattgacccaaacattcgccccgtttgtacgtcaatcgattggcgagaaaccatcaaggggccaagtgaattacaagtctgaaggtgacacgtacgtcggcgaactccaccaggggtgggttggcccagacacgctggttgatcaccagcgggttccacgtacgtctctttgttagtcgcaagtgtgttgagataaccctgtggtgggcgctggtgtacacgcggaaagcagtgcttctgagtcacacaaacacaggttacaggtggggcctgggcacagtgctgtccactagttgttcccactcctcctatttcgatgcaacc

SEQ ID NO: 707216 - DNA, 1282 bp, Homo sapiens
tggatgggtgggatcgcaaggcgcccctttttctaaagcctttcccgcgggccatcttacgaggcaggagtgcggcgtgggaaaaagacaagcgtggaattctctcaaaggttgagtggtccgcagcgttgaggattcatacggtggtctctctgggttccccgtgggtgtgtggtggtggtgatggtggtggaggagagggccggcggcccatataaattcacctttcttgagagcctcatggaaacagggacccaggaaaagaagggggcccccaaagtgccccgaagggacgttgggaccaacggccaccctgttgaaagaagaggcgtgtggccccccctatcatttctttgaagagaattttttctctccaaaaagagtccgaaggggcgcacgagggttacgagtgagtgatagagacctcctttgagccggcccgggaagtgtgcgtattcaaccagtggcgcccccgccggaaagccggggttcaaagagggggttgggaaccacccccgcgccggcccacaaggcgcgacacgaggggaccgtggcgacgaaaacaatcacaggctacacacaaaaagaggtggcgtgaacactgggggggaacgggggaagacatgtggccctgaggccccgatcatgcgaaacagcgcgcggaagctgaggcccggcacgcgggaagaagagaagtgagtgcccctgggaagaggaaaaaaaaagttaaacgccgcgggtaacaggggccccccgaaaatgcccagtgcgaacctgggaagaaaatcttcacacaggggagtacctccccaagggcctgagggaaaaactgcagcaccatgggaccggaaatataccacaagatcacataagccaagggagggatacgaggagaaatccacgcgggggcacaagaaaacaaagagaggagtgccagccggcggcaaccacatgaaaagaccaggcgtccgcagaagactccccaaaaacgcggttgtttgcccacgccccccggagagaaagctgtggaacatcaccgagaggaaaaaagagcgaccaaaaagaaaaaagaagaataaaaaatagaataccaccacaagaacaagacggacactagaaaagaaaaagcacagacacacagataacacgccgccacacacagcaagcagacacacacgacaacacaaccaagtaagaaaaccaacacaagacaacgacgacaagcagtagacaacagaagaaataccagcacacatcctcgtagcctgctgtacaagacaca

SEQ ID NO: 707217 - DNA, 465 bp, Homo sapiens
cgacagagcgagactctgtctcaaaaaaaattatatatatatatatccgccaggcacggtggctcacgtctgtaatcccagcactttgggaggccgaggcgggtggatcacgaggttaggagttcgagactagcctgacaacagtggtgagaccccgtctctactaaaaatacaaaaattagccgggcgtgatggcgggcgcctgtagtcccagctactcaggaggctgaggcaggagaatcgcttgaacctgggaggcggaggttgcagtgagctgagattgcgccactgcactctagcctgggcaacagagcgagactttgtctaaatatatatatatatatatatatatatatatatatatatatatataaaatatatatttttagacagtttatatatatataaaatatatatatatatttctaactatgggcttgaaattagtaggacataaaaatgagt

SEQ ID NO: 707218 - DNA, 497 bp, Homo sapiens
  misc_feature (57)..(57): n is a, c, g, or t
  misc_feature (204)..(204): n is a, c, g, or t
  misc_feature (351)..(351): n is a, c, g, or t
  misc_feature (369)..(369): n is a, c, g, or t
  misc_feature (378)..(378): n is a, c, g, or t
  misc_feature (406)..(406): n is a, c, g, or t
  misc_feature (426)..(427): n is a, c, g, or t
  misc_feature (434)..(434): n is a, c, g, or t
  misc_feature (438)..(438): n is a, c, g, or t
  misc_feature (453)..(453): n is a, c, g, or t
  misc_feature (465)..(465): n is a, c, g, or t
  misc_feature (473)..(473): n is a, c, g, or t
  misc_feature (475)..(475): n is a, c, g, or t
  misc_feature (488)..(488): n is a, c, g, or t
gcgccgacgccgccgccgaaaggcccacaaaccgggttgcaagtgtttaaagcgcancccgagcccccaaaagagtaaacccaaatccaccgggcgccagtccccggaaggagcccccaggcggaccgcctgccacaccccgggcccgcccccccggggccgcaccagccgggccaggcccatgacggaatcccccgtgcagcnccccagaatgcaagtcaaacacgaatcgcctgaggcccccaggaaccaacacaaccccgaagcccccaaacacaaacacacgcccaaagccgccaaaagcgaccacaggacaacccgccggagccccccgcatgcgcagaagaggangtccaaacccggcacaancggcacgcnaaaagcccaccgcaccccccccacccancaaccgccgagccaccccannccggaanaccnccaaacccaccgganccccccacaagngaaagagnangagaaaaggcagnacccccccc

SEQ ID NO: 707219 - DNA, 848 bp, Homo sapiens
  misc_feature (188)..(188): n is a, c, g, or t
ctcacacaaccattgacgcactgctcaagaactacgggctgctctactgcttcacgaagggcattggacaaggtcgagacattcccgccgatggtgcagtgccgctctgtagagggtagctgtcgcttctaggtgcccggatggcatcctgtgaccgaccccttcccagtgcctctcctggccctggnaggtgccactccagtgcccatcagccttgtcctaataaaattaagttgtatcacttactgcctcgcaaataataaaaatttctagccagtcaaaaaaaaaaaaaaaaacaaaaacacacaaaagaaaaaaaacaacaaaacaaaaaacaaaaaaacaaacacatttctagcccacacccacgcgccccccccaaaaacacacctctaccaacacacccacacatgacgagaaggggagcagcgaggcccccacaaagcagacagaaagaaaaccactgtgcacacagcacgacgtggtgtcctcccagagaagacagcaaccgcgaggcggaagacaacacagacggcggcgatgaggaggacccccaccaccaccagaaagagcaaacaacgccgcccgcgcgggaccaccacaccgagcgcgcgagtatgatgctgaaagcaaaaaacaacacccccgaaaagagcagagaacacaccatagaggaaggcacccaacacagacgaggcgcgcaggacacacaaatcacacagaacgaggaggatcacaccaccaaggcagaggaagatcccaacgaaaatcaagaaaaagataacacacccccccccgttgagggagctaaccagcgcgcggaggcctcagcgcggcctacatcacac

SEQ ID NO: 707220 - DNA, 386 bp, Homo sapiens
aactcctacctggagcctgacagtatcagaatagctaaggcagctaggggttgaatccagtgtcaagaggattacagagtactcatacatatgctggtagggaatctaaaatggtgccgctgtattggaaagcagtccagcagtttctcaaaatagctaaacatagaattacacagtaactctgagtaacatcccacttcaaggattgaaagagaattgaaagcatatgtctacacaaaaacgtgtacataaatgcccataggagcattattcataatagccaaaaagtggaaacaacctaaatgcccatcgatggacaaatggataaacaaaatgtggtatatgcatatgatggaatattattcagccaaacattcaagccgtca

SEQ ID NO: 707221 - DNA, 364 bp, Homo sapiens
tatagacttaatcagacatagacaaagcaggatcaatggacttccttgtgattcctattacaatctcactctctatatatctttattgcctgagtaagttcttgttctttccgttctctatgccgggccttctcctcaaggatttttccatagctttcgttttcttgaaattgggatctgaggggtccaaatagaacaagtgggaagtgtacattgcctgaaaccgtgcatcgttaacatttacctcaaagtcatcctctattaattccttctttttcacgagctgctttttcttctttttgctcagattctggtgctccacaatcttgtagtaattgaagtgtttcttactgtcctcgtcctc

SEQ ID NO: 707222 - DNA, 1012 bp, Homo sapiens
  misc_feature (222)..(222): n is a, c, g, or t
gggcgtctgaaggcctcggtggaaaccgtggtaccccgcctcgctctgggagtactaggtgccggtccctgtccttccccgaccctggctcacatgtggcggctcctgtcaaccctccctgactaaccccttactacggtcatggttgggcctaccaagtggctgggagaggcagaagcaacaccttgcctattcaaattaggaaagccactaagagaaaancaggtagccccgcagtcgtagtcgcgcccatataggaactccgacctaggtcatccgctctgacaggctccgaggagtataccctaactctcgctcggagttcatcgtgagttttgcagtggcctggtccatgcgagaacggacgtacgtcggaatgtcccgcttgtgcacctctatgtgtactgtccaacggtggtcgacgtttcgtgtgcaaccatttctgttacttactagcaccgtacagagcggcatcgttgtacgaccgtttagttgtctacatgtgaacgacgcggatacttcggagggggctagcgggaactgaggtagccctcatgtcgtgggtgatacgtcagtgatttggcaagacaagcgactcgcgtcgtaccccaccggtgtgcgcacctatcagtctacagggcctgtagatggtatcactctactcgctagagaatcggagccatggggcagcatcctcgcggcgcacacacattgtggcttgatgttccaggtcatggggttgtctgaacttagcttggagtaaatgcgttgagtgtgagtgggtgaagcgtgggaaaaggggaggaggtaaacgcaggaggaggaacagaaatattgggatggtgatacatggcgcaaggatgcagaggaatagcacatggatgtgtggctctagtctggacaggtagagttcaaagagttagaggtagatattacaagtcaggtggagaaaagattaattggcagcgtgagatgagtgtcccaagagagtagaatgacgggaggatgggga

SEQ ID NO: 707223 - DNA, 86 bp, Homo sapiens
atactaccaaaaatgtttggaatggttttggaaaaaattattattcctaaattcagaaggtatctggaaatgtagagaaaagatct

SEQ ID NO: 707224 - DNA, 239 bp, Homo sapiens
tggggaaaagggcccggggcccccccctggcctgggagtccctccctggtttttattttcagaaccccaggctcccctgtgtaattgaaggggaaggaagccctttcttgggttttggcctccaaaccagggtaagggcaggcccctccaaaaggggtttacaccccccaaggcagggggtgcaccccccccctgggagttttttttttatttaaaaaaaaattgttggggacccctca

SEQ ID NO: 707225 - DNA, 102 bp, Homo sapiens
cactagaggatccccagctactaccttatattgaccgatatgtcacacacgtaatttgtccatattttactataccataaatacttactatcactatcagat

SEQ ID NO: 707226 - DNA, 823 bp, Homo sapiens
  misc_feature (710)..(710): n is a, c, g, or t
aaaaaaaaaaaaaaaaaaacagggggaaaggggtgggttagggcaatctttctagggcagaaagaagtacgggataggaagagcataatacacggtttttctcaacagggagcagtatggtacacaggtcataaatggatggtggactggcttaagcccctaaaatatgggtaactaactctggggacaatatggggaggaaaattggaagatggtggatgggtggtaagagctaaatcctcatctggtcataatccagaaaatccactaatatatatatattacataaatggaatatggactaaagttatatggtggagggaaaaaacacagaagacttggcgtaaaagcagttaaaagtcatggcgtctgggagaaattaaggagggagtggggcagggggaccgggtagaggagtgcatttattaacagcgtgaaaaagcccttttataaaatttttatgtggtatttaaatattatgtggcatttcaccttgggaaaaacctaaaaaaaaaccaattaattgtgggaaaaaccctatggagggtgaatctaaacgggaaagggaaacaactcaagagaatatggaaaagagttatttggcctctggggaaagacccaacttggggcagggactggtgggttttccatggggcaagcacttttgggggagcctattctaaatgtgggtgactttaaacccaaatttncccatcctaaatttctcttaacataaaggaaaaccatattccctattcttacataaaaggaggtctacactgtgtgtacattcaacagcaaaacacacacaaaaggggggggg

SEQ ID NO: 707227 - DNA, 107 bp, Homo sapiens
atcttccctgtcttatgaattcgaacagcataccccgcgattcctgcttgcagataccagtaccgactggcgataccagataacaaaccagtaccgctgcataacca

SEQ ID NO: 707228 - DNA, 435 bp, Homo sapiens
tcttgtttcctgcacttccaagtagctgggattacaggcggctgccaccacgcccaggtaatttttgtatttttaaagtagagatggggttttgccgtgttggccagcctggtcttgtttcctgcacttcagcctgggcagcagagcgagactctgtctcaaaaaaaaggaaaagaaatacataaatacattttgtaatgccatagctaccataggcagtgatgcctccagtggatcagggcaaagtaaattgaaaaccttgtggagaggattcaccattccagatgtcatgaagaacactcatgaatcatgggagaaggtcagaatgttaacattaattaacagtggtttggaagaagttgatttcaaccctcatggatgactttgaaggttttaagacttcagtgaaggaaataactcagaagtgcaggaaac

SEQ ID NO: 707229 - DNA, 213 bp, Homo sapiens
gtttggtggctcatgcctgtaatccccgcaatatgttacatagattatagttttctctactcttattaccatcatagttttcatctgagccactataagggagggcacctcagagttaagggtccgctaagactagtgaattcctaaacatgatcctgcccttcacggagcttactgtcactgagataacctgaatatgttacgtctacctgt

SEQ ID NO: 707230 - DNA, 385 bp, Homo sapiens
gggagaaacacgagtcccagagaggtgagttggggttggaagggggaaggtcacagatagcacagggatctccttccttcctttctggaagctcacccgggtgccccagaatacagaggggcagatgtgcagagcagggggtgccagggcagtaagcacatgtgtggggacaggtggtggtagtgaggggagagaggagagatggagaggaaaacagaaggattaagagcagggcctaggagggaggtgagagagaagggggcgttgaggaaggaatgaggacagacaagctgggtgatggtcagaagatggtttgccatgagtcttagagggatctctgctgtcctcacagaggataaagaggtttactgcttccctggaaccc

SEQ ID NO: 707231 - DNA, 160 bp, Homo sapiens
agcccaacttcaccccgagcttgcgcgccgcgagctcagtggtgcctggcatgatcgaactcggcgcgatcaagtcaccgtccagcgccagcggcgcactcgtcaccctgctcaacgccgcctggaacgccgcattgcggctggcgtaccagcccgcgtt

SEQ ID NO: 707232 - DNA, 287 bp, Homo sapiens
cgtcgacgttatttagcaataaaaagaaatgatcagtgaagccatgaaaagacatagaggaaacttgaaagcatattgcaggctgaaagaagccaacctgaaaaatctacatatatgtatgatttcaactatacgacattctggaaaaagaaaaactatggtgacagtaaaaagatccgggttgtcaggggctctgggggacagagggagggacaggtaggtagagcacaggggatttggggggcagggactcctgggctggaggtcgacgcggccgcgaattagta

SEQ ID NO: 707233 - DNA, 367 bp, Homo sapiens
  misc_feature (69)..(69): n is a, c, g, or t
  misc_feature (99)..(99): n is a, c, g, or t
  misc_feature (118)..(118): n is a, c, g, or t
  misc_feature (169)..(169): n is a, c, g, or t
  misc_feature (299)..(299): n is a, c, g, or t
  misc_feature (350)..(350): n is a, c, g, or t
  misc_feature (357)..(357): n is a, c, g, or t
tattaattgaaaaggttcagggtacccacttccaatgagtgtagggaagcaagcagtagtggtgtttanaatatcaaggttagctgctggatgcgggtntcacgcctgtaatcccagnactctgggaggctgaggtggacggatcacgaggtcaggagatcgagacaancctggctaacacagtgaaaccctgtctctgctataaaatacaaaaaatcagctgggtgtgcacgcatgcgcctgtagtcccacctgctagggaggctgaggcatgagaatcacttgaacttgggaggcanaggttgcagtgagctgagatcacgtcactgcactctagcctgggagacagnagtcganctccgtctca

SEQ ID NO: 707234 - DNA, 815 bp, Homo sapiens
agcgcgcgagtagcaaggagaggagccggcgcggcgcgccctgttgtatgccgtctctcccgggcgaccgcgcagacacagaggaggagccacgcgcggtgatgtgttgccgggttgaggaaggccgcaaaagaatgccgatagccaaatgtccggagaagaatccgcagatccgtgcccaacgcggtcctgggtgggaacacatcctttcattggacgagatcaccttgtggttagagcgcccaatgtgtcgtggacttctataaggatccaaaccatataggaaagccttttaaacaagcgttggaccccccagacagttggcccaagacttttttcttttcacatttttgtagacacggcgcgggccaaggatgaattatcattattttcctcaggatattatccaatagattataagtggacaatatcatggtgatatggggtaacattcaatcaaaaaggtttggaggtgataaaggtactccgttggccaatttgtgggaatagtggtggggaaaagtgtaaaattccttatatgtggcgtggagacattaaaggaaaagagcgttgcattttgcaagaggggtggatccgagttttgcaaagaaaggggaacagtttgtggcaaaaatttctggaaatggcagattttggggaatcttgctggtaaaagaacaatcagcatgggggggaaggtttccgaaaggcacacttgtgggcggccggaacaaaattggagggaaacttccacaagagaaaggtttcagcaccggggatgtgaaatctgtcggaacctggggacctggggattt

SEQ ID NO: 707235 - DNA, 749 bp, Homo sapiens
ggctcacaaaaattttttgtaagaagagcgcctttttatcatctggctgcggcgccgcacacacatatatttgagataagaagaagaattataataatataaataaaaagacgtggcgactttacactgccagatggtgttccttcctggaaggcttgccaagatttgtgcccttatcttggaaattctcccagctaggatagccacttatagaagcgtctcccaccctttatctcacctttagccagattaaacttatgggggaaaacttaaatactggtgcaaacaaaattctgggaagcattttacttatctgttaaaaaaaaagggaatcctatggacctgatttggcccaccaaaaataaatcttgcctgtgaccaataaccaatactcttgggaaatttaagagaggatacctatggagtttgatgagctggtattagagggtgacacaatgtaaccgagttacacacacgacagcacataacttcgttttagagaacattcaagcacatagctttatagcttcaacaataatggtaacgttttaaaccttgaaagttttgcacatgaatgaaagcacgtaatttgtacacaatgaaaagcagagattctcttttatatggtttatactgttgatcagaaatgttgattgtgcattgagtattataaaaattagatgtatattattcattgttctttactcatgagtaccttataataataataaagtattctttgttaacca

SEQ ID NO: 707236 - DNA, 400 bp, Homo sapiens
agcctatagcacaagtggaaccctgtctttacaaaagaaaaaaaagccgggtacggtggctcatgcctgtaatcccagcactttggaggctgaggtgggcagatcacctgaggtcgggagttcaagaccagcctgaccgacatagagaaaccccgtctctactaaaaaatacaaaattagctgggcatggtggcacatgcctgtaatcccagctactctggaggttgaggcaggagaatcgcttgaacccaggaggtggagatagtggttgaaacgagatcgtgccattgcacgccagcctgggcaacaagagcgaaactccatctcaacaacaacaacaacaaaaaagccagatgtggtggtttgcgcctgtaatcccaggtactcagaggctgagatg

SEQ ID NO: 707237 - DNA, 708 bp, Homo sapiens
  misc_feature (14)..(14): n is a, c, g, or t
  misc_feature (84)..(84): n is a, c, g, or t
  misc_feature (87)..(87): n is a, c, g, or t
  misc_feature (137)..(137): n is a, c, g, or t
  misc_feature (141)..(141): n is a, c, g, or t
  misc_feature (167)..(167): n is a, c, g, or t
  misc_feature (178)..(178): n is a, c, g, or t
  misc_feature (193)..(193): n is a, c, g, or t
  misc_feature (200)..(200): n is a, c, g, or t
  misc_feature (208)..(208): n is a, c, g, or t
  misc_feature (215)..(215): n is a, c, g, or t
  misc_feature (227)..(227): n is a, c, g, or t
  misc_feature (259)..(259): n is a, c, g, or t
  misc_feature (360)..(360): n is a, c, g, or t
  misc_feature (367)..(367): n is a, c, g, or t
  misc_feature (402)..(402): n is a, c, g, or t
  misc_feature (466)..(466): n is a, c, g, or t
  misc_feature (537)..(537): n is a, c, g, or t
  misc_feature (545)..(545): n is a, c, g, or t
  misc_feature (572)..(572): n is a, c, g, or t
  misc_feature (577)..(577): n is a, c, g, or t
  misc_feature (632)..(632): n is a, c, g, or t
  misc_feature (701)..(701): n is a, c, g, or t
cccccctgattttnttttaaacaagacacccaaatcagcagcaaaggtacctggggtagtcactgagattttgaacactggganccngagggggaaagtccaaaaagtagaagtggggaagaaaagggaaggattgngggngaggctaggctctgggggacagagcngggccgcaggngggggaagccagttnggggggnaccctccngactgcngtggcccgtttncccccagaccccagagagccccagggtttgtnctgcagtccattccctatcccccaaaggcctcagaggcctaactccaagtcctctaactcctctcctagcgcccccctccttgctagcttttctagctgcnctttgcngggctggctgacttccccagcctggatccgctgcngcagccctcccacctgccggagtttcttctttaggttctttatcttcttggctttctcagtggnggcagccgagtgaggctggtcagaggcagcggtgggggctgcccgagagcgctgtggagcactggggagtngggctgtntcttccagggacaccttatcaagagtnctgcncaaggcctctccctctcctttctcttgctgctgccgcctcttctcctttcgcttnaggttacgtttggctgttttggagaggcctggttcaccaccttcaggcctggatggggtgacaggagcngtggcct

SEQ ID NO: 707238 - DNA, 113 bp, Homo sapiens
ctctagaggaccccgttttgtattggagttaccacaaatggcctcgctgaaaaaatgcagtataaaatgtattgggcctgtaagacaaatgggaaacacctgggtacctgagc

SEQ ID NO: 707239 - DNA, 133 bp, Homo sapiens
ccatcagtagcagcggcagccgcacatcagcagcttgctctgttccatccggcagcaatggcggccaccaccaccatggcgctctcctcccccgcgatcaagctcgccggagcctcctacgccctcggcggcg

SEQ ID NO: 707240 - DNA, 289 bp, Homo sapiens
ttgaacaaacttcatacgtttgctactgtccttgtatgaagtgtcccatcaatcaaggaatagattcagtacagtcagtgattgttcagtaacgatgatgtatttaaatttcgtcctctggaaggttgattagaactacgtggcacaacttgtaaaccttgcccatagtgtggccctgaggtttctaccacaattgtaggtcttaccttatgctcgagcttcgagtgctgttcttgtgtccatgtgttttcctgggtgatatactctatagttgggatttacttggtgt

SEQ ID NO: 707241 - DNA, 242 bp, Homo sapiens
atccctcaggtgaagacaccactgttactgatgttgggccaggaggaccgacgagcgcccttcacgcaggccatggagtattaccgtgccctcaagacccggaatgtgcctggtcggctcctgctctatcccaaaagcactcacgcattatcagaggtggcggcgctgacagacagctcaatgaatgctgcgctctggctacacacacacttgggcagctgaagccctgccattctgcatga

SEQ ID NO: 707242 - DNA, 106 bp, Homo sapiens
atggctgtacagtagcagagagtaaggtacatctagacactatgccatctgtttttgtaaaaagacactggcaccatgtttgaccaataccattccacactgctga

SEQ ID NO: 707243 - DNA, 117 bp, Homo sapiens
ataatagccgcttctaaacgctaatccaagcctcaccccactaggcctcctcctagcagcagcagggaaatcagccccattaggtctcccacctcgcgctcctggggggatcctcta

SEQ ID NO: 707244 - DNA, 372 bp, Homo sapiens
tgagcttctcgaggtgaggagttcacaaccagcctatactcaacatggcgaaaccctatctctactaatataatacaaaaatgtatgctgggcgtggtggcgcgtgcttgtagtgccagctgttcatgaggccgaggcaggagaattgcttgaacctggaatgtagaggttgcagtgagccgagatcacaccgctgcactcccaactgggcgacagagcgagactccgtctcaaaaaaaaaaaaaaaaatttgctgaggaataggagcaaaaacggagggaacctttccaggttccaggaaaaagagacagcatttgatggagctagggtcaacagaacaaaggaggaattgggatccaggccccttgggga

SEQ ID NO: 707245 - DNA, 220 bp, Homo sapiens
aaaaagaagctagcgtctatcattgtggacattcgggtggtacaagtctttgctattgtgaataatgccgctatggtgtttttttgttagttagttagtattagttaggttaatatctttataggaatctagcaagtcttctgttagattcattcctggcttttatacatttcagtggcctgattatataattcttatcaatctagctgaataatctcaa

SEQ ID NO: 707246 - DNA, 386 bp, Homo sapiens
tgatctagagccctccagtcattgcccagctgtagacctgctcgaagtccactgcctttgccccagcacagaagaggcccactgccaccctagtggacgcgagccaagggctggtcaggctgcagtgcccctcctagcagggccccttcccactcagaccgaggatgtgggcaccacagctcttgtggggcagcccaccttagaacctgactagcgagggacctccgctgcatctcagcaaagcccctcccagggttagatcgattgagcaggacagccctgctcctggacagggaccctggtacgagctctctcctcagggaggaagtaggggtggggctatgggggtgcttactctgtaccccccagaccatgtcccaagatgc

SEQ ID NO: 707247 - DNA, 928 bp, Homo sapiens
ctacttcccctatcatagaagagcttatcacctttcatgcatcacgccctcactaatcacttttccttatctgcttcctagctcctgtatgcccttttcctaacactcacaacaaaactaactaactactaacatctcagcacgctcaggaacatagaaaccgctctgaactactcctgcccgccatcactcctagctcctcatcgccctcccatccctacgcactcctttacactaacagacgacggtcaacgatccctcccttaccactcaacatcacactctggccaccaactggtactgaacctacgcagtacaccgactacgcgcggcactaactcttcaacctcctacactacttcccccattattccctagcaacccaggcgacctgcgacctcctctgacgcttgacaactcgcacgctagtactcccgacttgaagcccccactctcgtactaactacacttacatcacaagacgtctgccactcactgagctgtccccacattaggcttacaaaccacgatgcaattcccggacgctctaaaaccaaaccactttcaccgctacacgaccgggggtactacctacggctcaatgctctgaaatctgtggagcaaaccaccagctcttcatgcccatcgtcctacaattaattcccctaaaacatctttgacatagggcccgctatttaccctatagcaccccctctacccctctagagcacaccacccccccaccccccccccaccccccacaccccacgggggcgccccacaactcccccccacggcccccacacccccgcccccccctcctgtcacaacgcgcccaaaccaccccacaaccaccacgacagcgcacgttaaagcggagggacacgcccccgaacctgcgcaacccctgcgggcacctggccaccgc

SEQ ID NO: 707248 - DNA, 170 bp, Homo sapiens
tagttcattaaaacaacagatgaagtggtaacattcttggatattattattttgagacagggtctcgctctttcacccaggctgaagtgcagtgacatgatcatagctcactgcagccttgaacttctgggctcaagtgatcctcctgcctcagtctcctgaggagctgg

SEQ ID NO: 707249 - DNA, 88 bp, Homo sapiens
cttttttggattttggagttgggggtggtcaaaccccccaggaactttcccctccttcggatgggcaaataaatttgtggggggcgga

SEQ ID NO: 707250 - DNA, 283 bp, Homo sapiens
cttttttttaaaggaaaaatcccccgagaacttttttcccctttttaagggcctaaaataaatttttaatgactcctgttttaatattacccccccttgttcccccccccctttaatcaaaggtagcagattgttctttttggcccgaaataaaaagtttaaaagttgggggtcctttaaaaccccacccaggccttttttttccccccccttgggtaggttgtccccactgggcttttgccccaacttttgcttgggtttctcaatagtttttcccagccca

SEQ ID NO: 707251 - DNA, 836 bp, Homo sapiens
agcggggagtgactggttgccggctgctctctgcgtggttcttcttctcgtgtcgcgtgaaggcccccgtgtgctgcttcctggtcaatgtctgtgagtgcctgctgagctgtccccggtgccgccgacccgggtcgtgtgccaagtgggtccgagccgcttgcctgtgctctcatctccttccgtctcccgttccggcccgtcccgttgtccgcgtggaatgcaacgttgcagtccgtttctcttgtctcctgtcgatggcaattcgtgttccgttgcctttggccctcggcatggtccgaatatcaaatgcccgaggactaaataggtgcacctgatacgcaagcagtattagctagttaacctccccagggtcgagtgtcgagtgccgtagataacacaagtattataactttaatttaatactatagttaatttatttatagcagtttgtgattacctctatattcctgttgtacactagtctctgagaaggcgtgctcagtagttctcttattaagacaaacactaagcgccagatgaatggcaactcctcgattaccattcactatcccctgcatagccgtccgctacgtggatccttgtgtgtggactacctatggatgctcatcctgggactccaataactttgcattagtcgttgagcaattctccgtgttgtagccaactgatgtacgcacacttcttatggtacaggctgtgggctcatggtgtagttgaaccatgaaagcaagctctgcaagtcctagcttaggattgctttgacaaacagggggcatctgtcgatacctgggggtcataagttgatggaaagc

SEQ ID NO: 707252 - DNA, 1292 bp, Homo sapiens
ggagtttttctttagaaacagtgccaagaatgacaagatattaaaaaaaaaaaacaggaaaaatgaaaaaacaaaaaaaccccttactttttaaagagaaaagctgccttaacaggatttttataatataggttattctcataccactttttcttttccataggttccctaggatttccagcgcctcagggctggcattccttagcctcatactgggtggaaagaacacagggggtgtttttgggattccagaaacattattttgtgaacactcgtggaaatatagttcttaaattgtgtggtaaacacacatctaaggagaacaatttctccttatagacgctttttagacaacagacaagaacaaagaagatacaagaaagaagacaagagaaaaagagacaaatagaaaaaaaaaacagccatgtgtgtggggcggcgcgacgcaacgagcgagccacgcaaaaaagagaaaggtcttctagcaaccaacacaactctccgaggcaggggcacgcgcaggggcaggggccaccaaaaagaagagagaacaagcgagagcccaccgagaggggacaaacaaaaagggtagttgacccacaggagagaagaaacaccgcgggagatagacgaatgacaacacagacgcgggccggagtgagacagattctctcgcagaccagcactatgtaaaaagaaacaaaagagcccggcggggggagggagaaacacaaaaaaccagaagaacggtgtgtttcgtcgaggtgagaaaaacacaaccatcccctacaggaagagcagagaagaaataaaccaaaaggaaggagaacaccaccacaatggaggggggacacacacaaaactacacaccagaggggagggtgcaacaacacaaacgagcgagaggagcggcatacgcaaaaaaaaaataaaaagaaaaaaagaataagtatatgaagcagcgcgagccaaggcaagctaggagtcgaggggtggcgtagcaacgagaacagccaaggtagaccgacagagcaacagcgcgacatagagacgaggcagagaagagacgacgagaaggcaagcagcagagaagagagtcagaacgcagagccaagacgaagcaggcaagaaggacaaagcacatacagacaacaagaaggacgaagacaagaatagagacggtatagaactgacaaggaagaagaacgaaagcaagacagagagagagcagcgaagaaaaagacaaaactagcaagagaagacaagtaagagcacaaacaggagcagcacac

SEQ ID NO: 707253 - DNA, 141 bp, Homo sapiens
tatgtgtctaaaaaacagaaaagtaagaaacagaaacaaatacgataataactccaactttttttaaaagtcggaacacagtaatgaaactatacagaacatagctgagaatccaaaaaacacatttttattatctccaag

SEQ ID NO: 707254 - DNA, 102 bp, Homo sapiens
ccctgcaccgatgtgaacccaccagggaggcctttccatcagagtcctgctccctcactcctcgcggcgccccctgtcccagagtcccacctgggggctctc

SEQ ID NO: 707255 - DNA, 309 bp, Homo sapiens
ggggaccctttgtgatgtgtgcatccatctcagagagtcaaacttttcttttgattcagcagtttggaaacactgtttttgtccattctgtgaatggacatttgggagctcattgaggccaatggtgagaaattgaatatcccaggagaaacactagaaggaagctacctgagaaaatgctttgtgatgtgtgcattcctctcacagagttaatcctttcttctcattcagaagtttggaaacactgtttttttaagaatctgataagggatatttcagagtgcattgacgcctatggtgaaaaagaaa

SEQ ID NO: 707256 - DNA, 1074 bp, Homo sapiens
  misc_feature (958)..(958): n is a, c, g, or t
taaactgatcagcctttgtataatgttttttaaattcatttctaaattaaaacaaaaatacagagtgtgtcattctcccttgggaatgagggaaacaaagaactcaggtttccaagaagttaacctttaggaacgctctgtgggaaagaaaaaccgggtctccttgtggggtgtgtctcgtgggaagcgtgccaccaccaatcttcctctctgtgcacaagaccggggggctcaagatatatgcctctccctctcttaacaaacagggctgtggccctgtgtgggcgcccaggggttatattgctggggtctccaggagaaccaacaggcctgtgatgtagattcgcctctctcttatcacagactctcacagagagagtgtgtgagagagacgcaagccgcccccccacaggagagagttaattggggggaagagggctcaccctgtgttgtgcgacacccgagggcctattctctctcacaatgtgacaccttgtgggagacacattgttgttaactcgtgtgtgacacacacctatatatgtctctagaagaaagcacacgcgggtgtatatctctacgcacaaatataccacagatatatatttttatatttataaaagagcgcgcgagaaagccgaaagatgtctcacgggagagggttttctaagaccaaacacttttttgcggcgagggcggcctatatacccacagagaagaagaggcgccccctgttgtcgtccccatgttgcgctcttcctgttgagaaaaacgccaccaaaggcgaggacaccaagagaagaagaagacggggggaccttgttgccgccccccaccaggaagaccccacaaacgccacaagcgccgcctggagaagagcacacaagcggcggcgactcgttgcggggggggcgttggggctcccaacacaaaaaaagggggcgtctctttgtaacgncccgtgggggcgcctccatgataggggggtgtaggtatatacgacgctcgtggtggagaacaacggcccaaagcggctgttggtgcagggttttgtccttacaccaacactcgttc

SEQ ID NO: 707257 - DNA, 1373 bp, Homo sapiens
  misc_feature (151)..(152): n is a, c, g, or t
  misc_feature (155)..(156): n is a, c, g, or t
  misc_feature (177)..(177): n is a, c, g, or t
  misc_feature (180)..(183): n is a, c, g, or t
  misc_feature (185)..(185): n is a, c, g, or t
cggcagtctagtcatccaccgccatcctgggccccacgtgttgcctgaccattcctgagcccaggtgggagccgtggctgaggtgacggtctcaaagtggaagagcttactgtcacagcaactcctttgcaagatgccccggccaggaatnnttnntgaacaccccaggcctgctgnggnnnntncttgagtctcatgttcaagcagtcttgtgagtaaagcactggctaccccttttcacttactatcttttcaagcatgttctaccaccttggaaggtaagaggttagtaccttcttccagagcagagggcaggcattcttgctgtgcgttgtgaaagggtagagtcctgcgctcctttcttgtagtagtccaatggctcatgcaggtgcctctgactcccctatgggaactggggcttgggagggtggtggaaaatgctgatgctctggctattgctattgttttgaataatcagtggtcccttgtccctaatcgaggaatttcgtattttctaccagtgtccatgaaactgggaggcgaccgtgttagctgccagttcctgacagccacctctcaccagtggcttcactctgtgtccctgacccagcacatggcacaagagtgcctgccatccgtcagtgtttctacagcagcaatcccaagatgctggagctagaggggacctgacctgagagaagataccttcagtggctgccaggctgttccttggaacctgtgcaggggtaagtgtgcaggaaggtctgacctggcaagtcacttcactcctgttttatttagagtcacctggctaaggaaaagttcaaaaaccgtcaccttattttgaccttcccgtatggtaagtcaggtgattgaatcccggaaaggttcattgtcttcaagctcacaatactattttgggacaaacagttgtctagtgtttggactcatgaaccctgattcttgagggtggtattttactgcttttgtgatttggtttcaacatatatagtcttttctccggagttaccttaggtcagtggccagtgtttcagcccctggaaagggcatgggctgccactgaggttggtcacaggcctctcagctcatggtgggagtgggttcaggagttggtaagtagggttcagttctgttgttgccaccgatggcaacaggggtttgtaataatccctagttgtgtcaattatgtcacttaattttcacaacaggtctctgaagtgtttctcatctcatttttacagatgaggcctgcctgtgttaatacacctagtgaggagtggagctgaatttgaatgcaagccttggcaccttaattgagcaagtttgaaacctcgcttgttgcccttctggga

SEQ ID NO: 707258 - DNA, 311 bp, Homo sapiens
ttccccccccccccggggcccccaaaactgggggggggtttctgggtgctttttttaaaaggggggggtcctttttttggttttttcccacccaaaatttttttttgggtttgggggtgaaggggttttggcccctttgttggtccccccccccccccccccccaaggtaaagccgaagattgattaaaaattttgtttttcccccgggggggatgtttggggcccatcccggaagggggagcccttttttttgggccgggttttatggctttttactgggggggtaataaataaaaccggggggccttta

SEQ ID NO: 707259 - DNA, 326 bp, Homo sapiens
ggacctttctgtgctgggtgctgggctgcttgcgctgtatcccagaaatgataacatcaaagtgttacacggacaggttcgtattaaaaaaaaaaaaaaggcgccatgtgacggctggatgggagggtacagttaagagaagctttaaggagtctaagttgtaacctatatggtcctcagcaacttttccccagaagagaccatggtttggctcacagagaacatttaatttgccattctcaccaagtgcaattggttatgtactaaatgagaccagagtaggacacattgcccttgacactggccagcacaagacccacaggggt

SEQ ID NO: 707260 - DNA, 156 bp, Homo sapiens
tagaagtgagtggaagctgtgcattggatctttcagtgaacagtcaaagatcaggctgctctctctgttggtgatcacacgaattcttcctaggttagcactccagtcaccatacacaggttaccagctgtcgaaccttgatgaaatcacgtaatc

SEQ ID NO: 707261 - DNA, 354 bp, Homo sapiens
  misc_feature (15)..(15): n is a, c, g, or t
  misc_feature (79)..(79): n is a, c, g, or t
  misc_feature (130)..(132): n is a, c, g, or t
  misc_feature (134)..(134): n is a, c, g, or t
  misc_feature (342)..(342): n is a, c, g, or t
cttgcggccgcactntgggcacggtaagggcttctcccccgtgtggctgcgccttgtggctgcgcagctcgggtgccgncgggtaggccttggggcatagcggacacgcatagggcctaggcttggccgnnnancctgacaccttctccccactggcttcctctgccttagcttctgactctggctttggcttcacctcggccacctattcagagcagtctgccggcccatgtgtggcagcgtggcgcgctgccctgggcgcgtgtggaaatgtcttggaacaggacaggcacttggagcgggggtccgagcgcttgtagaagagggaggggaccgggcctnggcagggctgac

SEQ ID NO: 707262 - DNA, 484 bp, Homo sapiens
taattccccctggaaaccaaaaagggggggttccggggaaggggcccgtgtgggcccccccccctctcccgcgtgggtgggcccctgtgtgggctttttccctttctcccctgtgaagcagaccccccaaacaagatgtggtgagacaccgccccctccctatcgcctggacggtggtgctgctctcctccacaaacacccctcttttttagatgggggagagagggagaaacagacacgaagaaaaagaggtagagaggaggacaccccgcgccccccctcacccaaggcagataattctggagaaaggggcctcactgcaccccataaggagcatataaccccactcaccaggaggagggactacctcctccccgagaaccaattttgtgtaaaacaaccacaacctatgaaaaaaaactactaacaacggttcaaattaataaaacaacaaaaaaacaaaaacaaaaacaaaataaacaat

SEQ ID NO: 707263 - DNA, 485 bp, Homo sapiens
  misc_feature (377)..(377): n is a, c, g, or t
  misc_feature (407)..(407): n is a, c, g, or t
  misc_feature (413)..(413): n is a, c, g, or t
gttcgtcccggagagcaagaacggcggcagccggcgctcaacaacaacccgaggaggagcggcagcaagcgggtgctgctcatctgcctcgacctcttctgcctcttcatggcgggcctccccttcctcatcatcgagacaagcaccatcaagccttaccaccgagggttttactgcaatgatgagagcatcaagtacccactgaaaactggtgagacaataaatgacgctgtgctctgtgccgtggggatcgtcattgccatcctcgcgatcatcacgggggaattctaccggatctattacctgaagaagtcgcggtcgacgattcagaacccctacgtggcagcactctataagcaagtgggctgcttcctctntgggctgtgccatcagccagtctttcacanacattngccaaagtgttcatagggcgcctgcgtcctcacttcttgagtgtctgcacccctaatttcacccaaatcaac

SEQ ID NO: 707264 - DNA, 784 bp, Homo sapiens
  misc_feature (231)..(231): n is a, c, g, or t
  misc_feature (488)..(488): n is a, c, g, or t
ccgctctccacccaccccgggccgaaagtgctgcctgcacaggttggtgtatggtcctttgagcaggaagaagacatgaagcacattcctgttagctacgacagagaggggcagggcacacactggacatttcaagcccctccagaaaagcaagtcttactgtgctgggagtacttgtggagtgcgggctgtgttgccctgggctttaattatttcaggaacatttaaccncagggttggcaggccggatcttgatacgtgtttcttagttggaaagactttggaccatagggaaatgtcttctcaattcttttaatttcagtaaggttgtcatttttcttcttgtggcctctggaatgtgacacagaactcaagggacaggaaggagatgagttggaggctgggacaggggtccctgccagggatgctggtgactcacatgacggtgttgatgtgtggagtccggtgcctggtttggggaatgttcntgggatatgttccaaaggactgacggacctatcaggtactggaggtgaatggtcaagtctgatctcagggctgacagtgtcaggcaaggacaggaagttgacgttggactcattggctgaggttgcttgggacccagggagcaacgtgtgccaggacagatgggtctggggctaggaaggcaggtttgggctggagacttgggcttgggacgcatcccaggtagacagtggttgaggctgtggaaatgaccatgattgcctgggatgagagtggagacggacaagattccatctca

SEQ ID NO: 707265 - DNA, 422 bp, Homo sapiens
gttcgtcccggagagcaagaacggcggcagccggcgctcaacaacaacccgaggaggagcggcagcaagcgggtgctgctcatctgcctcgacctcttctgcctcttcatggcgggcctccccttcctcatcatcgagacaagcaccatcaagccttaccaccgagggttttactgcaatgatgagagcatcaagtacccactgaaaactggtgagacaataaatgacgctggtagatgagctgataatggggagggttgatggcactctgatgaatgcaaaatacattctcattagtaacatctggtttattgggtgtctgaacaacgtgctgagaagtaaaagtccgtccgtcgggatactacggatgtggaggtaagtctggaatcagggtaggtgcaaaatacatgcatgatgagggt

SEQ ID NO: 707266 - DNA, 623 bp, Homo sapiens
  misc_feature (231)..(231): n is a, c, g, or t
  misc_feature (488)..(488): n is a, c, g, or t
ccgctctccacccaccccgggccgaaagtgctgcctgcacaggttggtgtatggtcctttgagcaggaagaagacatgaagcacattcctgttagctacgacagagaggggcagggcacacactggacatttcaagcccctccagaaaagcaagtcttactgtgctgggagtacttgtggagtgcgggctgtgttgccctgggctttaattatttcaggaacatttaaccncagggttggcaggccggatcttgatacgtgtttcttagttggaaagactttggaccatagggaaatgtcttctcaattcttttaatttcagtaaggttgtcatttttcttcttgtggcctctggaatgtgacacagaactcaagggacaggaaggagatgagttggaggctgggacaggggtccctgccagggatgctggtgactcacatgacggtgttgatgtgtggagtccggtgcctggtttggggaatgttcntgggatatgttccaaaggactgacggacctatcaggtactggaggtgaatggtcaagtctgatctcagggctgacagtgtcaggcaaggacaggaagttgacgttgggcgtacggggaggggatactctagagcg

SEQ ID NO: 707267 - DNA, 519 bp, Homo sapiens
  misc_feature (25)..(25): n is a, c, g, or t
  misc_feature (48)..(48): n is a, c, g, or t
  misc_feature (78)..(78): n is a, c, g, or t
  misc_feature (134)..(134): n is a, c, g, or t
  misc_feature (149)..(149): n is a, c, g, or t
  misc_feature (185)..(185): n is a, c, g, or t
gtgccaaagggtccctggcctttgnacccctacctccacttttaacangcccctccccctcaactagacctaaaaccnttccctagttttttatttaaccagccgagagaatatgtgacctccttttttccacntgaaacactttttanaaggcctattgttgggttaataaattggtcctaacntccgatattgttgtgtcctaacatcccatatggtccttagggaaccagggaggccctgaagagagccaacagagatgggggaatgccccacttgcctcaagcagtcagaatacacacaacattgataatttaagttagcccatcttatatgagcatagttcatagcatcccaaaacaattacaatagtaacatcaaagatcactgaccacagaacaccgtaatagactgaaaagtttaaaatattgagagaattaacaaaatgtgacacaaagtgagcaccacagacttgctcacccagggttgccacaaaccatcaatttgttaaaaaaaaaa

SEQ ID NO: 707268 - DNA, 420 bp, Homo sapiens
cccccggccctgggtaaaagattgtttccttgtggcagcatagcacaccctcgccttttttatgccatccgctgccccctccttttggttctgggccctttagcccttttgcccttccactttttggaccccgcccccgccctccccccccaggtccgtttttttttatttgggggaggaaaaaaactcctgatcattggccaaaggggctttcccctggaaaggccaaatgccttttaggaagttaggaggtttaggcccaccctttacaaaaagggtgggtcccccccccaaatccaaggggaaaattcaggtcaaggggttataacggccattcaggaagctttattttgggtccccccgtgttttccgcccccccccccgccattttgttaaaaaaagccccctgggtttttccca

SEQ ID NO: 707269 - DNA, 131 bp, Homo sapiens
atctagaggatcccgttgattagtcattgttgggtggtgattagcgttgttgatgagatatttggaggctggtcgatcaactagagggggcacaatagaatgactcagtactgcggcgggctatgcctagg

SEQ ID NO: 707270 - DNA, 656 bp, Homo sapiens
  misc_feature (532)..(532): n is a, c, g, or t
  misc_feature (553)..(553): n is a, c, g, or t
  misc_feature (581)..(581): n is a, c, g, or t
  misc_feature (601)..(601): n is a, c, g, or t
  misc_feature (641)..(641): n is a, c, g, or t
  misc_feature (656)..(656): n is a, c, g, or t
caacaataatgaatcatttctctatcggattgtgatgtgtgccaaaaggtggattttatacgacaactggcgatgaccagctcagtggctggactgaaagaagctccaaagcacttcccaaagccaaacttgctccaaaaaatggtcatggtcattgtttggtggtttgctgccagtctgatccactacagctttctgaatccaggtgaaaccattacatctgataagtatgctcagcaaatcaatgagatgcaccaaaaactgcaatgcctgcagccggcattggccaccagaaagggcccaattcttttcacgacaacactgggccgcacgttgcacaaccaacgcttcgaaaattgaactaattgggctatgaagttttgcctcatctgccatattcacctgacctcttgccaacaaactaccacttctttaggcatctcagcaacgttttgcagggaaattgcttccacaactagcaggacacagaaaatgctttccaagagttcgtcaaatttggaagcatggattnttatgctacaggagtaaacanacttatttctcattggcaaaaatgtgtngattgtaatgggttctattntaataataaagatttgtgtgaaccctagtataatgacttntcatggtccccgctn

SEQ ID NO: 707271 - DNA, 398 bp, Homo sapiens
aatccagaatcgatgccatagctgtttgctcgagtgtaaaaagtagtctggcggaattcattcagtcttgggactgagtgatatggtgagtaaaggtacaaattaatgtcgagtaaagaggaagttgttgtgtcgataggggaagatacaggagcacagatggctgggtggccttgatctggtccctaaagctgcttggttggagctgctgcaggttaaaacccctagggcaaggatgtggaatcagaggctgcaccagtaagaaatctctttccaagagattttgtaggggctttgttgtattatttgacaacagtcaattctgctacagatgaacaagaaaaagaagatggatgaaactcataaacgtgtgttaagtatagataatgactatgtag

SEQ ID NO: 707272 - DNA, 157 bp, Homo sapiens
tctatccgtggttctggcttgcaaagaagaaggtcgtcactagtattgaacatgactgggagacaggtttaaggaagtgaggtttcggtgctagagcttgtccaaagaaatgagggctatccctgaagccctgagggaggacagtccatgtgagttg

SEQ ID NO: 707273 - DNA, 473 bp, Homo sapiens
gtaccagttcccccatgtgccagagtctccgtcactgctggaatatagagcaggagcccgtcgtggaaggatgctgggatggtgttcacctgtaggggcaaacagaggtcggctggggtgggcatatgaagggcatggaggtgggagctgtggggaagggaacaagaggcactgggattttggaagaggatgggagaaaataacacccctatatcacagggagattttactatttaaacgatgcccattccaaagcaggggatccaatgggatgccttctccaagtcctgtccaggctgtgggactttatcctcctcccgcctcaagcccattttcttatctttttagcctgctggtggcgaagcgcccctgggcagtcccctgcccttcattgcctaattcccagtgagcatcaccaacctcttttctgttctgtgagttaccaggagtgcataaagaaacaaacagaaaaa

SEQ ID NO: 707274 - DNA, 547 bp, Homo sapiens
  misc_feature (83)..(83): n is a, c, g, or t
ggcggtgatgaattgggacgcaggcgcggagcccagggaccatctccccctgcacagacttgagaccataggggacctgtctnggtggcctcagggataggcgctccccaagggtgtcgatatgaggcaggatgaactggacaggttggtacaccttgctcagtggcgtgaaccgggcattctactgccattgggcccgagtatggctctccggtcatcttcatcttcagaatcatgcgtgctggtggtgggctgccagagagtgtgtgggggtgatgagaaatcttccttcatctgcaacacactccaagcctgtgtgcaaaacaaggcgtgggcttatgaccaattcttccccatctcccatgtgcggctgtgggtccctgcagctcatcctagtttccacccacagtctctcctcgtggcattgcaccggtggctcaccagcaaacacattcgacgacgaaaatgctaccggtttgagggccatgggggacccccatacacctggaggatggtgaagaggcacaaggtccacaatctcagggac

SEQ ID NO: 707275 - DNA, 252 bp, Homo sapiens
tatgtaaattggctaattgatggtcgcctcaccatctgtacaatctcctgtttctttgccatagtggcattctgactcttggggattcattacttgcaacccccctttttccagagttccaaaacccgttttggcttttgtgttgtcatatcctattttgtgatgatggggattctgaccatttatacctcatataggagaagagcatctttctcgtggccacaggaaaagatcctacaggaatggatcctg

SEQ ID NO: 707276 - DNA, 105 bp, Homo sapiens
ttgagattatcgctagatgatcccctctcttcctccccactctgatataaatgagttcctattttttctgggacgagggggggattgattatgaaacataatgta

SEQ ID NO: 707277 - DNA, 392 bp, Homo sapiens
tccctttttggggtttccccccccccaagatccctttggggaggttttgcacaggcccgattcccgggtttaaaaaggttggaaatttcccggttttcccccccttttcacccccccggggattttttaaataaaggggtttaattcccttttctggtcagcgggggaaggggggaccccaaattaggtttaaaaggttccccccgggtttttttttttttgggtttttttttttgggccaagaaattttttgtttgtccaggaaaaggaagagggggaaattaaaacctttccggttagttttggaaaggccgggatttttccaaaaaatttaaaaagaggggcgtgggggttttttctttgggaaaaagaaacgtgggggcccccgggga

SEQ ID NO: 707278 - DNA, 150 bp, Homo sapiens
ggacagtagacataatatatgtatcggtgtcatctgatggtcgttaatgttttaagtttgggggttaacaaaagactgagtctcgctcggtgacccaggctggagtccagtggcacaatcatagttcactgttacgttacttcaaactcc

SEQ ID NO: 707279 - DNA, 1094 bp, Homo sapiens
  misc_feature (224)..(224): n is a, c, g, or t
  misc_feature (776)..(776): n is a, c, g, or t
  misc_feature (831)..(831): n is a, c, g, or t
  misc_feature (840)..(840): n is a, c, g, or t
  misc_feature (856)..(856): n is a, c, g, or t
  misc_feature (859)..(859): n is a, c, g, or t
  misc_feature (862)..(862): n is a, c, g, or t
  misc_feature (866)..(866): n is a, c, g, or t
  misc_feature (874)..(877): n is a, c, g, or t
  misc_feature (890)..(891): n is a, c, g, or t
  misc_feature (899)..(899): n is a, c, g, or t
agtcaagtaacgctgagagcctatcgcatgagggcgacagccggaaagcaggatggagcatagaagcattctcgcgagaagtagagttgcggttcctcgggagaggggcggaggctcagaggtgcaccacgtggggtttgctgccggagcggagtctccggccggcgtcagtttgagtctaggttggagttggaaccgtggagatgcggaaggaaaccccaccngccctagtgtgccgcgcgggccgggagtggaatcttcccccaaatgcgcccgcctgcatggaacggcggtggaggctgcgcggtaccggtccgatggggcgcttctcctcggggcctccagcctgagtgggcgctgctgggccggctccctctggctttttaaggacccctgtgccgcccccaacgaaggcttctgctccgccggagtccaaacggaggctggagtggctgacctcacttgggttggggagagaggtattctagtggcctccgattcaggtgctgttgaattgtgggaactagatgagaatgagacacttattgtcagcaagttctgcaagtatgagcatgatgacattgtgtctacagtcagtgtcttgagctctggaacacaagctgtcagtggtagcaaagacatctgcatcaagggtttgggaccttgctcagcaggtggtactgagttcataccgagctcatgctgctcaggtcacttgtgttgctgcctctcctcaacaaggactctgtgttactttcatgcagcgaggacaatanaatttactctgggataccgctgtaccaagccagcatcacagattggctgcagtgngctggaacntctactcgctggttgnatnctnaggnaagtgagnnnnggcttggtgatgnnatgggcangtcctgtgacccagattacgctgggttggggtcatgaatcccagttgatgggggtgttcccacgggcttactggccccagaacaggcagtgggcgaactatgatttacgaacccagttggagagtggactcatcctcaatgggaaggtcaggacacaccggtcgtgtacacggcgctatcaggtgttttagcagc

SEQ ID NO: 707280 - DNA, 262 bp, Homo sapiens
  misc_feature (4)..(4): n is a, c, g, or t
  misc_feature (19)..(19): n is a, c, g, or t
  misc_feature (37)..(37): n is a, c, g, or t
  misc_feature (53)..(53): n is a, c, g, or t
  misc_feature (68)..(68): n is a, c, g, or t
  misc_feature (79)..(79): n is a, c, g, or t
  misc_feature (84)..(84): n is a, c, g, or t
  misc_feature (118)..(118): n is a, c, g, or t
  misc_feature (129)..(129): n is a, c, g, or t
  misc_feature (150)..(150): n is a, c, g, or t
  misc_feature (156)..(156): n is a, c, g, or t
  misc_feature (166)..(166): n is a, c, g, or t
  misc_feature (182)..(182): n is a, c, g, or t
  misc_feature (184)..(184): n is a, c, g, or t
  misc_feature (186)..(186): n is a, c, g, or t
  misc_feature (207)..(207): n is a, c, g, or t
  misc_feature (210)..(210): n is a, c, g, or t
  misc_feature (219)..(219): n is a, c, g, or t
tttntgcaggttagggggnctgattaatgttcccttnccttacaaacagctanagaaaaaatctcatnaaaaattgganacctntacttcctttaactttcctactcaatggtagganataggaatatnttccccaaaaaatttctactnctcttntccttggctntgatccctatacatantntnaatttatatccaggtttcccnggntcaatattnacaagacgactttggcatctgaattgttttaatatctttactc

SEQ ID NO: 707281 - DNA, 1067 bp, Homo sapiens
  misc_feature (749)..(749): n is a, c, g, or t
  misc_feature (804)..(804): n is a, c, g, or t
  misc_feature (813)..(813): n is a, c, g, or t
  misc_feature (829)..(829): n is a, c, g, or t
  misc_feature (832)..(832): n is a, c, g, or t
  misc_feature (835)..(835): n is a, c, g, or t
  misc_feature (839)..(839): n is a, c, g, or t
  misc_feature (847)..(850): n is a, c, g, or t
  misc_feature (863)..(864): n is a, c, g, or t
  misc_feature (872)..(872): n is a, c, g, or t
ggaggctgcgcggtaccggtccggtgagccgagatccgggcctgggagctccttaccccggccaggcgcccctccccggagactgaccctctcagtagcatccccgtcctgcatgtaatcatgatgctgaggtcagcggtcaactgagctgtctccagaccttgacctccgcgattcctgagctctagagtacagacccggccgggatacgctgttctgtgcggtctccagtgggaggtcgaaccccgttctagcccgttcatcgcgctgacagcttgtaccccccgtagatggggcgcttctcctcggggcctccagcctgagtgggcgctgctgggccggctccctctggctttttaaggacccctgtgccgcccccaacgaaggcttctgctccgccggagtccaaacggaggctggagtggctgacctcacttgggttggggagagaggtattctagtggcctccgattcaggtgctgttgaattgtgggaactagatgagaatgagacacttattgtcagcaagttctgcaagtatgagcatgatgacattgtgtctacagtcagtgtcttgagctctggaacacaagctgtcagtggtagcaaagacatctgcatcaagggtttgggaccttgctcagcaggtggtactgagttcataccgagctcatgctgctcaggtcacttgtgttgctgcctctcctcaacaaggactctgtgttactttcatgcagcgaggacaatanaatttactctgggataccgctgtaccaagccagcatcacagattggctgcagtgngctggaacntctactcgctggttgnatnctnaggnaagtgagnnnnggcttggtgatgnnatgggcangtcctgtgacccagattacgctgggttggggtcatgaatcccagttgatgggggtgttcccacgggcttactggccccagaacaggcagtgggcgaactatgatttacgaacccagttggagagtggactcatcctcaatgggaaggtcaggacacaccggtcgtgtacacggcgctatcaggtgttttagcagc

SEQ ID NO: 707282 - DNA, 776 bp, Homo sapiens
  misc_feature (224)..(224): n is a, c, g, or t
  misc_feature (694)..(694): n is a, c, g, or t
  misc_feature (773)..(773): n is a, c, g, or t
agtcaagtaacgctgagagcctatcgcatgagggcgacagccggaaagcaggatggagcatagaagcattctcgcgagaagtagagttgcggttcctcgggagaggggcggaggctcagaggtgcaccacgtggggtttgctgccggagcggagtctccggccggcgtcagtttgagtctaggttggagttggaaccgtggagatgcggaaggaaaccccaccngccctagtgtgccgcgcgggccgggagtggaatcttcccccaaatgcgcccgcctgcatggaacggcggtggaggctgcgcggtaccggtccgatggggcgcttctcctcggggcctccagcctgagtgggcgctgctgggccggctccctctggctttttaaggacccctgtgccgcccccaacgaaggcttctgctccgccggagtccaaacggaggctggagtggctgacctcacttgggttggggagagaggtattctagtggcctccgattcaggtgctgttgaattgtgggaactagatgagaatgagacacttattgtcagcaagttctgcaagtatgagcatgatgacattgtgtctacagtcagtgtcttgagctctggaacacaagctgtcagtggtagcaaagacatctgcatcaagggtttgggaccttgctcagcaggtggtactgagttcataaanacattattttttttttttttttttttttttttcaagagaagagagtccgagagcgcgggagggaggcagcacgcccacnggc

SEQ ID NO: 707283 - DNA, 374 bp, Homo sapiens
tctcacggaacgtgacacagtgttcagagttctcttagtaaatgcttcatttcaaagcatacatctcttccaacatattacaatgaaaggacaacagtcttttgtttttcctttattattattatgactcatttttttggagagctgagaatctctggtaacatagttacagatgttggcccagattaaaatgatgtcttttcacaaacagtcaaatatctgaagtatttgacagaggatacacaacactttcagattcttcacacggtgtgataacatttatcatagtacctctgtgataaaaccagcattatgcaaatgaacagactctgtattccacgatcattcatacttacctctaagttcaaaacgta

SEQ ID NO: 707284 - DNA, 1105 bp, Homo sapiens
  misc_feature (787)..(787): n is a, c, g, or t
  misc_feature (842)..(842): n is a, c, g, or t
  misc_feature (851)..(851): n is a, c, g, or t
  misc_feature (867)..(867): n is a, c, g, or t
  misc_feature (870)..(870): n is a, c, g, or t
  misc_feature (873)..(873): n is a, c, g, or t
  misc_feature (877)..(877): n is a, c, g, or t
  misc_feature (885)..(888): n is a, c, g, or t
  misc_feature (901)..(902): n is a, c, g, or t
  misc_feature (910)..(910): n is a, c, g, or t
agtcaagtaacgctgagagcctatcgcatgagggcgacagccggaaagcaggatggagcatagaagcattctcgcgagaagtagagttgcggttcctcgggagaggggcggaggctcagaggtgcaccacgtggggtttgctgccggagcggagtctccggccggcgtcagtttgagtctaggttggagttggaaccgtggagatgcggaaggaaaccccactgatctagggaattcggcagcgctgaaagtcgtggtcttcccgctaatgaccgtgcctatctgtgtcacgtagagttaggcggcatagcgctcgatacgcgtgtcgatggggcgcttctcctcggggcctccagcctgagtgggcgctgctgggccggctccctctggctttttaaggacccctgtgccgcccccaacgaaggcttctgctccgccggagtccaaacggaggctggagtggctgacctcacttgggttggggagagaggtattctagtggcctccgattcaggtgctgttgaattgtgggaactagatgagaatgagacacttattgtcagcaagttctgcaagtatgagcatgatgacattgtgtctacagtcagtgtcttgagctctggaacacaagctgtcagtggtagcaaagacatctgcatcaagggtttgggaccttgctcagcaggtggtactgagttcataccgagctcatgctgctcaggtcacttgtgttgctgcctctcctcaacaaggactctgtgttactttcatgcagcgaggacaatanaatttactctgggataccgctgtaccaagccagcatcacagattggctgcagtgngctggaacntctactcgctggttgnatnctnaggnaagtgagnnnnggcttggtgatgnnatgggcangtcctgtgacccagattacgctgggttggggtcatgaatcccagttgatgggggtgttcccacgggcttactggccccagaacaggcagtgggcgaactatgatttacgaacccagttggagagtggactcatcctcaatgggaaggtcaggacacaccggtcgtgtacacggcgctatcaggtgttttagcagc

SEQ ID NO: 707285 - DNA, 389 bp, Homo sapiens
gcatgccgacactagaggatacccttcatttacgcaataaagtataggcgatagaaattgataacctggcgcgatagatatgtagccgcatggcgaatgatgaaaacattatatccaggcatattatagcaaggtactaacccctataccttctgcataatgaatcagctagaaataactttgcaaggagagccaaagctcagacccccgaaaccagactagctacctcagaacagctaagagagcacaccccgtctatgtagtcacaatagtgtgaagattcatcggtcgaggcgacgaacctaccgagccgggcgatggctggttgtccatgatagaatcttagttcaactttaaatttgcctatatcaagggtaccgagcgcgaat

SEQ ID NO: 707286 - DNA, 1074 bp, Homo sapiens
  misc_feature (756)..(756): n is a, c, g, or t
  misc_feature (811)..(811): n is a, c, g, or t
  misc_feature (820)..(820): n is a, c, g, or t
  misc_feature (836)..(836): n is a, c, g, or t
  misc_feature (839)..(839): n is a, c, g, or t
  misc_feature (842)..(842): n is a, c, g, or t
  misc_feature (846)..(846): n is a, c, g, or t
  misc_feature (854)..(857): n is a, c, g, or t
  misc_feature (870)..(871): n is a, c, g, or t
  misc_feature (879)..(879): n is a, c, g, or t
agtcaagtaacgctgagagcctatcgcatgagggcgacagccggaaagcaggatggagcatagaagcattctcgcgagaagtagagttgcggttcctcgggagaggggcggaggctcagaggtgcaccacgtggggtttgctgccggagcggagtctccggccggcgtcagtttgagtctaggttggagttggaaccgtggagatgcggaaggaaaccccacgtgcgtatgcgaggggccgatggaggaacgcaatgacggtggtgcgtagttggaggctgcgcgtttccggtgcagatggggcgcttctcctcggggcctccagcctgagtgggcgctgctgggccggctccctctggctttttaaggacccctgtgccgcccccaacgaaggcttctgctccgccggagtccaaacggaggctggagtggctgacctcacttgggttggggagagaggtattctagtggcctccgattcaggtgctgttgaattgtgggaactagatgagaatgagacacttattgtcagcaagttctgcaagtatgagcatgatgacattgtgtctacagtcagtgtcttgagctctggaacacaagctgtcagtggtagcaaagacatctgcatcaagggtttgggaccttgctcagcaggtggtactgagttcataccgagctcatgctgctcaggtcacttgtgttgctgcctctcctcaacaaggactctgtgttactttcatgcagcgaggacaatanaatttactctgggataccgctgtaccaagccagcatcacagattggctgcagtgngctggaacntctactcgctggttgnatnctnaggnaagtgagnnnnggcttggtgatgnnatgggcangtcctgtgacccagattacgctgggttggggtcatgaatcccagttgatgggggtgttcccacgggcttactggccccagaacaggcagtgggcgaactatgatttacgaacccagttggagagtggactcatcctcaatgggaaggtcaggacacaccggtcgtgtacacggcgctatcaggtgttttagcagc

SEQ ID NO: 707287 - DNA, 424 bp, Homo sapiens
ttcttcctgtcacttccttcctctggtattcctggtacgcgcaccaggcccaggtggccgaggaactggccgagcgcggccgcatcctggcgcgcgcgctggccgagaccagcgaatacaacgtgatctccggcaacctcaccgacctgcgcctgaccatcaacggcctggtgcagtccgacaaaagcatctaccgcatcgacgtggtcgacgccacgggcaagcgcgccgtgcgcgtgacctccgagagcgcggcggacgccgagccgcattactacgaagcgccgatccgcaagcaggtggtgtggatcaacctgttcaccgacaacggcatcccgcacgtctcggcctccagcgacacgcgcccgccgacgctgaccaccgaagtggtgggcgcggtgcgcgtgaccatgtcgccggcgaa

SEQ ID NO: 707288 - DNA, 667 bp, Homo sapiens
  misc_feature (545)..(545): n is a, c, g, or t
  misc_feature (667)..(667): n is a, c, g, or t
gtccatagaccgtagacgctgatagcaatctctagcctaattctatatgcacactataaatgttccactgatcgcgatatctggtagacgtactagagaacacagacagggaacgtctttcataactgattagaataacgtcattgtacagaagtgcggcatgattacgaggcaatatctaaagctaaagatcataagccgcatgtggactaaatgagatgatgtactagtgcaatggattgctgatataagaggatcacactcagacactagcatgaaagcaagaatagataccagttcaccttcagacaactgtactatggcatgactagagcgaatcccacgcaatcagatcgagaatcatattgatgaaagtagcaagagtccaaaggaggtctgaatatggagaggtactggtcttctggacaacctgaagacccttgaccagaattctgactgagctgatgactacatgctgaatatgcatgatagatcatctacagatatacgccatcctccaaactaatcgacactgaactaccgtngactggctcacatactcagtcactgtgtagtgctatgttgcatacttgaaatatattgatgatgtgatgatagtgcacttgactgcccactgttcaggacatgatactactgctacagtgtn

SEQ ID NO: 707289 - DNA, 857 bp, Homo sapiens
gtcccgtccggcgcttgggccagagtggtgcggacggcgcgtgggggatccccacgtgatgtgtttctcacgctagccctctttggtcctccttgacgtcccgggcctgtgggcccgctttctgccgagatgccgaaggtcaagtcgggggccatcggcctgcctgcgcgggcgagaaggagcagctgccgggagctgaaagagcgctgagaggactcatgttcaacacggggattggggcagcacattttgaaaaatcctctcattataaacagcattatcgataaggctgtcttaagaaccaactgatgtagttgcctggacagttgtggacctggaactgggcaacatgacgtgtaaacctggtacagacaaggcaccaaaggttgtttgcttgttgaaactggaccccaaggctaaggtagctgaacttcacaaaagagttcaggggcacgccctgtggccagcaaacttcaagtactggtgggttgatgtgctgaaaaacagatttggccattgcttttgataactgtgtggtgggcaaaatgtggccttatcaggatctcgttcgcccttttgggtccttcaaagcctgttgctaacatcgaaccttatctcgcagggtgtgcaataacttattgttttcccaacgagaagtttgcccctccgacttggtttgcaaaccctgaagataagttaaaacggcagacttctcatttaatacccagctgttggccgtgtggccccatctatgaacgtgggcacgaatatttggaccccgcccagggtgacccagtgttggacggtaaacctaaatcgcggccacaataattcaagaaggaggcagaaggaaaccg

SEQ ID NO: 707290 - DNA, 236 bp, Homo sapiens
gaagcgcctggtggccgcgtccaccaagaagaagaaaggcagcaagaaggtgacacccaaaccggcatccacgggccccgaccccctggtccagcaacgcaaccgcgagaaccttctccgcaagggccgggatccccccgacggcggcggcaccgccaagcccctggcggtgccagtgcccaccgtgcccgcggctgccgccacctgcgagccaccgtcggggggcagcgcggccg

SEQ ID NO: 707291 - DNA, 437 bp, Homo sapiens
agaacgacctccatctcccaggttcaaactattattcgtgcctatatcctcccgaagtagctagggattacaggtgtagagccaagtaaggctaggctgttctcgaattcctggcctcaaatgatctaccactgcctagtcctcccaaagtgccaggattacaggtgtgagccactgcgatcggcctttgattttctttctaattctatccattgttgagagttgggtgtcataatctccaactttagttctggatatagtctaactcttctttcattgtgtcagtctttagcgttacattactattgcagctctagattgctaattctggctggagagactcttttatcattacataatgtccttctctgtctctggtaattttcttggctcaggtctagtatatccactttatagctctgcctggtttcttttga

SEQ ID NO: 707292 - DNA, 563 bp, Homo sapiens
aaaacctctttccctatgggtgtaaatcacatcgtggcccccttaacggtagaaaccttgggttttaattcccatgaaaacatggaattttttaaacttaatcccttctttaacaggaaaaatgcaaatcccttcatatccccccaccaaaaatggaaaaactaaagtccaaaaaaggttccgaaaacgctttaaacctgtccccaagcccaatagggaaacctgtaatgactacaaactttgggaacgataccccatggtttatggaaacaatgctgccaataatcggtatttcaggaaaccccaaggggccaaattagactgagggaaaaaaaaaaatctctttttttttgaaagcgggcccctaattttgtatccccctgtaaaaacatttctgaaatacatagggttatatacaaaggttttttccgggaaattctcttgtctgggtgcacccttttttccgcccccaaattttaagtaatgaaaatgccctccagttagggtcaaaaaaaagtccacatatgtgattgttccataataaacttcggggggaaaacttt

SEQ ID NO: 707293 - DNA, 358 bp, Homo sapiens
  misc_feature (314)..(315): n is a, c, g, or t
gacgcctcgaagtcctcgaaggtgcagaagtggatgttcggcgtgttgtaccaggtgtacgggaggaattccgaaaccggcatccgacccttgctcgccaggtaccagcggcacgccagtgaccgaagttggggaaggtgatgatgcactggcgcccgacccggagcatttcgtcgaggatcttgtccgggtagtgcacggcatgcagggcctgggtcatgaccacgatatcgaagctgttgctggcaaagttgccgaggcccttgtccaggtcctgctcgatgacgttgatgcccttggccacgcaggtcganntgttctccgggtcgttttccaggccgtagcggtagagtcgacg

SEQ ID NO: 707294 - DNA, 628 bp, Homo sapiens
  misc_feature (22)..(22): n is a, c, g, or t
  misc_feature (60)..(60): n is a, c, g, or t
  misc_feature (67)..(67): n is a, c, g, or t
  misc_feature (148)..(148): n is a, c, g, or t
  misc_feature (153)..(153): n is a, c, g, or t
  misc_feature (179)..(179): n is a, c, g, or t
cttctcttatgcttggacaggnccaccagagggtttgtttagcagtaaacacccagtgtnttgggangatgcttgttgcaaagtggaccatgtctagcagtagcatcagtgtcaagggaaaacacccataattagcagattgggaaanggacntccctttccccggggggtttagagangatactcctccacctcttgtggagggcctgacatcagtcaggccccggcccgcagttatcccagaggcctgtctccctgtgatgctgtgcttcagtggtcacgctcctagtccgctttcatgttccatcctgtatacctggctctgccttttagatagcaggagcaaattagtgaaagtactaaatgtctgatatgcagaaataatggcataagctgtctctctctcttctctctctctctgcctctgcagccaggcagggaagggccccctgtccagtggacacatgacccatgtgaccttacctattattggagatggttcacattccttaccctgcccctttgtcttatatccaataaatatcagtgcagcccggcatttggggccactactggtctccgcgtcttggtggtagtggtcccccaggcccgggtgtcttttctttta

SEQ ID NO: 707295 - DNA, 818 bp, Homo sapiens
gactggcttcctgtgctccctcagtttgcagttggcctatcgtgggacttcaccttgtgatcatgacatctccaagaacttcgttcactgaagtcttaaacccctcacagtgacccatgaggattggaatcagcttctttcaaactcttactattgttgatattttgatcgcttcctatgaatcgtgaatattttaatgacatctaaaatgtgactcctggccgggcacagtggttcacgcctataatcccagcaccttggtaggtcaaggcgagaggatcatttgaggttagaagtttgagaccaacctgaccaacatggtgaaaccctgtctctactaaaaatagtaaaaattagctgggcgtggtggagaatgcctgtaatttgagctatatgggatactcagccaggagaatcgcttgaacctgggaggtggagattgcagtgagccgagatcgcgccactgcactccagcctgggtaacaaagtgagactccacctcaaaataaatacataaataaacataaaataacaatggtgtctcctttccagttttcaactttactttgcccaagatctatcataggaattgttgcctatggcatctacagccttatgaaatgtatttcttaagttataagacttaacaagttgaaattacccctttaattcataggctgcaggatggatgctgtgttatcaggcatagaaacaatagtatctacttgttacttctccattagggatcttggggtgaccagatgcattggcaatggaccaatatattttcaaatgaatctttaactattagatctcaa

SEQ ID NO: 707296 - DNA, 251 bp, Homo sapiens
ccccccctgccggggccgggacccaattttcaacaaatttggttcccccagggccgggacatcccgggccattggggggggttgtttttaggggggtttcccccttccccccgggccttggggttcaacccccccaggaggggggccgttcggcccgggttctttaaagggattcccgggtttgggggggagggggccccccctttttcccttagggcccgggcaataaagcggggggtttttccccccca

SEQ ID NO: 707297 - DNA, 749 bp, Homo sapiens
agcgggactacaggcatgcgccaccacacctagctaatttttgtatttttaacagagacagggtttcaccatcttggccaggctggtcccaaattcctcacctcaagtgatcctcccgcctcagcctcccaacatttgtatacttttggaagtcacacatcttcctgaaaagtggatagaagttttcaaccttcttcgcaggatggagggcagacacagaacttcaacacagtgacaggggcttcaaacgactaagttccgtccaggtacccttggagatgtgtgctgctgcgtggaagatgactgagcatgagacacgcagtgcccgaccgcgtggagcctacgtcctagagaggaggcacaggaacaccagacacgagaacgggaactgagtcaccagcggggaacgacagaccttatccaaggagcttcactaagaaacagaactgattacaagggaagaacatgtggtcgtctttacggcaagtcacacaaacgaatatgatgtgcctctggggtaaccaaaggcaggcttcccctgaggaagtgacccctgcaactgagcacttacagagtgattcagagttaatgcgatcatacagcccgagactggaagaatcagcatgtgccacacgtccagaagaaacgtacagcgagaccagcacagaccaaccagcccagagaggagccccacgtcctttagggtgagccacaggctgacctaaggagatccacaacatggctgccag

SEQ ID NO: 707298 - DNA, 176 bp, Homo sapiens
gaggtgagaggagatatcgtgggctatcgctatccatacatgggacagacctagttcaatgaatctgagtacgctactcagtagacagtcccaccctcacacgattctttacctttcacttcatcttgcccttcactattgcagcccttagcagggtaccagagctcgacattcgt

SEQ ID NO: 707299 - DNA, 163 bp, Homo sapiens
atctagaggtccctggtgcatgatgtggggcttctacgaggcagctgcgagtgcgggcaggtcacagattcacacgggctatgctatgcaggcttctacgacggcaaccgtgagtgcgtgcatgttcacagattcacacgggctatgcttatccatgcttcta

SEQ ID NO: 707300 - DNA, 491 bp, Homo sapiens
gatttcaaaaataactgaaaattgagataagaattctgagtacgaattgactaggcaggaaaggctttctttccaagagaaggcagcagcagcacctggtctcagagagcttccacagtgtcggcgacaaaaaggcagcagcttgtgcttggaaatggaaagaggcttgtatgagctcatctctcttctttttaaacatttttcatttattattgggtaactttttgtatatatattatctgggatttacacgtggaattgaccttgcagtatgaggagggagctcaaacttgttgaccacaggccttgtgccaagaaccagctgagtggttgatgtataatgtttccctggatccccagccatcagagagctgctgcccactgtccctagcttcgggccttctaaagggcctgggctggaagtactgtgaagaatagacacggagtcaggattgtgtatagaagtgaactagcaaaataaataaataaat

SEQ ID NO: 707301 - DNA, 607 bp, Homo sapiens
  misc_feature (330)..(330): n is a, c, g, or t
gtctggaatcagaggatgtatggaagtgcctggatgtctgggcagaagtctgctgcagtggtggagcccttatggaaaacatctgctagggcactgtggaagggaaatgtggggttggacccatcccatgcagagtccccactgtgcatggcctaacagagctgtaagaagagggctgctgtcgtccagtccacagaatggtagatccaacagcttgcaccatgtgcctagaaaagccacagacactcagtgcaagcccatgtgccagccaggaggggagctgtaccctgcaaaggcacagggatggagctgtccaaggccatgggagcncacgtcttgcatcaagtgacctggatgtgagacaaggtagagccgagctgggtctaccttgtttaaggtgatctgcccaccttcggctcccaaagtgctgggattataggcatgagcaagcaatacccaagccagtttcatttattttcataataggttatgaagtagtgatgtaatggttaaaagtcatcatcacatagtgtgtaaagatattggaattatgcgagaaatctggcaatcatctcttagatcagatggtaaaaaaggggacaaaaca

SEQ ID NO: 707302 - DNA, 577 bp, Homo sapiens
ccccggtctcacttctgaatccatatacaatttggattgtacagggacttataattttactggagctgggactgtggacacaactgtatataacctttaagtgctgagatactttagatatttgagctatgttgcaagaaacatgtcgtgatgtgtacataggagaattgtctcaagttatttattcagtagaggtagccagttaaagtcaaagtcttaacatcttgctgccagtttttatttgttgaatttattcaccaaatattaaatactacatgggcagcacaggactgggtaacccaacagtgaaccaagcaggcagtttacccaccaccaagaaacttctagtggagaagagagagtgaaatggaattaatcaagcagtgataagtgctgtaagggcataaaactagttgcagagtttttgggtacgttggtaagttggtcaggaaatgaaatgcagaagtgagccttgcagttgttacaggcaggatgaaccagaagcctggcagattaaagtaatagtaacaaagccagtgtgtctggggtatagtgttctgggaggaatgcatgagat

SEQ ID NO: 707303 - DNA, 954 bp, Homo sapiens
ctcaggcattgttgtaaagtgccatcagacaagatcagttgatcagaacagaaagctagctcggaaaatcctacaagagaaagtagactgttttctacaatggtgaaaacagtcctgttcacaaacgaaacaacgacgaacgcgagcgtaacaacacaaacacaacgaacaggcaacaacacaacgagcaagaggcaaaccctgcgaaaaaaaagaagctacttaacagaactgtgggcagtcaagtaaaaaggtccactgcagaacaacgaattagagattccaactgacagaatctgccagaagctcccagggaactaactggtggcgagcttccatcaccagcattattatagctgcttcaacaacgaaactatttctcgcatgaaacttaacacagcacacaaacaattctatttaacatggtgcactaaactgtagtgaacagagcacatgcacgattcaagaataaaactcggccgggcacggtggacggtgcctcacatctgtaatcccagcacttcgggaggccgaggcgggcggatcacttgaggtcaggagtttgagaccagcctggccaacatggtgaaaccccgtctctactaaaaatacaaaaaattagccaggcatggtggcgggcacctgtaatcccagctactcgggaggccgaggcaggagaatcgcgtgaacctgggaggcggaggttgcagtgagctgagatcgcgcactgcactccagctgggcaaactgggtgacacgagcgagacccagtctcaaacaacacaattacactaggtcacgtgaatgaccacgcctaatatccagaccttggaacgcataacaggaacactcccttgagcccagagtcaaattcgacaccataaacccagtgtccgcgtccacggccggattaaaaaaaaccgttcaaaaacaaatacataaccgtgtacaact

SEQ ID NO: 707304 - DNA, 903 bp, Homo sapiens
cttataaatggcagcatatcttgttaaacctccctccccaaatactctctgaaagtcatgcagatacctatgggattttacacacacacgcagctttaaaatgctatgtctctatgccatcagaatatacgtcatatattctattgtattaacggcaagcgaactaatgaaatagaacataaacacttcttcctagtagggatttcctagataccatgtatctaattcctcccattatgggcagatataggtgtttcgctttatatctgtattatactcttatctattagagcaaaataccattgaaagcctattgaactacttgacagatagtgatttggcaatggattacaggtctgactgtattcacttaatttcacatgtcgtatcgtgagaacgtatctcttgtataatgtgcattaccaagaatgccagcacagtttacatgatggcctactaacaaggtaaaacagagcatttcattctataacaaagatagctctggaatattgccttccttctgataaatattagaacatatcttgcagagacttcgggtggtcctgccacatgacctacattaactaggagtagagctaccaggatcgacatgcagtccgttattgacagtctagtcaaggagaccagaccactgcttgctaatatcccacttagagcgcaaagaacaattaaacctcagcaatcacggtaactctgtggcatcgttcgatgacccatatggtatctagtcagaacacggggtctaatccaacaagccgacattaacagatttgggttccctcaggttgaccgaaactgcacacccactatttcccatgctgtcatgctatcaggccttacagtcctccgtacagccccaatatttgacttacagacacaaaa

SEQ ID NO: 707305 - DNA, 163 bp, Homo sapiens
ccagcgacatttgtgatacttttctcaatacctgccaatactagataatagttctgtattggcaggtattggagaaaagtaaatcccaattcggtggccaatttttctctagttggaagactcccttttgcaatcctagaagtaggtatggacaggagggcac

SEQ ID NO: 707306 - DNA, 179 bp, Homo sapiens
atttgcccggccctgtttttcccccccggaaagtttttaaagagggggaaactccgggtcctctttgggggggggggggtttccaccccccccgttgtttcctttttgaccggtccaccccccgggtttttggggttgggggaaaaagggccccgggaccccccctccccgttttttta

SEQ ID NO: 707307 - DNA, 262 bp, Homo sapiens
ctcccctgacaagcaaaagctgaggaaattcatcaccattagaccaccctacacgaaatgctcaagggaattctaaacctggaagcaaaaggatgacatttgccaccatgaaaacatacaaaagtacaaaactcactggagtaaagcaaatacacaaagtaagaagaaagagaaaggactcaaaccacccctacagaaaaccacaaaaccacaacgacaaaaagaaaggaaaagaaagaatatacacaaacaactcagaaaa

SEQ ID NO: 707308 - DNA, 155 bp, Homo sapiens
  misc_feature (155)..(155): n is a, c, g, or t
ggcgaggcgggcgctgcggcccagcaagtcccttttggtggcgaccgacgatggacagagcaattggcagttttggaacgaggagaaggccttcgcaggcctcgggaggcttcggcccccccgggcaattcgggggaattttcagggcagaaatn

SEQ ID NO: 707309 - DNA, 373 bp, Homo sapiens
attgtgtaaaaacatggatttgaaggcagattaaggtatcaatctcagctcagcacaatcaatatgtgactttaggtgagctgcttaaattagcctcagtttatctcatctgtcaaatggggctataacaccacccaattcccaagcttatggggaggttaaatgagactgtgcttggctccatggctctcctctgctgctcattgtccatctgacccatcttgtcaagagatcaagaccatcctggccaacacggtgaaaacccgtctccaccataaatacaaaaaagttagccaggcgtggtggcgggcgcctatagtcccagctgatcgcacgaggctggcagattcccagtggatacggtgggtgatct

SEQ ID NO: 707310 - DNA, 482 bp, Homo sapiens
tatgtatgtgctccgattgtccaggcttttgatccacgctatgctccaagtcctcatcgcgcgcaccagcgtggccattgagcacctaccaggagtttgatagatacctatatcccatagaggacgcagacgtattcattcctggcatgactccacagaagactccttctgcttgtcagtactctattccgacaccctccaagcatggaggaaacgctacagaaatccaatctatagctgtctccgcatctccctgctgctcatcgagtcgtggctggagcccgtgcgtgttcctctaggagtatgttcggccgacaacctggtgtatgacacctcggacagcgatgactatcacctcctaaaggacctagaggaaggcatccaaacgctgatggggaggctggaagacggcagccgccggactgggcagatcctcaagcagacctacagcaagtttgacacaaactcgcacattcttccaa

SEQ ID NO: 707311 - DNA, 129 bp, Homo sapiens
gaagagtcgactgctataggatcccccatcgcaaggatgagaaacggaatagagtcaagttctgaagattatacctgaagaagttactgggagctgctattttatattatgactgcatatatgttaaga

SEQ ID NO: 707312 - DNA, 103 bp, Homo sapiens
cagagtcaacagtgccagtgattctaaaactggggttcctgcttcctagggagtgcatgatgcccaggcagacatggcactctttttctagcttgtgcatttt

SEQ ID NO: 707313 - DNA, 312 bp, Homo sapiens
tatcaggtgctgccatccaggttcagcttgtaaatagctcaggtgtcaccctgcaagggatccctgcacttgcagactctgacagagccatgggcctcctgtgtgtgtggctacaggattgagcactgaggtgtgctctgatcatccactgtgccatgtgccaggtttttggtctgacccactgcttttggtctgtgtgatgatgaaatgaggtcagagcctgcagttattaacactaacgatttgttaatgatagctactgtttattattttatttaatttttttgagacagagttttcactccagcctgg

SEQ ID NO: 707314 - DNA, 857 bp, Homo sapiens
taatttccggatgtgtagtagtatatcctgggttttaccatcttgtccatggttgtttctttgaattcccgtggacattcatattgattctgctcgtcctcagccttcccctagctgctgtggattcactcggtattgtaggcctaccgatgcctctgtcccaatatcgtccttgacatattaacttgcgattctacctttatgttcttcatccagcgagaggtttccttctttttgtgctattatagtatggcctataacccaggatgctaaccgtttcctgtgttcatgtctgattgtcatactgcatctgtcttgtttaacacgacgatttatagctaacgttgtgacaacgtataggtacctatgtaggatactatgtctagggaaatgaaagcttggaatattgtctttgtccatttaatatgatgtaatatatttcatgtattcatttcctgtctcatagttgtattttcatggttattttggtttcctatgttgcctactgctaatggtttggatttggtttgtttgtcctctatcaaaactcatagttgaaatcttgatctaccaatgtggcggtacttgggagctggggcctagtgggagtcgtctggatcatgggggcagatccctcataaatggcttgatgcccttcacgtggtagtgagtgagttctcattctggcaaaactggatcagttcctgtggaaatgagttcccatgaaagggggttgttataaagccaggatgctcctcgggattttctatcttagcagttacccacttcccctgggaccttctcggccatgttgtggcacagctttataaagccctccaatagcaccagggctgcag

SEQ ID NO: 707315 - DNA, 599 bp, Homo sapiens
tcatgttcatttcacaaatgcaaaaactgaggttcagggagactgaccaggccaagcagaacagctaggaagaggcaaggctgaagcgcgaaccaaagcccgttttcctctgcctctgcccttcccttccagtgcctggtgggattgcagctgagtccctaaccttcactccactggaggacatgatctttctcaagtgggaggagccccaggagcccaatggcctcatcactcagtatgagatcagctaccaaagcattgagtcctcagacccagcagtgaacgtgcccggcccgagacgcaccatctccaaactccggaatgagacttaccacgtcttctccaacctgcatcccggcaccacgtatctgttctccgtgcgtgctcggacgagcaagggcttcggccaggcggctctcactgagataaccaccaacatctcagctcccagctttgattatgccgacatgccgtcacccctgggcgagtccgagaacaccatcactgtgctgttgaggccggcccagggccgaggagcccccatcagcgtctaccaggtggttgtggaggaagagcggccacggcgcttgcggcgggag

SEQ ID NO: 707316 - DNA, 878 bp, Homo sapiens
  misc_feature (40)..(40): n is a, c, g, or t
  misc_feature (69)..(69): n is a, c, g, or t
  misc_feature (87)..(87): n is a, c, g, or t
  misc_feature (93)..(94): n is a, c, g, or t
  misc_feature (150)..(150): n is a, c, g, or t
  misc_feature (169)..(169): n is a, c, g, or t
  misc_feature (191)..(191): n is a, c, g, or t
  misc_feature (195)..(195): n is a, c, g, or t
  misc_feature (237)..(237): n is a, c, g, or t
  misc_feature (251)..(251): n is a, c, g, or t
  misc_feature (254)..(254): n is a, c, g, or t
  misc_feature (277)..(277): n is a, c, g, or t
  misc_feature (285)..(285): n is a, c, g, or t
  misc_feature (309)..(309): n is a, c, g, or t
  misc_feature (314)..(314): n is a, c, g, or t
  misc_feature (323)..(323): n is a, c, g, or t
  misc_feature (349)..(349): n is a, c, g, or t
  misc_feature (392)..(392): n is a, c, g, or t
  misc_feature (399)..(399): n is a, c, g, or t
  misc_feature (407)..(407): n is a, c, g, or t
  misc_feature (475)..(475): n is a, c, g, or t
  misc_feature (518)..(518): n is a, c, g, or t
  misc_feature (552)..(552): n is a, c, g, or t
  misc_feature (557)..(557): n is a, c, g, or t
  misc_feature (592)..(592): n is a, c, g, or t
  misc_feature (599)..(599): n is a, c, g, or t
  misc_feature (603)..(603): n is a, c, g, or t
  misc_feature (625)..(625): n is a, c, g, or t
  misc_feature (679)..(679): n is a, c, g, or t
  misc_feature (711)..(711): n is a, c, g, or t
  misc_feature (738)..(738): n is a, c, g, or t
  misc_feature (749)..(750): n is a, c, g, or t
  misc_feature (754)..(755): n is a, c, g, or t
  misc_feature (758)..(758): n is a, c, g, or t
  misc_feature (771)..(771): n is a, c, g, or t
  misc_feature (875)..(875): n is a, c, g, or t
cactactgggcagggaagacagagtagccactgtatgcanaggggataagcagcagccggtacaccagnggcaggtgccgctccacnaacacnngcagtaagacttggtcagtgaccaggccctgccgccgcatcagcagcaccaggtcntctagcttcacagtcttgnggccagcatgaacagcaaatanctcnagatcatcacaaagatgcaggaaatatatatcaaggcacttntccaccatctcaanagncttcctctccatgggcatcttancatagaancaaaagagtttcacaaaatagatnaaaanaaactatanggggatcttgccggggactggggccngtggtccggggacctagggggatgcctgaccaacagaggctcngcaagcnctgaaganaaaaatgcaacaccaggcgctggggctggctcaagaaactgatgatgtcgcctggcctggagagactnaggggtgctggaggccgactctggacttgctgccctgccagangcatcctcatcccctgaagatgctcctggcccgncagcntcagcagtaccctgggatccctctgcttctgtcanctctgtntgtncctcagcctcttctaccctgcngggtccttgtgctcctgtagcctccatttcactcacactcacaccttcttcttncatctttttctctgcctcttcaactccatcgngtaagggctctacttcatcttctccanagaaaccactnntggnnctnaggaagcccagancaaaggcattgacctcctctgcctctcctgccagacactgggcatggtttcccagggctattcttctgcagcccaggcccactgctctgtgtcttgcgaccggnagc

SEQ ID NO: 707317 - DNA, 125 bp, Homo sapiens
ccgagctgaggacggtggctcatgtggcattgggcatttatataccacttggagggcaggctgtggcttctggagcaggtggcttgtaaggaatgtagcaggcatgcacgtgagctccggaatag

SEQ ID NO: 707318 - DNA, 308 bp, Homo sapiens
tgtaccggagctacagttgcaggcacacgcacagtcacagcaatgccagatccaagccatatctgtgacctacgccacagcttggtgcaacacaggaccctttacccactgacgaggccaggcatcgaacccacatcctcatagataccagtcaaccacaatgggaactccagcagtcattgtttaataaatacaaagtttcaattttgcaagaggaaataaattctggagatggacagctgcacaaaatatgaatgtacttagtatcactgaactgtgcccttaaaaatgttcaagaagttaagttt

SEQ ID NO: 707319 - DNA, 262 bp, Homo sapiens
ccttggggggggggggggggcctttttccccaaccctttttgggggggaagggccgggggggaccccaaaaatttaccccccccgggggtttgttttttttccccggtggggggggccccccaaaccctttgggggggggggtttttttttggggggccctgggttttttatttttgggggttttcccccgttttggggggttttttccccctttttctttcccccggcccaagggcggggccttccccccgggccctttta

SEQ ID NO: 707320 - DNA, 591 bp, Homo sapiens
gactacgacttacagatccctgatgaacacagatgctacaatccattaacaaaatactagctaactgaatctaacgaacatatcaaacagatactccaccatgattaagtgggttacatatcagggatgcaggaatggtttaacatatgcaagtcaatggatgtgatacaccacaaaaacagaattaaaaaccaaaatcacatgatcatctcaataaatggagaaaaagcatttgatacaatccagcatccctttatgatgaaaactctcagcaaaataggcatacaagggacatacctcaatgtaataaaagccatctatgacaagcccacagccaacataatactgaattgggaaaagtggaaagcattccctctgagaactggaacaagacaaggatgcccactcttactactcttcttcaacatagtactggaagtcctagtcagagcaatcaaacaagagaaagaaataaagggcacccaaatcaatgaagaggaagtcggccgggtgtgctgactcacgcctatactcccctcactcatcaagtaatcccagcacttaggcaggccgaggtgagcggatcatgaa

SEQ ID NO: 707321 - DNA, 203 bp, Homo sapiens
  misc_feature (169)..(169): n is a, c, g, or t
  misc_feature (184)..(184): n is a, c, g, or t
  misc_feature (186)..(186): n is a, c, g, or t
  misc_feature (203)..(203): n is a, c, g, or t
ccgaagtagcccttttagatacccaagacattcgagaatattgagttatgatgattggttggaattttttgaccctttggagagcagccaaagctttttggtattaaaacttcagggacttcaaggaaaaatcaacttctttgccagagtgttggttttctaagtcttngaggagttaaaggangncttttttgggatatcan

SEQ ID NO: 707322 - DNA, 290 bp, Homo sapiens
aatatatagttttaccgcgatttgggtttcagaaatactggtcttactgtgtagccctcgctaaatacaaactcctgtgctctacatatcctcctgtctcacactcccaagtgctgtggctcaggtcatgcaactgtaccagctagttttcacttctttaaggtgcagtcatgtgaacatgaagataatagagaaagcctgtgttagacatttgcatttcatgggatagagccacatctgggctgtgtgctttctctcatgccacgcagggaaaccaggggaggagatgt

SEQ ID NO: 707323 - DNA, 1234 bp, Homo sapiens
gattgtgggtgaccagactgtgatttgccacggggggggggtttgtgtgagcgtcgttgctgcccgccgctcgtcccaacgggtttttaatttcgtcgaacgttgctcccagatagtttacggagttacgagaaattgaagagtgtcgagcgcgggataggcgggcactttgtttctcccaagaggcgtgaaccaagatggttgctgccgacacaaggtccagattgagggcgtctgggttagctcgggggatgggaggggggctgcgtttataaggggggcgctgccctttgtcccggttaaagtttgtgggggtattggcacggccacggcgaacacaatggggccccggcgatgtagaccaaatcggggtatacaccccacggtggtgtgcgtagtggggaaatgtttcccctccggcgagttaatataaagtggtgtgtagtatacagttttgtttggagccaagagagctttagactggacccgcactgggctccgcgcttttcgcttgtgccgcacgggtgctggtgtttgtgtttgtgaaagttttcttgggtgtggggaaaattggtatgggtgtaggcgtagataaatgtgtgtatgtttactagaaggggacgaagtgtatagccgctttatatgtctgtcttatgttaaatacatgttgttaatgtgtacagagggagaagagtgtatatagattagtgtcgcctgtgtataaaatttctgtgtagagtaaaaagagagatgtgtataattaaatgtagtgtaatgtattgttagaggggtgagattttatgccctttaatttcttttatttaatatttgtttgttagtggagccctgtctataaaggtagttgtttcttttgccttataaaacgtgtgataaccctcgggccggggcgtggttggctctaacaacctgttaaattccacgaacaccttctgggaagggccgaaggcgcggtgtgagttcaccgagggttcacgcgagagatcgaagaccactcctggctaagcaccggtgaaagccccgttctgtacttacacaataccaaaaattagcacgggcactaagtggcgggcgcctcgtagtgtccagctatacttcacggagggctcacggcacaggaggaattggcgtgaacccgggagacggagctttcggtgagctgagatctgcaccgcctgcaatccagcctgggcgacacaccaggaccccgtatcca

SEQ ID NO: 707324 - DNA, 1222 bp, Homo sapiens
  misc_feature (7)..(8): n is a, c, g, or t
  misc_feature (25)..(25): n is a, c, g, or t
  misc_feature (35)..(35): n is a, c, g, or t
  misc_feature (37)..(37): n is a, c, g, or t
  misc_feature (80)..(80): n is a, c, g, or t
  misc_feature (129)..(129): n is a, c, g, or t
  misc_feature (149)..(149): n is a, c, g, or t
  misc_feature (152)..(152): n is a, c, g, or t
  misc_feature (278)..(278): n is a, c, g, or t
  misc_feature (463)..(463): n is a, c, g, or t
  misc_feature (574)..(574): n is a, c, g, or t
  misc_feature (851)..(851): n is a, c, g, or t
  misc_feature (900)..(900): n is a, c, g, or t
  misc_feature (953)..(953): n is a, c, g, or t
  misc_feature (1011)..(1011): n is a, c, g, or t
  misc_feature (1090)..(1090): n is a, c, g, or t
  misc_feature (1093)..(1093): n is a, c, g, or t
  misc_feature (1141)..(1141): n is a, c, g, or t
  misc_feature (1194)..(1194): n is a, c, g, or t
  misc_feature (1222)..(1222): n is a, c, g, or t
tagaagnnaatatatatttttttgngtttttgtanantaaaagccaccaaagtgtgttggtccgccttatcattcccccntccgccttctcctccgctcgccgttgccccacctggtccgactcccctntgacattattttttttccancangaaaccccgcagccctcacctcgctgtctctcgcacgacaaggccacaccggtcaagtgaggcgagtccccccgcctcccccgacgagacacacgcctcccacagcccagcctcccctttagttcnccttcgtagcagaacagagccatccacacaccgatgaagcgacctcgcacccccgctcctcccttgcccaccggcgtcagtcaacacacacttcatggcactcttactgcgcacactcatagttttacattacgactgtctcagatcgcgtcagagaatgttatatctcctaattttttggagcnaggctatcttctcttacgcgcgttccttcgaattgagaaatcgacgcaccgcaggggagtcccagacatattcactcacccctatacattctctgcgacatggtgtgtttntcacacatgtggttatgagcaatatatatataagtgtgacgacgtaataccaccacgtaatcgccgttttccttcacaagctgtatcacacctccaccttctgcgtgcgtatcactctctcaatgcgtaccgcttgagattatgtaacaactggccacgattctgtttttctctatcactcctctactcgatttaattgttcctccaccgtccctcaaactcgcccgctactccacatatgctcatgacgagcctactgccaccttctcacagtctntccctcatagtgtatttccacattagacagtgccgttctgctgtcgagngagcagacgtttcacacattctgcgatgtgtcactggttatgtcatctgtatnagcgcgaattatcgcgataccgtcagagctcgctgcgacgctcatgtttcagtgtgcncactgtgacccgcatcgcggagcgtgatccttccactcgttcgaatatcagcaccgtccagtgtcgcaccagatcctanacnaatgagaacacagcggatacatgcaatagtgttgtgtgagtgatattntcgatctcttgtgtagttatgactctcgcgctgccgacagttggcgctgtacncaccatgtctcgcgttatgatgtcggtn

SEQ ID NO: 707325 - DNA, 215 bp, Homo sapiens
cacatccctgagtcaagctgttctcttctttacagcttcccaagtggctagagattataggcatgcaccaccatgcctggctagatttagagtataatatagtaaagacagagtttcaccgtgtagcccacggctggtatttgaacatcctaggactcacagcagtctagccctaccttggaccttgacaaagatgctacggacttacaggtgtg

SEQ ID NO: 707326 - DNA, 440 bp, Homo sapiens
acgcgcaccgcggtcaaatgcaggcgattcctgagaacgcctatccttaggagagtggcgatgaggacgaagacgagcctggacaaggcgcatctcgatctgctcctctgacaaacgaattgcctgtgaggaagagttctccgattctgaagaggagggagagggggtgagcaagaactcttccaacttcaaaaaagccaagagagtcaaaacagaggatgcaacagagaaagacccagaggcgcagacagaagtcaccgaagaggagaaaaccaaggagggaggaaagccagaagccaaagggggtcacggaggaggtcaaagttggcctgaatgggacctctccagctctggcttcctgctgagtccctcacgttatttccccaagccgtcagatttatatttactatttctctgtgtaatttatataaaaatttatt

SEQ ID NO: 707327 - DNA, 619 bp, Homo sapiens
  misc_feature (90)..(90): n is a, c, g, or t
cgaaaagcaaaactggatgcccaggtcaagaagctggtgttaagtccgccggtgaaggctaggcgcctggtggctgccagctcaaaaaanacacgccaatttagaatgagaagctcttctcaggaaagcgccagaagttggtcaccaagattgcccacatctgagatgccctgtagcccctgcccgcatcctccagggggcccagggtgcctgcacttttttgtggcagccaaattgggtggtagtgggaggttgggcatggaggccagtgaaagctgacatttgtaaaaggccttcaaggaaaaaaaacccggccctgggtcaggcagtgtgagtttcccgtttgcccctaactttcttttttttttttttaaaaaaagaaaactttaaaaaacccccccttaaaaacaaaacatctttgtgttttgaacaaaggaattttcaaaatttgattgggattctgttttgaagtttaggaaatttttcaccctataaacccccctgttttatccccttttaattttgatgtttgggtattgggtgagggcatgggtttttttttttttttttttaaagggggtgtgaccaaatggaaataaaccagggcctgtgaccctta

SEQ ID NO: 707328 - DNA, 91 bp, Homo sapiens
gatgccaaaaggataaaaattaaaggtatgccctactaacctttccatatattttttccccgattttcaataaaaaccctccggcagtgga

SEQ ID NO: 707329 - DNA, 786 bp, Homo sapiens
gagatggcggaggtgctgtgtcctggtgcttgatggtcgatgccctctcctgggccgactggcggtcatcgtggctacataggtactgctgtgccgctaacgtggtggctctgtacgctgctgaagggatcgaatatattctaggactacatttactaacacgacagacagagttcgagaggtaactctagtgcctttcctcctgccgtcatacgcgggatagaaacacactaaactccattgctcgcgaagggctcgactacgcagcttgcacgaggcacacctcatgccgactattctatcatgggctggatcctggtgcgagtgtattgctcgactctcagtaaagatgcaagtcgatggactcatggctccgatactggaccacgtcttgcacggtcgttaggactgcgtgatcgccagcgcagacccctgacgaccatacgtagaaaatgcctggaatagagtggggttacctatgctagcgcactcagaagtgtcgttggcgtcattgacacgaccgtactagatgacatagtttgctctactctcgtgcgcgtcgtcttggactcgaacgaggattggctcgtgaaagatcaccgagagcatagatgaccagatcaccgctgagtgaggcatcacacgcaggcaaactgatgagcgccctagatctcgattcaagcgggtaaagaagcaaactacgatcaatggagggtcatgggttgtccaggtctgtacgaagcaacgtggcagcaagcacccttttgcatcagatcatcctagtag

SEQ ID NO: 707330 - DNA, 388 bp, Homo sapiens
catttagactatctgtctatttcttttctttctttttttgagatggagtttcctcttgctgcccaggctggagtgcaatggcacgatctcggctcaccgcgacctctgcctcccgggttcaagcgattctcctgcctcagcctcctgagtagctgggattacaggcatgcgccaccacaactggctaattttgtatttttagccgagacggggtttctccatgttggtcaggctggtctcaaactcctgacctcaggcaatctgtccaccttggcctcccaaagtgctgggattacaggcgtgaaccactgcgtccggccaactctctgtctttctatgcactcaaaggctgcaaagtcagcttcctcctagatagttgtaaatggcg

SEQ ID NO: 707331 - DNA, 667 bp, Homo sapiens
acgccacaacatcttaaaaggaccaatcaaggccgggcgtggtggctcacgcctgtaatcccagcactttgaggggtcaaggcaggcccatctcctgaggtcaggacctcaagaccagcttggccaacatggtgaaatcccatctccacaaaataataaaaataggccgggcgtggtggcagacgcctgtaatcccaggtactagggaggctgagacaggagaatcgcttgaatccgggagggggaggctacagtgagctgagatcacgccactgcactccagcctgggaaacagagggagacccaatttcaaaacaaaacaccaaattacatcattatagaccagtactatccaatacaaaataatcgatcagaaagctggtgatctttatctcgaagagccaatactaaattcgttttcaccttaaaaaaaacaaccccaaactactatttaacagattctcagacgccaaaagtttcacacagtcaaaagtttcatataacgactagcttgactaagatgatcaagagatagaagccctatatggcagaccattgttagctgaatctaacaatgtctttcgggcccaaactaaggtcaatcagtgatgacgcttcacacattgggttgccggcgcggcgtaagctgtatccagccttggaggca

SEQ ID NO: 707332 - DNA, 430 bp, Homo sapiens
gcttgttcgcaaggggttggccgccaggaacacaggtaagtgccgtgtgtggttcccgcgggccgggcctctttacgggttatggcccttgcgtgccttgaattacttccaggcccctggctgcagtacgtgattcttgatcccgagcttcgggtgggaagtgggtgggagagttcgaggccttgcggccttacggagccccttcgcctcgtggcttgagtggaggcctggcctgggggctgcttggggccgccgcgtggcgaatctggtgggcaaccttcggcgcctggtctcgctggctttcgataagtctctagcccatttaaacatttctggatggacctggctgcgacgcttttcattctgggcaagaatagtctggtaaaatggcgggccaaagatctggcacactgggtactaccgggtttag

SEQ ID NO: 707333 - DNA, 298 bp, Homo sapiens
actgcagcctcctcgcctcctgggttcaaccgattctcatgcctcagcctcccgagtagctgggattacaggctcgggccacacacccggctaatttttgtatttttggtagagacagggtttcaccatactggccagcctagtctcaaacttctgacctcaagtgatccacccgtcttagcctcccaaagtgctgggattacaggcgtgagccaccacgtccagctgagtttgggaatttctagccactgcctctttgggctccttctctctaggcatcagtttcccaaattgcctc

SEQ ID NO: 707334 - DNA, 418 bp, Homo sapiens
gaccaggcatgccaggcataccagccatcaggccacatgcatctgtctccagaagctgcccaagtagccatgctggatctggcacacactttctctccaagacttaggaagcacttatgacagtggtcttgtctagagagcatcacggacggggattcagagtagctacaagatgctgccacatggacttgaatcacgcattcaattcctaattgcaagtgaaagaaaccgcctgagggggaagggctgttgctatactgcagtgctcacagcactacagaacccccattgtggggcttacccagagccagcaacaccagagtttgcatgttttgtttttttttaatttatttttagagatgaggtctcactgttgtccaggtgggagtgcgaacgtattcacaggtgcaatcattgc

SEQ ID NO: 707335 - DNA, 377 bp, Homo sapiens
tttttttgagacagagtcttgcactgtcgcccgggctggagtgcaatctcagctcactgcaacctctgcctcccggattcaaccgactctcctacctcagcctcccgattggctgggattacaggcgcctgccaccacgcccagctaatttttgtatttttagtaaagatggggtttcactatgttggccaggctggtctggaacgcctgacctcgtgatccacccacctaggcttcacaaagtgccgggattacaggcgtgacagctgcgcccagcctaaattaaacacttttaatgggtaaagtccatggtatgtgaattatatctcaataaagttgttttataaaaattactgaccttaaattatctactatta

SEQ ID NO: 707336 - DNA, 204 bp, Homo sapiens
ggacttcctgacaccacagtcaattaattcctacaggggccttggcctggagaaaaggtgcgcagcccacaccactcgtcagctgccccccaacatccgtctatggctagagaaggcagggcgtggcctgtaccatagactgctgcgattggtttgatctgttgtgttgttcttaattccatggtagaataacttcctgttttt

SEQ ID NO: 707337 - DNA, 294 bp, Homo sapiens
  misc_feature (178)..(178): n is a, c, g, or t
  misc_feature (188)..(188): n is a, c, g, or t
  misc_feature (254)..(254): n is a, c, g, or t
cctgagtcatcgggcatgcagctgcaacttccacctattttttttttctctgctattacttaggaagaccaaatggcaccagagataagactcccttagatccccacttagatcaccaccctttctcagggggtaataaagtcatcttccttggaaattttgggggttttaaaagggnccaattcctnaataaccaatcaaagcactgtaacatacgcactggtcttgtatggaaaatgttgtaatcctgctanaattcctctctctttgcctgtggaagtgaaaccttaactt

SEQ ID NO: 707338 - DNA, 108 bp, Homo sapiens
acgctgtcttattattctcatcgactgaggattattgatctgtcttcactcagcatcttccatttgcatgttttaggagaagctgtggcggccggagaagctgtggcg

SEQ ID NO: 707339 - DNA, 124 bp, Homo sapiens
aggagccatgaacggagtgaagtttcttctcttttcttctttagtcactcacgcggctgtcctgggctgccatgtctcaccagtgcctgggttccagccccacgccgcgagtctggtgtatttg

SEQ ID NO: 707340 - DNA, 205 bp, Homo sapiens
  misc_feature (43)..(43): n is a, c, g, or t
atccccccccggggggcccccctcgggtggggggggttttccnttttcccccttttttaaaaaaaaggggcccccgggaaacccccccccggttttttttccaagggtttcccccccccggggggggggggggtttttttaatttccccccgggggggggccccaaatggttttttccccccaaaggttttttttttttttttta

SEQ ID NO: 707341 - DNA, 1507 bp, Homo sapiens
gagcggccagtgcggccagaggcgagctgacggcctggaaagacgaaatcaaattgcagcctccccaaagacgctgagttactgcgggcgagcctggttcccgtgggatctgttctgcgagcgctgcagagagccgctgcctgcgccgcagagccctcccggggccgcctggccagaagctggggcgccgtccgacaggcagcagcccctgtggcgcggggttcggccgacgatgtgagcccctgttgcagatgatggggtgctgtgcaatggctccctgcctgtgcccgaacataggaagaacaacgagccacttgatgtctgagataggaccaacattataaaaaaaaataccgtgagggagcacgaaagaacaagcaagagagaagaaagaagacgaagaacagaggaaaaacaaacagaacacacacgcgagcaacagggagcagcgaagaacaagaaaacggagggaaaacacaaccacacagaggcagaaaaagagagagacagacaaaggaacaacagggcaacataacaaggaacagaacaaccaggagcgcagcgacgtcaccaggaaccccgcacacgaccgaacgagcacaagccaaaaaagaaacacggaggaacgaacacgagagacgcagcacgaaggaaacaaggaaggagaacaacgaacagagcaggagcaagcaacagccaacaggacgccccggaaaggcacaaggagaagccacaaacaacacagaacacaaaaacgcacagagacaacacacgagaaaagagacagcaaaaagaaaaccagatcggcacgaaaagagacacaaaagacaaaccccacgaaacaaaaagagagaacacgcgaaacaaagagagacagcaacacacgaaagcagaagaacaaaagaaccaaaagaagaatagaacaacacaaacaagcaccgacgacgacggggaagcgaacagacacaaagaacgagagcgagaaagaagaggaagaacaaaataagcaaagcaagaagacgagacagaaaatgaacagcatcgaagaagaacaagagagacaagagagcgacgagagaagaacgcgagcaaaacgacaagaagaacaacacaagggaggagaaacaacaagcgaaagagagggaaggagagacacgagcaaaggagcgagggagcagcaggacaccagtccgcgcgggcaagccagacacccgaaacgctgagacacgtcgtagatgaaaaagtagagaaaagcaggggagaacacgggcaagcagggcacgggacgcagcgaatagaagagaacgacagcgggaaggaaaaggagagcggacaagacggagacgacgcagaggacaacatggcgacaggacgacaaagagagggagagagggaggacaagcaggcgaacagaaaaaaccaccaagagacaaggagcgaacgaagggacagaccagaccacgaaggatgatgagcgaactggcgagacttctgaacagcgacgcac

SEQ ID NO: 707342 - DNA, 166 bp, Homo sapiens
aaggagctggggctcagcatgggtctgatgttgggtgctactcctgtatgttggacccctgcttctcttcttaaaacacctcttctcactatgtacttctcttctaggaatggatgtatattgctacctactgtcacgagaagggcggctagaggatgttgagaac

SEQ ID NO: 707343 - DNA, 209 bp, Homo sapiens
ctgggactccttattaaaaatttgtatatctattgtgtatttatgtgtgtgtgtctcatattggggtttcagctatatcagcaaatactaacaaagactgacattaacacaaagagagcaatacaattattgtaggatatttcaatactccactttctgtaatacaacacgacgagaatattacgtatggaaatcgaagacctagaagg

SEQ ID NO: 707344 - DNA, 333 bp, Homo sapiens
  misc_feature (12)..(12): n is a, c, g, or t
ggaaaacaaccngagaagaggaagaaaacaaggagaatgaccccccttagagcacccttattggttttatggcaccccctatttgcccgagtaaaatggaagtaatacagtctttgtgcaaatttacattgaggaaaaagagccctaaggtcaacctgcaaattctagagttcctagtccgtttttctctattttcctttctgccatgctttaagtctgctgttatttttccactgagataaaaccactgtttgggtctaatagttttttgggtttttcttgcaagctggcaaatttgtatttatctcatggctaaagtactggagtaaaagt

SEQ ID NO: 707345 - DNA, 335 bp, Homo sapiens
accgcggctcagttaattaacgtgaaacgagtatgataatttcgaagattacttttaaacccggcttattgtaagtctgtgatgagcttagttttccttctgcaccaagaattaaataagagaagcggctgggagcggtggctcaggcctgtaatcccagcgagtttgggaggccgaggcgggcggatcacctgaggtcaggagttcgagatcagccctggtcaacatggagaaactccgtctcctggattcaggcgattctcctgtctcaacctcccgagtggctggaattagacatccgtcaccacgcccggctaatttggtatttttggtag

SEQ ID NO: 707346 - DNA, 341 bp, Homo sapiens
  misc_feature (266)..(266): n is a, c, g, or t
atagcaaatgttaagttactaggactgatgtgaatttggcaagattgtaggatacaaggccaggtgtggtgcctcacacctgtaatcccagcactttgggaacctaaggaaggcggatcactggaggtcaggagttcaagaccagcctggccaatgtggcaaaacccagtctctactaaaaataaaaaaattagccaggcgtggtggcatgtgcctgtaattccagctactcaggagaccaaggcacaagaattgcttgaacctgngaggcggaggttgcagtctgccgacaaagcgcccctgtgctccagcctccgtgacacagtgagactctgtctcct

SEQ ID NO: 707347 - DNA, 179 bp, Homo sapiens
acgcccggacaccttcaagatggagtttgtcaattcggccacctccagccaccacaccaaccacagctctgtttggctgaggagataccttcttggagccggagggcatcttcacactgggtcttcttggtctcagggtcttcgtgaggagggtcttggtgaggggcataagcaggaag

SEQ ID NO: 707348 - DNA, 433 bp, Homo sapiens
  misc_feature (5)..(5): n is a, c, g, or t
  misc_feature (19)..(19): n is a, c, g, or t
  misc_feature (196)..(196): n is a, c, g, or t
aaacntttccaaaatatangattaccatgccgcctgattaaatgtccgttaataaataactgtgtgaaaaactcctccaaatagccctgtccaagaaagccgacctgtgaaggcctgggccatggtggcctcacaccctataatccccagcactttgggaggccagcgcaagtagatcacctgaggtcaggagttncaagagcagccctaggtaacatggtgaaaccctgtctctactaaaaatacaaaaattagctgggcaaggtggtatgtgcttgtaatccaagctacttgggaggctgaagcacaagtattgcttgaacctgggaggcagagattgcagtgagccgagatccaagtttgtgccattgcactgcagccttgtgacagagcgagactctgtcaaaaacaaaaaacaaacaaacaaaaaaaa

SEQ ID NO: 707349 - DNA, 130 bp, Homo sapiens
tgctatggaagaaagaacaagattaaaacttatttcccatacgctctttttgggggaggggggttagcatttccgctttcaggtgagtcgcattttatagaataaaatgaatttgggttgagaaaaagca

SEQ ID NO: 707350 - DNA, 354 bp, Homo sapiens
tgggggaaccccccgggcctttccccccgggttttttaaagattccagggccccttttttttgcccccccttggttttgggggcccccaaaaaaccaagccccttttgccccgtgggttccgggggtttttggtcccccccctccagggggtgggggggttttttttttgcccccattttttttgggccggggttcccccccattttttccccccgaccccccaaccccttttgggaaaagttgcccccctggccctccgggtccccccccccccttcccgggtggcccgttaaaaaaattggttggccgctcctgggcccgtttttttttttttttttttttaaaccccccca

SEQ ID NO: 707351 - DNA, 826 bp, Homo sapiens
  misc_feature (221)..(221): n is a, c, g, or t
  misc_feature (800)..(800): n is a, c, g, or t
cctttactatatgtaaatatgtgtttagtttcattcaatagatgaatgctgttcacatctagagagccatttgcatgtcagcaccatctgggtgtgttctggcttatgttgaaactgaacttgaaatgttggtgttaaacaatggttttaattattataatgttagaaatgattcaaaattcagtaagtagcagcatttcagagcctaccttcatgctgantaggccaattccgtaaactactgcctcccccctctggtgatcatctttgagaaatagtgtcttgtggaagaaaaaagtgtatttctctagtaattggttttgaattttatgtaatacctagattttactgtttataaacaatcaagacctctgatagagctactgttgggctttgcgtttatcctaataaaagttaaatgtgatgaactggttcttcatatctttgagactataaataattggcaaattttctgcagcccagcagagattatgtaaactggcctgtaattaatatgaaatatgtattttgtgtattttgccaaatttagtgattgtcaagaatcatttgcccatttgaaggatcacatttatattagaagttattggagccaaggtgggaggattgcttgaggccaggagtttgagaccagcctgagaaatataatgagaccctgtctcctacaaaaaatttaaaaacaagttagctgggcatggtggcacgtctctggtagtcccagccacttgagagactgagttgggaggatcacttgagcccagaggtccaggctgtagtgagcnatgatgggtgtcactgcactccagcc

SEQ ID NO: 707352 - DNA, 234 bp, Homo sapiens
aagatgccaagatcatgccactgcactccagcctggtgacacagcgagactctgtctttaaaaaaaaaaaggagggttaatagaattctgccctctgggaacccattccatccagtaagaaagacagaaaagaacataatatcaccataacttggtggtgggttcggatggtgatggtggatgggatacattggggtcaagcacctcctttctaagcatggatatggccagggt

SEQ ID NO: 707353 - DNA, 393 bp, Homo sapiens
  misc_feature (59)..(59): n is a, c, g, or t
  misc_feature (82)..(82): n is a, c, g, or t
gctccatagatgtttgctgaatgaagggattcaatggtgaactaaattgggaacacaantgggtgaccctgagttcacttanagtctttgtgcctctggaaaatgggaagcacacttgataatctccaaggtccttccaacttggaagcctgtgactctccccatctcgggcagtttctgcttccacccatcctgttggatgactgagatgcactctgtgagcatccaagaaagccctggccctttgctggagctgatggtgagaagactgtcagtgcctgccccatcagagcccttggaaagatctcatcacatctccaggagcccaaaaggcagaaaggaggaagaaattaagaaagctgtgtttgtgcctttctaatttatggtcataaa

SEQ ID NO: 707354 - DNA, 504 bp, Homo sapiens
  misc_feature (177)..(177): n is a, c, g, or t
  misc_feature (220)..(220): n is a, c, g, or t
  misc_feature (267)..(267): n is a, c, g, or t
  misc_feature (348)..(348): n is a, c, g, or t
gcttcatcagttgagtaccaatgccagaacttgtatcaacttgagggtaacaagcgaataacatgtagaaatggacaatggtcagaaccaccaaaatgcttacatccgtgtgtaatatcccgagaaattatggaaaattataacatagcattaaggtggacagccaaacagaagctntattcgagaacaggtgaatcagttgaatttgtgtgtaaacggngatatcgtctttcatcacgttctcacacattgcgaacaacatgttgngatgggaaactggagtatccaacttgttgcaaaagatagaatcaaatcataagtgcacacccttattcagaaacttagtantataatcagtctcaattcaatttttatggattgtttaactccttttaatcataccgaaaaatttggaataaattggggaaatggaaatattaggtgagaaccgtggctctcttttttaaagcaccatatttattctcggaaacttaaaaaaaaaaa

SEQ ID NO: 707355 - DNA, 532 bp, Homo sapiens
  misc_feature (530)..(530): n is a, c, g, or t
  misc_feature (532)..(532): n is a, c, g, or t
cagtgtgagtcaatctccaggcccccagatggtacattcaggcaccagcatattcctatgcatttctagataaaagtatttttcagaaaacctgagcatatgtcctattaatacaacttactctcatcagctctgcatgagaagaagggggatttccctcagtagaacagtcagaatggaatcacagacttgttttgagccagtcactggtaagtgggggtaggctaaaatgataagctcagaatctaaaccttagactagggaatggcaaactttttccataaagaagcaaacggtaatattttaggcttttggtctagataacctctgttgcagtgacacagtggtgccatcgtagcctaaaagcatatgtagacaaggcataaatgaatggacctggttttattccagtaaaacttaatttatacaaacagtcagagggccagatttggcccttggtctatagtttgccaaccctgtttagaccagtcacaatttattccctggggctgggccaactttttctatanan

SEQ ID NO: 707356 - DNA, 473 bp, Homo sapiens
cttcgcgcatcataatgaagtgtcacatcactgatcatcagagaaatcaatcaaaaatacaatgagatatcatctcaccctagttaaaatggcttttatccaaaagacaagcaataacaaatgctgtgagaagatgtgaagaaaaggaacccttgtacactgttggtggcaatgtaaattagtacaaccactatggagaacagtttagaggtttctcaaagaactaaaaatagaactacaatatgaaacagcaatctcactgctaggtgtactcccaaaagaaagcaaatcagtatatcaaagagatatcaagcactctcacatttattgcagcattattcacaacagccaagatttgcaagcaatataagttcccatcaacacatgaatggataaacaaaatatagtacacactcacgatggaatgctattcagctattttcttttttttttttttttaatgataccgcgaa

SEQ ID NO: 707357 - DNA, 240 bp, Homo sapiens
ggtggggttttttttttccggggggttttttgggggggggtggcccttttttaaaattttccccgggccccttttttttttgggttttttggggaggggccggttgccttttacccccccgggtttccccccccggggtttttggggttcttttggggggggggggccatttttttagttgggggcgggggctttttccccgggggaattttttttttttaccctttttcccccccccca

SEQ ID NO: 707358 - DNA, 881 bp, Homo sapiens
  misc_feature (651)..(651): n is a, c, g, or t
ggaggtgcggttggtttagtagggtgagcttggtttgtgtccctgtgggtggatgtggattggtgatcggcaggatcctggtatgcgcctaagcaggtcaaagtgcatatcattcggttgcataaccacttacacggcacaagacctgtcaaccctgtgagtgtggcagccctagttgactaccaagtcagtaaagatgtggaaaggcctaagatcctgggataaaggaaggcattctcactccactgatccagctgaggctccatcatttgctaggctgagcaagcgtggaagtatgagccggtacatcttttcatgacgtacaaatatcctagaaggtagtctgacacctgctcctagcgtgcttgcgtctagataggtgtgtatggcatatcttcgtgaaaagcgatgagcgcatggatcagtccaccctgggtattggagagtcccaaggatgactatccggactgagaaatagtcgatatggcgacaggactctcacagatgcttggtggacttggggatacccgactcagcaggagtgcgtcctcttttcgacatggtccatcgacagcatgcgtgaagtatttgggcgagacagcggacttgttctttgatcattatcaaatcatagttaaggagggggatgtncagaaaacccatggtttatctgggtaggttagaaggtctctgatggaaggttggttaatctgggtgagactcctgtacgatagaattgaaagccttggtttcagggatcgttggaatcctttgctaatggcatagggatgggtaaggtgaatccccaaagggtataataacaaaatatgggagttaaatttgttgagagtgggggaaattggatatttacgcataataag

SEQ ID NO: 707359 - DNA, 1022 bp, Homo sapiens
  misc_feature (1019)..(1019): n is a, c, g, or t
agagtcggcgcattcacgagaccgggaaaggatagtgcaatgcattacttccacatgtcaaacgatttctccagcttagctataagctgatacagctttattacttggataacatcatctccattagaatgtgagaagtgcatagcggtcattagttgcatatcagtcaatgctcttggaactttgttaaagtattatgactgtcgtgtacatagtaggagaagagagttgaatagcgagagagaatagtctggacagtagtagtcgttgtggttctgtaaagaaatagcagttcctagttgtttttagaaggtcatttatatgggtgtcattgagccagcgctggaaaattaggaataatggtagaatgcaaggcagtaattaccttcttggagaaggacgtctgaaggcggcaaacagaagggagagaacctcatgggcagaatattatagaatgagtgtcatattccagcatttgaattgggaaagaggaagaggtgaagatcctagagtatgattatgaatcgtgccctgtgtttttgaccgtgtggaacaatcagtttgagctgatgtgtatgagtgtcgtcatcgagatgaaagccctagtatgtaaagtcgaagtccgatttacatttggggtgtttggatagagaagagatcctccatagacgtggggtgtaatcatctgtggaactgggtaatagtaggtccaagggggagcactcttgtacccggtaccggggtacaggccgggatcctccacaatctggataccggggcaggggggctataagcgcggagcgaacggcagcgacacgggctactcctagcgagggcaatgaatccacgcagtggggcagtccgaaaacatatgatgagcgtgctagaaaaagagctgagcacatcgtgtgtctacagcagtgcacgccgacgcgactacacaaaacaacaaccgaggctctctccgctgctttctcctccccttatactagttagctctcaggagagaagaaaagcanaga

SEQ ID NO: 707360 - DNA, 391 bp, Homo sapiens
attcctttttcctttttttgccttttccctcaatagttgccttttagtgctgtaatagttaaatcctccagcataatcaataacttgcatatgaagtaaaaaggaatactgtgaaaggggagtatttttgtacagccagtttttttatgcaaaaatttatgcatttttccaattttatattaaacgggtattttcaaacaataggaaacttttttttttttttttttacagtttagtgtatttggtttttacatggaagactaaactcatgcttattgctaaatgtggtttttgccaactaaatttaaaatgcagcattttaaaaatttacatatcaatgtttttccagtattgtttgttaatttttaaataaagttatgatcagtgtgca

SEQ ID NO: 707361 - DNA, 1071 bp, Homo sapiens
ggttgttatgttcagattcagtttggtgccgtgatgctttgcggttgtgatcagtctgttcgaactgtggtgatctgtctgtcgcgccgagtcgttaagcggtagcgtatgagtcctggagaaatggccgtaaatccttcgagtgacatcgtgcaaaagcaatagatgtgactcgtagtcagagtgctggaagtgttgtcagtaaggtcacgccacgggttgaggtaaaacgtgccccgcgtgagaagcatgcgtagaaccagcgcaaaaggacccgatgacgtgagatgcgtcgactccttctcgtaccagagcggggatgtaaacaattcatccactcggattcacgggtctcggcgtaaaccgctttgagggtgtatccatacactattttccgttggatcacgtcacgacagaggtaagaccctcgacgtgcgtagcatcactctgggacaccgctaggacctttccaccgaagcgtgtttgtggcaacgggtgacgagatcggcgtcacggtgactcatgatggaatccgacgctctgttgagttgtttctggcagcactggcatgccgagttcggggtgccgccactgctgatttgaagcgagtacccgtgaagaaggagttcacctcttgagcttgtgggcgtctaggttcaacgcacaggaagttcaacacacaaccgatggtgaatggccttaggttcccaagcgcacgtaccctaaggaggttggatcgtaggatgcactgaaccctacagtgcgaaagacacgtgctgcgacgattgcgttggctttcgtagcccgggaattgttatcgcgtgcgaacgaacggaaggatagtccctcgaaagcgttggatacgtggctaagcaagtacgcttttcctcgcgcaagtttccttgtgcgtacgccgtgacatttctacttgctgttcaggccatagggcaaattccaaggaaattcaagtgggaaggccatggttgcacattggttggccaattagaacaccaggttgggaattgccaatcgtttgtggaacagtttcttgtaaacccatgggttccccga

SEQ ID NO: 707362 - DNA, 486 bp, Homo sapiens
  misc_feature (45)..(45): n is a, c, g, or t
  misc_feature (249)..(249): n is a, c, g, or t
tgaagtgacttgggacaacttccaattcagtccctgggactgccntggaggtggcttccccatggccagcgggagccttggccttggcccgtcctgtggacttcctgctctttgaccttaattgccatttttcaaagcacacctgtgtggcctgtgtcccctaggaccccctttcttgcagcgctgtgctggtttcttacagaatggttctgggccttggaacagcatcccaccccaccatggccctgntgccacacacatgtcctgtgaccacatggacagagacatcccaaggctctgccatcaccagggccacagcatggagaggcccagagctcggccagctgtgtgcagagggggctgggccagagtggggaccatgagggcctgtctctccaattgagacactggggtgggcttggaggggagtagatgccacaggctggagagctcagaccctggcaggggccaggatataaaaaaaat

SEQ ID NO: 707363 - DNA, 112 bp, Homo sapiens
tgactttcacctttgacaacgtgctcctggaaaatacacaattagcatcatgcatgaaggattgtgcttggaggacaaggagccttgaagttggagttcttgaaggatgacg

SEQ ID NO: 707364 - DNA, 625 bp, Homo sapiens
ggctattttttgtcttgtggacaggcctctgttgacagatgggttctccgctctatcaccctaggctgaatcatgggtctactgctatctctcagcctcgctgggcctgaagggatcctcctgcctcgccctcagcctctctgtagtatgtctgggaccacatggacctatccacaccctatgctattgttatgtttattttttttgtacgagatgggatctcctctgtgtatgctcaagctcatctgtgaattcctgggctcaacgcgagcctcccacctcagcctcccataagtgctttgatcataggcactggtgaggtggaattgatgatgaatctgtctggcacaccttggagcaatctccagtaaccatcagtacgtgaggataattgggtaactttactgaaagccctgtggaaggaagtcctttaaggatatggaaagacgatggatatatcaaatgcctgacctgttctccaaaaataaggaccttcaaataggagtgattgaaatcaatgatctacttgcatgttacgctgttcatttgggtggaatacttcatcagaataaactatgggatcttgtgctgtgtcaaagtaacagataacgacctggtctcagag

SEQ ID NO: 707365 - DNA, 856 bp, Homo sapiens
  misc_feature (35)..(35): n is a, c, g, or t
gggtgtgtctaaccccgcggccccgtgtggtgtgngccccccgggtgcaacgaactgtgggcggccagcctgctcgtgtgtgcatacccctttggggggccatgattattaccagcacggccttcatgcgtgcgcttgggggccccagccgaagctcggttgggttctgctgcggtgtgggtgtaacagtcttttcccttgtggccgccaatagagccctcgcggttggtggcacacgcgcgcctttggttctgtcacgaccacacccccccgtgggaggtttcttccacgcgggcggccttctattttttctattttgttcgcccgcgggcgatacgaactgtcgctcctgttaggttagttttgtgcccgtacgcgccagaccctcgctatcggtctgcggacgcgccctcgctcgccgcgcgtgtcggtgcgtgaattagattactcttcttctacggggggtccgcaaaccagtcttctacgccccccccagtagcgttttgttaggagtgttatgtggcagcacgctccgcagtatactgcgtcgctggttatccccccctcttgtatactctcctgggggaaatactctctgtggatggatgacacaccgtttttctggtctacaaaatagacttttgctctttattgcgggccccacaatactgtgttgccaccccgcaatacttgctcttttaataatatattccaccccaccaagctgggggcccccccccccccccctaaacaaaaccccccttttcccggacaacccccctttttttaccacacctttccccccctttttttttttttcccccccccccccatcatttcccgggtttttttttta

SEQ ID NO: 707366 - DNA, 965 bp, Homo sapiens
  misc_feature (390)..(390): n is a, c, g, or t
agtgcccattacggccgggggggggacaaaaaaaaaaaaaaaaaaaaaaaaaaaaatttttggccggcctggcccccgaaaagagctttcccgaaaccattcgcgttgggggcggcgggggcccataagaggatatcgagggaaaagtggggctcatagacgtgggttccctagaggaaaaaccgggggccaggaacatagtgggcgtgggaattccccaccccaataaaaaaaaaggcgcgcggggggaaagacacggaacgggttccgtgaaccaaactcccaagaagggggcagtatctaggagaggcacaaatcaaggggagaattcatcaccagcggcgacgtcccacacgcgaacccggaaattaatcaaaattatagcccccncggcgcagggggacacataacgaaataccaggaccaaagacaacacagccacaagacaaactaacaaaaggaaaccacaacaaacaaacgaccacacgacaaccaacgcaaccaacgagacgaccacgaccggcagacagacaccagacaaacacgacagacccacgaaccaccaaacaacaagacactcacacacaacccaccaccaaccaacgcagcacacacaacagacaaaaccccgacgaacccacacaacaaaagatcgagtctgatcgtccacagtcggtcgggcgaagaggtaacggcaaaacaagcgaagagaccgcgtggagcgggggggacggatgtgggggagagtcagagaggcaaatacgtacgagaactgaaagagggcagcaacagccggcaacaagctcaggaagcgaccagacggagatgctagaaccggggcccaccctcaaatcagcggcgtacccatgacaagaagacacacgaccgtgaccccgaccctgtcacgccgcgacacggctgtttcggtgccactgggccgggggcacgcacacctagcacaacga

SEQ ID NO: 707367 - DNA, 516 bp, Homo sapiens
tcggccctgagtcccgtcccaggctctggctcgggcagccgcgccaccgctgcccaggacgtcgggcctcctgccttcctcccaggcccccacgttgctggccgcctgcgagggtggcgcgcatgctcctgccttggccacctctgcccccgccgtggcctgcgctcgtggtgctgggcctcttcgggctcctggcagcatcgagccccagggtgtgctccagtagtgcgtcggagaaccagacctgcagggaccaggaaaaggaatactatgagccccagcgccgatctgtgcgcccgctgcccgcagacctatgtctcagctaaatgtagccgcatccgggacacagtttgtgccacatgtgccgagaattcctacaacgagcactggaactacctgaccatctgccagctgtgccgcccctgtgacccagtgatgggcctcgatgagattgccccctgcacaagcaaacggaagacccagtgccgctggcagccgggaatgttctgtgctgcc

SEQ ID NO: 707368 - DNA, 119 bp, Homo sapiens
tcccctctcttctcttcgtctccaacgcctcttcatattgaccggtcgatccctaggcgccccccctatgatagcagagttaccgagactcgacattcgttaatcatcgtcactagcta

SEQ ID NO: 707369 - DNA, 498 bp, Homo sapiens
tcccggaatgggcgtccccccacaagaagggtggcgagaaaggaaaaagggcccttctctgcccatccacaccgaaagtgtgtgaacacccggaggaataccacccatcccgaccattccaccagccgccatacccatgggaatggggcttccaagaaagcgtgccacctctgggccacatccaaagagaattctggaaatttgcccatgtaagagagaatgggaacatcccagatagtgccgccattgaccacccaggcgtccaaccaagactgtctgggcccaaggaataaggaatgtgcccatacccgaatcccttgtgccggctgtcccagaaaacgttaatgaggatgaagattccacccaaattaagctataataactttggttacctatgtgacctgttacccactttccaaaaatctaccagaccagtccatgtggatgagaactaatcgctgatcgtccagatccaaataaagttattaaattgccaca

SEQ ID NO: 707370 - DNA, 739 bp, Homo sapiens
gcgcggagatgtggaattcttctcgggaggcagtgctgggtcctttccaccataatcatcgtatccccaccggagtcaaagtattatagactgagctcgccacaactccacggaaagcacgtatgccctgactctgcgtgcaagatggtcctgacgccctaggatctcactcatttctttgtcaccacgtaggggtgggacttgactgggacacatacgtattagcacaacctcatcacataagacaatcgtcactacaacgaacaccgtcacatacggatgtggatagcatccagcgttatcacagataggtgattcctaatcgaacatagggaaggctggataaatttacggactcaaatcaataaggggaagggacatcaacacatatccaacgtggacatttatgcaccgagctacataactgcaagggccactaacaacacacatatgaacacacaaaaaccaataacagccacaaaaagaatcgccaatttatacacacgttactccgaatatttgccagttcaggggcagtttcaagacgttcttaaaacagtgttcaccttttcccccgacgaaaacgacacgtatatcctacgggaaccttaattcccgggaacattggccacccccgacaacgggatacaccgtcggggaacagtaagcccacggaagttggcagacacaacacacagaatggacacaacacttccataagtcaatccatggaagggac

SEQ ID NO: 707371 - DNA, 898 bp, Homo sapiens
  misc_feature (1)..(2): n is a, c, g, or t
  misc_feature (4)..(4): n is a, c, g, or t
  misc_feature (6)..(6): n is a, c, g, or t
  misc_feature (28)..(28): n is a, c, g, or t
  misc_feature (34)..(34): n is a, c, g, or t
  misc_feature (58)..(58): n is a, c, g, or t
  misc_feature (63)..(63): n is a, c, g, or t
  misc_feature (65)..(65): n is a, c, g, or t
  misc_feature (150)..(150): n is a, c, g, or t
  misc_feature (640)..(640): n is a, c, g, or t
nntntnacatacgtctcaccgcaggcgntagccnctgtttatgtattgggaggagagnaaggnancttcaacgccgagaacgacaccagggcggccggtgtttttcttgagagagcaactagccaccacgccccaaccacccccgtccancacaagggaggggcgcaacacaatactcggggaagcccggccctccggaacccacacggacaagcgcccccacagcagcgcccgacgaacaagcaagaggacaaggcgacaaacagcgacacgccacagcaccggaaagacccccaccaccaaagaacgcgccacacggaggccacagagcacacagcgaccaccgcgccagcccgggagcgaacaacacagcaacaacaccaatcgcgcgagccacacacacgcgggcaacacagaacccgcacacccgccaaggcccgcccacacgagaaccaccgcagaccacgacccgcccacccggccccctccaaacacaccaccggcagccccgaacaccccaccgcggcgaacgcccaccagaccacccggaccacgcgcaaacaaccaccacccacaacccacactccaacaaaccgcaccgccccacaccgccaaccccacaccgccaccaaccgcgcancggcgcactgaccacaacagacaccgggaaccagccgaaccccaacaaaccacacacacggagcaaccccaccccccgctcaccgcgcacaacccaccgcgcgccgaccacccacaaagcgcccgccaccgcacgccccagcaaccaccccggcacgccccgcgccccacaacacggcacccccgccaacacactcaccgcccccacccacgaccaaccggaccaccccaacacctcgacccaccgcaccgcgcccct

SEQ ID NO: 707372 - DNA, 151 bp, Homo sapiens
tgtggcgatctgtgcacctacgacaaggccaaggccaaggagctctacgccaaggctggtggctacaagggcaccctcacatcgccgtcaacggcgacggtgaccacaagtcgtggtcccaggccgtgtgcaacagctggaagaacgatct

SEQ ID NO: 707373 - DNA, 176 bp, Homo sapiens
gccttcagttacaattcatgatcatggcctagtcctactaaatttagtacatgcttcccaaatgctagtacataagtcccctatatagtccagcagcacaagctactactaccatactagtgtgatacctcatctaccagaacatgtggtccactagaaagacagcaataaattct

SEQ ID NO: 707374 - DNA, 432 bp, Homo sapiens
ttctagagtatccccaggactgcctgcagacacgactctcctgcctcagcctcccaagcagccgggatcacaggcatgcgccacatgcccggccaattttcataattttttttttttattatagatggggtttctccatgttggtcaggctggtctcgaactcccgacctcacgtgatctgcccaccttggcctcccagagtgctgggattacaggtgtgagccactgtctataatttttttaataaaatagagaggaggtcttaccatgttgcccaggctgatcttgaactcctgagctcaagcgatcttcccaccttggcctcccaaagtactaggattttctttttattttccttttcttgtttttgagactgagtcttgctctgtcgcccaggctcaattacgtgatcatggctcactgcagccttga

SEQ ID NO: 707375 - DNA, 310 bp, Homo sapiens
  misc_feature (13)..(13): n is a, c, g, or t
  misc_feature (150)..(150): n is a, c, g, or t
  misc_feature (282)..(282): n is a, c, g, or t
gtaaccccccaancccctcattccaccagccatagctaactactaacctgcttctgtctctgtagatttgcttgttctggacatttcatatcaatggtatcatatagcatgtggttttttgtgtctggcttctattacttaggatgtgtnttcaagatttatgttacagcctcagtatttcttttctttctgttgccaaatatcccattcatcacctgatggacatttgggttgttttcactttttggctattctgaacattttaccccctcctcttcaaanctgtgcttgtattcaagactcttctggt

SEQ ID NO: 707376 - DNA, 252 bp, Homo sapiens
ccgcctccgagcccggccggcagcccccggccttaaagcgcgggctgtccggaggggtcggctttcccaccgaggatttggcactctggtgagggaaaagggcgaaagagaaaagcgagcagccgtcctttcacagcctcagaaagtgctcgcttcccttcgggggctttcgcgaatcccgaggcaatctcggaggcggtatttgacctgtccaaagacgacttgatacctctataatgtaacagaaaaggt

SEQ ID NO: 707377 - DNA, 166 bp, Homo sapiens
gctgcagtgcagtctggaacactttgatagctcgtcgcattctgtacatctgcattccccagcgtcacctttccacccctttggtccgcgggctccacgggacgcgggaagcccagtgaagcctgctcttccttttgctcctttcagcccaaacaggaagccatca

SEQ ID NO: 707378 - DNA, 339 bp, Homo sapiens
aacactacaaacatgacacgttaataccaaggggagcagatttttttaatacaaggtcaaaatcagcaacaagtaatgcaatcttttgaagatatcagatacaagctccaaggacaatttctttacgaaggcttattccagtatcgagaggctagcatgaggtgtgtgcatttgccaggggcaaatatctatttacaattaacccatgcagtaaatgctacacatctgctgagtccgaatagaagcatttgcagtggacgatggaagagcccaactcgtcttactcctgcttgctaatccacatttgctggaaagtgaacagtgaggccaggatgtaac

SEQ ID NO: 707379 - DNA, 327 bp, Homo sapiens
cccctattacaacagttgggaccagaagtgtctcaaattttgaaatatctgcctatatatatgagatagcttggggatgggacccaagtctaaacaaaattcatttatatttcatgtacacttaatactaatagcctggagttaattttatacagtattttgaaataattgtgtgcatgaaacaaagttttgacccatctcataaaatcagatagggaattttctacttgtggcatcatgttggcactcaagtttcggattttggagcattttggattttagattttcagattatggatgctcaacctgtagtgagctgttgtaact

SEQ ID NO: 707380 - DNA, 146 bp, Homo sapiens
gatggcacgtatctccaccagttctctaaatcagcaagaatcttcagtaccagaggtgcctgatgtatgcacattatgccacttgagaatgctgggaccctgtctccctctatgacttacagtctgtggttcagcaagttacatgc

SEQ ID NO: 707381 - DNA, 191 bp, Homo sapiens
  misc_feature (107)..(107): n is a, c, g, or t
  misc_feature (163)..(163): n is a, c, g, or t
caagacccttcccctccctgggctgtgggggtttgagtttaaagcccccacaccctaggcccgtgccaaaggggaaaaggctgactcccaggggaaaaggggaagcnctgtcattttccacgtcattttcacaccagcccatcctgccctttagatttgggcnccaataaaggggttttttgtgcttggca

SEQ ID NO: 707382 - DNA, 327 bp, Homo sapiens
ctgatgatctacgatcgctatgctccctcttcacatctccaggaccgtagagggggctctggcactggactgtgtcaatgaatgtatgtcaacatgaatgaataaatgaacaagaggaggaacagagggagatgcagaaagaaagcaggaggctgggtgtggtaactcctgtctgtaatctcagcactttgggaggctgaagtgggaggactgcttgagcccaggagttcgagaccagcctgggcaatacagtgagacaccacctctttaaaaaaagcgtagtcaggcatggtggcacatgcctgtgatcctagctacacatgaggc

SEQ ID NO: 707383 - DNA, 712 bp, Homo sapiens
gtttgaattgaggctttggccttaacacccaggaactgtgttctattacaatcgcttaggaagtaaagcctggtctcccatccctggttctctgctctcttgttacccctctgacccagccgctcgtgccccacctctccagccctcctcagttcccagccctgcctgccctgcccctccagggggccatgagtgcctgaaggggtgttctcataccccacaaggtcacagactaggggaagggagggaacaatattgtataatggaagccataaattccatgctgtttgggcgggtggcgggcgtgcgcaggaagcgcgatgaggaggtgacgggccgatggcctgtgagctcctctgccaggatgcggggaccatccgctcctcgagttctcgggaccgaggtcgggtgcaacaccccttcaatcctccagattgggtcttaggactggtcacgactggcccaaggcgatggtgcagtgggatatggaggtgcgggaggtagaccttgagcaccttttccttagagaggagactgttagccttcacacatcggagccgaacatctaggtcattgatggggaggtgacaagtggtcccctcaagaaatccgcttttgcctgtagaaggcaggataggagtgagaacacggccaggcggtggagaccagtccatctccttgactaaggccagaggctgcgtcaggagaacgg

SEQ ID NO: 707384 - DNA, 926 bp, Homo sapiens
tagtgtgtgcatgtgctgggttgtgtctccagggtaagcgttttaaatggaaggcccttctattcctgagggctcagagctgaccatgcatgaatgtatggcatgtccacttttctgtataaaagtataaagtggggttcttccatatgacaaatgagggaacaggtggtgtctatctgtatatcagaaagattatctagggtctatcctagtgataatacatagtcagcctattcctgtggcaccttccagatgagaatgagggagcgacacatccaaggacggacaggaccagacagttctgacaggggcgtgctggggtggttgggagtgcacagtgaacgcatttcctgttggatttacactcacctacgtgtaaaaaagaagacctcagagtgcatagcagctcatgacagggccccattcccagcagaggctaacaggagcttgtgtacgagtccaggcagaggagcttgtgggaagaccttcctggaccaaagggagctaacccaagaagcctatgatgggcacacagtacggcagcagtgaataacggaaaggacagaaccagaaacataaaccaggctaattgtactagcacaggggtccacctcaagtaaatccaacgattgataagtaacgagctaagacacgtaactacagcccagaagagtatagcagataagaagacagacacacacactgatcaggtacaggcgaatacaaatcactgaacccatgcgaagtaaccagtcacacttgaatgaatgctgccaacttagaacaatggggcacaaacgagaacaaaaaagatagtacaaagcacaccaacactagagagtatacatgacagatagacaagaagagacaaaaagaaagaaaccacgaaaagacgagaaacaagcacaacagaagaaacaaaagaa

SEQ ID NO: 707385 - DNA, 850 bp, Homo sapiens
cacgccttgctgccgccccgcagaaatgcttcggttacccacagtcttttcgcgcagcatgagaccggtgtccagaggttactggctcctcatctcacccgggcttatgccaaagatgttcatatttggtgtcagattgtccgctgagcccttaatgccttcacaggctgttaggacctctttataccgtatgtctgtggtcctgttacatatggagtgccaaagcggtaagcaacagttgcattattagagcacgaagttgtggagaagctcccaagagttagatcaatacagcatggatgatgacctgtttgccaaacgttcccaatttgagccttaaatcgcacttcacaataacaatcgaagcatgttggcacgacctaaaatcgttgctttcaagtactggttgctccaaatataccaacatagaatgatacgtaacgcctggcggatgtggcaactagcctagcgtggcctacatgttagcctgggggccgacggactcctaataaggcccgatgcggatacgggccttctgacgcacagcattctagccagaatgggctgcctaaattacccacggtggggatagagctctaggtggacgcacgccggttgtagacattggtttaatggcctcggtttgaaatagccgtcggtagaatctggctgcgaaacctttagacacatacggctggggtcttaaacacccccttgggtgcatacctcaacccccccctggataaggaacactttggccaccatgcgcgtttggacctaccgaactttgtcttggcctcaaaccgcggaggaaccaatacgaaacatttgggcccacgtaatccaattc

SEQ ID NO: 707386 - DNA, 580 bp, Homo sapiens
cttacagagcatttcatgtgtattataagagaaactcagttagtttacttaattaagacagtaaaatagcagcaagtaccaagacatcgtgcatctcttctatataagacaagttacttcatgtacatcagagttagaaatgttcagactggctttcttgaatacttaaatatagctcgaatcactggtaagatatggacatattttcccaactgtacatcagggaggagtgctttcattagtttcagaaaatgcagaccctcagacagccagcatgaccacaacattgagcaataagagaaatgaagcatatactttccaagcatttgccacagaaggtaatggagtctttacattagtggttgtctcttccctccataagttaagggttgtgctttgttgaggcatttaagagaaattattgggcatgccactagtgatacttagggtcatgggtgtaggggatgatttagtagagctagtgaggcttgtgttagtgaccattccatcttggagatgaatagttagagttgcagctgctgcttcatgtgaattgatagtctctggggatgtatcttct

SEQ ID NO: 707387 - DNA, 216 bp, Homo sapiens
cgggagtagtcccgaataactcaaatttctgaacgcattttatgctacatatgcgtatactttgcgatcctcaggtgttcgtgcccaatattctctctcaataagtccttcaatacgtttcttaaataacaactggacttggttaagaatcgcgcgcttcaacttgctgagttacctccggctactagaaacatatgtgctcgcatccttctattc

SEQ ID NO: 707388 - DNA, 314 bp, Homo sapiens
atcgcagacgccgctatatctgtgaggcactcctgttagcttagcggccttcgatcacacgccatcgcacacacccgagagctgtgacgccctcctgtgagcttaccggccttcgatcacacgccatcgcacacgcccctataactgtaacacacatccatgtaagcttaacggcatacgatcacacgccatcgcaaacacccacaaagcatgtgaaacaatccatgtaagcttaccggccttcaatcacacgccatcgcaaacgccccacacctgtttaaacacctcctgtaacccattacaggccttcgaat

SEQ ID NO: 707389 - DNA, 542 bp, Homo sapiens
tcttgctgaccactacaacggtgctgggcatcgatcgtcgcagtcaacagagtccttggcgaacgtagcagtgacatgattggtcatgctgctgtgctgggtcagaggccccatcagtgtgtccggatcaccaaagaatactttgttttctcttgtcagtttgtcggacatatcccattgttcatagccccgtaacacattgctattgatgtagtacgtggttggaagccagtgtggtgaatagcgctggggactggtgactgggccatagttgctagatccccattgcgttgatgggtgagacgttgttgagagacactggagatggagtgtcgttccatgtgtttacccgatggtgaagggtatctgtgcaatgtgttgaagcatctggctttaaagattccatcagtgatctggagtacttcgtacctatggtccttctgcagtttaaacattctcaaatagaggagtgataaacatcggtagcatagtactgctagctttttgtccccatccgaagccaagggacttgcaaagttctt

SEQ ID NO: 707390 - DNA, 1041 bp, Homo sapiens
cagctcggggacagcgcatgggtgctgctgagaccgctccggacgtgcgaagcgttcgcggtgcggtaggaagctgaagtcttcagcagaaccctgacctaggtagggagtctcaatggccctgggtgaagaaacaggcagaatgctggaagcatctgaagacacaaaggcccagtcctatgtggatgagtgtgagctgcatgtggatgctgggagctggacatcccagtggcccatgatgtggggatgcatgccccacagcctggaagctgagtggagtgtgctcatctcccctgtatggggggcagaacgggatacctgcccctaacttgctggattgggactgacccatgtggcgggaccctctagagaccacacgcagccacaggccagtgatgccaacatgagaggccctgtagctgagaggtcttgagcctgccatctcagatggccatgcgctccatgcactaccagtggggggtctggagaccattcgtgcgtcatccgtgggaaatgccatgtgtgtgaggaagaccaaggactttcttaccatccgagggagattaccctcagaactcgtggagcacgtttcgccagcaagcgtagcaactaagtttgcttccaggaccagtgagtgctgagtagccgtaaggatgagtccgagtcaccttagcagaatttgggacccaagggaacttggagaccttcaggtacaaacgagagaacttcaagctagtggattcagggggtagtcgtcgtttagaccatgataaaccagggtgggaaaaggtcccggatggctagaagtccccaagtgtaacccagaagttgcgttccatgctacttttcagccaaggcttagcaagcggccagttcttctcgttggatatctcctttccaaaagaatgggcagagtcaagatactacaaaaaggggaatcaagcaaaagaggacagaaaagggactggaaatagcctatcagtagagtacgaggtattagtagtttggagcagaaagatggattctacaccgtcacgtccg

SEQ ID NO: 707391 - DNA, 266 bp, Homo sapiens
  misc_feature (40)..(40): n is a, c, g, or t
  misc_feature (47)..(47): n is a, c, g, or t
ccccgatgaagcctgacggcaggctgggctccgccaccgnacgctcncaccagaccgagcccaccgcgagggctcctccaggatgcaaaaaaggtaaagaagcaaagatgaacctttaagcaaatacgaatctcagagactcacggcatagccataactgcagcctgtgagacccacaccctggacccagacagagccgcagccgtgtgtgttacccctccattgccacttgggggcactgggctaaccctgcccccaccccatcc

SEQ ID NO: 707392 - DNA, 152 bp, Homo sapiens
atagactcattcttgcaaacccccccccaataccaattcctattctaatgtaaacctaccacttgtgctgttcctccttgagcatatactttataggaaacctatctccaacagactgaaagtgaatcttcaccccaaaatggtcttcgggt

SEQ ID NO: 707393 - DNA, 172 bp, Homo sapiens
cctcggaccggatttccttacactagtaggctctctttcatctcacagtgatctaagtcttctatatcttcatccatctcttcttcttcctcttcttttgaagtcactgcttctgttgtcccattctgtctgtttctccactctcttgacttctctctctgtccctttcaca

SEQ ID NO: 707394 - DNA, 179 bp, Homo sapiens
tgcatattacccagtgtgtcacacgacattgcaaatcaagggcaaattaactccattacagtagataactgtcagaaactggcctggtattcgatgacgtggtgggcatgtggagataatcaacagtaaggatgtcaaagttcaggtaatgggtaaagtgccaaccatatccatcaaca

SEQ ID NO: 707395 - DNA, 174 bp, Homo sapiens
ccctcctctgcaactgtcttacttctttaggccaggtatgcactccacagcagtgtctgcctatcaggcctgatttggtcaacaattttacggctctggggttcaaaccccatatcaagcattctgtcacgcttcgtccactacaaggtacagtacctcggcgacacactctgt

SEQ ID NO: 707396 - DNA, 292 bp, Homo sapiens
gccagtttttccagcccccccccccccccccccctagtgggggggggccgctggccctttgccccaagttttaatgcccctgaagctgtgttttttcccccgcctgtgggggggaaaatttaggggggagggggaaaccaaacccccccccccctaaaatccttttttttttgggcctaacgccccccttttccgggttttgcgggagatatacccctttttttgggaagggttttttggggttttttttcccggggcccgttttttaaaatatttttttaaaaagttgtta

SEQ ID NO: 707397 - DNA, 100 bp, Homo sapiens
agttgatctagaggacccctcacggaacaataccagcatcaaaggctattcaaagggagcagcctcttcagtaagcacgaaacaggctctcatcagggat

SEQ ID NO: 707398 - DNA, 463 bp, Homo sapiens
  misc_feature (185)..(185): n is a, c, g, or t
ctctcatcaccttatttaaaattgcctcaataccctaccctcttttcctgctttattttccctgtaacacattcccttttaatatacccataattactgacttattttgtttattgcattcctccctcactagaatgaaagctccatgtatacaggatttttttttctattttcttcactgcttnatccttagctgttagaactgtgtctggcatacagtaagtggttcagtacctaagtgttgagtggataaatggatggatgggaaggatggataaaaagagtgcctggtagacctaacgcttcagctgccagattcctgaaggccccagaggaagaaaatgctacagaaatcaagagaagcatttaaggcacatatcttcaacatcaactcttcctatccacccacaatgctagatcccaacataaaatgaaataaaatttctacagaatcatcagcaaa

SEQ ID NO: 707399 - DNA, 382 bp, Homo sapiens
  misc_feature (74)..(74): n is a, c, g, or t
agttgagacaaggggccgggcgtggtggctcatgtctgtaatcccagcactttgggaggccaaggtgggccganctttaggtcaggagttcaagaccagcctggccaacatggtgaaaccccacctctactaaaaatacaaaaattagccgggcgcgatggtgcgtacctgtagtcccagctacttgggaggctgaggcaggagaatcgcttgaacccgggaggcggaggttgcagtgagccaagatcacacccgtgtactccagcctgggtgacagggcaagactccgtctcaaaataaagtaaataaataataaaaataaataaataaaatgagacaagttatcgccatgttgcccaggctgctgatattgaactcctgg

SEQ ID NO: 707400 - DNA, 129 bp, Homo sapiens
gcgagaggtcgagtacaaggttgctgatgattgtactaaatccccattgttatcttggcttagctccctggtgatgtgtcgtactggaaactgatttgtagttggtgaggtaacatacgtggagcgtct

SEQ ID NO: 707401 - DNA, 478 bp, Homo sapiens
  misc_feature (23)..(23): n is a, c, g, or t
gggcctggtcctggccgggttanggatggagctggtcctcgctccctgcgcctggggatgcccctgcctgcctgacgcccgcggctgagccaccggcgcatgtgacctgcgcgtcagcccagtcccatccgtaggcgcccggcgcccggcccgcagcggctcgttgtccccgcgagacaccgaccggtctcccgagcatgacacccgcacagacaggcctgacagcaatgcaggcgcagagcagctgatcactgaacgcgtaaggacgcgctagagcaaggaccgagaagccacaccatacagagcgaccagtgtaccagcggacgctagagacagtgtacagcggtagtaccagagacaaccagcattgaaaaacgaataggaataagaatagccacaaacaatctaaaaacatgcattgacatgagtattgaagcaaagaaaaaacaaacgggaaaacaaaaaggaaagggcacaa

SEQ ID NO: 707402 - DNA, 181 bp, Homo sapiens
ggaagtgacatcgtccttaaaccctgcgtggcaatccctgacggcaccgccgtgatgcccagggaggacagggcgacctggaggtccacctactcccttaaggatcatcccactattggatgattatccgcaatggtctcattgtgggggcagaaaatttgggctccaaggagatgcagca

SEQ ID NO: 707403 - DNA, 329 bp, Homo sapiens
  misc_feature (45)..(45): n is a, c, g, or t
gctgcctggccttaagaagtccagagccggacgtttcgccttttngggctggcggctgggaggagcgctcgggttcatgtcttccccagggggactgcgagtttcctgggtgcagcgaggcccgggagtttggtgccgcaagacctttgggcagccaaggcttggctattcacggcccgcagcctttacccggcagactttaacatccagtatgagatgtacaccatcgagcggattcagagcggaccaaccaccccggaaggttcttgtacgaaatgtttttgaatttccagaccagccggtggtttggagagaaatcagcattattt

SEQ ID NO: 707404 - DNA, 818 bp, Homo sapiens
tcgtggaaagtgacatcgtcctttaaaccctgcgtgacaatccctgacgcaccgccgtgatgcccagtgaagacagggcgaacctggaagtccaaactacttccttaagatcatccaactatgtgatgattatccgaaatgtttcattgtgggagcagacaattgtgggctccaagcagaatgcagcagatccgctatgtcccttcgcgggaaggcttgtggtgctgatgggcaaagaaacaccatgatgcgcaggggccatcctgaggcgcacccttgggaaaaacaaacccagcctctgggacgaaactcctggctggcctcattatccgggggacatttgtgggcgcttgtggtgttccacccacgcggcacgggaccttcacttgaggactcagggcacattgttgtggctgccccactaagtgtgccagcttgcttgccctgtgcttggtgtgccatttgccccctattgttgaaaaggtcactggtgccagcccccaggaaacacgtggtctcgtggcccggagaaaggactctccctttttttcccgagggccttttaagcgttattccgacccactaaaaagattctcccaggggcgccacccatttggaaacatcccttgcagtctggattgttgcccgcgtgcatccaaggactgtgtggacgacaacacgtggtggcagcccagcggaacgcgcagggctgctggacaaccattgcctccaacattctccccccttttctccttgtggggcttgctccacccagcacaggttggtccgacaactggggcggcattctacagctctga

SEQ ID NO: 707405 - DNA, 264 bp, Homo sapiens
acgatctatgcgctgtgggagatgcagacgagtcaggcaggtcactggctttgtcagggagtggatgcctggcataagatgagacaactgttccatttctgtggcgcttgttgccagctgctaaacttcttcatggttggccttctccaggctttcataatccatgatgaccttgttagtgatgagtgagaagccaaagactcgaagtccacagtgccgtgcaacgataacttctggtactgtactcatgccaacaagcgcctg

SEQ ID NO: 707406 - DNA, 260 bp, Homo sapiens
gatggggggcatgaaatgttttaatacaggcatgcaatgcataataatcacatcagggtaaatggggatccattacatcaagcatttatcctttgtgttacaaacaattcaattacactctttgagttatttaaaaatgtacaattggctgggcacaggggcttttacctgtcatcccaacactttgggaagctgaggcaagcgaatcacttgaacccgggaggcaaaggttgtattgagcttaaatcgtgcctcgtgcc

SEQ ID NO: 707407 - DNA, 652 bp, Homo sapiens
gagattgaatggctattcagctttcagctgtggacagagaaggatcagaaccgattatgcttatgatactgacagccatgatcgctccactgtacttatacctgggtgacagactttgtgtaccaaacaactgatacttactctttgtatatgtttaaagtattttgttaactcaataaaactgagacttattttctctacgatttaagttggtgaataataacaaatatttgggttataatttccctttagtattaagttagctgtagaaatggtgttgtatctgacctagtaacccatttgactttttaaagatgaattactaaatttttttaatgatatgaaaaaatgtaatttgctccctttacctcttatcaatatatttatgataccataagtacctgcaaggtgtggagttacagtccgagacagtctaaagaaagcactgatgatgagaggtctaatcccagagtgctgtgcttgttacagaatttacgaagtgtatggtttgtatgtgacgtgaaattttgttaaaaagaaaattacacattaaacttttgagttttcttaggatctttaccaaaacctatgggatttgaagtgttctctaggaaaaagtttttaattctaagttagcccggtactgtaggcc

SEQ ID NO: 707408 - DNA, 878 bp, Homo sapiens
gggagtgcccaagcatggcgggggccgtaaggtgcatggggtcgagtctcgatacatcgatcaacaggcgtagcctgttcctgagatggttgtatcggacatcacttgttcttgtcactgtaaaacatccgagtgcccgacagacattgggtgcatgcgtgctaataaagtctgcagagagaagacgaaaagaaggtgcgtatcatgaatgaagacagcagcatgagagaaagacagatgaaatagaacaatgttaaaggatatcccatatatggagaggccgagagcctgaggagtgattgtctagttttaacatgcttatgcctcggagacagatatgtgaggtggagaaagcggtgcacgttatttaagaaatttccaagtgcttgagttatactatgtccaaagcatagtgttgatctggatagacactggagtatggcactgggcatagaagagaagcgtggagcccgtttaccatgggtgcttagttgccatacgccaattagcgcccggagatggactaaggttgctgtgtctacgagagaactgcatcagaggtcaaaatagcggaacgagtctggggctgcgttggctggagggacgtagtctggtacagaagacttggcgatgaatgaggatagttgcacgagctaaagcgtagctcgctcctgataataatgcttggctgtatcgattaggggacatactgcctacaagtattctacctttatccgaatgtccatgccgcgacttcccaaaggctgggtcattcacccgggctgcgtaggccggaaaacgggacttcgccacaattcacgtgggttcagggcaatggggaatcgagaaaatgagttgggccccggaatggccggggc

SEQ ID NO: 707409 - DNA, 853 bp, Homo sapiens
  misc_feature (230)..(230): n is a, c, g, or t
  misc_feature (233)..(233): n is a, c, g, or t
  misc_feature (328)..(328): n is a, c, g, or t
  misc_feature (364)..(365): n is a, c, g, or t
  misc_feature (367)..(367): n is a, c, g, or t
  misc_feature (370)..(371): n is a, c, g, or t
  misc_feature (377)..(377): n is a, c, g, or t
  misc_feature (386)..(386): n is a, c, g, or t
  misc_feature (417)..(417): n is a, c, g, or t
  misc_feature (424)..(424): n is a, c, g, or t
  misc_feature (433)..(433): n is a, c, g, or t
  misc_feature (446)..(446): n is a, c, g, or t
  misc_feature (468)..(469): n is a, c, g, or t
  misc_feature (471)..(471): n is a, c, g, or t
  misc_feature (474)..(474): n is a, c, g, or t
  misc_feature (480)..(480): n is a, c, g, or t
  misc_feature (482)..(482): n is a, c, g, or t
  misc_feature (487)..(487): n is a, c, g, or t
  misc_feature (489)..(489): n is a, c, g, or t
  misc_feature (498)..(498): n is a, c, g, or t
  misc_feature (532)..(532): n is a, c, g, or t
  misc_feature (593)..(593): n is a, c, g, or t
  misc_feature (619)..(619): n is a, c, g, or t
  misc_feature (623)..(623): n is a, c, g, or t
  misc_feature (670)..(670): n is a, c, g, or t
  misc_feature (674)..(674): n is a, c, g, or t
  misc_feature (691)..(691): n is a, c, g, or t
  misc_feature (740)..(740): n is a, c, g, or t
  misc_feature (774)..(774): n is a, c, g, or t
  misc_feature (848)..(848): n is a, c, g, or t
ctggtgggtgcaggaaggccaggtctgccccctggacgcggacggaaagggattctcagtgacatccccgccccctcccgctgcctcggtccccacaggtatggaggtgtcccgggggcggcgtcgcggggcgcctcatgcccagacttcagggggctgtgcgtgcggctggcggcggactggcgacgctgggcgccctcgagcagcagcgagaggcgggcgcggaggtnctnagcgccggcgacggccctggcgcggaggaggactttctgcggcagctcggcagcctgctgcgggagctgcactgcccggatcgcgcggctgctgngggcggggatgggcgcggctgcgcttcgggaacccnntnccnnacttcnccttcttcnctttctcttctcaaatctccaagccaccgcncctcctntgcctgccnctctctgctgganccgagtcctaggccaccccttnntnaangggtantngaggnanccggcatgntccaataactggaccttaccctccaagccctggngctgcccagacctgcaccagggacccccgccagccagctgctgcaggagttgcatgctaangtagagagtcagagtcccctcccganctgngctaccccactttccttgtgggggtgggggtcctctctccacttctngaangagtattccaaccactngcctgttttttcttgagctgtgacttgcattctcacatctgtggcctangtcctcaggggtgttgggagctgagtttacagangggcccatcctctctgccccagttggcctctgacttcttctcccatcagatctcagagctgcagccttctctgncccca

SEQ ID NO: 707410 - DNA, 452 bp, Homo sapiens
ggccgttaggagaggcgggttaggaaagaaggtgagagactgctgcgcggattctggaaccatgaacatatttgatcgacagaatcaattagatgcgcttgacaatgtctcatataacccgaacaacgcagcagtcagctgaagaaggtctatgcaagttttgcccttagtatgtttgtggcggctgcagggtgctatgtccatatggtcactcatttcattcaggctggcctgctgtctgccttgggctccctgatattgatgatttggctgatggcaacacctcatagccgatgaagactgaagcagaacaagactgggacttcttgctggattatgcattccttacaggagttggcctgtggcccatgcccttggagttctttgtattgcgtgtcaaccgccagtcatccttcctcactgcttttcatagggcacggcacatgatcttt

SEQ ID NO: 707411 - DNA, 545 bp, Homo sapiens
agagggtcacgcaggcactgtttgcaaaggaggtcagttgccccatgtcatccagccaagaagtggtgtcctgcctccgacagaagcctggcaatgtcctcaatgatgcccagaccaagctcctggccgtgagtggccctttccactactggggtcctgtgatcgatggccacttcctccgtgagcctccagccagagcactgaagaggtctttatgggtagaggtcgatctgctcattgggagttctcaggacgacgggctcatcaacagagcaaaggctgtgaagcaatttgaggaaagtcgaggccggaccagtagcaaaaacagccttttaccaggcactgcagaattctctgggtggcgaggactcagatgcccgcgtcgaggctgctgctacatggtattactctctggagcactccacggatgactatgcctccttctcccgggctctggagaatgccacccgggactactttatcatctgccctataatcgacatggtcagtgcctgggcaaagagggccgaggaacggtctcatgt

SEQ ID NO: 707412 - DNA, 222 bp, Homo sapiens
ggaattggagatcagcctgggcaacatggcgaaacctcgtctctaccaaaaaaaaaaaaaagaaagggacggaaaaaaagggacgaaggaaggcttttttccttaactttgagaaaaacaggggggggggccagagcttggggaagggctcaaaaaagaactgagcctgggggggaaaaaaaacttggcctaggaaggtcaaggctgctataggtattgagg

SEQ ID NO: 707413 - DNA, 179 bp, Homo sapiens
catgagcaaccagcacaatgtcacactggatacaaaaacatactctaaaatacagtccagataacaactgtccccactgtccccaaaatgtactttacagctagtaaataaactaggatccaaggatccaatccaagtgttaacagaattgcattatggtacatcactgtctacctaca

SEQ ID NO: 707414 - DNA, 202 bp, Homo sapiens
tgtgtgcccagcctgttggccgctgggctggactgcagggccgtgaggctatttgcctgaacagctcaacaggtgagttgcgtgcgcgagtgcccttcgactattggcacacattcatggagctccagtaatgtgtgccctctctaccaattatattattcatccaggatctatctgtgcatatagatattactttatggag

SEQ ID NO: 707415 - DNA, 1292 bp, Homo sapiens
  misc_feature (1)..(2): n is a, c, g, or t
  misc_feature (545)..(545): n is a, c, g, or t
  misc_feature (601)..(601): n is a, c, g, or t
  misc_feature (676)..(676): n is a, c, g, or t
  misc_feature (716)..(716): n is a, c, g, or t
nngggggagcttctcagtgtgagctctgaatgcttcaggatgtcttccaatagccagcctttcctctgtgtaaaaggtttctctggagtaatggagatagcatgtgtgcaagtaggcaggagctccccttagtgtcagcttgagagcaaggaagggagaggagagctatgcctctgaaacaataccattttgcccccaatgccagttttatttcagagataaaatgccatgcttcagagccatcaatgataattgtttgagattgatgacctttggaagctgacagaatactaacttctgggagaagactagagtagatcaggatgatttcttggtatactctcagctgtttcccaccatgtgtttcctcttctttctgatatacagccaaaatacatttcccagtctgccttgcagttaagggaaactgaggtctcgtcaatggaatatgaatagagaaatgtgtaccacttccaggcctggcccatgaaaacctcccatatgctctctctctttcatcttccttttcccttcaggctggctgnaggggaggcagctcctgggagagatttggaagttggcagagctgctattaagctgngttcctgaatgatggcaagacagaggcccacttctctatcgtattcacctgcccaagtattgttgtgagcacganaaaaaatatctactgtagttgaggccatcttaaatacagnttctcttttaaaagccattcacgtccaccatttggcattaagcgcttttaaaaaaactgtgagtgccctgccttgccagaaagctgtaacaagacttaactccgggagactggctttcctggcattctgagaagcagaaggtttaaattacttccaggttgaaagggaaaagaaccatacaaaccaggaactcaattggggaggcagacataaggtctctccacccggatgtcaagctcgggccttaaacctgcgaatttgtacctcatggaaaggggactttcaggtgattaaggtacggacttgaaatggggaaatatcggatatctaatgggccacctatttccaggaacctttgaaagggcggaaagatggctacacgctatcgaggatagtttcccacctgtgttctttaaaaagggcaaagcttcactcagggacacagtctaaactcgtaacagagactggatcctttaggcccaagggccccggtcaaccggtcacaaatggccttgcgatttcatattggctctctgtctggtgcgacataatactcccccccactactacaccgct

SEQ ID NO: 707416 - DNA, 242 bp, Homo sapiens
ctgaatcatcttccctgttacctgctgccattgtaattgcttgcaggatttctactttcggcatcatactccacaatgctactagaatgctcttcttaatatgagggcctggtcatatcactatgtggctggaaattactgtccagggctattaccagcccccgccagcatatcagcttgacatacatgatgctgtatgagttagattccaactatctagccagcttgagctgccactgcta

SEQ ID NO: 707417 - DNA, 469 bp, Homo sapiens
cgatgctcatactactattaatcataaggaaaaggtgaatcaaaaccagctacaaataccatatacacacccacatggatggctctcagtaaaaacagacacgaaacaggagataacaaatgttgctgaagatgtagagaaattggaatgcttgtgtgttgctagtggcaatataaaatggtttggctgctgtgaaaacagtttggcactccctcaaagaaattaaacatagaattaccatatgacccagcaattccactctaaggtatacagtcatccctcagaactgtgagggattggttccaggacaccctctggataccaaagtctgcacaggctcaaatctctttatataaaatagcagcatttgcagataacctatgcacaccctcccatatacttgaaatcatctctagatcactcatcatgccgaatacaatgcctacacatcactgcattcacgtggatt

SEQ ID NO: 707418 - DNA, 102 bp, Homo sapiens
attccacattaaagccaagctatcgtggtgggattaaattatatatttttaaaacctgtttttaaaattttgtttcttgcactaaattatgtcagtacattg

SEQ ID NO: 707419 - DNA, 620 bp, Homo sapiens
caaaaggaaaagcttgggcggtgccgtcttcatttggaacaagggggggttcatgcctaaaagaaaaaaaaaaaaaaaaaaagaaaaaaaaaaaaataaaaaaaaaaaaaggggggggacccgcatttgttttttttcttcaaatgaatttgttgcatgacactagggagacaggaacacacaaggagttagtcgcccatgattatgttgtgccacataagccgtaatctgctggagggagagcgaggaggagcgagagcggggagaagacgagtgagacgccactgcaaagaagaaacgcacagagaagaaaagcaagcagcgaggagggcgcacgggaggcggagaggggagaaaagcggacacaaagcaataaagacaaatggagagagaaccccgccggcgacgcagcgagcatgtccagcgccactgacacatgatgtcgtgggaaatagccagcgcgggagaggggcgtggaaaacaacggaaggaacaagaaaaatgcacacacaaacaacgaacgaacacaacaaaaggaagagaacaagagaagacacgcaacaaccaaatgctgcgaaaaagaacaacagcagaaaaaaacagcagaggaggagacaaag

SEQ ID NO: 707420 - DNA, 1118 bp, Homo sapiens
gtgcccccatgccttatacaatccactccggaatgagtttctgtcatcgctggaggaaggggcttcattggtcacccccccggaggagctgccttccccatcagcttcatccctggggcccatcctgcactcctctgcctggggacgatagtcccactaccactgtgctccttcttcccccggatgagcaacctgaggctggccaacccgggctgggggggcgcccagggtctaagaggaggatgccaggaagggcagctgatgatggggagggcgatcgtatgggggcatgccattgccagactcagtgccccctacccctcctccaggacatgaaacaagctgagtggagtgccggcgggggcgcagtgactcgggtggaaggtggcccagcttgcgtggacagaggaagtggaccctgacaacagggagctttgtcaaataatgcccaccgccggtgggcattggctgcaatcccaacgacaaagtcattgggaccctggggtttcctacattggtttcggtacatgggtttgtgtggaggtccctccagtcaatgcgtgccctggcacttcaacacccgggactcaggtcaccatgggagtgacatcagtactggtgttgttgagggcttgtgcccgggttggtcaaggggtgcaacacaggagggagaaaagcccagaaagcagcccgaaccaacttctatcactggggaacggatacactagcacatatgcttcggaattgccatcaactctcaacgctacacaagacgccacaagcctcaatggacggcgacttgcatacacggaatcagtcgccaaacacagcacatgaaaacatatctcgtatgcatcggacgcggatccggcacaccgccgagatattgtgcctagttgtccaagagcctgtgaccaaaggcgccacatcttgcgggcccaagggtggcccgatgcatatgaccaatgccgggctattgagttgctaacatgcacttgatcgaccgagtgtacccctgaggatgagcactagaaaataataggtgaacaagcgcacaactaataccgagagaccgtgagtgataaagcaaggactagagtatgcaactcagcacgtgg

SEQ ID NO: 707421 - DNA, 102 bp, Homo sapiens
gatctggcatattggaaggagtggggatgggtgaggggatcgacgagtgaaagaggggatacgtccgtaggggtggtggaggggagtgcgagtgcggtcccg

SEQ ID NO: 707422 - DNA, 263 bp, Homo sapiens
atgtcgaggctcatcgtgtacttatgtttggtgttgcatgctctcatatctataggttatagttcatcaattttgcaaaattttgagtcttttttttttttccaaatattttcctctcccctctccctctttccctggaaacccaattacttgtagtttggactgcttgatatggtcccaaagatcatgatgctctgtggtattttttaaagggcttctggccactctggtatttcctttttcctatttttggacagtctcgc

SEQ ID NO: 707423 - DNA, 581 bp, Homo sapiens
aggatggagggggatggtcgggtttccaaaaaaaaaaacatggaatatcccctgggttaattggatgccccccaattccgcttttatgagggggaaacttccccactccgggtttttcctgagaaaagcccccgttttggctactcccggtttcggtttgggtcaaggggccgggactttccaaaccaaagcgggggttcccccccctatttttttcctttcgggccccattgagacaggggaggggaattttttttttattttttaggttaaatgagggggtttgggcccaaaatttcccttcccgattgggggtttggggttttgggaaattttttttattttttttttttaaaaaaaaaaaaaaaccccataatttttcccggggcccatttagcagtgaaacctttttaaccgccaaaattggggttttggttcaaaaacaagttgtatttttttcccccccgattatgggaaaaaaatcagttttgtttttgggggggggttttctatggggatcccccgtttttggggttgggggggccccttttgtttaaaaaaatttttttaatgttttgtta

SEQ ID NO: 707424 - DNA, 999 bp, Homo sapiens
cgctgggaccgggaatcccgcgagctgcggccttctggggacgcggcccggtggctacgtcgtgggccgatccgtggggacgcggggtcctggaggctgcgcggggtctgaggcggactcgcattttgggaactggctgaatgatgccgggctaatgtcctggagtcctatggcagtggcacattcccgcacagagtttcggcgactcgcccgtgtcgggagcctccaggcgcactggagcttggagggggcgcagggacagttgcttggtgcctttgcggaggacgctcaccgcctgagcagccacggtgggacccgtagtgccaggaggccccgggcgagccgtcaggtcggactggaacgtgtgatgcagtcaagccgtgtcaggagcgtggctgcagcgaggtctagaaggctcatgccaaggcgactcgtggatgggcccattccgccgaggctggcagccgcccggttgccctacgacatttgccaacaaggcttcaagggaccttggcactgcgctcacgggagattggctagattgctccaactggggtctaccctgtctagcctgaatgctggctcggtgatgacccgtgcttgggacctctttgcaactgagacgggaatgcaccgtcctgtcactcagaaactggtgcctgcaaggagccattctaagcagtcctggcacacccgggaaaggtgtggcgagacgcccgcatgtaggggagcccagtagtggacggattccgggacttcctccaagaaacgggggttgggacgagcggggccatactgccatggaagcagagagggtcgacgccagggaatgcctcgaaggcgagggtatcccccgggacaaccctgtggcctggggatggacccggttgaccgtcataagttcagataacctggatagaagggccaccgcggccttgggtggccccaagcaggcgccggaggaaccatgggccttaaccttacgccgtgggcgcccgg

SEQ ID NO: 707425 - DNA, 159 bp, Homo sapiens
aatgggcgagttgtagttggtcacgacgcgggtagggatagccaggaacctcagcactgtgcagtgcacggtggcgaagacccagcactggacatacttgacgcgctggcagccgtggttcttccagcgccgaaggatgtccacgctgccgatccagga

SEQ ID NO: 707426 - DNA, 101 bp, Homo sapiens
gcgcttccggagaaaatcagcggtctaattaattcctctggatttacaaaaggtgcaggtatgagcaggtctgaagactaacattttgtgaagttgtaaaa

SEQ ID NO: 707427 - DNA, 967 bp, Homo sapiens
  misc_feature (967)..(967): n is a, c, g, or t
tacccaatcatatgcgactgaatattgtactaatgattgaccgattcgcaggtgctataagaagtagaatatctgctcgattccaacatctactccctagaacgtgctcatatgtctagactatttctctgattggtccagatactatctcatctctgtatgttgctcatgcacgccactccctctgtcacccagatagtcgtcgattactggctcctactgcgtgtttcgtcttccatgtgaactagcgagtaggggttgtccctgttatgctcctgcttctgcttactgtgggcttgtttgacagtaccttgctctgagatggcttaatattgctggctgtagtcgtcccatcttcttggtaactgagggaccctgagggatgacgtttgccaacatagactatttactatgggtgatgccttgccaaaaacaagcatgcctaggtattgggcatcagtgccactcttcatgatttattactcaacatgggctatgcatctatttaagtagcacgatgtgggggcatcttggcgagctgtttgacatgctgtggtcatgctctgacctatttgacttcatactttgaagaattgatgttatgcctctttgctctgctttgtcctgccatttcagctcacactcaggaagaatataacagataagtccatggttgcatgacttcttctttttaatcccaagaattttttccgaaactttatccttgtgggaaacgttggtagcatttgtgctaagatggacgagaggcacaatcggaagagtaaagcggggcccccactttttagacacggttactaacaggtattacttgctccacatccgcttaagaaacactattcggagataaacctgacgaaaaacaggaaatataaaactggcatgacgttgacccttaacatgataggaaagacaacacaagcacgtatcccacacccaccaccatcgn

SEQ ID NO: 707428 - DNA, 342 bp, Homo sapiens
attatttctgaggtatgagaactcaacacaacgctcagagttgtacactgctatatgtgacagtgcgatgatttgtcaccagcagtagggtctgcggggaggattctgggtgcaggtgtctgctgtatcttagtgatggtggagaacttcccagtgggggagctgacctggctgggttgtcttaggaggtagtgagcccccaggaattgcaggtgtccaggcagacgtaagatttaagcgcttttttttactccatcagaaggggccaggcaacagagaggcagcttcctcaggaccctctggacactgcctgacttacattccctgtaccccagagtttgg

SEQ ID NO: 707429 - DNA, 743 bp, Homo sapiens
agcggaggttcttttgccaatggcaaccagcagagcttcccctgaagattgcagggcatgagttcaggggctacgaagcgattagacgagatgtctgccgtcacagtcctgggtgaactcaactcctctccccgagagaccagacacgtcactatctgaaagtcaacattggcattctaaatccatcacctgacggccacatccatgacaagcagaaaacgctagtccgtagacaaagagttggcagcgaagaagaggacgaagccccaattctcttctgtgacctacgtagagcactgccggcgactgtggtctgggagccaccgtgatacttcttttagctgccagcctgaagattcttcgtgccctgagtaacctagttcctcacgacgttattgccagcgctcgtgggagagttgtaacttcgctgctagcctgaaaagctggggaaatggtactggtacacatatgagttctatgatatttacacagggctaacatcgccatgcatctcgacagggggcttgttggcacacgatgaggcaatgctccccattgtcacatagctaggacgtccgagatagcttaagatgaaagaagctgaataataatttgagtcagaatgagaagtgccttcccttcactatcgtcaggagagatgtcctgtgagcaacgttcttgggggacactaggaggacattactgaacgcatcatgactgtaaagatcatatctgtgtcagaa

SEQ ID NO: 707430 - DNA, 998 bp, Homo sapiens
gccttgatctcaaccggagacgatcgaattctgaagatgcaggccttatccggagcaaccaaccggaaaggagagggatctacaatatccaaacaacggatcaacagtcgaaatccacctgcgaacgccgctgtgatggaagcgatgttctgactgcagatatgtgcggcttcactgtgggccgaagagaccacagaccactgacattccaaattggcaattgacacaagctctggagaaacatgcgagctgaggcacagcacactaatgtatatcatatcgttggaccaaatcatatggttctggcagcagtgccgtgcatagccgtaagatctcgggcatgtgaaccgtacgtgcgtgatgccttagtatactgacagattgcacttctaaggagccttcgcaagaaaggaccagaaagagagtccatgcggagactgcgatacccgaaacgcacacacataggcacgtcacaggctgtccacttagtctaacagaacgacaggggagaaaccccgataatacttgtcacagcggcaaggccaccattagccatggctagagaccgtgttggatctccaggcatcactgtgcaacaagtactactttagctcccatgaggcaatacgaagcactcaggagcactacttagagcttgactacatggacgacagacggccatttcgcaaagacaacatataccatcgtcacactcaaccacagaggaacagatttgagcctacgcagaataccacacggaaaccacgctgcaatacaccagtacaccggtcacacactaaacaccccccttagctacgttgcactaaatcacaatacattacgacagtaccaacaaagaccgcagatgtaacacccgagccggcacattatacgtacagagcaaacaacgtagccactctagtagcaacccaggcactcccacacaaccgacaaataggaccaatgcccccatttggtcctatccacgcagacttcat

SEQ ID NO: 707431 - DNA, 126 bp, Homo sapiens
gcttaccttaccctcccacaaatcaaccaacttattctcacaaccgaagaaagaatggacacctcccattgagggacaaaaaaaaaattcacactctggcctgtggcaagttcacccggtcatttc

SEQ ID NO: 707432 - DNA, 176 bp, Homo sapiens
  misc_feature (16)..(16): n is a, c, g, or t
aatgtaaggcaccatnatcagcgccctgacaaaacaggccattcggctctaccaatcagcaggatgtgggtggggccagataagagaataaaagcaggctgcccgagccagcattggcaactcgctggggtccctttctacgctgtggaagctttgttctttcactcttgtgcaat

SEQ ID NO: 707433 - DNA, 1160 bp, Homo sapiens
tcgcgcttcaagaagctggctgacatgtactggaggctgtgcgatggactgactaggggactcgagagaggcggtgccccagacccatgctgctggtgacatgcagaaatcacgttgctggtggtttttcacgctcctcttcccgttgcagcatgacgtctctggggacacaccacgagactggttactgatgcagtatagtatacgctttatactctctccactttactagctctaataagtcagtgttagaacaagtttcgacttatttcttaacgctttttttcttttcccatcactcttaacatggctggctgagtgtccaaaagatccccaaactattaatattccacaaccaacaacttatagccatcagaaggttcacccagccaccttgcccgactcactcaccgcgacatccggctctcccttttacccacgaaggggcacaagttccacctactctagctcctgtcgcactggtgcactataattttcaaacatcaacaccactcgcagtgattctgcctcatacataaccattggtcgtgctcccttctgccctcttaccacacttcaacaaacacggcacacacatccacaagcgcaccaatagtgaggaacgcgtgcaacttagggtatgccacctaacacgattcaccattgacagccctatacccctccgcagggtgctcaccgcctatatcacttggacaccaacaaggacctcctcacagcgtagcgtgggaacaccctcagtgtgtcgtcacacaaacggtcttgattttcctaccttctcacaagctctacttctaccccacccgcacaaccccctgtctcgactataactccacccatggactaactaaacaccctatcaccacataacgatactacctatccacaccactaccacccacccaacatatactacgaatatcgagataacgacgcccacgcatccactcaacacatacccagaaacacctgacgcctcattccgcacacaacgtaaccttcactcccaaggctcttgacgtgtctgtgtgccacattctgagtagtctcaccgcctgggtcatccagtcttcaccaccagtctatcattgttggacaaggcccatcaataaccccaggtttcatagcagaaatatattatc

SEQ ID NO: 707434 - DNA, 191 bp, Homo sapiens
gtctctacagatcccccttcgactcgtcatgtgatatcgagctgttccttgccagctgctagagttacgaacagagtcacacctagcagcccgctatgctctgtattagtattgtgaataaagagcttttgtcctgctatcttaaacctttcattaattgtcccacagtactgtgccgcttggcttcattt

SEQ ID NO: 707435 - DNA, 778 bp, Homo sapiens
ggctggctccggggagatagcgcctgtcggagtcggtgggtcggtcctcgtcgccggtcctccccctccccggtctccgggggagtgcgcggtggagtcctgactcccggagtgttctccgagtggagggagaatgcgtgcgactggcggcagtggagtaagcctgacgccggagacgtgatgctggtcctccggttgccccgctaaaccccacgagaggccaatgggcgaaccaggctcgcccgcaccgccagcctggacgacatcagatctagtccgccctgcgggaccctggtgggatctatgagcatgtggaggtggtcggcaatggaacctacggacatggttgtacaagggtcggcatgtcaagacgggacaagctgtgctggcatcaaggacaatggatgtacacagtcagagacgacggaggaagagatcaaaaacacgcgagatcaccatggcttgatggacatgtaactcttcaccaccggcaacaagcgccacactacgtagcgggaagccatacatcaaagtagagagcgccccctggggagaaccgatggagcaaggatctaggagtggttgatggacagattccatggtgaagcgcctaggattacaggaggaaccttgagaccttggcagtaaaggcaacagaacaaatggcacaagacccctatagaaggaagagacatggtattcagaaccgaatatcttgcatgagaagaaacctcaaagggatctggccaatctgcgaataaggcacaaaggggaaata

SEQ ID NO: 707436 - DNA, 481 bp, Homo sapiens
gaaagtaagggtcggctggccccccttccctgtcctgatgccgccagctaggaaagggcagtgaacttgcatatggggcttagccttctagtcacagcctctatatttgatgctagaaaacccatattttttaatggaagaaaaataaaaggggcttcccccttcatcccctcccttaaacatataatattttaaaggtcaaaaaagcaatccccccccctgcaaaagctctttttgagcccttggtggcatcaaagcaggaggagccccaaaaccccctttggtgtccccccagggtacctgctcaggaaccccttttgttttttgaaaagtcaaaaaaggacattggctcccgccctgtgagattttgtttttaaacttggaaggggggaattattttaaataaagtcctttaaaaatctttttaaaaaataggaagcggcttatatatttaataataaaaaaagggccccagctgcca

SEQ ID NO: 707437 - DNA, 160 bp, Homo sapiens
tggtgagcacatctatagctgaagaactaggcagtggctccagcgctgggcggtggtggtgacaagtgagccaggtcaagaagaatggatttggccctagagtaggggttctccacatgtgacctcggccctacaagactctcttaggactatgtcagtg

SEQ ID NO: 707438 - DNA, 453 bp, Homo sapiens
  misc_feature (2)..(2): n is a, c, g, or t
cnaaatttcacctggggctcctcattattcttctggaaccccagaacttgaaagatctaaaggaaattgaatcttagtagagctcatgtctaccagccccaagcccctgcagcggggagactgctgtttgtgcttatctgtgcaggcgctgaataaaacggggcagctaaattctccagttccatgtgcctcctaatgtttaaaagaaaaaagcaaagtaacttgttaaaaattgacttgcaaaaaagtagaaactgttgggtggtggtgtaaagaaatggcattttcccaccaaggacaagccatccagttgtcagtcacaccgtatgaagcagcaaaggtgaaggagagaaaagggtatgtgtacaagagttgctttgcatggtctcatctgagatggttgcattcgaactgttgtaagaattgtaagaatcttgacttttttacgtttgg

SEQ ID NO: 707439 - DNA, 163 bp, Homo sapiens
  misc_feature (16)..(16): n is a, c, g, or t
agcagactccgtctgnggaaaaaaaacgaatgagaccatttaaaaatgtaattcgtttttggctgatttaaaatgtttgctcacagtggtgttgcctgagttaaatagatggaatagctattacattttataaagtgggtctcattcttattattttctgagt

SEQ ID NO: 707440 - DNA, 100 bp, Homo sapiens
cagaacattcacctttaattctgttacaggttccagtatttgcgcctcgaattgagctcgaattcgagcctcgaattcgaggctcgaattcgacttctaa

SEQ ID NO: 707441 - DNA, 206 bp, Homo sapiens
ctacgtggaactggtcgaggtcgcccaagcgaaatttttaatgcaggtttggtagtataggacctgtgggttgggaggtactgtttgcagttaataaagttaaagctccgatcagggtctatctcgtctatgctgtgcttatgccctgccatcttcacgaggcggagcaagttccacattagtgcgggtaccggagctcgacattc

SEQ ID NO: 707442 - DNA, 187 bp, Homo sapiens
gcaccctgagtgtcatctcgctgaggctcttcctgctgctgtctccctggacgacctggctcgagcaacctgggcccacagccctgcatgtctcaccctgcatatcctaggtttgaagagaactgctcagatccgcttatttctgccagtatattttggacactttataatcattaaagcactttcc

SEQ ID NO: 707443 - DNA, 513 bp, Homo sapiens
ccccagttaacactgtcagggggggccaagggactttttttaccctgcctgaactcgagagcctagagcctctaatggacggggcaggccaccctgaagggaagacactagaagaggggcctgcagactcaagtttgacttccaggcgcagtcccccaaggagctgactctgcggaagggtgacattgtttacatccacgaggaggtggacaagaactggctgtagggaaagcacctctggcgcctgggcatattccttgttaattatatgaaggtgctgccggcacatgatatccttaaccccatcaagcccccgacctaccaggggctgtagtttgtagaggctgtggcccagaacaccttcatgggggacctgcaggtggagctgtccttccgaagggaacagcacatttgcctgatccgtaaggtggactagaactggtacgagggacgcattacgggcacggggcaccaaggcgtattccctgccagctacgtgcaggcgtctcgtga

SEQ ID NO: 707444 - DNA, 388 bp, Homo sapiens
cgatgtacttttcatccaaaatacgcgagggcacttcttatgacctgctcagcgcgataatggcaggcaaggtccgagagaccttcctgcacatggtgtctctccaaatggtcagtatgccaaggaaccatgtattagggtaatgtgtcctgaaccccatcactatgctctatacacattatttaaatggtttgcagcccatggattcctttgtattggtattgtggaaataaaatacaaataggtaataatagttacagtaaaaacaaacaaagcctgtttgaaaaaacctagacatagtcctcagtatatgctattgaaatgtcgatacactaaatcagaataagaatggaaactttaaagtgaaaaattccccttagttaaaaag

SEQ ID NO: 707445 - DNA, 487 bp, Homo sapiens
atccaccctggtaaaaggtcacttattcccaaattgatataaatgtttaacacaattcatatcaaccttccagtccaatgtttggtagatatagccaatattattataaaatatatatggaaaggcagaagaactaaagtagctgacacaacttagcaaaggagaataaaatgggatgaatccacccattgatttcaagttttgcttagccagtcatcaggagtgcgggatactggtgaaaggatatacacatagatccatgggacacaataagtgaccgggaacacgcgtgcacatatgcgcaactaatttttaacaaaggtgccaaagtagtttaatggaagaagatagccttttccacaaatggaactctagcagttagaaatcccaaataaatggacttcctcctaagtttccccccttaaaaaaacttaccccaaattctggaggttaatgttaaatatggacatatttatcttttagggga

SEQ ID NO: 707446 - DNA, 650 bp, Homo sapiens
agtttagcgcttgctttgtcttcctctgctctgcttccctacttaggaaaatttcaagctgcaggttcagcggctgccgtctttaacgagagcattcactacacttatggctggaattaggcgcttagtacttcaacggccctcaggcagactacaaaccgtgacaaacggtgtggaggatcttatttgtgcagataggattcgttacaaatgcaccagatcaagaattccagtaaaagggtttcaggcctcacctgaagatcatgagaagtaccatggggatccacagaacccttataaactgcatattgataccagcattaaaagtacaagaagactgccatattgacagaaagagctactaaagatgctaggattatacaaagcacgtacccatcatgctcacaagaatatccctacagtgaatgcagaattgaaagtcgttaagcatttgataacgagtaagcccttgaagttgccacaaggactttcacagggtgagacaggtttacaagaggcctaaaacactgtgagttaagactgcaatggcatttggaccttgtgagcagaaaggacatgattcctattgcccaacagatttccaatgggcacaatgttctaattgatggtcataagtgtttttttcctgg

SEQ ID NO: 707447 - DNA, 185 bp, Homo sapiens
  misc_feature (56)..(56): n is a, c, g, or t
tggtgataaaggcggatgaggggcatctctactggttgaccaaatccaccagcttnctcagtgactggtcctcagcctgccgatcagcagctgtctttaggttttctccccttcatccgcttatacaattggggtacctgagctctgaattctgtaagtcattgggtccataaagactttggtta

SEQ ID NO: 707448 - DNA, 331 bp, Homo sapiens
tgtttttttttattattttattttattttgttttctcccggggtattcttttggggtttttgtcagttttttgctttaattgatgggtcggttttttttccagtggttttttggccattgggccttttttgttttgttggttttttcttttcgattgtctttttttttgttttttttgttttttgtggtggtggtaggttgtaggttttttttttggttgtatttgtttttttttttttttagtttgtttgttttttttttgtattttatttagttttttttacctttgccattagatttttagtaaaataaaagcccggaccaaaaaaaa

SEQ ID NO: 707449 - DNA, 366 bp, Homo sapiens
  misc_feature (359)..(360): n is a, c, g, or t
tgcactccatcctgggtgacatagtgagaccctgtctcaaaaaaacaacaaaataaaacaaaaacttggcatcaaattaaataactattaagtattaattgtaattttaaaaaagacatattatggccaagtgtggtggctcgcgcctgtagtcccagcactttgggaggccgaggcgggcggatcatgaggtcaggagatcgcgaccatcctggctaacacggtgaagccctgtctctactaaaaatacacacacacaaaataagttagccgggcatggtggcatgtgcctgtaatcccagctactccagaggctgaggcaggagaatcgcttgaatgtggagataggaaggggtganngagcaa

SEQ ID NO: 707450 - DNA, 427 bp, Homo sapiens
gctactcgcgttgtcaaataaagatatttgtttcccggcgtagagttgactctacagacacaggttgcagcaaatagaacatgcgggatatgacaaaatgaaggagaaagttgaacgtattctttagcattgaataaattgctttattaacaggctattaatttattattatcctgaacagctctttggtgctgctggtgtcatggctattgagcatgcagattttgcaggtgtggaacgccttagctcttgtcacaggtggtgaaattgcctctacctttgatcacccagaactggtgaagcttggaagttgcaaacttatcgaggaagtcatgattggagaagacaaactcattcacttttctggggttgcccttggtgaggcttgtaccattgttttgcgtggtgccactcaacaaattttaga

SEQ ID NO: 707451 - DNA, 138 bp, Homo sapiens
gtcaaggcatgacttgcctctagcaagctgtagtcttcccaggcccccacctttgccttgttaaaggattgttcctgtatgagaccaaagtatcagatttaatatagtcccagcagacttagaacacaggaaaattag

SEQ ID NO: 707452 - DNA, 409 bp, Homo sapiens
cacgcggggatatctctatgtgtgtttctataatgggcctctgacacagatgtggcgttggatatagagaaacactattgcgttaacatatggcacattatttaaagcgcgtgtttcacactatcctttcatatttattccttggataaatttgggagggacgcgcgagaccaaatttcctttcatatggaccattcccatagcgtttgaggaaaggggttttgagatgagaggattccaccaataactcggccaagggggattacacccaaatttcttaagaggagttctggatataaaggttagatatggcctgaaagttggttagagggacacagagagagccgggtctttggaagagtttcggcgttacattaccttcattagagtgagagaggttgcgctcttt

SEQ ID NO: 707453 - DNA, 188 bp, Homo sapiens
tagtcacatattactgggaggcttttttcattcctttccattcttttttctctattcttgtctgcatgtcttatttcagtaaggtggtcttcaaactcttatatcctttcttcggcttggtcgattaggctgtggatgcttaagaatttatcagcagttctccggtgcaaggcttcaacttcagtgtg

SEQ ID NO: 707454 - DNA, 1178 bp, Homo sapiens
ctaaaaaaaaaaaaaaagaaagaaagaaaaaaagcaacgaaacataaaacacacaagcgccccgttgcccccagttgacttcttgggccttctacagagccccctgccagccatgcattggggccgccggccgtgcatgccatgtcacggcgcgccctcacgatcgctagccccctcgtgtgctgtcctttccaagccgccacggtgcatttgtactatttcatcctatgccgcgcgttcatttatcttcaatcaacaaaaggcgttggagaactcggaagaactggacgatttttccccattttttaagattattgacagcccaagcgcgcctcgccatctttcaccctatctaacgctgtgctttgcccacttggacttccttgaaaagggggtgggaggagatcccatcggtcgcccacccttgggaagtgcctaaccttttattttaattcacagtttatacacgagcgaaacaagaaccgcctgattcacaggttgaacgaaaccacccctgggccctctcatcatggccgggattccccagtccctctgcacaggctgggaagggtccccgggctggacccacgggggcttcatctgggctgtgcctccggggacaacaatgggctgcttggccctgcccggggacatccagaggcgctgcacggccacccttgcctggctaaacagaacccaccaggagccaacgttgggctaggagagactgaaaaggaaatgtcagccagatagagcctggacaaacagggaccttcaatacgacgcactataccaccactcatcaccaattcggatagtacaccatatacgagacaacaccaaagtaaggaacggaacaacatcaaacacatatacaaagagtgctaccaccaaaaggaacaaacacgaggcaagcacacccaaccacagcacgaacgaaggccacacgagcccatgcctacccaaagtcaccacccacaatgcgcaaccaagacaaacaacctagtccgagacacccaacaaaggtcaggaaacaccacgcacaaccagcaggacgtagccccaaccgacgggacctagagacgacagaacacacaaacagacagaacgcaaacacaaccttcaacaccggcagcagagtagacatagactaacacaaccaactagaatggagcaaa

SEQ ID NO: 707455 - DNA, 432 bp, Homo sapiens
agccgatccccatgccaataacctccattggtgtgacactaactttagaaggtacatcttaccaagacaaggtgggggaagttcaggttctgtagcatccttcacctcatctgaaagcttgtagttgattttatgtattgcagcccattcaaaaataatcttgtaaagcatagtgtttgcttaaacttgagacagcttgcaatgtggcttccgtttagtgtgacacaaacctgttgtggactctctattataccacagaaattgttataaccaccacgtctatttgtcttccagaaggacacttgagagtcacttgtaaaagttggcctgtgctttcctattaaaaactgctgtgtaaatggtagttagtctcctgtttagtatgcggagtagctagatcaccctgcattcacaatgctctacattatgaaa

SEQ ID NO: 707456 - DNA, 150 bp, Homo sapiens
agactcgatggaaaatagcttgattactcctctctcatctgtcgattgtatagggaggcgagaggaacaggtgacagtctaccctcccttagcaggaatactcccacctgagctccgtagactaaccatctctccttacgccgatgcggg

SEQ ID NO: 707457 - DNA, 534 bp, Homo sapiens
  misc_feature (172)..(172): n is a, c, g, or t
ccgaattggtgcccgtgcctgagtgtggggcgaatactcagctgcagtatcagtgccagcttctattataatcctgtgcctcagcacggcagtggctgactagatatgagacagcggataagttgttagcagggtcacagccaacattggctgattactcatgacgcatgtncatgttgtacctgtgagtgtagcaccacctgtgagactgtagtagtgctgacgtaccagcagaggcagtcttgcagagcatccgagtgcgacaacgataccagatctgggatcagaggctaatgtccagctagcatgcaaccaagccagagtggtatgcgaagcacgggcattaagggttacttgtgtacatcagccagtagtggcagtggaagtctatacagtagcgtgagagtatgagaacctgcaggggcagtctcagctccagtacatgtttcagtaggcagccagatcgtcactgagcactagtagcaacagtgagagttgcaatactcgtctggtccgcgacttaatgccgacggc

SEQ ID NO: 707458 - DNA, 863 bp, Homo sapiens
ggtcggtcacgacgagggagaagcggacgtgtcatctgaaccagatgtctgagcttctgtagccgcgttgtagcaacacagggttcttacacgctgcttgtccaagggggtctgtaacaaaggcgtgggctttctcaaacgtgaacgatggtcccacacgggccttaaaaaggctgtgtctggcccaaaacaagactctcaccggttgggaaccaagcttcctgtttttttccgacccctctttttggggaaaaaacaccgccctccgtttgcctcagtgaatgcaccccgggaagaaaacatagccgggggacaaacgtagcccgagaccaaaacgggcaccgctgtggtccccaaggccccccagccccccggcttcatgaaacaacacctgtcgagagacccctcgtaagaaaagagacttatctcccctctgagggaaactggtcttctctgggcgaggacacacacagacaaaaactcaaggggaccacagaacgccaccccggggtagtacatcgcattgaggtggaacagaacaataatgtggtcacttccgcgcgaagacaagaaaatgatgggggggaaatacaaactcgtgtaggttctctctcttatgcaataatgactcccgaacatgtgtcactcgccccacgcaaaatatcctttggccgattcgtgggttataacaccggcggtcagtgtatgccatctcccccaatggacatatatctaatcattaagttgctgttataacaaaaataagccccacaatctggatagggaccccgagaagtcccaatcaacaaaaatttcggggccctagcacggaaaaaaaaacaaaataaaatccccacataaca

SEQ ID NO: 707459 - DNA, 108 bp, Homo sapiens
aaatcagtgctgtcaggaaaatgtacctgtctcttctactcaacacacaactgatgataggcccctgagctccctttccaagagaatatactaaacaaggacttaaca

SEQ ID NO: 707460 - DNA, 348 bp, Homo sapiens
gtaaagtttctcacactcaagtcgtcttcatagtttactgtccttttccaaacaaaagctaataacgccatacgcatccacacactccctcctggatgaacctaagtctcgtccccactgtcaccccaaggccagttatcaaacaaaagctaataacgccatacgcatccacacactccctcctggatgaacctaagtctcgtccccactgtcaccccaaggccagttatcaaaaactgttccttctctgccctcaaagactgaagccgcagccctgttctgcctctgctcaggaatctgattgctcttaaagtgctcttacaagattccgtcgatgtttgctccctc

SEQ ID NO: 707461 - DNA, 306 bp, Homo sapiens
  misc_feature (123)..(123): n is a, c, g, or t
  misc_feature (169)..(169): n is a, c, g, or t
  misc_feature (211)..(211): n is a, c, g, or t
  misc_feature (259)..(259): n is a, c, g, or t
  misc_feature (284)..(284): n is a, c, g, or t
gagcatgtaacggtgcaggtggtggtcgtgcggaaacgggaaggcctgctgcattccagccacatctcggaggagctgaccacaactacagagatgatgatgggccggttcgagcgggatgcnttcgacacgctgttcgaccacgccccggataagctcagcgtggtgnagaagtctctcatcacttttgtgaacaagcacctgaacaagntgaatttggaggtgacggaacttggagaccccagttttgcagattggngtgtacctggttctgctcatgggcnttcttggaagacttaacttttg

SEQ ID NO: 707462 - DNA, 146 bp, Homo sapiens
gttcacatgtggcgacggggtctcaggaaatggggaggcctgataagagtgagagaggggaagaagagttgatagaagagtcagaaacaaagattaataaagtttggcattaatatgggtgtggtacgtggtgacgtaaaacaatt

SEQ ID NO: 707463 - DNA, 314 bp, Homo sapiens
  misc_feature (33)..(33): n is a, c, g, or t
  misc_feature (37)..(37): n is a, c, g, or t
  misc_feature (77)..(77): n is a, c, g, or t
  misc_feature (261)..(261): n is a, c, g, or t
  misc_feature (274)..(274): n is a, c, g, or t
  misc_feature (287)..(287): n is a, c, g, or t
gaattcggcacgaggcaaccccgagatcccggncgcncctggagaggaacattggcttctggacacaagcctaaatnaggtctgttggccggcagtcactcaagagcaatccccagctttccttcgcaacacgaatggaagattggactttcctgggccaacacaagaggcatcctgaattccccgtcgtaactcgagaatcccgccgcaactcgagaaaaaccacgtgcttcccccgtcatcgcaagatgaagccctttncctctacagcgtntcaggaggaagtnccacggttaggaattgggaggttcgga

SEQ ID NO: 707464 - DNA, 268 bp, Homo sapiens
  misc_feature (124)..(124): n is a, c, g, or t
atcggtcctgcgtactgggcgtatgcccttttcctaacactcacaacaaaactactaatactaacatctcagacgctcaggaaatagaaaccgtctgaattgattatgtcggccgtttgtccangagtttcatagggggaccagccctaggcctgctttagattgtaaattaggtcatccatcgcacggttgccatcttgtcaatgggccagtaatcgtctggaatgattcattgaaacgacgacggtccactaatatttgactcttt

SEQ ID NO: 707465 - DNA, 295 bp, Homo sapiens
tggagagatttcagacagctttgaagattgtattgattcatttattttgaaaaaggggaggaggaggggagggactcttttgtttttcttccacccaggttttggcttcctgagggtttcttacagcgtttagggtttctttaggggcccagcttttcttcagtttttttgctacttcaacttttttgttcttccagtcttttaactaagacagagacactgcaaaccagcagacagagcatcacctttaaagtcctaaacagctgtcaatcttgaaatctcttccccgcaaaaa

SEQ ID NO: 707466 - DNA, 780 bp, Homo sapiens
gttggctggcgtgctgggaaaccatgatgtgccacgttggatgtcgtcttgtctcatctagcaagcggtctcaggagcagatgggcggtccagggattcgttgtgacatgtgtggcgggctggcgctgcattgttttccaccgcatcatagagggcttgcattcccagtatgagccgaatgtttcattgggcaacaagtcgaccaagaagagctaaaccagtctttgcaccacattgggaagctttccacctacttaacgtggcagcaaattgttttaacggcaggggaaggggtccaacaaacaaccacatttgggcgagctctgtctggggcagacacgttcacgagtggggcccatgtcaactttttacaccaagcgtcattatttatgtgggcacgagacaaatatgggcgccgcgtcataatgcgacttcgtacatcgttactatgacgcacgtcgtaggtggcaaacttcgttgtcattctaatacaccaagctgttggggtacgtaaaggaggaaattaagttacgagttacgcaattttataaagaaagtggttttggttgagttaagaattttagtgttgcaagaaggttgtgattaccttacagagtggggacatttctaggaagataagcagggataggttctatgagcgaaaagtaaattaaaccctgagaatttagtatagggacagaggatggtgttattattgaggagcgcaagccgataacgagaagggtaaagtaatgtgagttgctttagcacgattgaggg

SEQ ID NO: 707467 - DNA, 147 bp, Homo sapiens
gatccccggcgttgcgtgtcacttatgagtgggactactatgggatttagcggggtgatgcctgttgggggccagtgccctcctatttggggggtagggcgctaagctggacgtggtacaaaggctcatgaagacatcctgccgaat

SEQ ID NO: 707468 - DNA, 1883 bp, Homo sapiens
ggggggcggggaatccttccgcccttcttaggaggggctgcatcgcacgggggagagtgaactgacagacctcagtcactgacgacgggacaaacggagtcgacgaaggacaaacgccgtcaaacgccccaaccagcttccgtactttctccacgcccggcgcactcccccgcgacctcccgaggcacctccctccactcttcggcacacacgccagctaactctgactcgactacccagcgcagcctctgccgggaccctgctgcacctcgccccgctcccgcttccctcttctttctctggccggcatcgcccattcccagcaactcgcctctcgtcgcgcccctgcgccgcgcctgcgtccgtcccgctacagccacctccccaggctccccagcccagccgcgctcggccccagcgctccgggccccggcaccctgcacgcccgacccagcgcaccaccccccctggccggtggctggcctcccttgcagctaccgcccccttcaacttctggccgagctccccacttgcccgccctcccctcccttcgcacctggactggctcctacggccgcagcgactcctctctccgcatctccttgcgcctcccttggtctcccctctcatgcgccgttctttccactcctgtcccattttatctggtcccctcccttctgtgctcggcgcgcgcgccgactctgcccgcgtgacgcccgcactcccgccccaccggcccccctctcccaacgcgctagcccagcatcgtcccccgccctggcccgcctccttccccaattctctagcgcgtgcgcccaccatgtcacgctcgtgccatacgccctccggctccgcggcacttgtggtttggtgtttgttccggagtgtcgtcccccctcccccgcccctcccccccccgccgccgtcgccgcccctgccgccccgccccgcccgcgccctccgcgccctgcccggtcgccccctccgtcgcgtccgccgcccccgccccgccctcgcgcccgccccgccgcgctctcgcctcccccgcccacccgccgccgcccgcctctcacgcggccgccgccgctggccaccgcgcgccgccccgccgcaggccgccagcgccggcagcgccgctccgcgccgcacccggcgccttcacccacgactcgtgcgggcgcccgcgccgacggccgcgacgcccggcgggcagctggcgaccgaggcgcgcgcacgcgccgccaccgacgtgcacggccgcgcaccgcccagcacccacgtggcgctcctgcctggccccggcgccgtcggcgtgccgtggcgggcgcggccgtcgcggtgccgcgccggccgcgcggcggacgtgggaaggcggacgcggcgggtcgtcggcactcggctgcgagcgcgcaggcatggccagcggcgcccgccgcggcagccgccgcgccccgccgctcccgcaccgcgcccgcgtccgcccgccgcgcgacgcgcgcctgactccgccccgccgccgccgcccgccccacggcgcccagcgagcgcgccacgagcccatgcacagcgccacgagccagttcagcgggctcgatactacctcgtcccctcttctcactcctctcacacgcccgtcactcctccacactcctcacccacacactcgctgaccctctcctcctcgccgccccactcccgcacgacccgcccaccaccgtacccatctcctgctccctcttcgtctagctcgccacctctacctcctcctctcctctctctctcccccatctccgctctcccccagccaccaccacaccaccacagcacccgttcacgctccaccgcccgtccgcgccgatcgctcacaccaccctcataagaac

SEQ ID NO: 707469 - DNA, 142 bp, Homo sapiens
gttagtaggacaatctatcagcctcatagaatatatattgtagtataagtaacatgaaaacattctcctccgcgataagcctgcgtcagattaatacagctgaatgtgacaattaagcagcccaagtatctagcaatcaacc

SEQ ID NO: 707470 - DNA, 177 bp, Homo sapiens
cccgagcgccgttccggttgcaccgcgttcgttccgagtttcaggttcgtgctaagttagcgccgtcgtcgtctccctacagtcgccatcatgattatctaccgggccctcaataagaaacgatgagatgttctccgaaatctaaaagatccgggagatcgcggacggtttgtcgct

SEQ ID NO: 707471 - DNA, 435 bp, Homo sapiens
  misc_feature (266)..(266): n is a, c, g, or t
  misc_feature (302)..(302): n is a, c, g, or t
  misc_feature (337)..(337): n is a, c, g, or t
ctgcctcagcctcctgaatacctaggactacgggtgcgccaccagtcctacctaatttttgtatttttagtagagaacggggtttcacccatattggctgggctggtctcaaactcctgacctcaggtgatccgcccaccttggcctcccaaagtgctgggattacaagcgtgagccaccgcgcccagccaagttggttattgtatatattttgcattaaactgaacttcgatgaccaccagataatacaaatgttaatgaactanacggaaatatgtgccataggaaaatgggttagattnatcagaaaatctgttgagcagtaagaagtgggtangaaaacaaggtctcgttgcatgttgcaagggatataaaaccctaacccatttaaaaagatgaatgtcagcctgggcaacttagtgagaccttgtctgt

SEQ ID NO: 707472 - DNA, 193 bp, Homo sapiens
  misc_feature (4)..(4): n is a, c, g, or t
  misc_feature (17)..(17): n is a, c, g, or t
atcnttatgagccacanatcacaaggctgggatccatgctcagccatctgataaagaggggcttacttctgagcatggtattgatctacttctgtaattgtggggattcttaaaacgctctggtacgtatgacggtgttccccgaaccagctgtgaggatccgggaaaggaagagcgggagatacaaagattc

SEQ ID NO: 707473 - DNA, 189 bp, Homo sapiens
gttctattgtattcaaggctcctagttcgaccagatattgtgaacttcgttcacaccaatgtatgtcgctgaaccaccggagagccctatgctgtcagctgaattagcaggtcactctatgactagtgctgagtcttggggtactggcagagctgtggctctaattcccacatttcgaggtggtgtgac

SEQ ID NO: 707474 - DNA, 332 bp, Homo sapiens
  misc_feature (48)..(49): n is a, c, g, or t
  misc_feature (55)..(55): n is a, c, g, or t
  misc_feature (236)..(236): n is a, c, g, or t
  misc_feature (287)..(287): n is a, c, g, or t
  misc_feature (289)..(289): n is a, c, g, or t
aaagaaaagaaaaacaataacacacacatcagaccaaccacagagaannacatgntcacatggatgagtgttagggaagaagatctagcgcccttctccctccggaagaggtgggagtcggagcctcacccatacgttttcttcaatgacgaccacacaaccatgacattcatcggcttccatctgcagcccaacatcaacggcagtgtcgatgccatcagtcacttgactggganggtcatcaagagagacgtcatgaccagggacctgtaccagggcctgctgcncnagaggtgcccttcaatgtcgactttgataaactgcccagacac

SEQ ID NO: 707475 - DNA, 554 bp, Homo sapiens
tcactcggtacctgcttattgcccagggtgagactcaggaaactctcttccagtctccatccagctcgttaataggtgatgagatgagattcaggcagtgactatatgcaactcccttgtactttcctgtaagcacaagtttactgatcaatgataggagtgtgttgatcacaggtctagtccgtctgtgctttggtgagtcgaatactgccggcctagagtgctcaaatcgacttgcaatagggatgatcatcgacatggaatctgtgccttctagcttggccatatgtcccccattgttcccgtattgatattatgttgatatcagcgaaccgtgcatctatcattgcctgcagagtctataagcatttatgattccttgtaattattgatcatgtggtcttttgttgctatactaagggtctaaatctgattcaggttagctgttgatgcctttgactgtaactgtaattctctaactttcaacccttttatcatcaaggacctcaactattattttttgttccatatttgaaaacttttggtgttccaga

SEQ ID NO: 707476 - DNA, 354 bp, Homo sapiens
  misc_feature (42)..(42): n is a, c, g, or t
  misc_feature (54)..(54): n is a, c, g, or t
  misc_feature (122)..(122): n is a, c, g, or t
  misc_feature (200)..(200): n is a, c, g, or t
  misc_feature (256)..(257): n is a, c, g, or t
  misc_feature (292)..(292): n is a, c, g, or t
ggagtagaggctcagtgagctatggtcacactagtgtacgcngccgggtgacanggtgagaccctgtctcttaaaaaaacaacaaacaaaaatagtgataatgtatatttagcataaataanatgtctacaaatgaattttagaatgtgtagatgagattagaggattgaggaaggaatgagtcttacctttggtagttnggagttggagcagcagctaaagctacgcagcaaagacaaccagaaaattcatgggnnaacagttttgacctgtctttcagctccaagttctngggtcctttttctaagcagctcccagtttgttccatagcattccaccaattttcctttaagc

SEQ ID NO: 707477 - DNA, 104 bp, Homo sapiens
gacttctagagagatcccctcctgctatctcgccgctttctgcttctgccatccgaggacaactatattaagttggatttttggagcagtgctcttggtgagcg

SEQ ID NO: 707478 - DNA, 625 bp, Homo sapiens
  misc_feature (43)..(43): n is a, c, g, or t
  misc_feature (106)..(106): n is a, c, g, or t
  misc_feature (122)..(122): n is a, c, g, or t
  misc_feature (189)..(189): n is a, c, g, or t
  misc_feature (194)..(194): n is a, c, g, or t
  misc_feature (201)..(201): n is a, c, g, or t
  misc_feature (210)..(210): n is a, c, g, or t
  misc_feature (212)..(212): n is a, c, g, or t
  misc_feature (217)..(217): n is a, c, g, or t
  misc_feature (245)..(245): n is a, c, g, or t
  misc_feature (259)..(260): n is a, c, g, or t
  misc_feature (310)..(310): n is a, c, g, or t
  misc_feature (323)..(323): n is a, c, g, or t
  misc_feature (388)..(388): n is a, c, g, or t
  misc_feature (394)..(394): n is a, c, g, or t
  misc_feature (420)..(420): n is a, c, g, or t
  misc_feature (497)..(497): n is a, c, g, or t
  misc_feature (502)..(502): n is a, c, g, or t
  misc_feature (560)..(560): n is a, c, g, or t
  misc_feature (572)..(572): n is a, c, g, or t
  misc_feature (576)..(577): n is a, c, g, or t
  misc_feature (600)..(600): n is a, c, g, or t
  misc_feature (610)..(610): n is a, c, g, or t
  misc_feature (621)..(621): n is a, c, g, or t
cctgcctttaaaaaaaatcagcattggtcctattaaggccatnaggataaattcttaagcctacaaaagacgccttagtactactgcgcccaggcccaataatgtnaactaaaatctgactncaaagcccaggtgtagtttctagttccatttctacagtcattcagaagcacgttttaacttgatttncagangtcagtngaggacccnancagtnctatcaacctctataagagggggacatntagcctacttgctnntacccttctagccatatccaccccttatttttaatgggacaccagggcancccatttattgcnataaactaaggttttccccgggaaaaaacaaggcttttctctagaccagctggactggtcatggngggagntttataaaagtggctgtttgccagtnaaaaaagggttcatttctcgaactttttccttttccttttctgggctccttatctttttctggttttgaaggctttnaagantttgtctttttcttgatcatggcatcagtttctatagcatcttggtctttctcatcanattgagagttancttnntttaattcttcattgtattccgnaaccagggangggctttttcngtgt

SEQ ID NO: 707479 - DNA, 484 bp, Homo sapiens
  misc_feature (241)..(241): n is a, c, g, or t
  misc_feature (283)..(283): n is a, c, g, or t
  misc_feature (291)..(291): n is a, c, g, or t
  misc_feature (322)..(322): n is a, c, g, or t
  misc_feature (328)..(328): n is a, c, g, or t
  misc_feature (338)..(338): n is a, c, g, or t
  misc_feature (363)..(363): n is a, c, g, or t
  misc_feature (424)..(424): n is a, c, g, or t
  misc_feature (430)..(430): n is a, c, g, or t
tttccattacataggcaaagtttgttttttcccatatcaaagccaaatattatttgatgtactgaccaataatatatgtagaaagaataacagcaaaatatcttatttctttatataatttaatatataccctattaacaccagtgtgcagatgtacagtctgacagtatactaaatagttagtattaaaaattactttaaaaatgttttcaacattaggtactggtggaaccagagctgntattttgtcatcatatcatttatgtgttgcaaaggaaaagtnaaatttcnggagcattaggaatgtactggtattttatgnagattncaaatctcanacattatgaaacctccaatctatgngcctataaacactttaacacttgctatctggtcataaggtcttaaatatgaaccataaacncatttncaagctttgtttaagcaattgctgttaattggcactttaggcctgtacattgtg

SEQ ID NO: 707480 - DNA, 271 bp, Homo sapiens
tcggaaatagcgacgtatgtgcgggtgtggcctgaaaagaaaaaaggaaagaaacatactccccaccagtgaactggaagcagaaacaggagctttggggtcccacaggatagattctgtctctgtgctgagagtctgctcatttggaggagccccagggcccattcactccagtgagacgcccacccatgtgggggaccccttggtgggatgacagcctggcggccagtcgcgtaaattttccggcgtaccgaggctcgaacttcggtaa

SEQ ID NO: 707481 - DNA, 471 bp, Homo sapiens
  misc_feature (45)..(45): n is a, c, g, or t
  misc_feature (96)..(97): n is a, c, g, or t
  misc_feature (168)..(168): n is a, c, g, or t
  misc_feature (170)..(170): n is a, c, g, or t
  misc_feature (197)..(198): n is a, c, g, or t
  misc_feature (216)..(216): n is a, c, g, or t
  misc_feature (261)..(261): n is a, c, g, or t
  misc_feature (268)..(268): n is a, c, g, or t
  misc_feature (273)..(273): n is a, c, g, or t
  misc_feature (462)..(462): n is a, c, g, or t
tccgggcgcttggagaagatggtgctgcggcggctgctggccgcntgcgtgcacagcccgcagctggtggaacgtctgtcagagtcgcggcctatnngacgtgcggcgcactcacggccgttcgcactgcatgcaggcccagcgtgcggggcaggacgcggcccgccncntgcaggacctcgcggctgggccgtggnntcccgtgtgccgccgcgntgaggatgttagagactccttcacccaggagcgtactccgcggcntccgagncgtcnggggccaccaccaaggtagccagaggggccctggcgcaaacatttaatcctgggctgtgcggggccgaggcgcttgcttttccttccgggctctacagtggcatcaatgtggaggggtcattccgggcactgcgcgcggcttcgaatcccgactgggattgttggcctgcaagacatcccacgcataanagctaggca

SEQ ID NO: 707482 - DNA, 93 bp, Homo sapiens
  misc_feature (68)..(68): n is a, c, g, or t
  misc_feature (70)..(70): n is a, c, g, or t
gatctaaaaaatacaaaatgtagacaattactattcaggtgcttacttttaagccaatatgtagcagngnaaaactaatttctctgtggcagt

SEQ ID NO: 707483 - DNA, 188 bp, Homo sapiens
  misc_feature (98)..(98): n is a, c, g, or t
tatcatacagtccttgagctggctactctctagcgagctcagctctcctgagctggcggacgaggaactgagctccagagagtattcagcgagcctgncacagcttgctgtcagaagtacactcgagcgtcagctgcgctgctgcagcgagtcctctcgtctctacacgctatcagcggtgtatagct

SEQ ID NO: 707484 - DNA, 157 bp, Homo sapiens
gaggctgaatggagtcacggggcgcgcacgcggggaaacactacaaggtgcggcttgatgagtacgatcactccaagcccatccaggtgcaacagacagaagcccatttgagcgagcactggagagaagcacaccactgtcctactgtggacgtcag

SEQ ID NO: 707485 - DNA, 894 bp, Homo sapiens
  misc_feature (658)..(658): n is a, c, g, or t
  misc_feature (763)..(763): n is a, c, g, or t
gaacatgtggtgacaaaattcatgtctgtcgcgaatccgaggctgttcatcttataaaagcggtgtccgggttgctgaactgtgtcccaggaggaggagaacatgctcaaggaaaagtctggaagtataagatgtcatggttggggtgccaaaggcagctcccaagggcagcatgcggacgtctatctcaaagcctcggataccatggtcctagaggggactacccaaggatggagctccgtgggttgacactttttctgtgaaaagaacactgaggcaccagtctgggtgggtttgtaatcactgtaactgcagtattgtgtacaaggtgtctaaacatgtgtacaagactaaccgccagttccctgcaggcgtgagctgaacctcagggggtaagcgtgatcctgtcattctggtcaccaatagcaggagggtcctggcactacgccagatttccaccatgtgctgctaatatcccagctccagccagaacccatctgcagctgaatgctctaacttcacggtagcagttacagctgaagtgcatcagatctggcaggcacactgagtcaccaggtagcgctgctactggaggtagagacgggccttcggagatggtgcccagcaggtcaaaccaactggctctgtcaggaacagncgattgcatgggaactctatgggagtggcttttaaccttccgatgaggttaaaagggtgtagacccttccttctcagaaaattttctaccgggttgtttgaagcnttgaaatttgaggaacccccctaagggggcggggtaatagagaaagaagcccttgagggagattccttagagaggttttaagaactttgaaaaccgcccttttaaggtcgtttggggtgtgggacagaaat

SEQ ID NO: 707486 - DNA, 495 bp, Homo sapiens
agaccctactctagaaagcactcttctgggcattgggttgggaagtggctaagacagggttcttcaggtttagttggcaagtatatgatcactaccaaataatgagatgtacagatagtaaattggcagttgagaggagagaaaacaatgggctgtgactgttgtggaaagtttactggaagaactcaatttaggtcttaaaagagagatcctttggatgggagaggagggcattgtaggtagaaagaacagttgatgctgagaagcaggtctaggcaaggcttatttaagaggagtgtcgttggagataccaggctgtgtctaagggtgatgttaggattaatgagaaattaaggagcaaagataggttatggccagtgagtgactttagaacattataccagtctttccggcagaatttaaaattattttctgtaccttttctcctttaaaaagcattttatcttgaatcatgcaagtctataggtaagatta

SEQ ID NO: 707487 - DNA, 344 bp, Homo sapiens
agacagccaagattttcatagaaggcctaccacgacagcatccgtgaccaccatagaacacaaagcccaagatggaattgtcaaaatattttcaaactccaagaaagaggattgtgtctggttaactccaaagaaaccacctgtctgacaactacaccggccacagctgcaccccagcacctggcaaaagctactgtaatttaggatcctaccacaaccctgaaacaattgcctttttagttgtcgactaccaagtcaaagcacaaacacactagctcctaaaccttacctcaggcttttactagaattaagccctcccacgggatccgtgcacgttaacgatt

SEQ ID NO: 707488 - DNA, 109 bp, Homo sapiens
acctcagtggacaattaccagttgtcctgtcctgttcagtcaactcagcacagcaatcaagggttggagctggaatatgtgatcatgcacttggcacatcccttttcct

SEQ ID NO: 707489 - DNA, 196 bp, Homo sapiens
gaggttgcagtgagcgagatcattcaggcaacagaatgagacttgttaacaaaaacaaaaagtgacttgatttacggggaaaaaaatgacctggctatattcagtcagactctggcaaaaagtctcacggtgtcaatgtgaatgctcaaggtcttggggggggtgtcccctatcagactacaggtgttcagaggca

SEQ ID NO: 707490 - DNA, 279 bp, Homo sapiens
gaggaatctttaaagagggagagtgggcatgggaggaggaattaagctattagtcatattttatttagaaaactagatcttaagtaactgtagaaaaatgttaacaattattaacttggaataaaggttaaatgggattatgttactatattttttaataatgtgaaatattttatattttgaaaattaaaaataaatagtagatttttataaaagtggaatatgaaatgaagtataatgtgataatttgggattagtttaaataaaacagatttatta

SEQ ID NO: 707491 - DNA, 214 bp, Homo sapiens
gtacccctgcatcattgtgcccacagtcttctgatacatcttagcgaacatctgtttcatttgtacaaggtccatctcacttcgagtgaccacaatccggaccagggtgtaatcatcttgcgccaacaccttttcatagcatagtacagcttctcagcaaagaaagcaggacggttcagggcacactgcaagatgtatacgaatgttcagtggc

SEQ ID NO: 707492 - DNA, 442 bp, Homo sapiens
  misc_feature (166)..(166): n is a, c, g, or t
  misc_feature (244)..(244): n is a, c, g, or t
  misc_feature (246)..(246): n is a, c, g, or t
  misc_feature (248)..(248): n is a, c, g, or t
  misc_feature (250)..(250): n is a, c, g, or t
  misc_feature (252)..(252): n is a, c, g, or t
  misc_feature (256)..(256): n is a, c, g, or t
  misc_feature (259)..(261): n is a, c, g, or t
  misc_feature (393)..(393): n is a, c, g, or t
  misc_feature (405)..(405): n is a, c, g, or t
catgataagcaaaattttaaactttggtagttaaacctttatgttgcctcccctctggctgccagctgtggggatgtgcttctcccttaaggactttggcaagaataacaagttcattggaatttgactttctgacatagagcagacagccttgccctgtcatgcnaggcctttcatgtgaagttaccatttattagctgcttctgtctctccagggaaggatttccttttataagcctgggcnangngnangatngtnnnattccccatgtgataccagagttggaataggctgtagtgagattagggccaggactgtcccattttggattcttgaatggtttctgttacaacttgtcatggggaaaaagtaacacttattttttttttccncccttagaaggnccaaaatactaaatgcatttgagaaagccggtagttt

SEQ ID NO: 707493 - DNA, 1155 bp, Homo sapiens
gctcatgaacactctcctgcaatggacactcagggtgggtgactgcgatggcttctccaccttcgatgttcccatcttcacatgaagagttcttggaccacgaacaaagcgctgttgaggcgtgagcttcggcgcgttgcggtaccagatgaattgtggtccttcgtagtgagcagaatcgcggttacttgcagaggcacacgcagatcattgagcagcgcgcgcgatccgctctggagcaggagctggctgctggaggagcgtgagtgacgctggtcgctgctgctgtcgtgcctccaggtgcccgtgcgccagtgcgctctacctgcctagacgttcggcctactactgccctggtgcccgggtcacgggctgagaacgtctcagcgctggggcactctggaccttctacattgtgccccggcttcagcgtgacgcctatctaacgcgagcccgtccagacgactagaagcgtcactcgtctccgcaatcacggaatagtcctggcccaggttcgccagcgagtcacctgttgaggaattgcgccgggtccccacgaatgcggagggagacgtcttgtgggcgcggccttgacaagagcgcacaacccctgtgggacagataacggctgttgggtccaggccttttgggggcctggattcagcaatcgctgtcacccattgtgggggcattccaagacccaccattacagagtttaactttacttgctaggaatacccttttagctttgtccaatctccccagggcacccgttgtgaaatcgcgggagaaaagggcattccgcttgcgtactatacagcccatgaaggaaatccttcaacaagcacagaaggggttggccccctccctcaggagcgaacaagcccaccgcggctagccctaggtcttctccgaggccagccccatggacacatgtggggagcatcgtaaagaccccaagcgccccaagtacaacgtgcagggaacttcccccaacagttacttcacgtaacgtgggtggtctgggtccaataagtcccacacacggaaaggcttgcttttgtgcaggacttaccttgaagatgtccgccgcatttctggtaccccgacatgtgtttggaggtcggtttgacccattcttgctcacactcatcc

SEQ ID NO: 707494 - DNA, 863 bp, Homo sapiens
  misc_feature (380)..(380): n is a, c, g, or t
  misc_feature (863)..(863): n is a, c, g, or t
gccagtttgaatcgcggtgcgacgaaggataggtggtggatctcaccgtggtccgataagccttttctctgccttgtttgttagagtcagcgaaatcgaaatggtgcggaaaagtgttggaaaaggattccggaaatgtccaagacaagaggctggttccccggctcgaagagagcccgggtttgcaggtccccatggtgggcccgtatttcatcgacacttaaaaattctaggacgaccagctcatttgacgtgttgtggcgcgccaattggccgtttgttgtaccagggcaagcacattcgttgggattatacctttacaagcggaagggagagataaaactttggaaacacatgggcgcaagggacacatgtgcctnttcaaaagggaacttaaaagaggcttacaagaagggggtataaaccccctttgcgttccattttgtgcaactttggtgctcacatacccatggcgacgcatttgacaaccaacttgggcatttcctcctccaattacaagggcctaaaccattgtggctggtgtggagtggcgtgttcctttcccccaacaagtatttccccaagaagaatttcttcctgggattttggggaacacagaaaggcggcgaccaactaaggaaagcactgtggtcctaaaaagaggggaattggccgttgggagatttccccttgtgggtagattcctacgaagggaacttcttaaaaaataactctcataaacacaagttttggccccaggttggtgggagctgagattcccccagtgtggggtactcttggcatttcctccttgggtaacaaaacacacacaacaaatttttgtggcgccgtttgttgggacn

SEQ ID NO: 707495 - DNA, 134 bp, Homo sapiens
cggttcggataaccgactggagagggatgcacgatggtcggacattgtgctcagaagagggggtgtactgggtaggtgcatgtgcttctgtgcaaatcctggtcccgaagatggcgggggagggcacgagtgag

SEQ ID NO: 707496 - DNA, 206 bp, Homo sapiens
agcttcctttagacttattcttatcatatattcaatatcatagccatttaggcacctatgtggtgcagaagcagactgctttgcctcagcatggtcacagtattcaccagtggtaagtattaaagagcgctaagacatacagcaagcacagactcaatgtgctgactagctattcacatacaactactgacattctgtaagctaat

SEQ ID NO: 707497 - DNA, 259 bp, Homo sapiens
atatggttccaatgtatcctgcttacaaaacgggtctcggcaattatttccaaagggtattggtgaagaattatgcttcggaaagaaatggatgttagacgtgataagtggaccaatcttcgactatcacgtataatggctcacatgacacagaagactaaataacacagtacgtggaaggcagttccattcctgttccagactcacgtactacatctataatcacccagctgatctggatttcacctcagtcctgccc

SEQ ID NO: 707498 - DNA, 441 bp, Homo sapiens
acttagaaaacaaaagacaaaaaaaacgctattcttcaataaacattctgatccagtacatctgagtggcttgactatcactatatttaatctataccaaatggtttattattcacccctcaaatttgaccacagttaacctgtacccattatgcacacccaccatcttacataacattcattaatgggcacccttatcccttatttcagatcccttccctgaaaagtcatacatacatatatcacttaggccattagtttaataggctttggtatgcatgtatgtacataggacactaacataggttggccttcttcatttctttcagattgggagtccaaatatggccctgagacaatatctccagaaactgatatatatgaaataactttacccaaacatgtaataaagcaaataagtaaaacacttggcctcgaggc

SEQ ID NO: 707499 - DNA, 133 bp, Homo sapiens
cgacctccccggctcatgttatcctccgacctcagcagcctcgagctccccggctcatgtgatcctcccacctcagcagcctcgactcccaggctcatgtgatcctcccacctctaggaatcccggcggccga

SEQ ID NO: 707500 - DNA, 150 bp, Homo sapiens
ctcatgctttatacttcacggagaaacaaaacaaaacatgcaacaaactggtaggaaacttccccagctggattaggagttatgaaaaacccaaagctaatagcatacttagtggtgaaatagtaagagctttccctcagaaactgggaa

SEQ ID NO: 707501 - DNA, 529 bp, Homo sapiens
ctgacatcgctccggggtcagtgctggatattggtatgggcatggctgcttggtagtagcacagttccagcactgaccccggagcagaagaatggatgctgtactgacatctgctcacctgcatcgtggccacctgtgcaatgggcatcctggtctgcagatgagtccactgtggagcatttgccaaagcggccttgcagatccattttgcgtactctctggacgcacgacaatctcctgaccgtcgcaatcgcacacccctggggtctgccctgtctttcacctctggtctccatggcctctgtcattgccttcggtacccatgcctccggacctgcacctcttgcccgcttggcaaatccccctccttgcatgctcttctcgcgcgctgtgctttgtgtctatgtccccttcatcactgcccagtcgcctagcaaccacgcctccctttacccccccaccgcaacaacgtggcccgctgccctctcgcacttggggtgtctggtcccctcctcttcccgcgcaccag

SEQ ID NO: 707502 - DNA, 255 bp, Homo sapiens
ttgggcactgtgttttatttttttcaaggaactccacaagagcagtcctgtatctgctttccttaccattgaacctacagtgcccagcacatagtgggcactcgacacatacttgttaaaggaatgaacaaccagatgagtgaccaaactggaaacaaccatccaatgcaaggataatactagaatccatgattcctgtcccgagatttctttcttttttaacctttggtctgctgagattcatttatgtgcagt

SEQ ID NO: 707503 - DNA, 110 bp, Homo sapiens
aagacaccctgaaagacacaaccttgggtaacatctgttatattctcctagaacaggaattcttcataaaaatgttcttccaggttcggaaggataaaatcaaattccca

SEQ ID NO: 707504 - DNA, 2779 bp, Homo sapiens
  misc_feature (33)..(33): n is a, c, g, or t
attactgtgagcctccttgtcagcactccaccnaagcctctgcctcagccttactgtgagtctggttgacagtagcttctaagatgtcccagcaacacacactgccagtgaccctctcccctgccctcagtcaggagctcctcaagactgttcctcctccagtcaatacccatcaggagcaaatgaaacagccaactccactgcctcccccatgccagaaggtgcctgtcgagctcccagtggaggtcccatcaaagcaagaggaaaagcacatgactgctgtaaagggactgcctgagcaagaatgtgagcaacagcagaaggagccacaggagcaggagctgcagcaacagcactgggaacagcatgaggaatatcagaaagcagaaaacccagagcagcagcttaagcaggagaaaacacaaagggatcagcagctaaacaaacagctggaagaagagaagaagctcttagaccagcaactggatcaagagctagtcaagagagatgagcaactgggaatgaagaaagagcaactgttggagctcccagagcagcaggaggggcacctgaagcacctagagcagcaggagggacagctgaagcacccggagcagcaggaggggcagctggagctcccagagcagcaggaggggcagctggagctcccagagcagcaggaggggcagctggagctcccagagcagcaggaggggcagctggaggtcccagagcagcaggaggggcagctggagctcccacagcagcaggaggggcagctggagctctctgagcagcaggaggggcagctggagctctctgagcagcaggaggggcagctggagctctctgagcagcaggagggacagctgaagcacctggagcaccaggaggggcagctggaggtcccagaggagcagatggggcagctgaagtacctggaacagcaggaggggcagctgaagcacctggatcagcaggagaagcagccagagctcccagagcagcagatggggcagctgaagcacctggagcagcaggaggggcagcctaagcatctggagcagcaggaggggcaactggagcagctggaggagcaggaggggcagctgaagcacctggagcagcaggaggggcagctggagcacctggagcaccaggaagggcagctggggctcccagagcagcaggtgctgcagctgaagcagctagagaagcagcaggggcagccaaagcacctggaggaggaggaggggcagctgaagcacctggtgcagcaggaggggcagctgaagcatctggtgcagcaggaggggcagctggagcagcaggagaggcaggtggagcacctggagcagcaggtggggcagctgaagcacctagaggagcaggagggacaactgaagcatctggagcagcagcaggggcagttggaggtcccagagcagcaggtggggcagccaaagaacctggagcaggaggagaagcaactggagctcccagagcagcaagagggccaggtgaagcacctggagaagcaggaggcacagctggagctcccagagcagcaggtaggacagccaaagcacctggaacagcaggaaaagcacctagagcacccagagcagcaggacggacaactaaaacatctggagcagcaggaggggcagctgaaggacctggagcagcagaaggggcagctggagcagcctgtgtttgccccagctccaggccaggtccaagacattcaaccagccctgcccacaaagggagaagtattgcttcctgtagagcaccagcagcagaagcaggaggtgcagtggccacccaaacataaataaccacccgcagtgtccagaggccctcagatcgtctcatacaagggaagagagagccactggctccacttatttcgggtccgctaggtggcccgtctcatctgtgaacttgactctgtccctctacatgtctctttaatggggtgagggtgggggagagagggaattattgtccagtgccaaccccaatgaccccaatcccaacctcaggtgagcagagcctctacttgagggactattgttactataggaatccttacttccccagtattgaagctgaatcagtgagtgtgtacaatgatacataataaatcctggaagtcttgggatcctaaaaaaaaaaaaataaaaaaaaaaaaaaaaaaaaaaaaaaaaaaaaaaaaaaagggggggggggctaaatatatatccctcgcgaggagggggccccaaacatcaaagccgcgcaccaccagacttattgtgtgagaacacaaggagggggccaccaaaaagaggaagggacactgatataaataagggacagcaggagcggacggaaggagagatataagaaaaacacagcagacgatggggaaaaaaagaagcgagacgacacgaggagaggacacccaatcgagaagaaaaagaacacacccaaataaatataggcgagggagagacggacagaccaacaagtgtggacacaacaaacacaccatcaagcaaggaaaataaaaaaaaagaaccctcaagaggggggtaaaactatatatcaacaatattcaagaatggtgagttaatacggggtgggtggtgaacaccaactcggagagagatatatatgttggtaaccgaggtttgggaaaaaaggtgacagggcaaacacgcgaggagataaatataagaactctcgacaaaatatttatatcacaggggaagaacctatagaaaaaaagagg

SEQ ID NO: 707505 - DNA, 2299 bp, Homo sapiens
  misc_feature (33)..(33): n is a, c, g, or t
attactgtgagcctccttgtcagcactccaccnaagcctctgcctcagccttactgtgagtctggttgacagtagcttctaagatgtcccagcaacacacactgccagtgaccctctcccctgccctcagtcaggagctcctcaagactgttcctcctccagtcaatacccatcaggagcaaatgaaacagccaactccactgcctcccccatgccagaaggtgcctgtcgagctcccagtggaggtcccatcaaagcaagaggaaaagcacatgactgctgtaaagggactgcctgagcaagaatgtgagcaacagcagaaggagccacaggagcaggagctgcagcaacagcactgggaacagcatgaggaatatcagaaagcagaaaacccagagcagcagcttaagcaggagaaaacacaaagggatcagcagctaaacaaacagctggaagaagagaagaagctcttagaccagcaactggatcaagagctagtcaagagagatgagcaactgggaatgaagaaagagcaactgttggagctcccagagcagcaggaggggcacctgaagcacctagagcagcaggagggacagctgaagcacccggagcagcaggaggggcagctggagctcccagagcagcaggaggggcagctggagctcccagagcagcaggaggggcagctggagctcccagagcagcaggaggggcagctggaggtcccagagcagcaggaggggcagctggagctcccacagcagcaggaggggcagctggagctctctgagcagcaggaggggcagctggagctctctgagcagcaggaggggcagctggagctctctgagcagcaggagggacagctgaagcacctggagcaccaggaggggcagctggaggtcccagaggagcagatggggcagctgaagtacctggaacagcaggaggggcagctgaagcacctggatcagcaggagaagcagccagagctcccagagcagcagatggggcagctgaagcacctggagcagcaggaggggcagcctaagcatctggagcagcaggaggggcaactggagcagctggaggagcaggaggggcagctgaagcacctggagcagcaggaggggcagctggagcacctggagcaccaggaagggcagctggggctcccagagcagcaggtgctgcagctgaagcagctagagaagcagcaggggcagccaaagcacctggaggaggaggaggggcagctgaagcacctggtgcagcaggaggggcagctgaagcatctggtgcagcaggaggggcagctggagcagcaggagaggcaggtggagcacctggagcagcaggtggggcagctgaagcacctagaggagcaggagggacaactgaagcatctggagcagcagcaggggcagttggaggtcccagagcagcaggtggggcagccaaagaacctggagcaggaggagaagcaactggagctcccagagcagcaagagggccaggtgaagcacctggagaagcaggaggcacagctggagctcccagagcagcaggtaggacagccaaagcacctggaacagcaggaaaagcacctagagcacccagagcagcaggacggacaactaaaacatctggagcagcaggaggggcagctgaaggacctggagcagcagaaggggcagctggagcagcctgtgtttgccccagctccaggccaggtccaagacattcaaccagccctgcccacaaagggagaagtattgcttcctgtagagcaccagcagcagaagcaggaggtgcagtggccacccaaacataaataaccacccgcagtgtccagaggccctcagatcgtctcatacaagggaagagagagccactggctccacttatttcgggtccgctaggtggcccgtctcatctgtgaacttgactctgtccctctacatgtctctttaatggggtgagggtgggggagagagggaattattgtccagtgccaaccccaatgaccccaatcccaacctcaggtgagcagagcctctacttgagggactattgttactataggaatccttacttccccagtattgaagctgaatcagtgagtgtgtacaatgatacataataaatcctggaagtcttgggatcctatattctctttagcattttcttctatcacaccacataaaaacctgtgtatgggtcaatggctgcaagagactcccacggcccattctcaaaggaggacagactctttttaaatttgtcactcaaaccg

SEQ ID NO: 707506 - DNA, 277 bp, Homo sapiens
ggggcccccccccattaaattggggtgggtccccccctaggccccccccggttttccccttttttttcccccccgtattttttttggaaattttcacggaaacccctttcccccccgaacccccttttcccccttttcccccccacccgaaattaccccccccccaacaaaaccaaaaatggagccccccccccggggggccccctttaaaaaaaagggaccccccccccccccagaaattggcccccccctttttttaccccatttttccccaaca

SEQ ID NO: 707507 - DNA, 271 bp, Homo sapiens
  misc_feature (258)..(258): n is a, c, g, or t
ttcacgcccacatgactctgtgttggaaatgtggaaacgatggaatggttgggccctcataccaccatcttgtctcagtcattggacagtggcacagccataagaaaatcataaacttgttccaaaagctgagtataccctgtaggagccaacagtggtatgctgtcaggtgatcacagtcttgaagcagggcagtttttttttgtttgtttgtttgtttgagaccatgtctcgctctgtctcccatgctggagtgcngtggcacgatctc

SEQ ID NO: 707508 - DNA, 1173 bp, Homo sapiens
taaattcgcggccgcgtcgacgcaggacggacaactaaaacatctggagcagcaggaggggcagctgaaggacctggagcagcagaaggggcagctggagcagcctgtgtttgccccagctccaggccaggtccaagacattcaaccagccctgcccacaaagggagaagtattgcttcctgtagagcaccagcagcagaagcaggaggtgcagtggccacccaaacataaataaccacccgcagtgtccagaggccctcagatcgtctcatacaagggaagagagagccactggctccacttatttcgggtccgctaggtggcccgtctcatctgtgaacttgactctgtccctctacatgtctctttaatggggtgagggtgggggagagagggaattattgtccagtgccaaccccaatgaccccaatcccaacctcaggtgagcagagcctctacttgagggactattgttactataggaatccttacttccccagtattgaagctgaatcagtgagtgtgtacaatgatacataataaatcctggaagtcttgggatcctaaaaaaaaaaaaataaaaaaaaaaaaaaaaaaaaaaaaaaaaaaaaaaaaaaagggggggggggctaaatatatatccctcgcgaggagggggccccaaacatcaaagccgcgcaccaccagacttattgtgtgagaacacaaggagggggccaccaaaaagaggaagggacactgatataaataagggacagcaggagcggacggaaggagagatataagaaaaacacagcagacgatggggaaaaaaagaagcgagacgacacgaggagaggacacccaatcgagaagaaaaagaacacacccaaataaatataggcgagggagagacggacagaccaacaagtgtggacacaacaaacacaccatcaagcaaggaaaataaaaaaaaagaaccctcaagaggggggtaaaactatatatcaacaatattcaagaatggtgagttaatacggggtgggtggtgaacaccaactcggagagagatatatatgttggtaaccgaggtttgggaaaaaaggtgacagggcaaacacgcgaggagataaatataagaactctcgacaaaatatttatatcacaggggaagaacctatagaaaaaaagagg

SEQ ID NO: 707509 - DNA, 654 bp, Homo sapiens
atttcagaaaaatcagaaaatggaggttctgggtccctccgagcaaaattggatctttcagaaggacctagtaaacccacgacacttgcaggacaattccttaaggagggaagcacccttacaggagtagatttcgaacttggggacactggctaaaggcttcccttaaagaagagcggtttggtagtggacgatacctgggggattggtgatcgacctggaaaagtgatggcgccttagggattacaatagccgtcattgccgataaggtggtttttaaaaacactttaacaacttggatggaggttaaacaaactaaaaacgttttaggtggcttcccacaataaataagacgctctttagaaaaggatcgaattaaatagaccggactgggaatgctttgttggaaaggaacagctcaattctaagggaggcccattcattaaaatctcaagtcaattgaaattttgggggggtaaagttttaaatttatttccaggggcaaagtcgaaaaaaagggcttaagggggtaaaatcaagcctcaaggcttaaatatgggaggctcaaggggaattgagttttcactccctttttaagggccggaggtaccttgtttcaaaggggaaattgaaaccccttccttggggtttggg

SEQ ID NO: 707510 - DNA, 699 bp, Homo sapiens
tactacagtcaggttgctacagctgttgttatccacagcgacaagaggatgggagaggaagtcctgggtctgcaaccgttggagacagagcttgatgacgtggtactatacattgctacagtgcatcagctctgttgccgaagtagtcttcgtcagggcggacgatgcgtcagtgcgcttcagatactctgcgcctccgcagatgttctacctatctctccatggaccttcaggctcctcctaggatgtatcctggggtacgtcacaagctgccacaaccaatctattgcactggcatagatcatcggagttcggaatagagacacaggttgggctagctagtgtcggcccaaaggaaatggttgctcgtaacatccatggccgtcccgtgatagaattctagggtgtagcccgtatcggaaccttgcatgtattcatcagcgtaccatgaatccgggcgtcaacgagtcagtgtgtctggcatgtgtccagctcagtgtgcatccgtgtgcagctggaatcacatgccaaggtctagtgtcaatgtgccagatgattcatatcacgacccgtaaatcaagatgatcccatcatgccgttttgatggtgtgctgggcaatgtgcacgtgatactccgggggatagtggtgcaatcctgcagagagagagaaactaaaccgcttattagctccattatga

SEQ ID NO: 707511 - DNA, 228 bp, Homo sapiens
aggagagccactacgcgccacgagatgggctgccaggtgaacaagggttggccacagtgcgggaaaggtagggagtcccagccctgctgacagggctccggagctcactggggaccgagatggaaggtcccacctcacagagcctagcttgcgactgcctctggcatgcttgcgagtaatttgacagagacttaattagtaaattaagatggcagaaaattaaaactt

SEQ ID NO: 707512 - DNA, 701 bp, Homo sapiens
  misc_feature (701)..(701): n is a, c, g, or t
gaggcagccgggtgcttcgcagccggagctcgaggctctgtagcacccagttggacccagtctgcccagtgcacctgccctgctgcccctgtggacctgtctccttgcgcctccacagatggatgtgtgatgttctgatgcgatcccacctgctgtgctgtgcctactccgtctggtggtgccatgtgatgctgtggtgaatgctgaatgtgcatgagatgacccctgtggaccccaagctgcttgtactcttccctgcctgccctgaacctaccgatgaccacacatttcagacaaggtgtgcccctttcctaattgtgtggctctctgtgcctgagatgtaccaagggagacaagtgattttgcgtttcgcagagtgtagttgagtcaagtcgaggtggcatggaaggaatgaatcgttcggcgaaatttgtggcactacggacactgagggttgacgatgggcccattggacggcatttgtgggccccccaagacccttttccgcgagatgccgctcgggggtgccttatcacacactggtggcactttggtgcgatcttcacattaccccgttacctttggcccggacaagcattatacagttacacgagcgccaactggcttttaaacaatgcccccactgtcggccttcaatctgtttggacaccggaaagtgtggtccagacgtcgagagattn

SEQ ID NO: 707513 - DNA, 298 bp, Homo sapiens
ttacatttttaattttgtaaaatttttttactcttttgtgatgtcatttagcttgagcactcattgttcaactgcacaaaaatattctttatatccttattctctaagcatttttctatttttagttttttactttttaatttttttgttaaaaactaagacacatacacacacataaacctaagcctacccgtggtcaggatcatcaataccactgtcttccacctccatatcttgtcccacttgaaggtcttcagggtcagtaacatgaatggagctgtcatctatgataacaatg

SEQ ID NO: 707514 - DNA, 188 bp, Homo sapiens
tagtcctccaagctggtccctgacgctgcctcctctattcatcttgctcactgtctcctccatctgatatcacgaggggaacatcttccttggctgtcatcttcatttcaatcctgagctagcgctcgaaggtcagcaatgccactgacagtagaatcagaagcatctagcaggatgctcacagtgct

SEQ ID NO: 707515 - DNA, 166 bp, Homo sapiens
cttagtagatgacgggttcaccttgttggcaggatggtctctatcttctgacctcgtgatcctgccaccttggtctcccaaagtgctgggattacaagcgtgacgcacagtgcccagtctgatgtgctattttctgtatgttcttttgtatctttcacatttggtg

SEQ ID NO: 707516 - DNA, 305 bp, Homo sapiens
accttccctcgtgttactcccccgtgttgaattggaagaggcatagccccagtgctcagaaggcccagtgctgctgggtctggtggtggactgcgtgtgtgccccaatggtgcagctgctggaagtcaccactagggggtgatggagatggaagggggccaccccaaggtccattaaacaaccatgtactcctttcgtagtgagccgaaccccatcccgctccaccgctttttaaagccccccagccgctgtcggtgagatttgggcttgggtagtggacggaggatgtaccaccatgaggcaat

SEQ ID NO: 707517 - DNA, 323 bp, Homo sapiens
gtagcaagtggggtggagcagtcatttcttcacaggcagctttttcctgtgagctgtgcttccgatcttgaggttctgtacctggcagcacgcgggtggtgcctgaggctgtcagctctgctgggccacggtgggtggggctgctgcctcccactctggcattttgcttcaatctggacagacgcttcttgggctgctgctctgttgtctctaggttaggtctttctgctcatttcctttccaggcatttgtccctgtcctctagtcctgttgcgtgatgatggttccgtgttgtgatttgtccctgtcctctagtcctgttg

SEQ ID NO: 707518 - DNA, 445 bp, Homo sapiens
  misc_feature (25)..(25): n is a, c, g, or t
  misc_feature (42)..(42): n is a, c, g, or t
  misc_feature (45)..(45): n is a, c, g, or t
  misc_feature (53)..(53): n is a, c, g, or t
  misc_feature (62)..(62): n is a, c, g, or t
  misc_feature (68)..(68): n is a, c, g, or t
  misc_feature (91)..(91): n is a, c, g, or t
  misc_feature (114)..(114): n is a, c, g, or t
  misc_feature (233)..(233): n is a, c, g, or t
  misc_feature (306)..(306): n is a, c, g, or t
  misc_feature (323)..(323): n is a, c, g, or t
  misc_feature (380)..(380): n is a, c, g, or t
  misc_feature (393)..(393): n is a, c, g, or t
agggggttgagggtgcacagacctnccctgcccatgctgggntgncctgcagnttttgactnccaatncagtgataccagcaccacattgnacagggaggatcaaatttcctgnacttacatttgcactggcttcttgtttaggctgaatcctaaaataaattaggtcaaaaaattccaacaagtaggccaggggctgcagaggacactccagtgcagagggagaaggacttntaattttcaaaggcagggctggttttccaacccaggcctctgagaaaccatttctttgctatcctctgccttnccaagtccctcttgggncggttcaagcccaagcttgttcgtgtagcttcagaagttccctctctgacccagggngagtccatactgnccctgatcccagaaggaatgctgacccctcgtcgtatgaactgtgcatagtc

SEQ ID NO: 707519 - DNA, 382 bp, Homo sapiens
cgacaagcttcagagacatggtatgatagcgaaccgggaggatcctatggcattgaggcttccctgtagctctatgaacatagagccgatagctttttaaaggtgaccaatctgtggctacgcgccacgggcttattgcctgtaatcgcagcagtttgggaggccgaggcaggtggatcacctgaggtcaggagttcaaggccatccgggggcaacatgctgaaaccccgtctctaccaggaatacaaaaactagcgaggcgtggtggcgggtgccggtaactcccagctactgtggaggcgggatggatcacttgaactcgaggaggtgggggttgcagtgagccgagatcgtgctgctgcactccatcctgaggtgactg

SEQ ID NO: 707520 - DNA, 355 bp, Homo sapiens
ctatttcctgtgttctgactgtattctgaatacaagagaatatttaccttttaaaaattgcttccatggctgggcgcagtggttcacgtctgtaatcccagcactttgggaggctgaggcgggtggatcacgaggtcaggagatcgagaccatcctggctaacatggtgaaaccccgtctctactaaaaaatacaaaaaaattagccgggcgtggtcgtgggcgcctgtagtcccagctactcgggaggctgaagcaggagaatggcgtgaacccaggaggcagagcttgcagtgagtcgagatcacgccactgcactccagcctgggcaacagagcgagactctgtctcaaaaa

SEQ ID NO: 707521 - DNA, 900 bp, Homo sapiens
ggaccactgtggttctactatgccttctgaccccgtcttggactatcaactgggagaatgtggagccacttgaacaggctcctcttctggagcatattttcttctgtcacttgtagaaaagctgtattggattgtgaggcaatgaaaacaaatgaattcccttctccatgtttggactcaaagactaaggtggttatgaagggtcaaaatgtatctatgttttgttcccataagaacaaatcactgcagatcacctattcattgtttcgacgtaagacacacctgggaacccaggatggaaaaggtgaacctgcgatttttaacctaagcatcacagaagcccatgaatcaggcccctacaaatgcaaagcccaagttaccagctgttcaaaatacagtcgtgacttcagcttcacgattgtcgacccggtgacttccccagtgctgaacattatggtcattcaaacagaaacagaccgacatataacattacattgcctctcagtcaatggctcgctgcccatcaattacactttctttgaaaaccatgttgccatatcaccagctatttccaagtatgacagggagcctgctgaatttaacttaaccaagaagaatcctggagaagaggaagagtataggtgtgaagctaaaaacagattgcctaactatgcaacatacagtcaccctgtcaccatgccctcaacaggcggagacagctgtcctttctgtctgaagctactacttccagggttattactgttgctggtggtgataatcctaattctggctttttgggtactgcccaaatacaaaacagaaaagtttgagaaataatgtgcccagggaccgtggagacacagccatggaagttggaatctatgcaaatatctatacacg

SEQ ID NO: 707522 - DNA, 801 bp, Homo sapiens
  misc_feature (158)..(158): n is a, c, g, or t
gagaccgcgctgtgttggcgctgccgttgactgccatcgtgccaggccctcgggtgagtgtcggggccgagcacggccgaaggacgggttgctgtggggcccgctgggagtccgtttcttctgagtctgcccgggagggcttcctgtatagtatgagntcccccgggtggtggaaccctcgacctttatagtggaactcagattcgttgacttacacgaattgttagagcatgccacagtctagtaattatggaccaacgtggaatgtacatcataatagtcaatacactctcaagagcgacctgggaacgaggctcgtgctgaggaaattcgaagtaaattgttgctcatggggagaatcttgctggtatgctgagagggtcataatcgctccaggaaatacctggggcaccagtggcatgctggcttgaagatttgcctgcctgtccacgtgggagctgacttcccaaatgtgctggtcgcattcgactgccgtggaagctctcactaacagcagatccacggcagccgttccggtgggcccatcggcattccatgcaggatgctgaccctcaggggctggagtcgaacgagcctgctgcacgggaggcactcgttaatgtttaagccctaccataccattgcgcatgtgtattcaccaatgattctccgtctgcgcctatgtggatgtcgcaatacgcatgcagaaggaagggaatcacactcaatgtgcttgatgtgacagcatgcttgctcggaacgattcggacgcatgtgtggaccaattcccggggaaccatg

SEQ ID NO: 707523 - DNA, 2087 bp, Homo sapiens
  misc_feature (1865)..(1865): n is a, c, g, or t
  misc_feature (1884)..(1884): n is a, c, g, or t
  misc_feature (1925)..(1925): n is a, c, g, or t
tctcttcaacagccacccaaagcactcacttcaagtccaacatagtagcacaaacagcaggctgcatcagcagtcacgtgcatggtcatcacagcagccagaggtcaggcaattcataacacacattccagctcaacaatcagtcagcacaacatcatcatcatcaattccaacagatcacatcatctctgcgtgttcagccacagatatgtcgtcatgcacagagcacctccacaacacatgagtcccacagagcagcacaacaacacacatcagcgccagccaatataaagcgcggcagtcatgagatacaaacaaactacgacaaatgaaaccaagacaacaaaagcacgacaccaacgaatccatcagcccaagaaccccaccataataatgagatacacaataagtaacaataataacaccatgcacacatccaatacgaaaccaacaccggcaaactatgaccatacacaacgacaaacacaaaggaacacgccaagcgcgacaagcaaagggcacagttccgacgacgaacacttaacataggaggacagcagggtagggaacgacggaacgaaagcaccccagcagcgtaccaaggagcaccacacctgctactaacaccaaacgagaaccacaggaaccaacgaggtaacatgttaccacaacatacaggacacttaggatacacccaccaaagaggacaccctaaaacgagcgcacttataggaagagcgagccacaagcacatcagacaggacacaacaaaattaggatatacaccaccaaccatacagaagacacattcacggctgcggccacacgcaatccattcaaactcacttagaccaccgcatataatacagacgatagtatacataataagatgtatagtacacgcccgatgaaatttacagtatcggttaccccatataaggacaaacgcattatatccacaccaagaaggtgcgccaagccgcaggctaacacgcaattgataacaattcaaccgacacataccaacacaacacacacacaatcagcaacaagcatacgcatgcttatccgaatcataacgacacatataccatacacactacatacaacaacactcagttacggttcaatacaaaacataccattttatcaacaacaaacacacaagacaaaaaaaacatataatctacacatcacaaccaaactatactactttaataacatcactacactacacacaacctaatctcactatcacactaacacaacagcaaacacacactacagactgaatataataatacatcaacatatcacacaacaatattaaacatagatataaaaaccataacattatatcattacgcaaccaactgaatcgaatcaacgttactacaacttacaccaaagttcatttcatataacaaagtatcagatgagccaaaacactaacataataccacgactaacaaaatcatcaacatcatccatatacgcaaatcaacgctactatagcaactctacacatactaaactagacacaaactacaaccaatatagtacaatagcatactaacaaatactaatacataaaccactatcaacacaagcaagcggagaggactatacgaacaagactcaccggactatcagtccgaagcctaagagagagtagacaaggacagatcagagtagcgagagtactaacgcaggacacacgacgattcagttagcagtcagaacgaggcgtagacatagtactatgatgaccgagacagaaccaatccgacggcatgccgagaacccctgcagatggccatactctagacagcatggtaccgagacttcgcatcggtcttgatgancagcacgctactgaacgancgatagctcatgcatgagatcagtgagtcgagaatacgtanagacgcatctgtagcacattcgtaccacgaacatagcagacagacgcgagcagactgggcatcgcagactcaacagacgcggaggtatcgagccgcagactacagacaccatcaacgccgagcgtcagatgcacgacacggttagtctgaatcaccagcata

SEQ ID NO: 707524 - DNA, 875 bp, Homo sapiens
gccgagcgccgccatggactctgttgtccagagggcctgtgacgagctgcccggcgcctgcctgtcgcctgtgcgggccgcccaaacctgaccgagctgttcagcgagtcacggcgcctggctctgtagtgagctggtggcgggcggccccgagagccttctgctgtgcttctctgcgatcgcgagcgcctggctcgtttcctgaaccccgatgagtgtgcgcgccattctgcgcgcggcggagaggccggggaccggagtggcgctggctgtgtcggctgtgctgtgtgtgccgacggactctgttcggctcctcgcatcgtactgtctcttctggtgcaccgtacttccccggagctaggtctgggaccttggtacgccaccgcatgtgtgcgagccttggcttggcccgtcttctagccaggggcagtcctaacctggtggctgccacgcgtgtcgagacgcacttccagccccggcgggcgctggcgaaggtggccccttacgggttgcaagggacgctctgcgccagcagctccggctcggcgcgagaggtgattgcaggtggtcatggacgtgttcacatgacatcgaacatcttcagaagacctggcaagaaatatgcaggaccacagggagttgctgtgtatatccttctggaccaggctctcctcttctcaatttatggcatatgtgcatgcctcttgaaagttcagtcctgaacaggaaaaagttaatgacagttcggactattcacaggaacttatctacttttgcaaggtcaggaactaacgatcattgcggaagtgttcacgagaaagttcaccgtcgattgatggcctccggtggcaacaggcttgtaccagtgtaccttg

SEQ ID NO: 707525 - DNA, 526 bp, Homo sapiens
  misc_feature (7)..(7): n is a, c, g, or t
  misc_feature (15)..(15): n is a, c, g, or t
  misc_feature (27)..(27): n is a, c, g, or t
  misc_feature (91)..(91): n is a, c, g, or t
  misc_feature (157)..(157): n is a, c, g, or t
  misc_feature (208)..(208): n is a, c, g, or t
  misc_feature (216)..(216): n is a, c, g, or t
  misc_feature (219)..(219): n is a, c, g, or t
  misc_feature (225)..(225): n is a, c, g, or t
  misc_feature (289)..(289): n is a, c, g, or t
  misc_feature (323)..(323): n is a, c, g, or t
  misc_feature (406)..(406): n is a, c, g, or t
  misc_feature (426)..(427): n is a, c, g, or t
  misc_feature (436)..(437): n is a, c, g, or t
  misc_feature (445)..(445): n is a, c, g, or t
  misc_feature (454)..(454): n is a, c, g, or t
  misc_feature (523)..(523): n is a, c, g, or t
ggcggcncgggcagntcggagctccgngctgctgcttctggttctcattgtggccgccgtcgctgtccggctgccttgggctgccgaacanacaaggcgtgggccacagcacctcagaagccgacgcagctcgacgcaggggccgacaagaagggtnggcgatcgcgtgtcggagggcgccgcgcgggcaggcggacgggcgccaaanggggaaanagncggggncggcgggatcagccgctggccgggccggccggggaatttcgatgacctgacgcgaataccactncccagagtcggggaggagactgaagcaagccaanaaaatctaagaccccgaaaaatactccttcattgccacacgatacaccaaagacgcccaaagaagcaaatcacagtttagctngatggacatggcagagagtnncaccacaanncccccacncaaaaactngggccgagagatcttttgttctcgctgcgatctacacagttccttccacttgacagctaacagtttcanctg

SEQ ID NO: 707526 - DNA, 126 bp, Homo sapiens
acgtgtcacttctcatgtggaaatccatcttgcatactatcattcttgctccactggattccagtgtttttgtgcaaaaaagccatctcatgtgaagaaaactgcagatatgaaatgtccatcatg

SEQ ID NO: 707527 - DNA, 116 bp, Homo sapiens
gatgctccctcttcatgctcttgaactcatctcaccacactctggaacgaccggacattgacactcccacagtggcagggcccattctgtctgtggactgtgggttctcaatggaa

SEQ ID NO: 707528 - DNA, 731 bp, Homo sapiens
  misc_feature (447)..(447): n is a, c, g, or t
  misc_feature (515)..(515): n is a, c, g, or t
  misc_feature (533)..(533): n is a, c, g, or t
  misc_feature (540)..(540): n is a, c, g, or t
  misc_feature (549)..(549): n is a, c, g, or t
  misc_feature (569)..(569): n is a, c, g, or t
  misc_feature (573)..(573): n is a, c, g, or t
  misc_feature (580)..(580): n is a, c, g, or t
  misc_feature (584)..(584): n is a, c, g, or t
  misc_feature (587)..(587): n is a, c, g, or t
  misc_feature (591)..(591): n is a, c, g, or t
  misc_feature (596)..(597): n is a, c, g, or t
  misc_feature (604)..(604): n is a, c, g, or t
  misc_feature (611)..(611): n is a, c, g, or t
  misc_feature (618)..(618): n is a, c, g, or t
acttccgctgggacctgattcgtgcctgcgcaacatgcagcagcagcgggcagcagcgggcgcagggcagaatgcgcgaggacgtctcagcgggcgaagactgcggcccgctgcctgagggcgggcccgagccccggagcgagtggtgccaagccgggcccgcgcgagggcaagcgctcctactccatggagcacttgcgctggggcaagccggtgggcaagaagcggcgcccagtgaaggtgtaccctaacggcgccgaggacgagtcggacgaggacttccccctggagttcaagagggagctgactggtcagcgactccgggagggagatggccccgacggtcctgccgatgacggcgcaggagcccaggccgacctggagcacagtctgctggtggcgggcgagaagaaggacgagggcccctacaggatggagcacttccgntgggcagcccgcccaaggacaagcgctacggcggtttcatgacctccgagaagagccagacgcccctngtgacgctgttcacgccntcatcangaacgcctncaagaagggcgagtgaggcncagngggcccnaggntancctncccannaggcgancccaagnccttgcnctccctgactgctgcgggccaagcgaggggcctgggcatacaagctttaggcgcggttttcggagataaccttacattccaaaccaatcagcggggcggccagggtataggag

SEQ ID NO: 707529 - DNA, 216 bp, Homo sapiens
ggcgcctcctggggggtggggacacggtttcgtgaggagaattggaggtaaggctcgccaagctcgcggtctggaagctcctctgaaccccgagaataggagagagctcccgtcctctctcgtgtcctgatgcagcacctcgcaagtggaaggggtcgtcgcgggttaagcgcccgtgataggggaatcgggccccttctgggattcgagcggatc

SEQ ID NO: 707530 - DNA, 874 bp, Homo sapiens
agagagtagaaggggtgggaggcggaggtccgagcgcgccactgtgtctatgttaatcgggattgtgtcgggggtgcttcttgggtagcctgtcgcggtggacgctgtccatggcaatctattcctgggcgcgtgtgttgccgagagtttcgcgtattttggaagcgtgggcgattatttccggttgacggcgtctacaatctgggtgcaatcggggtcggccgcacgtttctttaagcctgtcgtcgtcgtgggacgtgaatattcggctggcggtcgtcagcgtggccagccgtctgtacaggagcccacctcgtgagtaggtctgcgatagcgtccgcccgcccaggttccccttggaatatcggcccaaagggcaatccgccttcattcctcgcgaagtcatccttccgcgcacatagtccacccgctttcgtattttcttagcactcttgcgcctttgcacgacgttgaagaacccccccgcttggtgggtgtagacaattacccagggcaaagtattcaatataagcaatcctggctttcagtcccacaatgaagcaaattctcgtgtcccgctcgtggacacacacgttcgggtggagtgacggcaaacccggagtcctcccttttggggcctgttccccctgagagtggggccacgacacgcccccccgggggatagggcgaggtctatgtcccccaggttgatgatatgtagctgggtaagcccactggcgccccgaatcttacacgagaacagggaacaataggggcatttgctcgccccaccgggaggatcttcagagtgggcgaccattttgttcttgaaaacacattttttcaaacaaacaactaaaacaacccacataac

SEQ ID NO: 707531 - DNA, 672 bp, Homo sapiens
  misc_feature (45)..(45): n is a, c, g, or t
  misc_feature (57)..(57): n is a, c, g, or t
  misc_feature (122)..(122): n is a, c, g, or t
  misc_feature (143)..(143): n is a, c, g, or t
  misc_feature (237)..(237): n is a, c, g, or t
  misc_feature (242)..(242): n is a, c, g, or t
  misc_feature (289)..(289): n is a, c, g, or t
  misc_feature (320)..(320): n is a, c, g, or t
  misc_feature (322)..(323): n is a, c, g, or t
  misc_feature (345)..(345): n is a, c, g, or t
  misc_feature (355)..(355): n is a, c, g, or t
  misc_feature (358)..(358): n is a, c, g, or t
  misc_feature (388)..(388): n is a, c, g, or t
  misc_feature (392)..(392): n is a, c, g, or t
  misc_feature (415)..(416): n is a, c, g, or t
  misc_feature (421)..(421): n is a, c, g, or t
  misc_feature (440)..(441): n is a, c, g, or t
  misc_feature (444)..(444): n is a, c, g, or t
  misc_feature (465)..(466): n is a, c, g, or t
  misc_feature (481)..(481): n is a, c, g, or t
  misc_feature (484)..(484): n is a, c, g, or t
  misc_feature (487)..(487): n is a, c, g, or t
  misc_feature (489)..(489): n is a, c, g, or t
  misc_feature (496)..(496): n is a, c, g, or t
  misc_feature (505)..(505): n is a, c, g, or t
  misc_feature (529)..(529): n is a, c, g, or t
  misc_feature (531)..(532): n is a, c, g, or t
  misc_feature (535)..(535): n is a, c, g, or t
  misc_feature (537)..(538): n is a, c, g, or t
  misc_feature (547)..(547): n is a, c, g, or t
tggtaagcggttcatgatgtttccttgggaattcccggataagtncaggaaaacatnctgcatgtggtatctagtcggatgtacttatccatctcattacaaacaaaaacacacagacggcnattggtagctctgtaatcctngaatacggaagtaaattttcttctttcctggacttggacattggtagctatactggttcccattttggtttttacaaatccttggggtctaatnctggngagcctacctatagcacgggattaaaatggtctggcatcatttcttnagttatccagttaactttaaacactggtggnannaagtgtaaaccagcccatgacnggttttggtnctngttaaagaacttcatggtccagtttccatngatnatggtgtagggacagacggtgtnnatgtncggtgcggtccgggaccanngtnaattacacttacgacgtattnnagttccacttcacanggnttngnccccagngaccctttnatcctttctaggccatttctggtngnngtngnngtggcagtnccccttggcatggtatggcttggacaacggtaattggaatcagatctgaagaggacggtcccagcaacctacacagcactactcgggggattacctcaaacaacaacacgcacaccacaaagcgc

SEQ ID NO: 707532 - DNA, 721 bp, Homo sapiens
  misc_feature (447)..(447): n is a, c, g, or t
  misc_feature (515)..(515): n is a, c, g, or t
  misc_feature (533)..(533): n is a, c, g, or t
  misc_feature (540)..(540): n is a, c, g, or t
  misc_feature (549)..(549): n is a, c, g, or t
  misc_feature (569)..(569): n is a, c, g, or t
  misc_feature (573)..(573): n is a, c, g, or t
  misc_feature (580)..(580): n is a, c, g, or t
  misc_feature (584)..(584): n is a, c, g, or t
  misc_feature (587)..(587): n is a, c, g, or t
  misc_feature (591)..(591): n is a, c, g, or t
  misc_feature (596)..(597): n is a, c, g, or t
  misc_feature (604)..(604): n is a, c, g, or t
  misc_feature (611)..(611): n is a, c, g, or t
  misc_feature (618)..(618): n is a, c, g, or t
acttccgctgggacctgattcgtgcctgcgcaacatgcagcagcagcgggcagcagcgggcgcagggcagaatgcgcgaggacgtctcagcgggcgaagactgcggcccgctgcctgagggcgggcccgagccccggagcgagtggtgccaagccgggcccgcgcgagggcaagcgctcctactccatggagcacttgcgctggggcaagccggtgggcaagaagcggcgcccagtgaaggtgtaccctaacggcgccgaggacgagtcggacgaggacttccccctggagttcaagagggagctgactggtcagcgactccgggagggagatggccccgacggtcctgccgatgacggcgcaggagcccaggccgacctggagcacagtctgctggtggcgggcgagaagaaggacgagggcccctacaggatggagcacttccgntgggcagcccgcccaaggacaagcgctacggcggtttcatgacctccgagaagagccagacgcccctngtgacgctgttcacgccntcatcangaacgcctncaagaagggcgagtgaggcncagngggcccnaggntancctncccannaggcgancccaagnccttgcnctcccctacacatatgccgccaccccgaacataggaggatcgtggcagataaaaaacataataaagctacctgtaaaagagaactcaaccatttcaaaaataa

SEQ ID NO: 707533 - DNA, 912 bp, Homo sapiens
  misc_feature (313)..(313): n is a, c, g, or t
  misc_feature (601)..(601): n is a, c, g, or t
tgtggcttcaaaaagcttttttccctttgggcccagggtctgtgtaggatattataaaaaagctgcctatgggcttgagagggagaagagggtttagggcaagaacgcccttattaattttgcgcagagggggcccttctaaaaatctcgcggggcgcctcaaaagggcctctgggctcgtcgctgtagaaagtagacgcctttctcagaaagaagattacctcggcccacgccacagcctctcgcggcgccacaccacagagctctgtgtgtggagaggtgtgtgcgtctcagagtgtggtggctcacaccnccaaactctttctctttataaatgagagtcttctcaaacttctcctctcatatctgtgagagaagagtgtgagagtctctctccagagagaagagtttccacgagagagagtagtggggggtctccggtgcgggagggacagaaaaaccccacaggggggtcttgagaagatatccacaaaagaggggccctctggtgtacacggtctatatattctctccacagggggcgcaccatggggacagtgtctataccacagtggggctgtctctgggggtgtttatatanccccactatctcactatttctaagggggtgggatctctcggtggaaagtgtctcgcgtggaaagaaaagaagcgcggcggccgcggcccaagcggctgtgggtatttggggcattcttatacgaggaaaaaagcgtctctcgatagagcccctttcggcgggcttttctctcctctcgggggcccaatatctcggggggaaaaaaaagagggggtctccaacgcgccttttccaagagagcccaatttttctatcggggggctcaaaaatataagaaaaccccccgagaagaaagagagtgtaaaggtaaa

SEQ ID NO: 707534 - DNA, 1061 bp, Homo sapiens
tctcccgaaaggtgtttttggagaaggttctgtttatccccccgccctcccctgtggaaaatatttggagccctgtaaagggtgaaggcgtttttttggggaagtcttttcccagcgcggggtctctccccaaggattttattccccctccccccctcttatggggtggtgggcaaactacttgttgtagggcccttgcttggaccgcgcgacctcgggggggagcccccaaatatttcttttattccccgcgtcccgccctttttgggagttgttaccccccccaagaaagcctttttggtttgggttttttgtggggaaatttttttaatccccagccaccctcgtgtggagacacacgaggaaatttcttgttaaaaagatactgtcccccgttcccacccgcattgggctatagaacgtttttcacctccaaaaagaccccctttgtttgggggagttcaccacactgtgcacactcactaagaccgagagccacggtgccctctgtcacttttatagtgtaaaatttggagattgaggaaaacgcctctcttgtgtttcccacgcgagaaatatttgggtcgcaccccactcgagaaagagaaggaataagtttttgttggtgtcccgcacagagagagcactcttcacttttagagtgtggagaaataatccctctccccgcagaagggataaccacctctgaagaaaccacctccgctttgttgtgttttataaaggccacccgagcctgttaaagttgctccctcaccccccacaggagaaaaatgagatgatcctcgccacaccttttaagaatttataaagtgattctttcgcccctgagtaaaataatatattttaaaaattatatagtttatataagtgtattaatattgtaaaaggccagtggttcaccaaaatagtgtccagtgttataattgtgtttagagttgttttgtgaatttttaaaggggtaaaataaacacataatatttttcttttatgggaatttattaaactttttgtagtataaaagttttcattttactgggtta

SEQ ID NO: 707535 - DNA, 414 bp, Homo sapiens
tatgcccggcctggtggcacggcccccggaattccagcagggctgaggcacccacagaatcgccttggaaccccggcacacaagaagggtgcaagtgagacccgaggggcacaccccctgcaactcctgcctgggccaaacgaatgggagctctgtttccaaaaaaaaaaaaaaaaaaaaaactacttctaattagctccatacttaatattttaacccagttgggttggtaacagtatatctttgcccactgctggccaattcttgttttgtcagcacttttccataactctggcccaagtgtcacctgatgtggccacgttttacagtcttgctattgtttcttgagtcccttaatctataagaagtatttttaaaatatataacatataaattttgtttcgttatagctcc

SEQ ID NO: 707536 - DNA, 564 bp, Homo sapiens
gtatacaagtaccagaagtatagaacaccaagcagatttaacccaaagaagactacctcaaggcatttaataatcaaactcccaaatggtcaaagataaatgaaaggactctaaaagcaacaggagaaaataaacaaataatatatagtggcgctccaaaatgtctgacagcagagagtggtatgacatacacaaagtgtggaaaaaaaaaaaaagatctcacctcttatactagtatagtatatccagcaaaaatatccttcatgcatggagatataaagactttcggagacaagcaaaagttgatatgtcatcaacaacagacctgtcctataagaaatgctaaagggataccttaagaaaaggacattaatgagcaataagaatcaattaaaaatacaaaactcactgatgatagtaaatatgcagagaaacgcaggatagtataacattataattgcgatgtttaaactactaatatcttgagtagaaagactaaaagacaaaccaatcaaaaataataactacagccaggcatagtggctcatgtctctaatcccagca

SEQ ID NO: 707537 - DNA, 942 bp, Homo sapiens
  misc_feature (7)..(8): n is a, c, g, or t
  misc_feature (37)..(38): n is a, c, g, or t
  misc_feature (41)..(41): n is a, c, g, or t
  misc_feature (43)..(43): n is a, c, g, or t
  misc_feature (48)..(48): n is a, c, g, or t
  misc_feature (68)..(68): n is a, c, g, or t
  misc_feature (433)..(433): n is a, c, g, or t
  misc_feature (589)..(589): n is a, c, g, or t
  misc_feature (601)..(601): n is a, c, g, or t
  misc_feature (612)..(612): n is a, c, g, or t
  misc_feature (614)..(614): n is a, c, g, or t
  misc_feature (617)..(617): n is a, c, g, or t
ttgccannagggctttagagccgcatttgaaaaaccnnctngnggctngaggtatccgcaggagcggncgggtggcgggaggaaccgttacgggaactgaagttgcggattaagcctgatcaagatgacaacctcccaaaagcaccgagacttcgtggcagagcccatgggggagaagccagtggggagcctggctgggattggtgaagtcctgggcaagaagctggaggaaaggggttttgacaaggcctatgttgtccttggccagtttctggtgctaaagaaagatgaagacctcttccgggaatggctgaaagacacttgtggcgccaacgccaaagcaagtcccgggactgcttcggatgcccttcagagagtggtgcgacgcctttctgtgtgatgctctctgggaaggctctcaaatccccagccntcatccagagtttggcagccgagtagggacttcctccccgttgtcctctacggaaggaagcgatggctatgggtcgtactcacctccgaggtactccggggtcttggggagttttctcccctaaaccatttcaactttttggggattctcgtcttngatgctcccccngtccttttccntngcnagttccttgttgacggttacagtttctggagtggattccgggcccattcttaacccaacctttatttaatccggttgataacagtgggcttccttttgtggaagaagcatggtcctgtaaggttgttagatcataaggcaggggttcaacaaaacactaagcaagaaaaagaacaacatttttggcgcggcgggcacagagagcataaatatgttgggggggcgcagagggaccagttgaggcgagacacggacgagggtgtgtacaaaaacgacggagcgggttaaacacgggtagagcgaggaacgcggaggcatcacggggg

SEQ ID NO: 707538 - DNA, 656 bp, Homo sapiens
  misc_feature (7)..(8): n is a, c, g, or t
  misc_feature (37)..(38): n is a, c, g, or t
  misc_feature (41)..(41): n is a, c, g, or t
  misc_feature (43)..(43): n is a, c, g, or t
  misc_feature (48)..(48): n is a, c, g, or t
  misc_feature (68)..(68): n is a, c, g, or t
  misc_feature (433)..(433): n is a, c, g, or t
ttgccannagggctttagagccgcatttgaaaaaccnnctngnggctngaggtatccgcaggagcggncgggtggcgggaggaaccgttacgggaactgaagttgcggattaagcctgatcaagatgacaacctcccaaaagcaccgagacttcgtggcagagcccatgggggagaagccagtggggagcctggctgggattggtgaagtcctgggcaagaagctggaggaaaggggttttgacaaggcctatgttgtccttggccagtttctggtgctaaagaaagatgaagacctcttccgggaatggctgaaagacacttgtggcgccaacgccaaagcaagtcccgggactgcttcggatgcccttcagagagtggtgcgacgcctttctgtgtgatgctctctgggaaggctctcaaatccccagccntcatccagagtttggcagccgagtagggacttcctccctgacttctactaaagtttccttctctaaccattttaatactttattggattctcgctcttgaatacctactctgttcattttacattgctaagtatcctggtgacagaatccagtctttcttgtatggaattccctgtcttaatcttttaatccctatctttaactttaatctcgttcgttaccc

SEQ ID NO: 707539 - DNA, 360 bp, Homo sapiens
cgttacgcctgtaatccccagcactttgggaggccgaggcaggcagatcacctgaggtcaggagttcgaggccagcctgaccaacatgatgaaacccgtctctactaaaaatacaaaagttagccgggcatggtggcaggcacctgtaaacccagatacttaggaggctgagccaggagaatagcttgaacccaggaggcggttgcagtgagctgagatcatgccattgcactccagcctgggcaacaagagcaaaactctgtctaaaaaaaaaagaaagaaaaagatgaaattatgtttttcacagagatacagcctactggaatcaccatgctggacagctggtaaggtacttagagt

SEQ ID NO: 707540 - DNA, 1048 bp, Homo sapiens
ggaggcctgcctgaggcgaccttcaggatgggactgtggctaccagtgttctctcgcgcgggtgtcgctgggctgtcggcctggaccttgcatgccgcaactggattcaacgttcgacaatatggcaactttgaggagatatcaccatggagactaaagtccatcaaagaacatccagaactcttaccaagtctatgaacacatggtagtcggcgagcaagacatatgcccgagctgatgagagagctgaaatccagctcgaattatatggatcgtggatcttgagctctgtatgaacacaagctgatatcaaggggggcctgactgacgagaagaagcaaccatccgttatgggtgtgtcctcagatcgaggactgtgtggtgctatgcattcctccatgtgctaatcagatgatacagcgaggttgcgtgactctaacagacagctggggaaagaagtccatgcttagtcgagaactcggtgagccaagagatcagagggcattactttgataggactcattgcgtgaccagatttctggtgagcattcgggagatagtgggcgaagacaaagtcccccatcttctggagatgcgtcagtcattgggcccttggggattaccgtacccttccggggcatcattggagtattgatagaaagggcctcccattacatctttgtacattaacagtgtcagggtctggtccgatcttcgctaattgaaggaccaggacaagacaaaagcccggattcttgttccccctgttaattaaccggtttggcaatgttgcctgggaccaggtccagtgaaggttgattcttactgcacgcgaattactgggaactggcctctgaacggtgggcctgagcgaacaaatttaacgccaagggaaattatccgaactcttggtgccaacgtggttccaatcctaactaaaatccactcctggaaaggggaagtccaacccacattggctggagcccacacagttgtgccccggattggaaccagccccaggggggacacaatgtgccagctcgcggaa

SEQ ID NO: 707541 - DNA, 627 bp, Homo sapiens
tggcgtctggtaccggtccggcagtattgggattgctccaagccattcacttccccaaatcttgtcgttgatgggtatgtgtttaaaacatgcacggtgaggccgggcgcagtggctcacgcctgtaatcccagcactttgggaggccaaggcgggtggatcatgaggtcaggagatcgagaccatcctggctaacaaggtgaaaccccgtctctaaaaatacaaaaaattagccgggcgcggtggcgggcacctgtagtcccagctactcgggaggctgaggcaggagaatggtgtgaacccgggaagcggaggttgcagtgagccgagattgcgccactgcagtccgcagtccggcctgggcgacagagcgagactccgtctcaaaaaaaaaaaaaaaaaaaaaaccagggcaagggggcatcaagcaagcccgggggcctcgggccaaggcaatgggaaggctgaggtgggaggagggatggagcctcgaggcaacttgaggcttgtagagaagctatgattatgccatgggattcccagcgggggcaacattagtaagaccccaatctctttaaacatgtgatttgggccattaaacaggtgccttaaggcatgttaatccaa

SEQ ID NO: 707542 - DNA, 1160 bp, Homo sapiens
gcacttgcttcacttgtcctcacaagtagaagattcttataacgcaagtgcagtccttttccacggctatggacagtctgcagaatgacgagagatcacctgtggaatgagctggagaactctcgaacacgtcagaggaagggaagcagaggtctgctagcgtcagccgttccaccagcccagcgtgaagtacagagtttaaccagaagcgtatgtcttacactgccaaaatgacacgagactagactactgcaggaattgaagaatctagcagcgagaaatacttacgagattactcacacgagatcactgagttacatccatctgaaggctcacagttcagcgagatagtcacagatacgacaagaatgcagttgtcacgagttatgcacaggaggagctcaggcaggaaaagctctcctggcaggcatgaagctgacattcgagcctccaggatatgagacgcacagacgtttccctaggggcacacgtacccagttgactacaggagacactgacaggaacgctacgaaaccctttaatagtgctgagtcattccgcgcactcagaaggacttccgccaagcgcaaccaaaatcactctagacagaggatacgtacattaaacgacgaaaactagagcacaagggacaatcaccaaaagcacgaacacggcagacaacatccagagagacctaccaccaaaaaaggataggagacaaaacgagcaacaagaaacaagtggggcaaaatccacccaaacaaagcccagctacagggatgaaccacaccaggaaaaagcgggaaacacaaagaagaaacagcgggggatcaagacatagaagaaccacacgaacaagaacaccacacaaagaggaaacccacacaggcaacaacaaaaatggaagacaaagcaatcaacaaaaggggaaaaaagtataccagaccaaaaaaacaagggcagacaagcacagagaaacatacacaaggcacacaccagacagcacacaggaaacaacaatacatacacatagcagaaacaaacgatggagcaaacaaagaaaacaaagacaaaaacacaacatggaccaaaacaacacaaggcgacacggcgagaaatcacccacgagcaacaacaagaccaggccgggcaagaagaac

SEQ ID NO: 707543 - DNA, 322 bp, Homo sapiens
atgtaacatagttgtctctgtccaagttcttctcatgataacaagactacctactccaactcttactgcctaacagtaaatccgggacattgactcccaagctcacattgtacaatctgtgttagaatttccctatttattagacacaggttgtgttagatatttatcgtgtgtattttaattcctttcataaaaacacaaaattaaaggcttggatactcagtcagagggttctttttactcgaccattcttttctttcttgagacagagtcacgctctgtcgtccaggctggagtgcggtggtgcgatctcgatgatcct

SEQ ID NO: 707544 - DNA, 526 bp, Homo sapiens
tggtagccactttcccatgcagctaccaaaccataactcacaggcccgggcagtggacacagcctttggaatggaagatgggtctgcaatgacttgggactgctggtatattggtagcatttgccaatttccatggtgtaaatagtcacatcatgactgatttcaaactaccaacattctgtcaacagtctccagaatttctgaaaatttaatgaacatctttgagaaccagtatggaccagctccagcataccactgcctagggcaaatgatgaaatggaacctctaccaaactgggaggcaggagttctgggtccaggaacagttttactggaactgaattcattgggtaatccctcatatttcctactctgggcctgagtttctccagctgtcaaaagatgaatatagtatttgctctgcctgcctcaaaggcattgggatgtcaagagccaatagcatggccaggcgtagtggctcaagactgtaattccagctctttgggaggctgaggcgggtggatcac

SEQ ID NO: 707545 - DNA, 915 bp, Homo sapiens
  misc_feature (415)..(415): n is a, c, g, or t
  misc_feature (513)..(513): n is a, c, g, or t
ctccagaggatcaggtgtccctttgtcttgtttcgtatttgagatggagtctcactgtctcacccaggctggagtgcagtggcatgatctcagctcactgcaacctctccctgacctggtttaagtgattctcctgtctcagcctcccaagtagctgggactacaggtgcgcaccaccatgcccggctaacttttaaaattttatgtggagatgaggtctccctatgttgcccagactggtcttgaactcctagcctcaagcagtccttcttccttggcctctcaaagtgttggaattacaggcatgagccatcctgcctggccttttacttattcttaaataaacttattccttgactaatctttacagaaagagatgttaacattaagtatgcctcttcactttggtctaaantttgtagtatctggcagctcttttttgtagtatattttgaggaagtggtgtccctttcctagattcatgctagacaaatttttctctctcttcttttntggagtgtgtgtatgtctgtgtgtgtgtgttttatttcattgggtttcagagacagaggttaaataattgtgcattcactgcttcatccttacaagaaaatatatgagctttaaattagataatgtatgtatagcacttagtatagtgcttggcacatagttagcatttaataaatggaagctttatggccaggcgcagtgactcattatctgtggtcccagcactttgggaggttgaggcgggtggatcacctgaagtcaggagtttgagaccagcctggcccacatggtgaaacctcatctctattaaaaatacaaaaattagctgggcgttggtggtgcgcaccttgatcccagctactcaggaggctgaggcaggagaattgttgaacccaggaggtg

SEQ ID NO: 707546 - DNA, 589 bp, Homo sapiens
ctgagcaatggagagataaaaactcagatggaggccaaagcatcatcttctttattgaagaaggcttaaaggaggcagtggcttagtgtgaagtcacatgggtctgtgctgggctgactttcccccttcccctagtatcacttgttttgggtaagtgaggccccacgcatcccggccagtggagtccgactcatagaagaaagcatcggaatgggaaatctgcccccctcctcacagttcataccccaggagcaaatgctaaatactgtcttgaattaacagagttactatgggttggccgggcacggtggctcatgcctctaatcccagcactttaggaggccgaggcgggtggatcatgaggtcaggagatcaagaccatcctggctaacacgctgaaaccccgtctccactaaaaaatacaaaaaacagctgggcatggtggcgggcgcctgtagtcccagccacttgggaggctgagacaggagaatggtgtgaacctgggaggcgggacttacagtaagctgagatcgtgccactgcgctccagcctgggtgacagagctaaactccgtctcaaaaaaaaaaaa

SEQ ID NO: 707547 - DNA, 938 bp, Homo sapiens
atatacaatataactgctctaatgctgctagtcgtagtctttaccacactaggtggttatgcctttattagcataaaacacaaaaaacttataacaggagctttacatattactgggatggggggtggttcgggatgggtgggcagctgctgaacccttagggcattacctctgtaatgtaggcgctttcaactgtactgctgcagacttttaacgtaccttaaagcttctcctgtgaacttcttagggaaatgtcaggttcagaactaaagtgtacgggtgggtctatgtagcgggggggagggtaacaatgggtggtcttccttgatattcatcttcacagaggttagtacacactcggagtacgtagaggaacttcatatacagtacttgatttggcaggttttcttctaccttgtgctctgccatggagctgttccactatgatatacaaacgcaagtgtagtattccattactatgtggctacagggcatcatatgtgataaaaactcaaccatgttagctgggacttagactccctacagttccttcaatggacacacgtaacatataaacaatcctatcgggtaattcaaaattacagattaaaacaggagcttacagaatcgggggtcacagcccactgcctccgtccatccccgacgccctaaaggtaaccccctggccccagtatcattccagcacagtaatcatgcaatatcaacggccccgtgcttacccaacaccgcgggtcctacaagaataccgggagagcgacaacggggggcaacaacagccaggaacccagcaccggcgcaaggcgaacgacccgcacacggggcgggcgctgcaccacacacaacccgaaacgcggacacacgaaggaacaagacacacgagcagaaggcacgaacaccacagtgacacgaccaacaca

SEQ ID NO: 707548 - DNA, 1015 bp, Homo sapiens
  misc_feature (1015)..(1015): n is a, c, g, or t
ggacgcgtgggcttcttttgtgttcccccccgaaacagagtctcgctctgtcacccaggtggaggtgcagtgagccaagatcgcaccactgcactccagcctgggcaaaaagagtgaaatcaccaccgcgccccccccccccaaaaaaaaatggccaggcatggtggtcacacctgtaatcccagactttgggaggcaaaggcaggtggatcacgaggtcaggggtgtcgagaccagcctgaccaacatggtgaaacccgttgtctctactaagaaatacaaaaattagccgggtgtggtggtgggcgcctgtaatcccaggtactcgggaggctgaagcaggagaattgcttgaacgcgggaggcggaggttgcattgaaagccaagatcgcgccattgcactccagcctgggcgaccagaggcgagactccgtctcaaaagaaaaaaagttctgatgttgaatatgtgtctccagggctttggggagatccaagttgttgttcctttcgtggagggtatggcttcacatatgggagagtgttggttttggaaatgagattcttacttctgttgtccatgcttgcaaaatttagatgttgagaggctataaagagtaaaaattgacatcagtgtctgaggtacagaagaatacgttttgcctgcgtgatattacaggggcataacgggtggtgattgaacaatgataaacatttgccggcacctaagttagcgttttccccggcattgcgggcgccacggggtggacccaggatcgggaattggaccacctgctatcaggaactctatccatatcaataaaaatccggggtggtgtggcatgtagcagcacatggggcggacaggtgcacccggggagcatcgacgcatcgctgcactggaaagactacacaaaacgggcaacacggcacaacacaagaggcagacaaacagagggacggaacgacatcactgctcacacgagatgctgcgagtcagacgtctcaactatgcgn

SEQ ID NO: 707549 - DNA, 108 bp, Homo sapiens
ggtccgccccgggctgccgccagccaagtgcaacttgaattgtctagagtatttttggagctttggaggttaccagacttgcgttttctgtgttgcaaaatccttcgc

SEQ ID NO: 707550 - DNA, 398 bp, Homo sapiens
ggtcggtcggtaccggtgttccttgtctggcataaacttaactgctccctgcgcataaacttaactgctccctgtagatacagaaactggtgcctctttttctgtcactgtgttgagcaggcagtctgttgtaatgacccccaaatcacagagacttagtaagtacttattcatgggccaggcgcagtggctcacgcctgtaatcccagcacttttggaggctgaggcaggtggatcacaagattaggagttcgagaacagcctgacccacatggtgaaaccccgtctttactaaaaatacaaaaattagccaggcctggtggcacgcgcctgtaatcccagttacacagaagactgaggcaggagaatcgcttgaacgcaggagacaaagggaaaca

SEQ ID NO: 707551 - DNA, 168 bp, Homo sapiens
tttctgtacagcatacttgatcataaccatgctcaagaaccacccaaccatcaagggttaaatgctttttgccttgctggataatgacttttaagtcagccaaaccatggtctgccgcaactaaggcacgttcaggctcagttgctaagtcttgcatgtgggcatcat

SEQ ID NO: 707552 - DNA, 117 bp, Homo sapiens
tgtggagtataaatagtcctactgcacaacatgagccagaatagataagcctttctacagcacaatcccccaaattcattgtacctcagagtgaatataccacacgaacggctcttg

SEQ ID NO: 707553 - DNA, 347 bp, Homo sapiens
tgtgcttgagcaggagttgtcctcctctgtgcagtcctgcgaatgggggccagccaggcccatactggaggggagaatctgttctcgagagcctgttggggtcgctgccagcctgtctcctctcgaggtctctccagttccccttctagaccaagggattttctcacgctccctgggataactgtccaagcaggcaggctgttctctggttccaactactttgccacaggatctctaaagaccgcccgaattggggctattgccagcggttagaagagaacccagggtccaagggcattgtgggcgagtccagagcacatccggtgttcgaagcgctggtaagcctt

SEQ ID NO: 707554 - DNA, 113 bp, Homo sapiens
acgtagtcggaccactttcagagtagtctaccgtacaaccctaacataaccattcttaatttaactatttatattatcctaactactaccgcattcctgctactctggaaagg

SEQ ID NO: 707555 - DNA, 729 bp, Homo sapiens
gaagaggagctggtgagaagactgacgataatggcgcctccggcccccggcccgtgactcgccggcggcgtccggtggtaggtgtagacgagctgtgcgacgtagaagaacgccttctacgatcgtgcaggctaccgagacatgtgcatagaacggaggcgcagctgggtgatagctatctaagacccacgtagacgagacggatggtgaagatggttgacgtcttcctgtatagagacgtagctggcgcagaggaaagtgcggtgtggtcctggatgatatcaagccctcctcggaccctgagctccagggcgtgcgcatgttggtgcgtgaactatcctcggcccatcggagaagatcaggaatgggagcatgcactggtgtgtccgaagctgtgcatcgcggatggagtatggacgcatgggagaccgttgtgacgtgagcaaacattcaacctattcctgtctcatggaccgcactgccatctatctccacgatcagaatccggatgccgacctgtcgtgcgctgcaccatgggtgtgactacgcctgtgaagttgcatcatgaccattgacagttgcggatccttgccttgagagcttggtagctgattggtagctcgcccggtaaggagctgcaagagaatgcgggaccggcgacgaggatgtcgagcctcagccagttcgtcactgcttggggtcagtcctgggcacgggtggtggagaagc

SEQ ID NO: 707556 - DNA, 366 bp, Homo sapiens
  misc_feature (366)..(366): n is a, c, g, or t
ggcacaaggcatgctgaattggcatatgacattacaataagtaaaccgtgttcgcatgtgcattttagatggcgtcaagctgtgccagccaggctggagctctatgggacaggatcagataactgcatcctcatgtgtagcaagttcaagcaaatctcctgcctgagctctccatgttgctgccattacaggtacctgcgacctcgcccatcaaactactgtgcttgcagtagatacagaggttcaccatcatggtgatgtaacgctccgctgagactgcagaccaagcgatccatagcatgttggactgacgcgctgggatcaccagagtgaacgaatgggcccggccgtacctagtcctctggn

SEQ ID NO: 707557 - DNA, 733 bp, Homo sapiens
agcggagtgtgcgataacacagtactacaacgaggtgcttacgtctcgttgggttgtctggctcctcgtcgctagcatcgcattgcttccttgaccaatgacgatggggtgcactctaaacagatgctccatgttattcttgtgggggtctgcagatgggcagatgttatggctacgctgagatccgaggggaaggagtaaggtggtgggcctttcaggttagcttgattgccaactccatggagtggttggacataggacggcgttgccgatcacactttctaagtgattattagtaacttcggagccgtagtctccaggacttgggattggggcccaaactcgtagggtagattgtatggacggatgaggactggtcttgagtcagccaagggaggatgtttgttacaagagttgagagcaggtaaacttgtctgtggtccactttcacctgattctagggcagtcccagtttcgtggtaagaactagttagaggtacaggctaagacccgagaagactttgggcaggggtggtgagcactctaggagggttcgtagcttcccgtgtatccccgtgcgctttttagtattcctccgtctaccgttgaagcttacagaagggtgaccaggctgtgtgtcaggatgtgaacgaacgctgtggtccatccaggcagggaaaaaacttactgagtatggagtgcatcagcccagagatcgtctaattggtaccaa

SEQ ID NO: 707558 - DNA, 231 bp, Homo sapiens
gtgaaatttgaggtgataatcaacttgacaaccttcaaggtacataacatttagatgagtaaatgtgttaaattttgtggaatggctttctgagctaaaataaattcaagtaagtttttttatttgagtgtatataacgtaataggacaatctgacttcccattcatcttagtaagtatgcatttagtagtctgcagtgtaattacagagacttggaaataaattaggtaa

SEQ ID NO: 707559 - DNA, 1434 bp, Homo sapiens
tcctggagtcctcgatggcgctggagagcgggaacgacaggcagtagctcgcgcggacgattgcaggcaggacatcaccaggagggcgaaggcgagccacggggaggggggccccgggacatttgcgcagcattggaggctgccaggggcttcggcctgctgtgtgtggccgtgtctccaccgagggcaccttgcgtgcccaggggttcctgcgttgccggatgatgtggccccacaagtgggacttgggttgaccgcctgatattgccccttcaagcggctcagcccccttggggcgcctgggcttttgggcacgagcaagtatcagggcattccaggggggaggtcaagggggcaattgggcggccgatggacccaggaactaaggggctgacgggcagagtgctcgtgtggccagggacgttggaagtagacgcatacttccagggggcaacggggcaagcagcactgggttgccgagcggcaaagcgcgccgcttggaagggcaggcccgctcaagagcggtgacgcactgtggccaggaaagccggcggagcaagggcgaacattgggggccactttcccagaaaaggcccccggatggtaccccgaagaggcgaccggtggtgcacccatttcgggaccggaggctcgggcggctagaaaccggcggaccgcccccggcggccatatccgagcggcttggcccatacaaaagggccggattctctgagggtggcccattggggggcaggcaaccggcaagtgtgccccgaggggggattcattccccgaagaccattggttcggagacaggggccactgtgctgcgccccccaaagcgctcagatggcctgtttggcccccagggattagggtgcgccagaaatgaacgcctgcccaaaagggggtctcccggggaattggggacccggttgtgaactcacggagcacgagggggaactcacttttggagcactttgcgggctccccggggagtatgtatgaaccagcagcccacgcggaatccacgagaaggcgaaaggcgggcaggacccgggcggcccctcttctgcccattggaataccacccgctttttaaacgcgagcttcgtggatgcacgccccattggcgtgcaaaccggacatgcgcgggcagtcctctcgctgcgcatattaaccgattccctttccaagggggtacagttccgcgagccaccttacgtggggattgggccccgatcattggggtctcctgcagaggacaccccgtagacaagtcttttgccaatgggagcattgcggctcctaaaccgccgaagatataaaggcgctttggaggcccatgtatggtctccccggaggcgacaaagcaaccatatttgacgctttgggaacattcgatattatggtggagcgatttcacacaacctg

SEQ ID NO: 707560 - DNA, 1000 bp, Homo sapiens
  misc_feature (21)..(21): n is a, c, g, or t
  misc_feature (63)..(63): n is a, c, g, or t
  misc_feature (78)..(78): n is a, c, g, or t
  misc_feature (113)..(113): n is a, c, g, or t
  misc_feature (134)..(134): n is a, c, g, or t
  misc_feature (152)..(152): n is a, c, g, or t
  misc_feature (178)..(178): n is a, c, g, or t
  misc_feature (182)..(182): n is a, c, g, or t
  misc_feature (206)..(206): n is a, c, g, or t
  misc_feature (244)..(244): n is a, c, g, or t
  misc_feature (290)..(290): n is a, c, g, or t
  misc_feature (402)..(402): n is a, c, g, or t
  misc_feature (404)..(404): n is a, c, g, or t
  misc_feature (424)..(424): n is a, c, g, or t
  misc_feature (429)..(429): n is a, c, g, or t
  misc_feature (441)..(441): n is a, c, g, or t
  misc_feature (460)..(460): n is a, c, g, or t
  misc_feature (465)..(465): n is a, c, g, or t
  misc_feature (472)..(472): n is a, c, g, or t
  misc_feature (476)..(476): n is a, c, g, or t
  misc_feature (480)..(480): n is a, c, g, or t
  misc_feature (482)..(484): n is a, c, g, or t
  misc_feature (492)..(492): n is a, c, g, or t
  misc_feature (495)..(495): n is a, c, g, or t
  misc_feature (498)..(498): n is a, c, g, or t
  misc_feature (500)..(501): n is a, c, g, or t
  misc_feature (510)..(510): n is a, c, g, or t
  misc_feature (522)..(523): n is a, c, g, or t
  misc_feature (530)..(531): n is a, c, g, or t
  misc_feature (536)..(537): n is a, c, g, or t
  misc_feature (546)..(546): n is a, c, g, or t
  misc_feature (549)..(550): n is a, c, g, or t
  misc_feature (553)..(553): n is a, c, g, or t
  misc_feature (555)..(555): n is a, c, g, or t
  misc_feature (558)..(558): n is a, c, g, or t
  misc_feature (562)..(563): n is a, c, g, or t
  misc_feature (573)..(573): n is a, c, g, or t
  misc_feature (580)..(580): n is a, c, g, or t
  misc_feature (586)..(586): n is a, c, g, or t
  misc_feature (597)..(597): n is a, c, g, or t
  misc_feature (605)..(605): n is a, c, g, or t
  misc_feature (616)..(616): n is a, c, g, or t
  misc_feature (623)..(623): n is a, c, g, or t
  misc_feature (625)..(625): n is a, c, g, or t
  misc_feature (629)..(630): n is a, c, g, or t
  misc_feature (634)..(634): n is a, c, g, or t
  misc_feature (640)..(640): n is a, c, g, or t
  misc_feature (642)..(642): n is a, c, g, or t
  misc_feature (650)..(650): n is a, c, g, or t
  misc_feature (655)..(655): n is a, c, g, or t
  misc_feature (662)..(662): n is a, c, g, or t
  misc_feature (668)..(668): n is a, c, g, or t
  misc_feature (671)..(672): n is a, c, g, or t
  misc_feature (675)..(675): n is a, c, g, or t
  misc_feature (677)..(678): n is a, c, g, or t
  misc_feature (680)..(680): n is a, c, g, or t
  misc_feature (683)..(683): n is a, c, g, or t
  misc_feature (690)..(692): n is a, c, g, or t
  misc_feature (694)..(694): n is a, c, g, or t
  misc_feature (700)..(701): n is a, c, g, or t
  misc_feature (759)..(759): n is a, c, g, or t
  misc_feature (769)..(769): n is a, c, g, or t
  misc_feature (776)..(776): n is a, c, g, or t
  misc_feature (780)..(780): n is a, c, g, or t
  misc_feature (787)..(787): n is a, c, g, or t
  misc_feature (792)..(792): n is a, c, g, or t
  misc_feature (797)..(797): n is a, c, g, or t
  misc_feature (799)..(799): n is a, c, g, or t
  misc_feature (809)..(809): n is a, c, g, or t
  misc_feature (812)..(812): n is a, c, g, or t
  misc_feature (814)..(814): n is a, c, g, or t
  misc_feature (822)..(822): n is a, c, g, or t
  misc_feature (824)..(824): n is a, c, g, or t
  misc_feature (836)..(837): n is a, c, g, or t
  misc_feature (842)..(842): n is a, c, g, or t
  misc_feature (844)..(845): n is a, c, g, or t
  misc_feature (847)..(847): n is a, c, g, or t
  misc_feature (859)..(859): n is a, c, g, or t
  misc_feature (861)..(861): n is a, c, g, or t
  misc_feature (863)..(864): n is a, c, g, or t
  misc_feature (980)..(980): n is a, c, g, or t
ggcactcaaccctggttgcgngggctacgtacgttcagtgcggaggtgacctggctcctcgangaggttacagcctcntcacccaggggcccgttactttgctctgtccagtntgtgcatcccacaaggtgccnacagtaatgacagtgcgnactggactgagtaccaggaccccagnactngcagcagtaagatcttccctggcnactgggacaaccactcccacaagaagaacttgtttganacgcccatcctggctcgctatgtgcgcatcctgcctgtagcctggnacaaccgcatcgccctgcgcctggagctgctgggctgttagtggccacctgccacccccaggtcttcctgctttccatgggcccgctgcctcttggcttctcagcccctttnantcaccatagggctggggacnggggnaggggagggtgntcagaggcagcaccaccanacagncaccccncccncccncnnncccacccnccnccncnnacgggcccngccccagccccnnagccccnnccccnnacccccagnccnnacngnccngttnnctaaggcacngaggganctgagnaggtctggganggacaggnaagggcaaagnagggcgngnggtnncccngccccngnccggaccnccgancccaggngcgtgngtnnctntnncnccnagccccnnncncacacnncacattcccatggtggcctcaagaaaggcccggaagcgccaggctggagataacagcntctcgcccgncggcccngcgncggcccnggggnaccangnggccacaacngcngnggcccccngnccccaagacacnnccccntnncnccctggttgccncncnngccccttgtcctgaagcccagcgacacagaagggggtggggcgggtctatggggagaaagggagcgaggtcagaggagggcatgggttggcagggtgggcgtttggggccctctangctggcttttcaccccagag

SEQ ID NO: 707561 - DNA, 153 bp, Homo sapiens
ttcaccatccaaaagagttaagtccatctctcccagaaattggccttaaatagagacagacgactctagattatcacggatgtgactagaaagaacttcaaggtttactggcttcacattcccactttcaaacggtccccacagagagagcgt

SEQ ID NO: 707562 - DNA, 1954 bp, Homo sapiens
  misc_feature (21)..(21): n is a, c, g, or t
  misc_feature (63)..(63): n is a, c, g, or t
  misc_feature (78)..(78): n is a, c, g, or t
  misc_feature (113)..(113): n is a, c, g, or t
  misc_feature (134)..(134): n is a, c, g, or t
  misc_feature (152)..(152): n is a, c, g, or t
  misc_feature (178)..(178): n is a, c, g, or t
  misc_feature (182)..(182): n is a, c, g, or t
  misc_feature (206)..(206): n is a, c, g, or t
  misc_feature (244)..(244): n is a, c, g, or t
  misc_feature (290)..(290): n is a, c, g, or t
  misc_feature (402)..(402): n is a, c, g, or t
  misc_feature (404)..(404): n is a, c, g, or t
  misc_feature (424)..(424): n is a, c, g, or t
  misc_feature (429)..(429): n is a, c, g, or t
  misc_feature (441)..(441): n is a, c, g, or t
  misc_feature (460)..(460): n is a, c, g, or t
  misc_feature (465)..(465): n is a, c, g, or t
  misc_feature (472)..(472): n is a, c, g, or t
  misc_feature (476)..(476): n is a, c, g, or t
  misc_feature (480)..(480): n is a, c, g, or t
  misc_feature (482)..(484): n is a, c, g, or t
  misc_feature (492)..(492): n is a, c, g, or t
  misc_feature (495)..(495): n is a, c, g, or t
  misc_feature (498)..(498): n is a, c, g, or t
  misc_feature (500)..(501): n is a, c, g, or t
  misc_feature (510)..(510): n is a, c, g, or t
  misc_feature (522)..(523): n is a, c, g, or t
  misc_feature (530)..(531): n is a, c, g, or t
  misc_feature (536)..(537): n is a, c, g, or t
  misc_feature (546)..(546): n is a, c, g, or t
  misc_feature (549)..(550): n is a, c, g, or t
  misc_feature (553)..(553): n is a, c, g, or t
  misc_feature (555)..(555): n is a, c, g, or t
  misc_feature (558)..(558): n is a, c, g, or t
  misc_feature (562)..(563): n is a, c, g, or t
  misc_feature (573)..(573): n is a, c, g, or t
  misc_feature (580)..(580): n is a, c, g, or t
  misc_feature (586)..(586): n is a, c, g, or t
  misc_feature (597)..(597): n is a, c, g, or t
  misc_feature (605)..(605): n is a, c, g, or t
  misc_feature (616)..(616): n is a, c, g, or t
  misc_feature (623)..(623): n is a, c, g, or t
  misc_feature (625)..(625): n is a, c, g, or t
  misc_feature (629)..(630): n is a, c, g, or t
  misc_feature (634)..(634): n is a, c, g, or t
  misc_feature (640)..(640): n is a, c, g, or t
  misc_feature (642)..(642): n is a, c, g, or t
  misc_feature (650)..(650): n is a, c, g, or t
  misc_feature (655)..(655): n is a, c, g, or t
  misc_feature (662)..(662): n is a, c, g, or t
  misc_feature (668)..(668): n is a, c, g, or t
  misc_feature (671)..(672): n is a, c, g, or t
  misc_feature (675)..(675): n is a, c, g, or t
  misc_feature (677)..(678): n is a, c, g, or t
  misc_feature (680)..(680): n is a, c, g, or t
  misc_feature (683)..(683): n is a, c, g, or t
  misc_feature (690)..(692): n is a, c, g, or t
  misc_feature (694)..(694): n is a, c, g, or t
  misc_feature (700)..(701): n is a, c, g, or t
  misc_feature (759)..(759): n is a, c, g, or t
ggcactcaaccctggttgcgngggctacgtacgttcagtgcggaggtgacctggctcctcgangaggttacagcctcntcacccaggggcccgttactttgctctgtccagtntgtgcatcccacaaggtgccnacagtaatgacagtgcgnactggactgagtaccaggaccccagnactngcagcagtaagatcttccctggcnactgggacaaccactcccacaagaagaacttgtttganacgcccatcctggctcgctatgtgcgcatcctgcctgtagcctggnacaaccgcatcgccctgcgcctggagctgctgggctgttagtggccacctgccacccccaggtcttcctgctttccatgggcccgctgcctcttggcttctcagcccctttnantcaccatagggctggggacnggggnaggggagggtgntcagaggcagcaccaccanacagncaccccncccncccncnnncccacccnccnccncnnacgggcccngccccagccccnnagccccnnccccnnacccccagnccnnacngnccngttnnctaaggcacngaggganctgagnaggtctggganggacaggnaagggcaaagnagggcgngnggtnncccngccccngnccggaccnccgancccaggngcgtgngtnnctntnncnccnagccccnnncncacacnncacattcccatggtggcctcaagaaaggcccggaagcgccaggctggagataacagcntctcgccctctttcccagcgtccagcctctgcacgtgagcccggtggccagaacctgaatgtgcgcgctccctgtacaccccacacgaagtacctttcacctcgtttgctcgttcctgtgttatggctcttgcttggcactctgtgttcctgtacatggcgcgcatggacagcggaagggggtggtggcgggggttcgtagtgtgaggaccatagaaggcgcatgctgacgggtacacgagcggaagtgcgccatgggtgtcgtgagtggttcgtggcgttctcgcgtgagccctctactgtctagcgactattataaaactctcccacaatgggatcgcacggcaagagaatcaccagacacagtagtacttctgtactcatttccgttgcaacgaggagaaagaagaccatcatatgcacacagaaaagaaccatagacaattcgagcaccatgaaaagatacacaaaaggtgagaacaacaaaacaagacatagtagagaaccaacataagtaacgcgcgagaggagcaccgtatacaccacatttgatatctacctacaatggagattaggccattctatcaattagaaaaccaatatgaattacactggaaaatgcgataaaagaagaaaaaacgaagaaatcaggagacgaatagagggcaggaagatcttaattgaaggaaaggaaaatagggggaagacgaaagaggacaaaaaagaggacgaggagcaataggaaagataagagacaaggagaatagagagcgataaatgggagggtcagcctaataatagagtgaagaatataataaaaacaccaagaagaaaaaacaaaggagcaataatttgtgagaaaaatagtagtctaaattaaaaaaattatcaagaggtaaaaagaaaagaagaaagaagaatgaacaatataataaataagatagaaaaaggaggagaacataagaaaagaaatataataatagctttcgaatagcgaggagaaaaaaattatagagacagaaagggagatattaaactataagcaaaataatatatctcaggcacgtgagaagaaaaaaaacaatagttagcgaaggaaacgagcgaagtacttataaagaagaaaggatcataaacgacaacgaagaggttagtgcgaagataaggagggtaaaataaattaggagtatacggac

SEQ ID NO: 707563 - DNA, 859 bp, Homo sapiens
  misc_feature (28)..(28): n is a, c, g, or t
  misc_feature (103)..(103): n is a, c, g, or t
  misc_feature (105)..(105): n is a, c, g, or t
  misc_feature (109)..(109): n is a, c, g, or t
  misc_feature (177)..(177): n is a, c, g, or t
  misc_feature (188)..(188): n is a, c, g, or t
  misc_feature (198)..(198): n is a, c, g, or t
  misc_feature (224)..(224): n is a, c, g, or t
  misc_feature (397)..(397): n is a, c, g, or t
  misc_feature (607)..(607): n is a, c, g, or t
  misc_feature (616)..(616): n is a, c, g, or t
  misc_feature (664)..(664): n is a, c, g, or t
  misc_feature (684)..(684): n is a, c, g, or t
  misc_feature (701)..(701): n is a, c, g, or t
  misc_feature (704)..(704): n is a, c, g, or t
  misc_feature (754)..(754): n is a, c, g, or t
ggatccgcggcgctgcccggggcggggnaaggaagcagccgaggagacgcacgtgcccggagtccgggagcggggagcctcttcatctctccatcctccctcngngcgngccctcagccgtcctcgtccgctcaccatgcacctcccctccaagaaagggccacatgcgtgccaggnacgcgagcccnggccacaggnacatagcagcctagaaggtgagtcangcgttaaaccacatgggtactcaccggggaaatgagataaatgccaagaagtgagagtttcataacatcgtatgggggagacggtaggacctgaacccggggagaccagaggtttctgggggcgattcacatgtagccaagatgtgaaggccctataagagtaaacaaggtanggagggaagaattttccaggcaggccaacagcaggttccaacagcagggccaacagaggtcccaaggcaggaacggtcttgcagcaggggaactggaggaggctcagctcagcatggtagagggctagtggtgcagcggagctgtggtgtgagaggggccaggtcatgcagaggccgatagagcacagcgaagacctcggtctttattcngggagacangggaagtcctcggaggaagttaagctgataagagacatcatgaagttngggccaggcgcagtggccangcctgtaatcataacanttngggaggctgacatgggaggatcgcctaagccaggagttcgagaccagccnggtcagcatagttgagaccccccgccccccgcccgccatccgctaaataaataaataagacataatgaagttttgaattgtaatgagatcactctggctgctgta

SEQ ID NO: 707564 - DNA, 404 bp, Homo sapiens
  misc_feature (186)..(186): n is a, c, g, or t
gccagtacggatgtggcatcatgttgcggctacagctctaccgaacagccatgatgggctggggggtccgcgcctctgcagaccatcccatcagggtgaccttcatctgcgagtatgtcgggtagctgatctctgatgctgaggctgatgtgagataggatgattcttacctcttcgactttgacnacaaggattgagaggtgtactgcatagatgcccgttacatatggctacatcagccgcttcatctaccacctgtgtgacccctacatcattcccgtccgggttcttcatgctgcaccatgacctgcgatttccacgcatcgccttcttcagttcccgagacctccggtctggggaggagctagggtttgactatcgcgaccgcttctgggtcatcgtac

SEQ ID NO: 707565 - DNA, 216 bp, Homo sapiens
cgatcattggttcacatctctgctgccgcaaccgcttcctcctgaacgctgtaaaagctgtccaaaaatgtcacagtcctttcgaaatttgcattctcagaaatatgtgactgtctgtcctccctccctctcgtgtgtccccaccagtccagtcggcgggatggaccagggagtgatcatgtcacggaatggcactaaaaatgcatttaattggca

SEQ ID NO: 707566 - DNA, 604 bp, Homo sapiens
  misc_feature (463)..(463): n is a, c, g, or t
  misc_feature (478)..(478): n is a, c, g, or t
  misc_feature (587)..(587): n is a, c, g, or t
  misc_feature (604)..(604): n is a, c, g, or t
ctctgcatatttcctggtgattattcctggatatactgcatttttgtagttgtgaattatagtacaagagaaaagcagtacctgacattcagatggagcatttttatatacaaccatgggaggggcagagagccatccagagtcacagccattgtatattgaatctgtcaatactgagcaaataaaacaaaagcattctgcataattctgttgatttttttttgtcataggaaagaagaaaagagtttgaaactaatctcagacaggtcttgagttggaaatagaagactttctcctactctggcctttgcctggatagactctgtgtttgggggcaatacaatagctcttttggctacagatatgtgcaccgggatgatagggcctgtggtcttacaggtaagtagatgagtactgtgaatatgcagtaataaatggaacactttataaattgacacagttngcattcaggattcanagagaaagaagattgtggacttttatcataacagtttcattttgaagtctgcctataatctggtacccttaattaaccaggctgtcttgcagcataacctgctgttaangccgacttctttctgtn

SEQ ID NO: 707567 - DNA, 347 bp, Homo sapiens
tttccattgttcaggcgggtgactgtggctctgctggtggggctgctgaggctcttgttttatgtgacttcttcgctcctggcccatttgagcacaccgccggttagcgggggcaggcctcctagggagaggagggtggatggcattcagggtgttagtcatgttagcttgtttccggtgcgagatacgtagtacgggtcgtggtgctggagtttaacgttgacgtagtaggaatgcggatagtagttaggactacctactatctagttaacattacgaatggttatgtaagggttgtacgagaagaccctgctattatacatcctatgtgggtaattgacggcgta

SEQ ID NO: 707568 - DNA, 285 bp, Homo sapiens
ggccatgctcctctgcaccggacttgttagagccgtcttgaggagtctgcttctccgtcacccgacatgtgagggacgtcttataggggtctgatcctccgcacccgacgtgctggagccgtctttgggggtctggcctccatctttctctcatgctgaatgcttcctgcccgtcaaacattggactccaagttcttcagctttgggacttgaattggcttccttgcttgcagatgacctattgtgggacctaaccctgtgatcaatgtgagtcaatactcctta

SEQ ID NO: 707569 - DNA, 224 bp, Homo sapiens
  misc_feature (190)..(190): n is a, c, g, or t
tgcaaacattgatagactgatgatcagactctagaggtatcccccacaagagacgagatgctagggaaagggaagagagtggctcagcctgcaggttaataggctacaaaagccaaggccaagaggctggcaggggagaggacagctcaccatgctccagcctgtgggtcttgggtgtaccggttatccncttctgccctgttgccatctcccatcctcgtctc

SEQ ID NO: 707570 - DNA, 713 bp, Homo sapiens
ggtgatcgaacagcatggcgtcggtggtgtggcgctgaggacccggagcagccgtgacatccttgctaagccccattccgggtacagctctctgctggtcagatacgcatccaagatagtcgggtggtagctccaaaaacctcggtggaagagtcatcaggcagacgccaaggctattaagaaaatggaaggtcatctatgtgtcatgctgggaacatcatgtgcaacacagcgccatttcctggtggtcacccaggtgcccatgtggggtgttgggaagaataaatgtctgtatgccctggaaagaggggcatagtccggtacactaaggaggtctacgtgcctcatcccgagaaacacggaggctgtggatctggatcaccaggctgccaaggtgtgcttgtgctgctacaagactttggtccacgtggttcctgccaatgccctgagggcgcccttcaaactggtagctatgtctttgatgtcctgtcgaggccatcgcacagagactggagtcccagtgtgaacaggacgatggctgactaccatgaagtcacgggtcgggggtggcgacatgggcctcccgaggaaaagggtctgttggatgggtgacctctgcaggagacctctgaaggtgcctgctgggaaaccctttgggagaactgacctgggggccaaaaataaaggtgaggcgggtcatggacggcattgga

SEQ ID NO: 707571 - DNA, 203 bp, Homo sapiens
agagaattgcttgaacccgggagctgaggttgcaatgggctgagatcgcgccactgcactccagcctgggtgacagagtgagactcatctcaaaaaaagacccagcaaataataggtgctcactaaaattggttggatgcctgaatgactattccattgtttcggaaggtaagtgcactaggccacttgcaacatctttctcc

SEQ ID NO: 707572 - DNA, 298 bp, Homo sapiens
cccgactagcccgacagtgcaaaggtgaagaactgaggatttacatactaaaacagaaacagggcagtcattatttaatttttaaaactctcatttaaatttgcaatgttttagccgggcgtggtggctcaagcctgtaatcccagcacttggggaggctggggcgggccgatcccctgaggttaggagttcgagaccagcctggccaacatggtgaaaatacaaaaattagctgggcgtggtgtaagaatccaggagccgcagggttttccttggagtgctgtcgggctagtcgggg

SEQ ID NO: 707573 - DNA, 185 bp, Homo sapiens
aaggctagaagacttagtagcttcagaagcagaagaggaagcagcaaaagaagattctgaagcagaggaagaagcagcagaagaggattctgaagcagaagaggaggcagcagaagaggattcagaagcagaagaagaagcagctgaagaggattcagaagcagaagaagaagcagctgaagaag

SEQ ID NO: 707574 - DNA, 252 bp, Homo sapiens
  misc_feature (168)..(168): n is a, c, g, or t
  misc_feature (252)..(252): n is a, c, g, or t
tgtgctgcggttcgcctctacgacggactccccacgcagacgttctgggaggccccagacggactccccaggttgtctgggtcttccacccgtcccacgccctctcgggttacgactcactacgacacaccggttctggactatacacatgactgggggtcacctccngttggtccacctgtggcgggacgcggggggtctcccgtgacctgacgcccaaaggggttacccgacgctcgacatttcgtaatn

SEQ ID NO: 707575 - DNA, 660 bp, Homo sapiens
aggagctgtactgataacttcactactgtatgcgatgcgttacttcactctgtttcatagaatttatagacaggtcttctagaatccataaagatagaatgtaaaagattgtgtttctgttctgaatcttccaaagccatctgcacagtgctagcatggtgactcagtgtcctccaagagtcatagtcagtacgagagggcagcaaatgactggtattttctatccaagcctcagtgctcttcagaaggtcactatattcctccatcttaactgtggccttattcaactgtgaggttctacactctgctctctgtgatacttgctgatactgctggaaaggaatcatcaagttatccatccattcttgagcctgtcctgggtcctgttcaacaatgtcctgaacttcagaatccagctcatttagtttggaatgccatagatctaactcgtcccacattttcttttgaatttcttgagctttctcaatatttctgcttttctgctgcaacatcttttcaacattatgaagcccattgttaatttcttctatttttctcctcattgcatatgatggtgagctttttaagacttcattgctaatcttctcatctatgtcttctaaagcttttctggattcttccacctgggattccatctct

SEQ ID NO: 707576 - DNA, 1182 bp, Homo sapiens
  misc_feature (184)..(184): n is a, c, g, or t
  misc_feature (927)..(927): n is a, c, g, or t
  misc_feature (972)..(972): n is a, c, g, or t
gaatgttgcactgtggtgtgtgccctgggcccatgttagtaaagatttctccaggttggaaggagcccgggtgggcccttgacggagcagaactgggcattgtttccttttggagttggtagagttcttctctctggtcctaatcctggtggatgtctgctcgcctgtagctcccaaagattgngtcaggttatttcacttctgcagtaaaaactgggcaaaaaccattcactccatgatattaccgaattatttgtttcacaggtgttcggaaagggcagtgcttcacccaaaggaacgttcgattatgttcatctagtatgccaaagctagcctcgattagcttagctggttactttgttagatcttaaatacacaggccagtcagttagcaccgaaagcctatagtctaggaatcacactgatttgctttgtgtgtttgagatatacatagccttttaactttcccttctgtgggagacaggaaaagccagagggtttgtcctctggaggctccctttactgtggggtgggttccatttcagcatgtaggcttgcaaatggaatatttgatgatgcaaacttacctggccagagatgaataggcatttctgaactcacatcagataaaactagccttgatgtgaggatggatggggtatctcacagcatcaatttacaagccataaggtgagcagtgtttttgctaaggaggggctgcagcaatgctgatcttccatctgattaaatgacactgggggtggtgggttggcttcccttcagcttcaaatgggtgctgttggccatccgttgtcttgcgccatcccaacatgtgtgtattcacttccttctctgccacctgtttcttatgtggacattttatccccttgagaggtagatcacatctccctgccagagatggagatnccagagtcctgggtccagtgcccacagcagccctgactcattgtngggcttctctgtccctaaacacccaagtttctctatttgtaaatagcgcatgttggcagacttaattgatgtttgtaagatgtttctagggttcctggattaatggtggcaatgtatccaagaagtgattgaaaaggttggcaactgcttagtgagagattgaaaccttgagctctctttttttccggacgagtcagtctctgcacttca

SEQ ID NO: 707577 - DNA, 1097 bp, Homo sapiens
  misc_feature (141)..(141): n is a, c, g, or t
ttggaggaatgcatgctcgcatcggagagggcggcaggctagctgtctgggagacggctatcacggatcgggcacgtgcctgcggggtcgcagtctctgtggctgctaggcccggatcggtaaccgatacggcgcaggagngtccacgctgctgctgtgtcgtcgtgtgccccagctagaatggatagggaacgccgggcagtggcgggttgtaaggctccgatgatgtggagttgcctacggttacatagtgatactacctagagtggagcacgtgtgacaagaatgtgtcgtgagaacgggaatctggggcctcgcttagttgacgacgatcatagtcattgagaattcagagatgatgctttgaactaagatatgcgtgacatagagggtaccgccaccctgtagaaggactagctggacaacgtctaggaagggcacctgttagtgaggccccttgttctgtgcagtgattcatccacactaaattgaattggaatgtgaccactgattggacacacgcgcggttacttgggccctagtcaacctttctcccttttttaaaagaacctttatgcgtagcaacgtggggtgctccttttgggtcaccgtccattgtctgggaacccaggctattcgacttacgacgaacagtttccttaaaaccaagctacttctcattcatttgcacacgtttcctaccattttgtcaattcaagacaaagaacggttactaaattatttccccttgagcttgggacgtccatagtttaaccaataacccccaaggggcgttccaatacagtgatctgcgccggagttatgagacatacgtccaaggcacctttctggacggatacaaccaattgaacggctttgcccttcgacgcgggtgggacataaccccaaggggttaaccaaggaaagacccgcgcctcggttctccgttgacgttttcatttccacaacactgcgaacaaacccgacggaacagcgcaacacgcactcccctccggcacttttgtccacgcatattgagcgttggcaaccaaatcagtatgcgaccatgtgttgcacattaacagcgcgcggtaccc

SEQ ID NO: 707578 - DNA, 121 bp, Homo sapiens
ccgcgagcgctacatgtctgactcgcgcttgggctgtccactactatgcgataagttacctgggtgaccgtgaccagcctgtcacaccaggccatgcggcgtattttctctttatactata

SEQ ID NO: 707579 - DNA, 160 bp, Homo sapiens
aaaagaattttgggggttttccctttggcttccctgggccttttatcccctccctggcctacccgaagatttatacccttttgaggctccagggagacggtggttttcccccttcctcctcctagccttttttcccaaaaggtaaacccaatggtggaga

SEQ ID NO: 707580 - DNA, 418 bp, Homo sapiens
tgggtcgactggggcctggattcggccagtttctgctctgcatccaaagatggtccgaagcattgtcacttcagtaacatcaagatgctcaatgacatgggacccgtgcagtggtacttaagtattcaaaatatacaagtacagattctctgacagaacccgaggacggggtcttcatcttcattcaccccagaggtgagagtgcgaggggagaacagcatcgtcagtggtgatatccaaaccaaggcctttggtgagcggggtggggtggggggggtttgctgttaatggaattggaattgtaagatgtgggcattgtgttgtgatgtgaactgagagtaatggcattgccgggcctgtgacctaaagtgaggctcgtaacgagcatggatctgactagacatgtcctcattacatg

SEQ ID NO: 707581 - DNA, 180 bp, Homo sapiens
gtcatgctcggtacctattctactgtgtagcttagttttaaagacaactttgaagtaaacaatgaaataaaagatgtacactaaaacctctagaagctcctagagtacacatactacgcgggatacctactaagagtacgacctagcaggcatagcaatgctataggcactagtgccgta

SEQ ID NO: 707582 - DNA, 220 bp, Homo sapiens
  misc_feature (73)..(73): n is a, c, g, or t
gatttatgctttatctcaaaggaatagagcattcttggaagataggggtctgtgtaggctgaatatatatgangcacttatggattaggtgctgacttttgaacctttgggtttaaaggggctaggccttaggtttgagctttgttaaattgggataagggtttgccctttccttaaatgtgtgccaggattagagccatttgtggaggttcccccccta

SEQ ID NO: 707583 - DNA, 98 bp, Homo sapiens
tctatgaatcatcattaagaactctgggagaacttttgaattcataaccaagccaacatctccagacatgtgagggtaggggaaagtgattcaaattg

SEQ ID NO: 707584 - DNA, 144 bp, Homo sapiens
gagtagatagagaaaggagctcagatcgtaataaggatcgcagtcgactcaagagaaaaaagcagagatcgtggaagggaacgagagcgggaaagagagagagagagagaacgagagcgagaacgaaaacggcatcttcatcgg

SEQ ID NO: 707585 - DNA, 103 bp, Homo sapiens
cgttaaaaccattacacactatcttggggaaaaggtcagaaagacctcctgactccatgttacagtagacaaaacaagttggactcttttggacctataaacc

SEQ ID NO: 707586 - DNA, 596 bp, Homo sapiens
cgtctcctccccagccaccatcgtcatatgctccgggccgaactgtgtggcccctgcctgtgccagccatgggctcgggatggactccctgggcccccacacccattgcgccagcccggaaggccagctttcgcttgttcctgcctcgggacaggccccgggtttcccccagcatcctgagtgtgtcccctctccccaccttcagaggccacccacctcagcaccaccggcctggccttgcctgcagactattaactataacccctagctcgacacccgtctgccgtccacggcgtctggaaccgcctcccggctcggggaggcccccgggctgggaacgcctgtgccctcctgcgccgaagcccacgccccctctgtccttccctggccctgctgccgaccccggaggctgccccgcctgtgggcggtcggccttccctccttcgctccttttttatattagtgattttaaaggggactcttcagggacttgtgtactggttatgggggtcccgaggcacctaggcttggggtggggaggtcccctgttccatatagaggaacccccaattattaaaggccccccatctggacca

SEQ ID NO: 707587 - DNA, 320 bp, Homo sapiens
  misc_feature (56)..(56): n is a, c, g, or t
  misc_feature (60)..(60): n is a, c, g, or t
  misc_feature (62)..(63): n is a, c, g, or t
  misc_feature (65)..(69): n is a, c, g, or t
  misc_feature (71)..(72): n is a, c, g, or t
  misc_feature (74)..(74): n is a, c, g, or t
  misc_feature (77)..(77): n is a, c, g, or t
  misc_feature (80)..(81): n is a, c, g, or t
  misc_feature (83)..(83): n is a, c, g, or t
  misc_feature (85)..(86): n is a, c, g, or t
  misc_feature (96)..(97): n is a, c, g, or t
  misc_feature (304)..(304): n is a, c, g, or t
  misc_feature (315)..(315): n is a, c, g, or t
tgacaatccaatcctgaaccacagaggcttgaagcgcgggtgacaatcgtgacaanccantnntnnnnnanngnggnttnntntnngtacgttgtnncgattgtcaccgttgtcacgattgtcaccggtgacaatcgtgacaatccaatcctgaaccacagaggcttgaagtagcagtaggttgtcacgattgtcaccacaatcgtgacaatccaatcctgaaccacagaggcttgaagtagcagtaggttgtcacgattgtcaccgttgtcacgattgtcaccggggatcctctaggggcgtnccaaaaagctnacgac

SEQ ID NO: 707588 - DNA, 119 bp, Homo sapiens
cgcggacgtcacgccatgtcacgactcttaatctttccaaacagaaagtgtgtacccattaaacagtaactccccatttcccagtcctttcagtctctgctaatcttttttttgttggg

SEQ ID NO: 707589 - DNA, 713 bp, Homo sapiens
cctggtgcacatttggggagtcacaagttggtgtcaacatgggccctctcttttgcctgggcctgcccagcacccaggcctccatgcctccatgcctccaggccaccaagcattgcccctttggcctttgaatttcaaatctaaggctagaaaggcatgcggagagccttcgggggcgctccaaacgccctctccccagcgcccctctttccggaccagacagccattgccccggggtgtgtttgctggaatggttttgacataccgtgaccacccacagcatggcccagagacttagcgtccctactgccgctctccgacatcctccagtggaggaggaacttcggtccctctggtgtcttgcccatccccctcccgtcccatgggcccggccctggacaccctcaggtgcctgtcccccagcccccaacaccccactcctatgcccccgtctgtcctctcccagaccaaatggaaccaacgctgcgcttctcgaagcgccccgcttgcgcgtgtaatggttcagcgtaatcccatggcgaaatgggggctcactccgccgaggaggactccggcagcagggccttcctgacccacagccagcttctgtccttcccccccggaaacacaagttcatttgtgtgatcatgtatagacctcagacggaagataggactgtaaataattgtaataaatacccgttgccactaatt

SEQ ID NO: 707590 - DNA, 263 bp, Homo sapiens
  misc_feature (247)..(247): n is a, c, g, or t
  misc_feature (258)..(258): n is a, c, g, or t
aggatccccaatcgtgacacccccagtagtttgtgatgggtggttgggtgggttgtcacgattgtcaccggtgacaatcgtgacaatccaatcctgaaccacagaggcttgaagtagcagtaggttgtcacgattgtcaccacaatcgtgacaatccaatcctgaaccacagaggcttgaagtagcagtaggttgtcacgattgtcaccgttgtcacgattgtcaccggggatcctctaggggcgtnccaaaaagctnacgac

SEQ ID NO: 707591 - DNA, 965 bp, Homo sapiens
ttgcgcgcgccccatatttaagagggggcgcgaagaaaatttgcgggccggggaggatattttcttgcgtggtgggggggaaagacaagatgtgtttcggtgtcggagaggaattatattgccgcgggacccacctcacctgcatgtgtggagcagtccagacggctatcacgacgggatggtggtcgtaacagtgactgggatgctccttcccgccgcgaggtgtaatcggcattgtggcccggttcaagccaactggagtggctgtcgttacttcgatgctagtgcgcgcgacgccaaaaatctgttcggccgtgtgcgcgtgcgcgcgcgaccactgtttgttgcgtgcgtagtgcggccgccaccctgccggttatttaagcaaaacgcacggattggctcctgcgggggaggtgttagaacgaattgcataagggccaatgtcattgtccgccgtgtgagtatcgtaccacaccaccacgtgccttcatctcattgggcagttgaccacgccgtgcaggtagtagggcgaccactcgccctctctggttatgttgtactagataaagccgtcctgccgcacgcgcgaggatataacaattgtgtttgtaggacgcctcgctctcgtcttgctcccactcgctcctcgtaaataaaagaaaggagggctctacgtaattcctttagttcaagacatattggagtgggccgcccctagcttcctcgggtattcaaggggtgtgtccggcactgatggcgttagtttctttcaacccgacaaaagactacaggctggggtgcgtctcgtcagaacaaagtcaacaattgttgcgtcgcatgttcatgtcgttggccccctcagttgagtaacaacacctccctctctggccctccgccctcatacagaaataaaccacagaccaaaaaacaaataaagaaaaacaaaacaaacaaccatatca

SEQ ID NO: 707592 - DNA, 300 bp, Homo sapiens
  misc_feature (56)..(56): n is a, c, g, or t
  misc_feature (60)..(60): n is a, c, g, or t
  misc_feature (62)..(63): n is a, c, g, or t
  misc_feature (65)..(69): n is a, c, g, or t
  misc_feature (71)..(72): n is a, c, g, or t
  misc_feature (74)..(74): n is a, c, g, or t
  misc_feature (77)..(77): n is a, c, g, or t
  misc_feature (80)..(81): n is a, c, g, or t
  misc_feature (83)..(83): n is a, c, g, or t
  misc_feature (85)..(86): n is a, c, g, or t
  misc_feature (96)..(97): n is a, c, g, or t
  misc_feature (284)..(284): n is a, c, g, or t
  misc_feature (295)..(295): n is a, c, g, or t
tgacaatccaatcctgaaccacagaggcttgaagcgcgggtgacaatcgtgacaanccantnntnnnnnanngnggnttnntntnngtacgttgtnncgattgtcaccgttgtcacgattgtcaccggtgacaatcgtgacaatccaatcctgaaccacagaggcttgaagtagcagtaggttgtcacgattgtcaccacgcgcctcgcgcaccgtcccggcaagcctctgtggttcaggattggagttgtcacgattgtcaccggggatcctctaggggcgtnccaaaaagctnacgac

SEQ ID NO: 707593 - DNA, 631 bp, Homo sapiens
  misc_feature (38)..(38): n is a, c, g, or t
  misc_feature (556)..(556): n is a, c, g, or t
gaccctagttttttcctaatgtcgaggggcaacctatnctttcaaccaactgatacacatgcttaaccctgatccaagcaatcgccaaccgaattaccttaaaccagaccgaatcattgcacaaccctatacgtaaaaaagttttttgggggaggcaattctctcaaacctaacacacaagacattcatcacgttaaggtataaccttttgaaaaagaatgcatgtacccctataagaaatattcatgtgccggctgatctagacgccaatctccgcaattcctataatcaactgattccctagaagaatggagggttctctaacataagtattcccctaactacgccattgcctttagcctttttactaaggcggtctctgcgcagaataaggcggcaaacagctttttattcgcaaaaggaattgtaaagcgtcaaaatataaaaaacgccttaccgaacttctgcttataaacttctttcaaggcctggaaaaagcaaaaaaatttcaacccctaaattgttcccctccgaaaatcctttaaaaaaagaacangtacaaagcctctaatcaacctttatttttggtatatacaatttctcttttagtcctcaccctcccaccaaagtg

SEQ ID NO: 707594 - DNA, 446 bp, Homo sapiens
  misc_feature (358)..(358): n is a, c, g, or t
  misc_feature (385)..(385): n is a, c, g, or t
  misc_feature (393)..(393): n is a, c, g, or t
  misc_feature (437)..(437): n is a, c, g, or t
  misc_feature (442)..(442): n is a, c, g, or t
aaatacccaccttgtttccccagaggaccagccaaaacctcgcctcgagtcacacatatgataattttcactccaattcagtattactccagccagttagcctacacaccgccacagcagcagcagcagcaaaccagaggctgccacccttgccaagcagtcatccagtgctaaaagacggcgatctccagccacccaattactacgaggtaatggagtttgatcccttagctcccactacagaagctgtttatgaagaaattgatggttaccaccagaaagaagctcaaagtcatagtgacttgctaagatacacaaagggccagctctctaaaaggaatactttgattcagcaganggcttgacagaccagacctggccacangggagagncccagttggaccattttctctgctggaagctttaacagaagagnttaancttg

SEQ ID NO: 707595 - DNA, 148 bp, Homo sapiens
taggtcattgtcccatgcatttgctagagatggaaatcgaaagatctctagagaaaacttcctcacagggtcggtcaagatcatcagaagtgtctgtctgtggagtgtatccttctgaaaggtggaaggtcccagttatcacgtccag

SEQ ID NO: 707596 - DNA, 913 bp, Homo sapiens
gacggtggctcacgcctgtaatcccagcactttgggaggccaaggcgggcggatcacgaggccaggagatcaagaccatcctggctaacacggtaaaaccccatctctactaaaaatacaaaaaattagccgggcgtggtggtgggcgcctgtagtcccagctacttgggaggctgaggcaggagaatggcataaacccaggaggccgagctgacaaagtgagctgagatccggccaacagagcgagactctgtctcaaaaaaaaaaaaaaaaaagttccaacccgttgggcttggtcccctgtgtgtatcccaactatggggaagcacttagggcagctaggattggtttgtatgccaaggatctactgcgggtcacccttattggagaacctctgttctctacaaacaattaacaaccttttccctcaagtgtgggtagcacaccctgtgagtcccttctaacttggggaaggctgaaggccaggaggaattgctctggaccccaggagtccagggctaccgggtggacaccagagaattcaggttggatgggcagagtcccagctgtgggttgaacagctgagaactggttgtgatcaaaacaactaaacagtaactcgtacaattagcaaccaaactattttgttgtggagcagcattctgcggccgcttgaagaaaaaagtgttttcttgaaacacaatcttgtttgtgggcgagcggggagcggcccaagtgttggttaagtgaaaactgtctgcgaacacggcgtgtccgacgagaagacaaccttggtggacgtaggaacacgtggtcttggggttctctctcccaattataaaaaagcggcggggggaaaccacaggggtttttggtaacatcctcgaagaggggagtacgacgaacgaccggg

SEQ ID NO: 707597 - DNA, 293 bp, Homo sapiens
tttttgggggggggagggggggcctccccccttttggggcccgggttttttgggattagccggtttattgtttaaccctttcccccttccccccccccttttttgggtgggtttcccggttttttaaagggggcccccccccccccttggggggggggggccctttttaactgaaaaactttccttttttttcttcccccctaaattggctttttttttccctttccccccccccctggggggtttttttcccttttttttttttggggttttttaaccctttggggttttta

SEQ ID NO: 707598 - DNA, 225 bp, Homo sapiens
ctgccacgaagtgggttcaactgagtgtgtacaaagttttggagtactagtgaagggatgaagaaggtcattccacacaagaacaacacaaattaagatttggatgcctggtcacagtcggccctacgccgtgttaatcccaagcacgttcgtggtgcagcggcgtaccgagactcgtaattcggtaatcataggtctatatgctatgttcctgctgtttaatat

SEQ ID NO: 707599 - DNA, 695 bp, Homo sapiens
  misc_feature (2)..(2): n is a, c, g, or t
  misc_feature (98)..(98): n is a, c, g, or t
  misc_feature (100)..(100): n is a, c, g, or t
  misc_feature (134)..(134): n is a, c, g, or t
  misc_feature (158)..(158): n is a, c, g, or t
  misc_feature (160)..(160): n is a, c, g, or t
  misc_feature (169)..(169): n is a, c, g, or t
  misc_feature (223)..(223): n is a, c, g, or t
  misc_feature (249)..(249): n is a, c, g, or t
  misc_feature (255)..(255): n is a, c, g, or t
  misc_feature (258)..(258): n is a, c, g, or t
  misc_feature (343)..(343): n is a, c, g, or t
  misc_feature (410)..(410): n is a, c, g, or t
  misc_feature (455)..(455): n is a, c, g, or t
  misc_feature (507)..(507): n is a, c, g, or t
  misc_feature (554)..(554): n is a, c, g, or t
  misc_feature (578)..(578): n is a, c, g, or t
  misc_feature (632)..(632): n is a, c, g, or t
  misc_feature (676)..(676): n is a, c, g, or t
  misc_feature (686)..(686): n is a, c, g, or t
anaggagaaaaaggtaggcagcaaacatttgttatattaaaacaaatgcagatagtaatattgaaatagtatataaaattgacattactttttgagananaggaagagacatcaaagacattttaagccgagcncctcatgagcttcctaaaccccgncnggggggggngacccctgcattctcgttctgtctaatattatcagtggggctgttttgacaganaagtctcagaagcagcgaattaagtncttacnaanttggcaatgtcccagtaagtaatataaataagtaaaaccacaggctttctcattttagagcattttaacctgctttttagaaggnctgagtaaacagaagctttatgcttgatttgaattttattttctcccaaagttatttttttcctccnataaatgttaacatgcttaactgagggtatggcatgtgagggggncagtgtgctaagacccatgtcgacttgggttggcattaccagaaatggagtnacaaatatactttccaaggctgttatcagaaatgcaaaactactcancttcggcaacaataacaaaaaggnaacaaaacaaaaaactgaagaacaaaagattatatataattagaacggtatggngtaatttaagcactggcaaatacttggctcttaaagaagggggngactcctgcnggatctgct

SEQ ID NO: 707600 - DNA, 177 bp, Homo sapiens
  misc_feature (131)..(131): n is a, c, g, or t
cactctcgtaatccaaagtgctgagattacaggcatgagccactgtccccagcctactatattgtcttatttactcatttgatgttaactgttgattctatatttgacaattgtaaagagtgttgcaaacnacattagaagtgcaaattttttttattctggattgccgaggtggag

SEQ ID NO: 707601 - DNA, 101 bp, Homo sapiens
taaagtcaagtgagttatatgactatatatatgcgggagggggtgatctaataagcactctttacgccgcacacgccactgtcaaggtgcagtcgcgggac

SEQ ID NO: 707602 - DNA, 350 bp, Homo sapiens
cacgaggcctgtctccggagctggaactggcggagagctgtgccgaggcgcaggacggggagctggacgggctgtggccgatcatcaccatcgtcatcatactcttcctgttaagcgtgtgcaacagtgccaccatcaccttcttcaaggtgaagtggatcttccccccggtggtggacctgaagcagaccatcatccccgactacatgaagatgatcggacagggggcctatggccaccctctgcggggtgtccagggccgcccataccccacacagcagccatggggcatagctcatccatcacccaagccatacctggccccgacctcaccgccctcaaacccatgg

SEQ ID NO: 707603 - DNA, 425 bp, Homo sapiens
acgttggtgaattgtatggtatgtaaattatagttcaataacatagttacaaaagataatcaaaagcatgaaagcactattgatgtggtttggatctgtgtcctcaccgagtctcatgttgaaatgtaagccccctggtgggaggcgatgggattatggggcagagtcctcacaaacggtttagcaccacccgctcagtgctgttctcctgatattgagtcctcatcacatctggttgcttcaaagtgtgtggtgcctcccctctgtctccctcctgctctggccatataagatgtgcctgcttctccttcgccttctaacatgattgtaagtttcctgaggcctccctagaagcaaaagctgctgtgcttcctgtaccatctacaggaccgtgagccaattaaacctcttttctttataaaaaa

SEQ ID NO: 707604 - DNA, 114 bp, Homo sapiens
acgtcacagcgctgcgccgacatgtgcccccgctgtcactgggatcacccttcctgtctggaggccagagtgaggaggaggcgtcatcaagctcaatgccattgggccagcggg

SEQ ID NO: 707605 - DNA, 1348 bp, Homo sapiens
ggtagaatttacgaggaggacacgagcctgtcttctgttacctcctaatgtggtaacaggactgatgccagaaatgtgcaccaggtcgcttgttcagatcttgcacagtggagaacgtctagtgccaaaggtttggagggggaggaggaggaaatcgagactttcgtggttaaaggttaacacctagatggtgctccctctattggctgtctcatttgataaatacatatttgagctgatgatctcgcgaatatagtatagcaggcgtgtagcagaaactgactagaagagtaggattggtagtgttcatgatggcgtatattgttggattcagtcttcagaaatcagaggacgtgagcctgtaggaaacgtaggtggctatttgaatgtcaacagttgggcgtgttaatagcgagggacgtactaggtgctcagtgcgactgacgtagttattgacaagaagtaaattcaggtgatgatgctgatggtctttgaggtgatgcaatttgcagggccccaactatctataggataaagatcttgtacagcatgtgttggggagtgattaatggtgacccctgatgtgtagaactgagccaatagatagctcatgctagcatgctggatctccagtatgtgaaaagttagaactagattctcacagcctcgaagtgacaaacttcctgtggatacagctctcgccaagcgataaattgcaacaactttgaaggataactgcgctgagattcatatgttccctgtgggggtcgggcaacatacctgaggttctggattaggggggtttggggtcataaggcgtcatgcaagtcacccccatagcaactgggtcgaaacaggcgtgtggagaaatatgcagggcggaggttccccagagacccagggaaacgccgaaaaagaagtccgggataaacccgcaggaaacgcgggcggtagaaaaacacaaggagagaaaagggcacgataaaagaacacaaaaaaaaggaaagacaaagacgggaagaagggggtagcgatcgagacagcaaccgcccaacgagagaccccccaaaccgcgggccacggggaggcaagaggagagaacaaaaaggagcacaaactgtcaagacagaaaggcagcccggggaacagagagagagccaaagaagagagaaccacaaccgaacagacaaagcaaataaaaaaagatagagcaaaaaggcgcggaagcgacagaggagaccaaaagaagagaggacgcaaacacaaagaggacgaaaacaaccagtgcaacgacaacaaaacaagacaggacaagaagtgcagaagaaggcccgagaagggaaaccac

SEQ ID NO: 707606 - DNA, 459 bp, Homo sapiens
aaaatgttctatttttaatttttgtggctacatagtagatggatatatttatggggtgtatgagatgttctgatataggtatgcaaagtgtaactatcttgtcatgctgaaaggggcatgcatcttctcagacatttatcctttgtcagtcaaacaatccatttatgctccatcaggtattttaaaatgtacaattaaattattttgactacagcaccctgttgcgttatcaaatactggatattaataatcacattatgcagcatggggtatctgtccctcaagcgtttattctttgtgattacaaacaatccaattatacttttttagttatttaaaaatgaactaagttattattgactatagacatcctgctgtgctatcaaatagtagatcgtattcattctttacaacttgctttgttacccccattaactattcccacttaccctgaagcac

SEQ ID NO: 707607 - DNA, 488 bp, Homo sapiens
  misc_feature (13)..(13): n is a, c, g, or t
  misc_feature (31)..(31): n is a, c, g, or t
  misc_feature (52)..(52): n is a, c, g, or t
  misc_feature (149)..(149): n is a, c, g, or t
  misc_feature (339)..(339): n is a, c, g, or t
  misc_feature (343)..(343): n is a, c, g, or t
  misc_feature (408)..(408): n is a, c, g, or t
tttttactgtcanaatcttgctagaaagacngcttggactacgtgaagccantagcacactggacagctgcaccttgagaccggggagatgctccgagatgtgcttcgcgaacaaggccacctgacccggggcactggggctaatttcntcggggttcaagtcccgcaacaacttgaggttcagccttggcagacgttggctccagacagcgtttggacccgccgcctccaccacccaaagttccgtgcgggatgagactgtccgcggaagcgagggtgtcgcttcgcccccgggcccgggtccgccccgctccgaggcctgctcggaagaaagacctngctncgcagttctcctcgcgctcccacacctggtccgcccagtcggaactcacccctacgccgccgccntgccgccgccgccgccgccggtcccggagccagagaagaaacagcaaccgcgcgcgccaaaagtatcgtcacttcctgta

SEQ ID NO: 707608 - DNA, 862 bp, Homo sapiens
  misc_feature (40)..(40): n is a, c, g, or t
  misc_feature (71)..(71): n is a, c, g, or t
  misc_feature (104)..(105): n is a, c, g, or t
  misc_feature (110)..(111): n is a, c, g, or t
  misc_feature (119)..(119): n is a, c, g, or t
  misc_feature (125)..(125): n is a, c, g, or t
  misc_feature (138)..(138): n is a, c, g, or t
  misc_feature (143)..(143): n is a, c, g, or t
  misc_feature (177)..(177): n is a, c, g, or t
  misc_feature (189)..(189): n is a, c, g, or t
  misc_feature (191)..(191): n is a, c, g, or t
  misc_feature (199)..(199): n is a, c, g, or t
  misc_feature (210)..(210): n is a, c, g, or t
  misc_feature (215)..(215): n is a, c, g, or t
  misc_feature (219)..(219): n is a, c, g, or t
  misc_feature (221)..(222): n is a, c, g, or t
  misc_feature (231)..(231): n is a, c, g, or t
  misc_feature (239)..(239): n is a, c, g, or t
  misc_feature (245)..(245): n is a, c, g, or t
  misc_feature (257)..(257): n is a, c, g, or t
  misc_feature (276)..(276): n is a, c, g, or t
  misc_feature (289)..(289): n is a, c, g, or t
  misc_feature (319)..(319): n is a, c, g, or t
  misc_feature (332)..(332): n is a, c, g, or t
  misc_feature (561)..(561): n is a, c, g, or t
  misc_feature (669)..(669): n is a, c, g, or t
  misc_feature (762)..(762): n is a, c, g, or t
  misc_feature (861)..(861): n is a, c, g, or t
ataggaaagtttgtaaaaagagggggtggtagggtgcggnattccgggatggtcctgagagggcatgcgcnctctccaccactgggttccctcggctaagaatnncccgnnccccagcnccgggntcgcgggcgcacnggggngggggcccgggtggggcgggggggtggcgagagnggcggcgccggncngcgcagcngagagggagcngggcncgcngnntcccggggncttccacnggagcnatccggacgggngggctcgggattgctcggnaccatcccgcagngttgagctgatattttttagtgtggggggngagattttgtggnggggatttaaggggtttttgttgtgactgctgggttgtatatatttattttctttcttggaactgggggtggggctcctcccactgagatgatggggcagtgcaaggggaatgggtgggagtatgggctgacggggatcggcgtggggatggtggttcttggggtgatgatgggcatgtggaacgtggtacccggcttcagcgcggccgagaagccaacagctcagggnagcaacaagaccgaggtgggtggcggcatcctcaagagcaagaccttctctgtggcctacgtgctggtcggggccggggtgatgctgctgctgctttctatctgcctnagtatcagggataagaggaagcagcggcagggcgaggacctggcccatgtccagcacccgacaggcgctgggcctcacgcccaggaggaaganagccaggaggaagaagaggaggatgaggaggctgcctcaaggtactatgttcccagctacgaggaagtgatgaacacaaactactcagaagcaaggggng

SEQ ID NO: 707609 - DNA, 343 bp, Homo sapiens
tcagctcggtaccgctctcgtgaactgatctttttcagaaacatcgcaaaaaatatataatcaatcaattgcttaaagttttcgtcaatatttttaaacattattttcaaatctttttttgttatttttttcattttttaggctctctttttaatagttcaggaaatctttctttgtttaactcattttaaaaaaaatccggcatttgatgttagcgggacaaaaattaatgttataaaagctattgttcaatagcatcaataatccatttaatattcggacaattttcaccatctttatatgtttcaataattattaaataagcaatcacatcatctgaata

SEQ ID NO: 707610 - DNA, 136 bp, Homo sapiens
acaattatactccgtaagcatcctatgaaaaaactcacttgtctcttgcccaaggtcatttccgagctagctagagcagtcatttatctggacaccaacttaggttattaaacaaaccagcatggctgcctggggg

SEQ ID NO: 707611 - DNA, 391 bp, Homo sapiens
  misc_feature (102)..(102): n is a, c, g, or t
  misc_feature (196)..(196): n is a, c, g, or t
cctcttccatattcttaatgtgtgtgacatgatgaatctctacttgacccttttctctttccatattttgtattcagtgaacaacaccatactacaactgcnctttaatcaattccgcacacacataataattcctacatcgttacccacaacatgaaacacacttccaagattgtctatccacaccatattccangctatctcagtaatcagcttaaactcagatatgttcctacactgcacattacatcatcttggttatgcgcttttccatgtagctcttactttctcatattcccatattttactagaaaggtggtactgtgctagatatggactctcctacttacctacagcatgcaataagccctgtgcttctaaattccaagta

SEQ ID NO: 707612 - DNA, 344 bp, Homo sapiens
tactccaagaggtgtatcaggagtaaaggtgatattctcatctcgcaccatctgtacactgtgcctctcttaagtggtaccgaaatctgaaaaacaggtgtgctgtataaactccaatcataagcactatacaggacatttaaaagaacaactaaggtttacgcagagcttgtattaggcccactggaacttcctaataacctaacacagtcagttacattagcacatgatgcctaagcagctattattaagcactcacagccgcgcaccacaccaggcaatggggggcggtctgtatcattagcaccattttacagttgggaaggcaatcagagtcagtcact

SEQ ID NO: 707613 - DNA, 194 bp, Homo sapiens
tgcagctgcagtttcactctgtggtaaaagctacagccccggcaaccaccggtgtcagtcaagagtccaaaagctgaagagcttggagtctgatatttgagggcaggaagcatccagcacaggagaaagatgaagtactggaagactcagccagtctagttcttccacgtttctctgcctgcttttatcctagc

SEQ ID NO: 707614 - DNA, 226 bp, Homo sapiens
aagcttaacgaggcagactagccgatcatcagataggtcaggatgccagatgacgtggtgcgtctcggatcctaggactcgacgcagtctagctagtctagggtctaggtatggctggtcgcgactgtctggctgtccagccagtgttccgatcagtagtggcttgctcggcgggcgctatctagcttcagtcagtatgtcagatctgatccggtgcgcgaggcag

SEQ ID NO: 707615 - DNA, 1106 bp, Homo sapiens
tgtagatctcggagttaatgtcgacacgaggaatctcctctatgtttaacctatgttgctcctccgcttcctttaccctgctgtcgacaagatacttcacatctgccttagaaccagagagggcttcctctagaagccaagggaaaggggtgctttaatagaggctagcttctgcttttctgccctggctgctgcccagtcgggatcagccccaacagccaaagcgcgccccaaagccaatccaccagagcccagcagcagtgaccttcctagagggccgctggaagcagctcctgcagagtcgcacttgagagccaagcataaaaacagacgtggcagggtgccaagatgcacctgtgccaagccaagggactgagagctatgcttgtaggccttcgctgccaattgggctggcctgtggatatcaccagggtgaacgctgcccgtatcaacaaaggagaattatgccctgactccagcggcctagaacccggagatctgttctcagcgaagaaccgcccggatgacaaatgattggaagtccacgcgaaggctcataacggagcaccatgcactcagactttgccctgaaaccatttcgaaaccgacttcaaccccaggttgggaaacaattcacaggtgaataacacaccaactgtttcgcacacagttgaagatagcatttgataagacggaggcattgggacactttcctagcaagcaagccgttcagaccggggattttcccaaaagcaacaaccgcctggtatgaccagacgggaacttccagcagggagtcaggaatctttcccctgaccctcacagacagaataaccaagatgaccatcatacatcgcgaaggggcatctaaaatagcacccaacccccatgaactgaccccggaggacatggagatgaaatggacggaatggaaatcccccaatccccaggtgtagaagccacaaacaacagcaccgtggaaaaaaaaaacaaaccccgtgagtccaggggccatcacaccgtcataacgtgaagccggtaacagaagaccaacaacaggacccgaccaaggcaagggagcacaaacaccaccgaacaaacgagaa

SEQ ID NO: 707616 - DNA, 282 bp, Homo sapiens
ttcggcacgaggcaaaggtagcataatcaactttgtttcctttaaaataggggaccctgttattgaattggcttccacggagggttcaagcttgtcttctttacttttttaacccacgtagaaatttgaccctcgccccgtagaaaggagggccggggcattgacaacaagcaaagacggaggaaggacccctattgggaggcttttaaattttatttaaattgcaaaacagtaccctcaacaaaaccccacaaggtccctaaaactacccaaaaccctggc

SEQ ID NO: 707617 - DNA, 760 bp, Homo sapiens
agcggctttccggacctggccgacgtcatgatggcgccatcatgggagtggacatccgacataactaggaccgaaaggtacggtgcaaggagcccaagatccaggatatctacctgaggctgttggatcaagcttatacaggttatctggtcagaagaaccatactccacattcaagccagggttgtgtagaagaggtagatctatgagtcgcacacaactcgtgggcgcactactgtgcctttcccggatgatccggaaagatgaagcttcctggccgggaaaacaagacggaccgatggattagtggggaccctataactgatgatgtgcgggttcacggaggtacccaatgctgaaggtatgtgctctgagcgtgaccagccgggctccgctagctcgatatgctcgagggctagggggcaatgactcctcgagctttcgatcagactggctgctggactcccactgaagggtctgtgggcacatgtcctgtcgtctccgggtcctcgctaaagcgcccgaagagagtgtaccgggccattatcgagcggaggcccccaggaagccccgcgacagccatcaccaaagccctacgtccgttccaagggccggaagttcgagcgtgccagaggtccgacgggaccagtccgagtgctacgaagagttaaccctggatcctacgtctcttattaccaaagatttttgctgactcaaaatctgacctctttccaatgtacatctcgtccatagccgagtag

SEQ ID NO: 707618 - DNA, 901 bp, Homo sapiens
gggagcactggagatctcgccgagctttaagttcacctcggtgtctgcagcagcctccgtttcctctcctaggcgacgagacccgagtggctagaagtatcaccatgtcatattctcaagatccgatgccagggagatcgttgtgactctcgcggagaatccgcgactgttcgaggttgatctcttcacctcagaaggtctcttcagatgctgcttgtgctccagatgtgtgcttcacactggtatctatgaaggccctagaagctccgggacactgataagactcgctatatggggaagggtgtctcacaaggcgtgtatgagcacatcaagtaaaactattagcagccatgacctggttacgtcacacgaaaactgaatcgtcatcagaaccaagagaagatggacgaaagctgactgatcgacgcactggactgtcaaccagagcacattacagtctaaagttatggctgcgaacgccattctggggcggtgtacccttgccgtactgacaaagctggtgccgtttgagaagggggtcccccatgtacccgacaagcatcgctgacttggcatgacaacgtctgaagttcatcctgccagtccctggctgtcacatgtcatcaatgggcggttctcatgctggcaacaacgctggccatgcacggagttcatgatcctaccagatcggatgcaggccaaacttcacgggaagccatgcgcataggagcagaggtataacatacaactggcagccatgtccatcaagggagaaaacacattggcaaaggatgcccaccaagaggcggagggtcgaacggcgcgctgcgcacccaagcactcttggagaataaacgacggctgcaaccatgtgaaaccgacactggcgcaacacgccacg

SEQ ID NO: 707619 - DNA, 100 bp, Homo sapiens
  misc_feature (14)..(14): n is a, c, g, or t
ccatactatgcttnatgataatgaagggaacgtctcttggtgactggtgtgcttctttgtttgggaggtggagaatgggagacccgccgctttggtggtg

SEQ ID NO: 707620 - DNA, 200 bp, Homo sapiens
aggcacggtgcaaagactactacgactgttgtggacagaagccactggctggtggctctcatccagaacgtcatgctcaagcgaatactcttatacatcgatcatgacaagtcagaggagtggaccacttagaaaggaaaccagggacttcaacccgttcgggagttttttcagattctgtttaacggcggttttgcaag

SEQ ID NO: 707621 - DNA, 1069 bp, Homo sapiens
gcctttctctcctcgactgtgaagcgggtccgggacctgtccagaggcagaccacaccggacctcgggggcgatgcggctgctgcccctgctgcagtgactgtccttctggtggccagcgttcctcggctcccctctgccgcgtgtggagctctcagcactccagccatcgtaggtctactgtgaactccagataacgcccatggttgtctatcagaggagacggccgtggttggatgctgggcctcaagcgagttacctagaaacatttgatctgccctccaacatacagaaacgtgcctcaaggtgtccgacatgacgaggcccccggatagacggtatatgcctctgtgtagcattgcgtgcgatcgtgtgcctaagagctagtgacgttctcatgctcaaggcgagatgaggcccccccgtgggcgcgttatcacagcgcattgggatgttgcgtccacgtagcccctttgcgtgcagtggttcagacattcctcatcatgcctacgatttgcagccgcatatcagcaccgcattactcacactcggacccttatgatgttccttaacctgcgaagaatgagctgaactagctaacatctctggttggcccactccatggagaaggttctggccaagatgcttgacgtgctccaagagctgatcctgtctatgctgcataggagaaggaagttctgaagtcacgccccagtaccatgtttggagagcccctggacgcagacgtggccacagtcacgggatgggcagacggggaggggggacactatcgcaaaggcacccctcatgttcgtcgttggcgttattataactggcgtggctttcgtggattccttatccgaaccttctggccgaaatttcttggtgaaagccaagaggcagagcgcatttcccccctccttcgtttcccaaaggatggccaagaaggtccgtcaccaaaggaatccccctggaaggcaaggctgggaactccctggttgcctggaacttgggggggatgcccaaattacaaaacgcacgcagagatgggagcatggatggggagaaac

SEQ ID NO: 707622 - DNA, 396 bp, Homo sapiens
gcttaggtggagtgaggatattgaggaaacctgtaagttaccctgtaatagagagcagacagccagagtctcacacaaataccttatccaggattctcatttgataaccaccctggtctgagcatcccatgtgccctgttgctctgctggtttaggaagcagcccccttgcagagatacccgtgattgacagaccacatctgctaccatgttggaagataatgagccgtgtttcacatttactttgatgcacagaacatcaggtgagatgtttttgaagcatccgtcatgattattggtaggtgggcttccagcccagggaggggggcagtatgttcaacacattgttcccaggcaggtagacccgcccgcgaatttagtagtagtaggcggcagc

SEQ ID NO: 707623 - DNA, 668 bp, Homo sapiens
  misc_feature (17)..(17): n is a, c, g, or t
  misc_feature (24)..(24): n is a, c, g, or t
  misc_feature (447)..(447): n is a, c, g, or t
  misc_feature (533)..(534): n is a, c, g, or t
  misc_feature (546)..(546): n is a, c, g, or t
  misc_feature (548)..(548): n is a, c, g, or t
  misc_feature (593)..(593): n is a, c, g, or t
  misc_feature (596)..(596): n is a, c, g, or t
  misc_feature (648)..(648): n is a, c, g, or t
  misc_feature (657)..(657): n is a, c, g, or t
gggcggaggcggggccngggaggnagcggaggaggcggaggcggcgcggcgttcgcccgcccgctcgctcgctcggtttccccgcccccgccgggcttaacgccgctgaaggtatccgggtgcgcgctgtcgcaacctgccctcatcctggcccgcgactgtaagaccggacccacatccagaccaatcttcctgtccgggctgctgcgacgcgggctccgcaggttgcaggcgggcggccggggcgcctgaaggttaccgagtgcatgagcgcctagcgcttcccgcgctgccccgcccgctggcccgccgacccgcccgccggctcgcccgccagcccctcggcgcccggcggcggcggcggcggtggcggcgacggtcgcaggaggtgccgtctgcctcccaggtgcgcgcttcgctcccggagccgcggaactcggcggccgncatggcgtccaacatggaccgggagatgatcctggcggattttcaggcatgtactggcattgaaaacattgacgaagctattacanntgcttgaacaanantaattgggacttagtggcagctatcaatggtgtaataccacaggnaanatggcattctacaaagtgaatatggaggtgagaccataccaggacctgcatntaatccagnaagtcatccag

SEQ ID NO: 707624 - DNA, 302 bp, Homo sapiens
ggggggcccccctggggggaaaaaaaaggccccccccccccctttttaaagcccccaaaaaacttcccgcccgttttttttttatgggcccgggaaaaaaaaaaaaaggccccccccttcccccaaaaaaatttggggttttcccccgggccaaccagggccaaatcctcccccccctaaaaaaaaggaagggccccccccaacccttggggggggttggggccccgggtttaaaaaaagggcaaccccggccccaaacccccagggctttttttttttccaaaaaaaagtttttttttgga

SEQ ID NO: 707625 - DNA, 615 bp, Homo sapiens
  misc_feature (17)..(17): n is a, c, g, or t
  misc_feature (24)..(24): n is a, c, g, or t
  misc_feature (394)..(394): n is a, c, g, or t
  misc_feature (480)..(481): n is a, c, g, or t
  misc_feature (493)..(493): n is a, c, g, or t
  misc_feature (495)..(495): n is a, c, g, or t
  misc_feature (540)..(540): n is a, c, g, or t
  misc_feature (543)..(543): n is a, c, g, or t
  misc_feature (595)..(595): n is a, c, g, or t
  misc_feature (604)..(604): n is a, c, g, or t
gggcggaggcggggccngggaggnagcggaggaggcggaggcggcgcggcgttcgcccgcccgctcgctcgctcggtttccccgcccccgccgggcttaacgccgctgaaggtatccgggtgcgcgctgtcgcaacctgccctcatcctggcccgcgactgtaagaccggacccacatccagaccaatcttcctgtccgggctgctgcgacgcgggctccgcaggttgcaggcgggcggccggggcgcctgaaggttaccgagtgcatgagcgcctagcgcttcccgcgctgccccgcccggcggcggcggcggtggcggcgacggtcgcaggaggtgccgtctgcctcccaggtgcgcgcttcgctcccggagccgcggaactcggcggccgncatggcgtccaacatggaccgggagatgatcctggcggattttcaggcatgtactggcattgaaaacattgacgaagctattacanntgcttgaacaanantaattgggacttagtggcagctatcaatggtgtaataccacaggnaanatggcattctacaaagtgaatatggaggtgagaccataccaggacctgcatntaatccagnaagtcatccag

SEQ ID NO: 707626 - DNA, 131 bp, Homo sapiens
cccgaaaaaattacaaacacaagtagtatcttacctctgaactgttccctgttcagatgaaaagatttgtgcctttaatgataaaagtgatctgcatagagtcaaaaattcaagccatggagtaaatggca

SEQ ID NO: 707627 - DNA, 122 bp, Homo sapiens
gcactacggggtatttggtatggcccaaaaaataaaatggtttgtgtgtgtatggggagtgaaaggggtgcaaatgctgtggtggagctggtgaagtgggaatgtggacagacgagtgtcat

SEQ ID NO: 707628 - DNA, 304 bp, Homo sapiens
tttttttccaaaaaaccggctttttttcccccagaatggattgggttttcccccttaaccaaagggggggggaatttttccccccgaatttgctttggggaatctttttggcggggaaaacccccccaagggtttgggggggggccccccaaaggtttgcccccccccccccccttgggggggagtttttttttttccccccccccccccctggtttgggggcccaaggctcccccgggggggccccctttttttttttggtttttttttgttccccccaaacccttttcattttttttggtta

SEQ ID NO: 707629 - DNA, 240 bp, Homo sapiens
ttgatgccccagtatgccaatgttacagtaccatatgcaggctaactgttttcttaaacgcctatcactagttatctttttatcgtaactcatcagacgatcccttgcgtacatgtactaagggtcttcctgtccgtgtctctagtagaattcttatataagatatatatcctcaggtaccgcagagggaaatgatgaagataattataaccatagcatcatatagcaacggactaatcc

SEQ ID NO: 707630 - DNA, 1133 bp, Homo sapiens
gaccaggagatgatgggaactagatggagtaaattagtgtcacgcaggaaggcaggaccgtgcagcattcaccaacctggattttggagtcagcgttcaaatctgagctctgctgtcttattgaggcggtgaccttggtttggataagttatgtaacctctctggccctctcacaaataaggataatcacggttggcatcaagattaacgctacaaataatgtgtgtcacatcgtcacaggaataaatcacatgatgaactgtccacggtactggcgtttacgtgcctggcacatacctaacgtgcttaataaactgagaggctatctgttagacccatcctgagccaagcctccctccatctctgcaagcagcagagcgaggcatcggctctgccctgtcatctctgacttctcctctctgctgcaagacgctcactgcgccatcaactacctgccgctctactctattcttgtctatctacatccctgcagtcacgcccacttgcacccacacgggctacaacagcactgccaacatctccgtactaaccccctacactcagccccaccacatacacgcccacctgcacaacccggaacagaaattagctttcaaaaaccacaccaagtccccctaaaagacaattaagagagagcccaaacctaccctaccagacgtaccatccccccaagcatagcctcggatcactatcacttaacgatcgaactctgctcctccagcacggcgctgcgcatcgagcaacacgatacaccataggcgcacgccaacgacccctgccacgagacccacggatatgcaccaaccgctcacccacatcttcccccccccaccaacctagcatgccctatgaaaaacaacacaccacctgcacacccacacacgcagaaccacagcgctccttcatatgatctccacaagctggcactcaaactgcaagaccaactgccaacacccacacccactcggcacctgcagaacacaacccaccgccactaacacaccacccaccatccaccacgcccacacaccaccaccagacaaccacacggcaccacccacgcaccagagcacatcaaacacggccaacccaccccccacacaatacaacac

SEQ ID NO: 707631 - DNA, 220 bp, Homo sapiens
agtagagggccacagcaagaattataaaaatcatggataaataagctagattttagaggcagtaggcagccagaaagaatggagaagctgcaatatttatggttaaagacatactatccccaaatctttctgaaaacctatggaacaaattcttcactccttggccccactcatagacaagtcctcacctctcaggctgaacaatgaatagaaaaaaaaa

SEQ ID NO: 707632 - DNA, 138 bp, Homo sapiens
actctagaggatcgcctactcaggaggccagctactcccccagctactcaggaggcagagggacagaatcacttgaatctggaggcagaggttacaatgagccgagatcgtgcactgcactccaggctcagcgacaaa

SEQ ID NO: 707633 - DNA, 126 bp, Homo sapiens
aaaaaggtacgctactgatgcgtacatgaggtatatggtccaaactaatagttttttctcccctaaaaatgagaaacgacagccaacgagaagaccacactattccctgtagagcctatgaaatca

SEQ ID NO: 707634 - DNA, 121 bp, Homo sapiens
  misc_feature (39)..(39): n is a, c, g, or t
actaagcgaaggcttgagaaagtctccttgtctgagcantgataaactatctagaaacatcccacaactatcagagtgacaatagctcatgctaactcaccgaggcaccccgagaaacaat

SEQ ID NO: 707635 - DNA, 251 bp, Homo sapiens
tggctcgtggtcccaagaagcatctgaagcggggtggcagctcccaaagcatttggatgcctggataaatttgacccggttgtgtttgctcctcggtccatccaccgggttccccacaaggttgagagagttgcttcccccttcactcactttccctgaggaccagacctttaaggagtgcccctgacagggagagtgagagataaagaagagtttgacatgcagcggttcattaaaaatcgatggcaagg

SEQ ID NO: 707636 - DNA, 956 bp, Homo sapiens
ccatcccgtcatcgcctctgacaccagtaaccaaaccgtatctcgccggagacaccgccttaaattttcctaaccacgccttcggaattcttaacgctggcccttccagtgattttattgggcacatgggccaacctcaactaaagggtaacgcccgcaccgcttttaccccacgagactcgaaataacatttagaagccactttcgtccttcccatcgctcgatggaacaggaaattcgaaccacgggtgtccttcatactaagaaacacaggagggattttgcggctagatttagcaaagtcaccatataagacaattcgagggtaacactgggcgaaaatataacatgagctataaaaaccctcttccgaagtccaagaaaaaaatatggtctcagaaaaaaacacccgggggtaaaaagagaccccccagcgcgcccttagaatgctgtgccctccttggggggctttattcaacccccctttaattctgaaatccataagatctcttttactcaagcctttctttctacgcccaagttatcccagatttatgggtggtaaggttggccattcaccatttccgagtatctatgtttgattacccatatataacaagcaacagacgttgtaataccggcccccagcacccaacgtggagcgcgtcactctagtatccactctccctttttagtttcagaacccagtgtgattatagatcactacctggccctgtacgttaatagttgagaatgagcactagctttcacaacagatacgcactgctgttacccccttgtggatccaatacatatgacgccagagagcacaagacctaacagagtggtgcgattggttgactccaaatcgataccactttatacgaccgcaccctgctgttttttttcttcgtattttttcgcacacattctactcaatttataacaccccacta

SEQ ID NO: 707637 - DNA, 326 bp, Homo sapiens
cgacagtcacgtctcacagtgcttactccaataccaagacagcattgtgtccaccaagtatataacatgtgtctgcgggcgcggtgaagcatggctctttagcatactacaggaagcaccattctttaggctgccatgccaccaaggaaacatttgagatcacagcactaggtctgggtgcctacccttatctcaaacaccagtagaattcacttcatgtcatgccggcactttcctgtttacctcagatcccaggaaaaggcccagctctctggttattttctcagcctcatccccaaacatatcgctctttacataattttttt

SEQ ID NO: 707638 - DNA, 529 bp, Homo sapiens
  misc_feature (2)..(2): n is a, c, g, or t
  misc_feature (12)..(12): n is a, c, g, or t
  misc_feature (27)..(27): n is a, c, g, or t
  misc_feature (38)..(38): n is a, c, g, or t
cnccctggctcnctctggtctccctgnccaagaaaccncctctgtcccaggaaccgtctggccggtctgggtttgtaatctcccttggggtcagcaaaggatgggactgcacatcaagaggcccaggcatctgggcatctggctgcagtgaggcaggcataggtgcaccctctgcagagaagctctcagcttcaatcctcttatcctcaatgtagccacggccccctcagaagcccatgggaatccctgcaaggtggctttgtctcatctgcggagttggctgatgcgatcggctcatgctggggccaaaaacatggcaagaaacgtcccactgtcaacctcccgggcaagcgtgtgcacctgcagctcagggccagcccaccacactgccttagtgacactgcagccgggggaccacaggccgccagcaggctgaggaacaatgccgtgtgacctttccttttgtaaaaaacaaaaactgcaatttttattcaaataaaaaaagggtaaaaataaaagttaataagga

SEQ ID NO: 707639 - DNA, 680 bp, Homo sapiens
cacggtggctcacgcctataatcccagcactttgggaggccgaggcgggtggattacctaaggtcaggagttcaagaccagcctggccagcatagtgaaaccccatctctactaaaaatacaaaaattagccaggcgcagtggcacacccctgtaatcccagctactcgggaggctgagggaggagaattgcttgagcccgggagacagaggttgcagtgagtcaagatcatgccactgcactccagcctggcaacagagcgagactgtcccccccccaaaaaaaaaaagagagagactgctttcaaagaggaccaagactacagtgaacattaaaacctggttggctggctgggcatgggtggctcacacctgtaatcccagcacttgtgggaggccgaggcggttggatcacctgaggtcagaagttcgagatcagcctgaccgacatagctggaaccctgtctttactaaaaatacaaaaattagctgggcatggtggcggcacctgtaatgccagctcctccagaggctgaggcaggagaattgcttgaacccagtaggtggaggttgcagtgagccacagttgcgccattggcactccagcctgggcaatgagtgaaactctgtctcaaataagcacaatttaaaggcaaaaacagaccctcagcacaaacaaca

SEQ ID NO: 707640 - DNA, 499 bp, Homo sapiens
tgtatgtacttcgcacgatatacctattaccaaagattgtgacaccttagttagtagcacttccaaagtaccccccgaaaagctgtttagaagaccgatttccatattgtctctacacaaagtgcatactagtatttcgcaataatcatcttcagatgtacgttttatttagtacatttcacagttttcaggtgattcaggccctcatgtacgattttcttgtcctttctttttccctgtttgtgaaatatgtgattccagttcaattcagagtgtatgattccgcttttcacgctgatcaagtaaatttatggtgtctcttttctgatcttcgacattaaaaactaaaaaggaaaaacacataatattctatagagtattaaatgagatactagccctaggcaggtcccattttcttatcaacttctagaaactgtcataaagaggactgcatctcccacagcaacactgtaattgggagttgtattcctcatcaagg

SEQ ID NO: 707641 - DNA, 640 bp, Homo sapiens
caggtgtgatggtatgcacctgtagtctcagctactcaggatgctgagtgcaggagaattaattggcctggacccatggaggtagaggttgcagatgagctgagatcgtgtcgcatgcacgttcaggcctgggccaataggagtgcagctccatcgtcaaaaaaaaaaacgccaaaatagacagaataaaaaggttgggaagacaaatatttgtgtcgtaaaagcaggggtttagtaacataagggtttaaaaagttaagccccgaaagacccagaaaacaatgtataaagttgtttatctccgacaatgattttgccgtgggtagcggtcttcattgtaaaatctttaaacgagaatgtaagcaatgaccaaggtgactaaaagattaccggccgtatttatggttcgccacaaccacaaacagaacgccccaaaaaagaaaggggtcgaacacacaataaggtggggggcggcaaaagagggacaaagtggggcaccggtgggggctgaatgccccgtaggtggtagcttggtgtacgagtgaaaggttttgcgctgggcaagaatgattttggttggcagttgagagcagagcaccacaggtgtggagttgagcccgcgagcacagaaaaggtgtga

SEQ ID NO: 707642 - DNA, 224 bp, Homo sapiens
gaggttccctgtcttgctctgactctccttggtgcccttcagggtgactttgtcgctctgtgtgccagacgcgtgcgacgctgaccatcaccccgcctgtactcttccgccaacctcccgcaagacctggcctctgcggatgaacgaaggtggcggtggtgcttggggtccaccagccatggagtcttccaccactattatccaggcttttggatcaaggacct

SEQ ID NO: 707643 - DNA, 845 bp, Homo sapiens
cctaattggaatttggtgaactccttcccacaccatacatttttctgggagggcctgtgatggctttcccgtgtactggtccacgttcccacctggcgactcctatgggatgcaggtcagcgtggaggaggtgctgaagaccgtgggcaacaaccgggacaaggggcggtccaaccacagtgccttcctctttggcttggggatgggggtggtggcccaccacagaccatgcctgagtaccgcctgaagcgcctgagcaactagcggatgggcatgcccagggtgcaagaccatactcttcgtccacagacagctcttctcagcatcctggagagtgactcagtagcagcatgtgcacgtgggttgtgggagctcttcttggatgctgcacagatggcatcatacaccatcacaatgcccagatcaagaaggggaaccgggtaatgtgagcggagtcctgctactgacagtgtgacgtctgctcagtatgcctggccctggtcggccgcagtgtcgccatgttcctatagcgcccgagtcgagcccagcatgcttagcagctcgtggaggctccttcttctgaaccagttcccactgatgtggtgactggaaggctgcatccgagcatggtggcagaggaagccatgtgcgcattatgaagacatccgtggcccagggcaatacacttgctacagcgcgagcgagccgaaacactgtgtgctgggggagccaggtcactgagggctcctcatcgtcagcagactgacctggaagcggatcaaagggactggccctggccaaacccggggggggcccccagctagggacgaagactgagggggaag

SEQ ID NO: 707644 - DNA, 678 bp, Homo sapiens
ggtcagtctctacgtgaccagtcaaggtgaagtactagtcgctgactgtggtaactatcgtatacaagtctttacccgcaaaggcttttctgaaggaaatccgccgtcggaccccagatggcattggatagactttgtagctgaagcttccttggggcagatctacccaacctcactcctctctcagatggcaatgaactgccaggggctgattggtgtgactgacagctatgataactccctcaaggtatatacctatggatggtccactgcaggtggcgctgtcacaggagccagtcgtgagtcaacaccatggggtatcacagtccttgccctagttctggccgagtttgtagtgaaccgatgtggaaggtggcaagctttggtgttccacagttgatcgaggatcaggggtggtcagatacagctgccgtatgtaggtgctgtgcgggaccgaaagtgtgtcatcctgtgatgctgagggcagcgtcatacttcacccagggacttaggcctcaatcgtggagaactcggacagaagtgagcagccgacctggagggtggtctttcgcccatgggctctgtatggcccgtgatgggcatgtctgggtcgccagatcagtcaatgtctgctcggagaatgaaggatttccgctgaaattgttggcatgtgtgtga

SEQ ID NO: 707645 - DNA, 117 bp, Homo sapiens
atatggatcacggcagatcaaaatatcaccaaagttaactccacagaaatggacatcaaatctgacctcgtgaggcccgacggggcgggggccacctctacaatgtgagcaggtcgg

SEQ ID NO: 707646 - DNA, 165 bp, Homo sapiens
taaagtattaatgcattaaccaaagtagtcactgtacaaggtataattagggggtttccagttggtataacacttggatagttggtagcatttttatgtatattgatcttgtttacagttaatattgtaatgtatcactaaccgagtataattcacgaaaagtaa

SEQ ID NO: 707647 - DNA, 132 bp, Homo sapiens
taacgtgtatatcttccataccaccttttctgcgggacgttcaatagcccatttcaaatacttaggccgttagttaatttcactatgggtcaaatatccaacgactgtgaatgtagagttttaaaaaaaaga

SEQ ID NO: 707648 - DNA, 1459 bp, Homo sapiens
tgccctcgctgccccaccgagtgttgtgcgcgcccctggtccgctgtgttgtcttgttctctttcggggcgggtgttttaatacccgctgggcgtcgtgactaatttttttgtggtccccaccataattattctctcgtgtgtgtggttacgtgttgtctcgcttgtcgtcgtgttctcccccgttgggggagaacccctaatggtgtttccccccacttcttggggggccccccccccaggtgttttctcttcctgggcggccccccgtgcgccacattgtgtgccccaagctgaaaaagacgcgtcttcctgctgtcttataaatatttgtcccccatggaacccctgggtgtctctccccagagttcccccctgtttgtggacccccactccccacggttgctcttggatcaccacacccacccggggtaatgaatgaaattggggcttatatcctcgttcccctgtaatgcccccccaaagtttagtagacaaaacttggggatatgagcaaagggtttatctttggggggttatagaaactgtgctctcccatattattagaacgggaaaagggggtacttggggaatcttttcccacgctgcttacaggagtttctttgggaaagaaggggcagaaattcccccggccttatttacaaacgtccacgctaccaactctttcttacagggtacatgtgccccctgtttccccccactttctgcaacggcgtttcaacacggggagaaggtctgttcaccccaccttattttatatcttccaccacctgtgtacacatatctgccccctatcccccaagcctctctacactctctcggaaagcagatatttctctgtgccccccacctctcctctgtgctcacaccatgtgggaaatactctcttccccctcttgtccccactctctttacccctctcgctctctcacagtctcagcgtccccttgtctcccccttgattctatcgagcgaataaggggagttcaaaggcgggtgttgtgcgaaggtgcgcgcgaataaagagagaccccacgcgcctgtgtgtcctcccctatagagcgcctctccacggagatacaccttctttccttaatattccccacccctcttttcttaacttcccccacataaaagcaattgacacacccccctcgaacttctcggaagttggtgtgatatctcgccaccactccaccttgtttgagagtccacgtgtcccccagaggacgaggggaaccctccctccactacttttttgcacacactgctcactttcttcctctttgcctgttgcttcccccctcacacaccacacttggttttgttttatcctaccactttgacgagtctttctatgtttatgttgaacttgctgctttttttcatattgaaaagatgacatcgcccccagagccccaaaatgaatgggaattgta

SEQ ID NO: 707649 - DNA, 614 bp, Homo sapiens
tccactaaaatcttaaaacttactcagctggttgcaaataaagggagtttcatatcaccaattggtagcaaaatggaatttttccataaactaaaatgttagacacatttgggtcttaatccatgtacacttttttattctctgtattttcccacttcacgtgtaaaaatagtatgtgctcacataagtgttcttatgggcatagtctagtggagaagtgcagaaacttcagaaacagtgtgtatgtattattgggactaggtggatccaggtttttggcagtgtatatatcttccggtagtggactaaagttatttacaaaacaggtgactttggattccaatgtgtgtgagcgtgtagtttagaattacctcaattttataatttttcttaaaatttttgcttataattctgtctaattattctcctttgtggggtttggggggggaggcggacgaaacaaacaacaacacaacaacacacacaacaacaacaacaaacaaagacagggggggggggcgccgccccaatagaatttttcccccagcgggaggcgcccaacagttcttcgccgttccccccgctttttgtgtggtcacaaagggggtgcccca

SEQ ID NO: 707650 - DNA, 729 bp, Homo sapiens
  misc_feature (162)..(162): n is a, c, g, or t
taaggtgacacggtatccaggtcctttctttttgcccccaaaagccctagcttgagaagataaaatggccaaggttgttgggaaaaaaaaagtgccgagcttctctagagaaaaatgtgaaggagatgctccgggccattgagaagatttagccaagaaatncccagatgtgccagacttttgagaagcacctgcaagcacaagctctttttttgagctatagtccatccctcatgaaaaatgcttgaccactgctggcaagcaggagggatgattccaactaatttcccaaaccccagtctcattggtaccagctttggggaaccacctcacttgagcccaaattggttttaagtgcattacaaagtttctggcatcactcccactcttgattaacaaagaataagagaacattttatcatcatctgctttattcacataaatgaagttgtgatgaataaatctgcttttatgcagacacaaggaattaagtggcttcgtcattgtccttctacctcaaagataatttattccaaaagctaagataaatggaagactcttgaacttgtgaactgatgtgaaatgcagaatctcttttgagtctttgctgtttggaagattgaaaaatattgttcagcatgggtgaccaccagaaagtaatcttaagccatctagatgtcacaattgaaacaaactggggagttggttgctattgtaaaataaaatata

SEQ ID NO: 707651 - DNA, 142 bp, Homo sapiens
  misc_feature (42)..(42): n is a, c, g, or t
  misc_feature (76)..(76): n is a, c, g, or t
  misc_feature (82)..(82): n is a, c, g, or t
  misc_feature (86)..(86): n is a, c, g, or t
  misc_feature (88)..(88): n is a, c, g, or t
  misc_feature (113)..(113): n is a, c, g, or t
  misc_feature (121)..(121): n is a, c, g, or t
tgggcgaagggggcgcgcgccatggcgaaggcgaagaaggtnggggcgcgaaggaagagactccggggagaagganggagcncgangnggaacggagaaggcaaaatcaaatncgttcgangtgaaagtaaaaaggaagaag

SEQ ID NO: 707652 - DNA, 138 bp, Homo sapiens
ccttaacatcccattaaaacctcatcacccttaccccgatcactgccaatatcccatctcacagcacgctttacacggcttaccgcctgttatcacttgcctgttacagcatggcctatttaacgcctcataaactct

SEQ ID NO: 707653 - DNA, 394 bp, Homo sapiens
agcactgaacctgcatagcctaagcaagactacgcaacgagaacaaatctggaggcatcacactacctgatttcaaactatactataaggccatagtcagcaaaacagcacggtactggtataaaaataggcacacagaccaatggaacagaatagagaacccagaaataaacccaaatacttacagccaatggatcttcgacaaagcaaacaaaaacataaagtggggaaaggataccctttttaacaatagcactgggataattggctggccgtatgtaggacaatgaaactggatcctatacaagatagattaaggacttaacgacctgaagctataaaaaattctagaaggtatcattggaaaaacccttctagacattggcttaggcga

SEQ ID NO: 707654 - DNA, 373 bp, Homo sapiens
gcggcccctactactactaaattcgcccccgcctcgactagagatgcacgagtaattggagaagctgcagatcttgtgacctctggaatgatggctggcaccttaccagaattcagactcctcacctcctcctagcctggtagggtctctcattagcttaagaaagcttagctccatcctggctaacagggtgaaaccccatctccactaaaaaatacaaaaaaattagccgggcgtggtgatgggcgcctgtggtcccagctacttgggaggctgaggcaggagaatggcgtgaacctgggaggcggacttgcagtgagccgagatctcgccactgccctccagactgagcgacagagtgagactctgtctc

SEQ ID NO: 707655 - DNA, 956 bp, Homo sapiens
ggaggaggaggcccggcgggcagtcctgcgagcttctgctgctgagagccgggattgctatcgactgggactgaagtactcatgacgatgccctgctgtacatgaccatcagccagcaagagtttgtgccgtcactggcgcttcctgacctgaagcaggtatggactgagcgaagagccagaattggcttttatgtccattgcagaatgctccctgacagtggcagcagtagtttggcacaggacggcagatcagacagacgtcgatgccaggctcagctatggacacatccgagccagaccatcggcaggatggagtgattacgagcgtgagtgcaggacccccgagcttctcttcaggacgtgtcgctagatgagacctccccacggtgttggtatccgccaacctaattagaaagccagttcgagatatgcgtagtgagggctcccctggccctccccaggtccaaccgagatggatcggggtcacgcatagggagcccacgtacacggaggggacaaggacggacgggaaccgttcgcatcacctttggacgggttaacacgggcgttagctagtacatcctggctataagggaggcaccgtgcccttggggagaagccaccgcgagatactacggggtcacgaactgctggtgcttaactcttggtaaaccccatttcactgcccgtaaatactacacatgccttcggggccaccgccgttcttctaagtacgggacgaacattcatgcccattattaaccacgcagcgaacgtgagaagggatcgaggacgcagacccagacggtggcgtcgggcgagcccgatgtccggacaaaaagtaggtctggcgccgagaggaagaagtggctcccacacgatagcttggttcccgctctttcccccacgaatcgccttgtggtgtggcaaccacagtgcgtgtgaccaatacag

SEQ ID NO: 707656 - DNA, 134 bp, Homo sapiens
acatgcacggacattccgtcatccaacagttgatcctaagtgagcacgcccacgggccgtggtcatggcctgtggcaccggaccagctgtagcccactctccttgcatggcgctctgtgatccccaaggaaggg

SEQ ID NO: 707657 - DNA, 184 bp, Homo sapiens
  misc_feature (155)..(155): n is a, c, g, or t
ctgaacgtggagagcacgagttagttgtagtccggcttgcggtggggcttgactttcctgttggtttgagcccctttttgttttgcctctgggtgttttctttggcccgcaggagggtgggtggagcaggtggacttggagtttctcttgagggnaataaaagttgtcatggtgaaaaaaaaaa

SEQ ID NO: 707658 - DNA, 250 bp, Homo sapiens
ctatgacttgcctaacatattatacgaatgtatatataaatttacctgtccttggatacctttcatagtcccaagtttcctttctctctcctgatctagcgttgctactactgacaataataactattgagacatggtgtattgcagacctgatgaggatcaattgtacactaaatgtcgtgagtggaccactatactagagatcatcatacttggggacagggctatgtcttataagagcctggcctgt

SEQ ID NO: 707659 - DNA, 340 bp, Homo sapiens
  misc_feature (101)..(101): n is a, c, g, or t
ctccatcacaaaaaaaaaaaaaggaaggaaaagaaaaaaaattgtatttctagtagagacggggattcaccatgttggccaggctgatcttgaattccttncctcaggtgatccacctgctttggcctcccaggatgctgggattataggcatgagccagctcacctggtctccatacccttaccaatagtgggtgttaccttatttaagtcttgacccatctgatgagtgtgtcattgtttcaaattgtatttctttggatactaatgaagtgttaaacattttttccaaattatatggtcttttataaatcttttattacgaatccagaaaaaaaaaa

SEQ ID NO: 707660 - DNA, 257 bp, Homo sapiens
gagatcgcgccattgcactccagcctggatgacagaacaagactttgtctcaaaaaaaaaaaatttatctcaaattttcaaaaccgggtttggtagtacatttaattggcttatcccaaagcagtggggttggcctgcgtggcagttaaatattaagctatacttccctttcaaataaggtatttccatcgttaagcctgtaaattctagttggtcattgttaagatttttatagtcattttaatatatctgtttag

SEQ ID NO: 707661 - DNA, 989 bp, Homo sapiens
  misc_feature (13)..(13): n is a, c, g, or t
  misc_feature (16)..(16): n is a, c, g, or t
  misc_feature (25)..(25): n is a, c, g, or t
caggctggtacgnccncggggtatngatatcgtcgacccacgcgctccgctgagttcttggtgtcgactcagattaacatatggtgctgacgctggccagtgtggattttcagcatgcctctgaagatgcaaggaagaccataaaccagtgggtcaaaggacagacagaaggaaaaattccggaactgttggcttcgggcatggttgataacatgaccaaacttgtgctagtaaatgccatctatcttcaagggaaactggaaggcatacaattcatgaaagaagccacgacgaatgcaccattcagcattgcaactaacgaccagacagcaaaaacctgtgaacacatgatgtactcacgaagaacaaacatttgcactatggctacatcgacggaccttaacgtgccgctgctgctggaactgccttaccaacggcgaggagctcagcatggtcatcctgctgccggactgacattgaggacggagtccacgggcctgaaagaaacattgacggaacagttgacctttggaacagttgcactgagtggactaaacctgagactctcgatcctcattcgaacctaaatgtcagccttgcccaggttccacactgcccccacacgtcttcacctctccacctccgaccctcgaccgcctacggtgtgcccacgatcccttcaacagacgccacgcctgcatctcgccgccaatctaaggaagccacgacgacatatcgtcactatcgaccacacgcaccacaaagcgcaccagcgcgaacgcgcccacacaacgaccacaaccccgccacttcgcctcacacgctcggcatccagaacacctgacatgcctcgtcgcaagcccgacctgcacaagaccgcgaccgcgccgaatgacgtcgcactcatctcaataccggcagacaaatcgtcaaggtaccactccaatgctagagaggaaatcgaacaccctcagagagcgagatgcgcc

SEQ ID NO: 707662 - DNA, 430 bp, Homo sapiens
tgtgttggcacacgcctgtagtcccagctactcaggaggctgaggcacgataattgcttgaacctgggaggcagaagttgcagtgagctgagactgtgccactgcactccagcctgggcgacagagtgagactccctctccaaaaaaaaaaaaaaaagaaaaaaagggaactccaaactaattgggtggtataaaaatgttaaatggggttgcgcatgatagctcatgcttgtaatcccagcactgtgggaggcttaggcaggaggaggatagcctgagtccaggagttctggaccagcctgtacaatacagtgagatcccatctctacaaaaaattaaaatttaaaaattagctgggtgtggtggcttgtgtacctgtagtcctagctactcaggaggctaaagcagaaggattgcttgagcctaggag

SEQ ID NO: 707663 - DNA, 269 bp, Homo sapiens
agtgtgccccaccaggtgccctggatggagaaggcccagctcactcagcctgccagaaccacaagccttgcagcgcgatgtcccctgtgataatgtcagcagctgcccctcctccgatacctgctgccaactcacgtctggggcgtggggactgctgtccaatcccagaggctgtctgctgctcggaccacctttcactgctgcccccagtggctacacgtagtctagctagcgagggcaactgtcaagcgctagcagcgcgctcgtgg

SEQ ID NO: 707664 - DNA, 181 bp, Homo sapiens
ctagaggatccccagcgccggatcccccctaagacacatatgacccaccaccccatctctgaccatgaggccaccctgtaggtcctgggtctggtcctccctcatcccgctgccaggtcagtgtgatctccgcagggtagaaccccaaggcccagcacctcagggtggcctcatggtcagt

SEQ ID NO: 707665 - DNA, 83 bp, Homo sapiens
tcaagcttctaacgatgtacggggacatggaatttaaaagctaagtaagtataaaaaataaaatgttatatacaaaaaaaaaa

SEQ ID NO: 707666 - DNA, 3263 bp, Homo sapiens
agagagttgggagatgtaggtgtgtggataggatgggagaatggtaggtgtagtgtaggtggagctggtgatatgggtaggtgtatgtgagtcgatggtaagactggtggtggtggtagagaggaggtgtttatatgggagtgtaagggggaataaggttttgagagagatgaaagggatgggtagtgtggttggtgagttattaaggattgttgggggatgggttatagtgttttataattgttgataattgtagttttgatttgtggagggtgtagatttggtgtagggagatttgtggcatgttagttgtgtcattaatagatgttagggtgcggtgtcccggaggtcccagggtgttgcgtggtttccgcgtttctcgacgcgtgtgttgggtggcgtgtgccgtgtcctttgcgtgtgggatttcgcgtttcgtttttgagtgggggtcgcccgctggggtgcgaggtgatagtgtcgtgggtgagggtgtaaagctgtggtgggcgcgcgttggtgggagatatggtgtggaggggtgccggcctgtttttgttgttttgtttttttttttttaaaacaaatatttttaattaaattttcaaacatgaaagtataaacgttaatatttgttgaaaaatatatacggcatttcccccgtgtgaacacaatggcttccggtaacactacccacttacaatgagatcttttaggcacttgggtgtagaatgtgcgagagggaaatgcaactttactttcctgctacctataggggcaaccacaattagatctcatgaaatattgttttcaacactgttagcattaacaccgacttaaaacatacggtgaccggacatataacctttaaagtcccagtatatttaaaacaggagaaatctggtaagttgttaggattctaaattccttttagtctgttcactgagatattaaatttcagtagacagaacccaaaaagagatttcatttctttctaatcactttggcttctttcttttttgttaagtaggtaaaaaccttcttggtgggcacctaagcaggatgcagccaatagttcatgaaccagctgcgcacgtgaggcttaaaatctaagatgctgctgaagtggctgcgggaggagcggctgcgacttacttttaatttcaaatcagctgcagatgtttgggagccctctcgatgaacagaacaaatcacataacatgcagaatccactcagaggctgttattccagggaaagagcgggcaggtgtcctgaggagtacattcttgctgtcacagtctcactgctggcacagaggtgccttgtttatgagatttaaaggccacaaactctggctcaggtggggacaagggtgtgccgtggctgaaaccagcgtggtcactgtgtggctggcacggcctgcacatgctgcaggagctgctcgcagtaggtggccgagcggtgcttgtggatgacggcctccgtctccctcaccaggagatctgggaacagcccgctgccctctttgaggacctctaaaattgcatcctggatggccctctctggatcgtcaaggtgaaccagcaactctcggtacaggtactggacactgctctgatagtaggattttgcgttggcacccttgacacactgcagccaggtgaccaaggtggaggcggctgccatcctcacatcgttggacacgtcatctaggcgttttaagagttcaggataaatcttgatgagtttctctggatccgtcatgccgcccgaggtttttaagaacgtgttgataatacggcatgagatcagtcgcgtcatcttcgaatcctcctccagggtggtcaggacctggggcatcagtgtttcctgcacgtcccgtatctgctctgccgacaggacctcgctgctggtgagcgcccagaggcaggacacggcagccgtgcggatggccgcggctgtcctccccgcatgccactgcagattgggggccaggatgtcctttgtcaccgtctcgaggtagctgggaaactgcccctgggagttgatggtgtccgtggctctgagcagcacggtggacaggatggagaacagcttcaggcgcatctgcgggtcttgggagggctgcagacaggccctcagcgtgggcacgacgtgtggcagggcttctcccagggcagggcctgactgtgcgacgatgacactgaactgcaggagctccggcgagtgtgcggtccagtcaaggtgcgacgcggtcacccgctccaggaggggaccaatgtgcttgcggtagaggtcctggcagctgctgacaccctccaccatggccagtgagtccatcgtctcctgtgccttgtccctcaggccggtagcacctgcgagggccactattgtcagcagcacgtccaagagctgcaggctggccacgccacagtcctcatgacacacagacaccagagcctgcacacacagcagcaggcgctccaggtagaggtcgttttcagatgcctggcagatgtgggcctgtgccagctctgtggcgatggctgccaggtgcggctggagggcttctcgggggcaaccccgcatggcggaggccagcaccaggaggccggaggcagagggcgtcttcttcagcgtcgataagatcagcttcagaaacacctcagggctgacaaacgtcccgacgagctctgcggatctggtacaactttggaccacggctgcctcctcgtcggtgcaggcctggaacagggtccggaggacgacctccaggtgctgcgtggcgtggtcctcggcatgcagcagcagcactgggagcagctgtgccgacttcactcgggtccccaccacccagtcggtgatgtcgtggcacagggcagggaggatcttggagaggttcctgaagacgagctcccggcagcccagcacagggcggcgctcatgtggagggtaatggggtggggtgggaggggcaaagtccagcttgtccttcaggtcctcctcattctccttctgccactgcaggccaacgtcctcccagaggctggcagccagctgcctgacctcaggcacctcgtcgttgaggctactgagcagcagagggatgagcttgtggaagaaggagtaacggtcacgcagacacagcagccagccgcccaccacggaggccaccgcccgccggacctgcgggacgtcatcaaacagtcgctgagcaaaatgggaaagcacggtcgacgcggccgcgaatttagtagtagta

SEQ ID NO: 707667 - DNA, 195 bp, Homo sapiens
aggaagtggttggcagggggccttgttcctttaactgggttaacattggccatgaggaattcaaaatttaatcctttccttaccttttagggaattaggacctttttggcaagttggttggattgaaactaaggccttaattggttaatagttccggttaaaccatggattaaaacctcagggggcacctacctt

SEQ ID NO: 707668 - DNA, 3311 bp, Homo sapiens
  misc_feature (3222)..(3222): n is a, c, g, or t
agagagttgggagatgtaggtgtgtggataggatgggagaatggtaggtgtagtgtaggtggagctggtgatatgggtaggtgtatgtgagtcgatggtaagactggtggtggtggtagagaggaggtgtttatatgggagtgtaagggggaataaggttttgagagagatgaaagggatgggtagtgtggttggtgagttattaaggattgttgggggatgggttatagtgttttataattgttgataattgtagttttgatttgtggagggtgtagatttggtgtagggagatttgtggcatgttagttgtgtcattaatagatgttagggtgcggtgtcccggaggtcccagggtgttgcgtggtttccgcgtttctcgacgcgtgtgttgggtggcgtgtgccgtgtcctttgcgtgtgggatttcgcgtttcgtttttgagtgggggtcgcccgctggggtgcgaggtgatagtgtcgtgggtgagggtgtaaagctgtggtgggcgcgcgttggtgggagatatggtgtggaggggtgccggcctgtttttgttgttttgtttttttttttttaaaacaaatatttttaattaaattttcaaacatgaaagtataaacgttaatatttgttgaaaaatatatacggcatttcccccgtgtgaacacaatggcttccggtaacactacccacttacaatgagatcttttaggcacttgggtgtagaatgtgcgagagggaaatgcaactttactttcctgctacctataggggcaaccacaattagatctcatgaaatattgttttcaacactgttagcattaacaccgacttaaaacatacggtgaccggacatataacctttaaagtcccagtatatttaaaacaggagaaatctggtaagttgttaggattctaaattccttttagtctgttcactgagatattaaatttcagtagacagaacccaaaaagagatttcatttctttctaatcactttggcttctttcttttttgttaagtaggtaaaaaccttcttggtgggcacctaagcaggatgcagccaatagttcatgaaccagctgcgcacgtgaggcttaaaatctaagatgctgctgaagtggctgcgggaggagcggctgcgacttacttttaatttcaaatcagctgcagatgtttgggagccctctcgatgaacagaacaaatcacataacatgcagaatccactcagaggctgttattccagggaaagagcgggcaggtgtcctgaggagtacattcttgctgtcacagtctcactgctggcacagaggtgccttgtttatgagatttaaaggccacaaactctggctcaggtggggacaagggtgtgccgtggctgaaaccagcgtggtcactgtgtggctggcacggcctgcacatgctgcaggagctgctcgcagtaggtggccgagcggtgcttgtggatgacggcctccgtctccctcaccaggagatctgggaacagcccgctgccctctttgaggacctctaaaattgcatcctggatggccctctctggatcgtcaaggtgaaccagcaactctcggtacaggtactggacactgctctgatagtaggattttgcgttggcacccttgacacactgcagccaggtgaccaaggtggaggcggctgccatcctcacatcgttggacacgtcatctaggcgttttaagagttcaggataaatcttgatgagtttctctggatccgtcatgccgcccgaggtttttaagaacgtgttgataatacggcatgagatcagtcgcgtcatcttcgaatcctcctccagggtggtcaggacctggggcatcagtgtttcctgcacgtcccgtatctgctctgccgacaggacctcgctgctggtgagcgcccagaggcaggacacggcagccgtgcggatggccgcggctgtcctccccgcatgccactgcagattgggggccaggatgtcctttgtcaccgtctcgaggtagctgggaaactgcccctgggagttgatggtgtccgtggctctgagcagcacggtggacaggatggagaacagcttcaggcgcatctgcgggtcttgggagggctgcagacaggccctcagcgtgggcacgacgtgtggcagggcttctcccagggcagggcctgactgtgcgacgatgacactgaactgcaggagctccggcgagtgtgcggtccagtcaaggtgcgacgcggtcacccgctccaggaggggaccaatgtgcttgcggtagaggtcctggcagctgctgacaccctccaccatggccagtgagtccatcgtctcctgtgccttgtccctcaggccggtagcacctgcgagggccactattgtcagcagcacgtccaagagctgcaggctggccacgccacagtcctcatgacacacagacaccagagcctgcacacacagcagcaggcgctccaggtagaggtcgttttcagatgcctggcagatgtgggcctgtgccagctctgtggcgatggctgccaggtgcggctggagggcttctcgggggcaaccccgcatggcggaggccagcaccaggaggccggaggcagagggcgtcttcttcagcgtcgataagatcagcttcagaaacacctcagggctgacaaacgtcccgacgagctctgcggatctggtacaactttggaccacggctgcctcctcgtcggtgcaggcctggaacagggtccggaggacgacctccaggtgctgcgtggcgtggtcctcggcatgcagcagcagcactgggagcagctgtgccgacttcactcgggtccccaccacccagtcggtgatgtcgtggcacagggcagggaggatcttggagaggttcctgaagacgagctcccggcagcccagcacagggcggcgctcatgtggagggtaatggggtggggtgggaggggcaaagtccagcttgtccttcaggtcctcctcattctccttctgccactgcaggccaacgtcctcccagaggctggcagccagctgcctgacctcaggcacctcgtcgttgaggctactgagcagcagagggatgagcttgtggaagaaggagtaacggtcacgcagacacagcagccagccgcccaccacggaggccaccgcccgccggacctgcgcatgagaggaagggataaggattcgtgtangcaaaggggatgccggggctgacgccacggtgcggctctgagtgctgccatacggacgctgcctgaggcagaggcacgggcaggtcctg

SEQ ID NO: 707669 - DNA, 2998 bp, Homo sapiens
agagagttgggagatgtaggtgtgtggataggatgggagaatggtaggtgtagtgtaggtggagctggtgatatgggtaggtgtatgtgagtcgatggtaagactggtggtggtggtagagaggaggtgtttatatgggagtgtaagggggaataaggttttgagagagatgaaagggatgggtagtgtggttggtgagttattaaggattgttgggggatgggttatagtgttttataattgttgataattgtagttttgatttgtggagggtgtagatttggtgtagggagatttgtggcatgttagttgtgtcattaatagatgttagggtgcggtgtcccggaggtcccagggtgttgcgtggtttccgcgtttctcgacgcgtgtgttgggtggcgtgtgccgtgtcctttgcgtgtgggatttcgcgtttcgtttttgagtgggggtcgcccgctggggtgcgaggtgatagtgtcgtgggtgagggtgtaaagctgtggtgggcgcgcgttggtgggagatatggtgtggaggggtgccggcctgtttttgttgttttgtttttttttttttaaaacaaatatttttaattaaattttcaaacatgaaagtataaacgttaatatttgttgaaaaatatatacggcatttcccccgtgtgaacacaatggcttccggtaacactacccacttacaatgagatcttttaggcacttgggtgtagaatgtgcgagagggaaatgcaactttactttcctgctacctataggggcaaccacaattagatctcatgaaatattgttttcaacactgttagcattaacaccgacttaaaacatacggtgaccggacatataacctttaaagtcccagtatatttaaaacaggagaaatctggtaagttgttaggattctaaattccttttagtctgttcactgagatattaaatttcagtagacagaacccaaaaagagatttcatttctttctaatcactttggcttctttcttttttgttaagtaggtaaaaaccttcttggtgggcacctaagcaggatgcagccaatagttcatgaaccagctgcgcacgtgaggcttaaaatctaagatgctgctgaagtggctgcgggaggagcggctgcgacttacttttaatttcaaatcagctgcagatgtttgggagccctctcgatgaacagaacaaatcacataacatgcagaatccactcagaggctgttattccagggaaagagcgggcaggtgtcctgaggagtacattcttgctgtcacagtctcactgctggcacagaggtgccttgtttatgagatttaaaggccacaaactctggctcaggtggggacaagggtgtgccgtggctgaaaccagcgtggtcactgtgtggctggcacggcctgcacatgctgcaggagctgctcgcagtaggtggccgagcggtgcttgtggatgacggcctccgtctccctcaccaggagatctgggaacagcccgctgccctctttgaggacctctaaaattgcatcctggatggccctctctggatcgtcaaggtgaaccagcaactctcggtacaggtactggacactgctctgatagtaggattttgcgttggcacccttgacacactgcagccaggtgaccaaggtggaggcggctgccatcctcacatcgttggacacgtcatctaggcgttttaagagttcaggataaatcttgatgagtttctctggatccgtcatgccgcccgaggtttttaagaacgtgttgataatacggcatgagatcagtcgcgtcatcttcgaatcctcctccagggtggtcaggacctggggcatcagtgtttcctgcacgtcccgtatctgctctgccgacaggacctcgctgctggtgagcgcccagaggcaggacacggcagccgtgcggatggccgcggctgtcctccccgcatgccactgcagattgggggccaggatgtcctttgtcaccgtctcgaggtagctgggaaactgcccctgggagttgatggtgtccgtggctctgagcagcacggtggacaggatggagaacagcttcaggcgcatctgcgggtcttgggagggctgcagacaggccctcagcgtgggcacgacgtgtggcagggcttctcccagggcagggcctgactgtgcgacgatgacactgaactgcaggagctccggcgagtgtgcggtccagtcaaggtgcgacgcggtcacccgctccaggaggggaccaatgtgcttgcggtagaggtcctggcagctgctgacaccctccaccatggccagtgagtccatcgtctcctgtgccttgtccctcaggccggtagcacctgcgagggccactattgtcagcagcacgtccaagagctgcaggctggccacgccacagtcctcatgacacacagacaccagagcctgcacacacagcagcaggcgctccaggtagaggtcgttttcagatgcctggcagatgtgggcctgtgccagctctgtggcgatggctgccaggtgcggctggagggcttctcgggggcaaccccgcatggcggaggccagcaccaggaggccggaggcagagggcgtcttcttcagcgtcgataagatcagcttcagaaacacctcagggctgacaaacgtcccgacgagctctgcggatctggtacaactttggaccacggctgcctcctcgtcggtgcaggcctggaacagggtccggaggacgacctccaggtgctgcgtggcgtggtcctcggcatgcagcagcagcactgggagcagctgtgccgacttcactcgggtccccaccacccagtcggtgatgtcgtggcacagggcagggaggatcttggagaggttcctgaagacgagctcccggcagccgggtgtggggccgccacggcctccgccacccccagcgccgccatcttgcccgcgtcagccggccaccccgct

SEQ ID NO: 707670 - DNA, 2362 bp, Homo sapiens
agagagttgggagatgtaggtgtgtggataggatgggagaatggtaggtgtagtgtaggtggagctggtgatatgggtaggtgtatgtgagtcgatggtaagactggtggtggtggtagagaggaggtgtttatatgggagtgtaagggggaataaggttttgagagagatgaaagggatgggtagtgtggttggtgagttattaaggattgttgggggatgggttatagtgttttataattgttgataattgtagttttgatttgtggagggtgtagatttggtgtagggagatttgtggcatgttagttgtgtcattaatagatgttagggtgcggtgtcccggaggtcccagggtgttgcgtggtttccgcgtttctcgacgcgtgtgttgggtggcgtgtgccgtgtcctttgcgtgtgggatttcgcgtttcgtttttgagtgggggtcgcccgctggggtgcgaggtgatagtgtcgtgggtgagggtgtaaagctgtggtgggcgcgcgttggtgggagatatggtgtggaggggtgccggcctgtttttgttgttttgtttttttttttttaaaacaaatatttttaattaaattttcaaacatgaaagtataaacgttaatatttgttgaaaaatatatacggcatttcccccgtgtgaacacaatggcttccggtaacactacccacttacaatgagatcttttaggcacttgggtgtagaatgtgcgagagggaaatgcaactttactttcctgctacctataggggcaaccacaattagatctcatgaaatattgttttcaacactgttagcattaacaccgacttaaaacatacggtgaccggacatataacctttaaagtcccagtatatttaaaacaggagaaatctggtaagttgttaggattctaaattccttttagtctgttcactgagatattaaatttcagtagacagaacccaaaaagagatttcatttctttctaatcactttggcttctttcttttttgttaagtaggtaaaaaccttcttggtgggcacctaagcaggatgcagccaatagttcatgaaccagctgcgcacgtgaggcttaaaatctaagatgctgctgaagtggctgcgggaggagcggctgcgacttacttttaatttcaaatcagctgcagatgtttgggagccctctcgatgaacagaacaaatcacataacatgcagaatccactcagaggctgttattccagggaaagagcgggcaggtgtcctgaggagtacattcttgctgtcacagtctcactgctggcacagaggtgccttgtttatgagatttaaaggccacaaactctggctcaggtggggacaagggtgtgccgtggctgaaaccagcgtggtcactgtgtggctggcacggcctgcacatgctgcaggagctgctcgcagtaggtggccgagcggtgcttgtggatgacggcctccgtctccctcaccaggagatctgggaacagcccgctgccctctttgaggacctctaaaattgcatcctggatggccctctctggatcgtcaaggtgaaccagcaactctcggtacaggtactggacactgctctgatagtaggattttgcgttggcacccttgacacactgcagccaggtgaccaaggtggaggcggctgccatcctcacatcgttggacacgtcatctaggcgttttaagagttcaggataaatcttgatgagtttctctggatccgtcatgccgcccgaggtttttaagaacgtgttgataatacggcatgagatcagtcgcgtcatcttcgaatcctcctccagggtggtcaggacctggggcatcagtgtttcctgcacgtcccgtatctgctctgccgacaggacctcgctgctggtgagcgcccagaggcaggacacggcagccgtgcggatggccgcggctgtcctccccgcatgccactgcagattgggggccaggatgtcctttgtcaccgtctcgaggtagctgggaaactgcccctgggagttgatggtgtccgtggctctgagcagcacggtggacaggatggagaacagcttcaggcgcatctgcgggtcttgggagggctgcagacaggccctcagcgtgggcacgacgtgtggcagggcttctcccagggcagggcctgccttccaagcacgagcgctcctgctggcggacacttctgcccggagccacgtgtccgccctcccagcactagcgctcctgcttgcagcagggacacttccacgggaccatgtgtctgccctcccagcgtgagctcctgctcgcagcagggacacttccacccggaccacgtgtct

SEQ ID NO: 707671 - DNA, 358 bp, Homo sapiens
ctctctctctctctctctctctctctctctctctctctctctctctctgtctgtctctctctctctgtctcaccatgcttggagcagagggtagaagactattacagctactgcaatcaattgaactacaatcgtaatgccgacggtcctgcgtcacttgaactaccgagaaagtgactgagggaaattatcaatgaggtcatctgccagagacagtcagtgagtcagtacggatgagagactgtcaagaagacagaggaggagaatgacagactgtcgagccaaacccgccaacgagcaccgacagatgaaggtatacaccggaagtgaacctgagagtgaggatgatggtggccgc

SEQ ID NO: 707672 - DNA, 1144 bp, Homo sapiens
  misc_feature (42)..(42): n is a, c, g, or t
  misc_feature (1101)..(1101): n is a, c, g, or t
  misc_feature (1125)..(1125): n is a, c, g, or t
gggcggcgttgggggtgcagcatgcttgctgctgcggcgcgngggggcgggcgtggagggcggcgccgctgcagtgcggggacccgctcgctcgctcgccagccgtccccgcgccccgcgtcccgcgcagccgcctcctggcctcgggcgccgcgcatccaggaaggaagcagccaccctcgccatggcctccccgcccgcctgcccctcggaggaggacgagagcctgaagggctgtgagctgtacgtgcagctgcacgggatccagcaggtcctcaaagactgtatcgtccacctctgcatctccaagcccgaacgccccatgaagttcctccgggagcacttcgagaagctggagaaggaagaaaacaggcagattttggcgcggcaaaagtcaaactcacagtcggactcccatgatgaggaggtgtcgcccacccccccgaaccctgtggtgaaggcccgccgccggcgaggaggcgtgagtgccgaggtgtacaccgaggaggacgccgtgtcctacgtcaggaaggtgattcccaaggactacaaaaccatgactgcgctggccaaggccatctccaagaacgtgctcttcgctcacctggatgacaacgagaggagtgacatattcgatgccatgttccctgtcactcacatcgctggggagactgttatacagcaagggaatgaaggagacaacttctatgtcgttgatcaaggggaagtggatgtgtacgtgaacggagagtgggtgaccaacatcagcgagggaggcagcttcggggagctggcgctcatctacggcacccccagggctgcgaccgtgaaagccaagacggacctcaagctctgggggatcgaccgggacagctaccggcgcatccttatgggcagcacgctgaggaaacgcaagatgtacgaggagttcctcagcaaggtctccatcctagagtccctggagaagtgggagcgtctgaccgtggcggatgcgctggagcccgtccagtttgaagatggagagaaaatcgtggtccagggagagcctggggacgacttttacatcatcacggagggccaccgcgttccgtggcttgcaanggcccgggttcccccccaatgganggaagttacccttggaaag

SEQ ID NO: 707673 - DNA, 106 bp, Homo sapiens
tgggtcacaacattctcctctccctgactggtgcagattcatcaaacaaaaaataaatctcgaagaaaaaaatgcacttacatgtgcttatttggcttttctcatt

SEQ ID NO: 707674 - DNA, 1230 bp, Homo sapiens
  misc_feature (42)..(42): n is a, c, g, or t
  misc_feature (1224)..(1224): n is a, c, g, or t
gggcggcgttgggggtgcagcatgcttgctgctgcggcgcgngggggcgggcgtggagggcggcgccgctgcagtgcggggacccgctcgctcgctcgccagccgtccccgcgccccgcgtcccgcgcagccgcctcctggcctcgggcgccgcgcatccaggaaggaagcagccaccctcgccatggcctccccgcccgcctgcccctcggaggaggacgagagcctgaagggctgtgagctgtacgtgcagctgcacgggatccagcaggtcctcaaagactgtatcgtccacctctgcatctccaagcccgaacgccccatgaagttcctccgggagcacttcgagaagctggagaaggaagaaaacaggcagattttggcgcggcaaaagtcaaactcacagtcggactcccatgatgaggaggtgtcgcccacccccccgaaccctgtggtgaaggcccgccgccggcgaggaggcgtgagtgccgaggtgtacaccgaggaggacgccgtgtcctacgtcaggaaggtgattcccaaggactacaaaaccatgactgcgctggccaaggccatctccaagaacgtgctcttcgctcacctggatgacaacgagaggagtgacatattcgatgccatgttccctgtcactcacatcgctggggagactgttatacagcaagggaatgaaggagacaacttctatgtcgttgatcaaggggaagtggatgtgtacgtgaacggagagtgggtgaccaacatcagcgagggaggcagcttcggggagctggcgctcatctacggcacccccagggctgcgaccgtgaaagccaagacggacctcaagctctgggggatcgaccgggacagctaccggcgcatccttatgggcagcacgctgaggaaacgcaagatgtacgaggagttcctcagcaaggtctccatcctagagtccctggagaagtgggagcgtctgaccgtggcggatgcgctggagcccgtccagtttgaagatggagagaaaatcgtggtccagggagagcctggggacgacttttacatcatcacggagaaaaatttgccgggtgtggtggcacatgcctgtaatcccagctacttgggaggctgaagcaggagaatcgcttgaacccgggagatggaggttgcagtgagccaagatcacaccattgcactccagcatggacaacagagtgagattcngtctca

SEQ ID NO: 707675 - DNA, 293 bp, Homo sapiens
  misc_feature (274)..(274): n is a, c, g, or t
cgtctgtagtttagtgggttggatgagcgggtgcgaggacggactgaggccggagcggtaggacggatatcagtctgatgatctgagaatgagtgcgactgaggctaagctaggatagtgagcgagagagagagaagcgaagggagctgagagccaagctggggtttgaagtgcgagtgggaaagatcgaagtctgggaattgaccgagagaatctctggttgcagggatagagtagagagcagactggcgtgtccttccagcgaggagcgacngctggatgagccttatgtg

SEQ ID NO: 707676 - DNA, 3024 bp, Homo sapiens
agagagttgggagatgtaggtgtgtggataggatgggagaatggtaggtgtagtgtaggtggagctggtgatatgggtaggtgtatgtgagtcgatggtaagactggtggtggtggtagagaggaggtgtttatatgggagtgtaagggggaataaggttttgagagagatgaaagggatgggtagtgtggttggtgagttattaaggattgttgggggatgggttatagtgttttataattgttgataattgtagttttgatttgtggagggtgtagatttggtgtagggagatttgtggcatgttagttgtgtcattaatagatgttagggtgcggtgtcccggaggtcccagggtgttgcgtggtttccgcgtttctcgacgcgtgtgttgggtggcgtgtgccgtgtcctttgcgtgtgggatttcgcgtttcgtttttgagtgggggtcgcccgctggggtgcgaggtgatagtgtcgtgggtgagggtgtaaagctgtggtgggcgcgcgttggtgggagatatggtgtggaggggtgccggcctgtttttgttgttttgtttttttttttttaaaacaaatatttttaattaaattttcaaacatgaaagtataaacgttaatatttgttgaaaaatatatacggcatttcccccgtgtgaacacaatggcttccggtaacactacccacttacaatgagatcttttaggcacttgggtgtagaatgtgcgagagggaaatgcaactttactttcctgctacctataggggcaaccacaattagatctcatgaaatattgttttcaacactgttagcattaacaccgacttaaaacatacggtgaccggacatataacctttaaagtcccagtatatttaaaacaggagaaatctggtaagttgttaggattctaaattccttttagtctgttcactgagatattaaatttcagtagacagaacccaaaaagagatttcatttctttctaatcactttggcttctttcttttttgttaagtaggtaaaaaccttcttggtgggcacctaagcaggatgcagccaatagttcatgaaccagctgcgcacgtgaggcttaaaatctaagatgctgctgaagtggctgcgggaggagcggctgcgacttacttttaatttcaaatcagctgcagatgtttgggagccctctcgatgaacagaacaaatcacataacatgcagaatccactcagaggctgttattccagggaaagagcgggcaggtgtcctgaggagtacattcttgctgtcacagtctcactgctggcacagaggtgccttgtttatgagatttaaaggccacaaactctggctcaggtactggacactgctctgatagtaggattttgcgttggcacccttgacacactgcagccaggtgaccaaggtggaggcggctgccatcctcacatcgttggacacgtcatctaggcgttttaagagttcaggataaatcttgatgagtttctctggatccgtcatgccgcccgaggtttttaagaacgtgttgataatacggcatgagatcagtcgcgtcatcttcgaatcctcctccagggtggtcaggacctggggcatcagtgtttcctgcacgtcccgtatctgctctgccgacaggacctcgctgctggtgagcgcccagaggcaggacacggcagccgtgcggatggccgcggctgtcctccccgcatgccactgcagattgggggccaggatgtcctttgtcaccgtctcgaggtagctgggaaactgcccctgggagttgatggtgtccgtggctctgagcagcacggtggacaggatggagaacagcttcaggcgcatctgcgggtcttgggagggctgcagacaggccctcagcgtgggcacgacgtgtggcagggcttctcccagggcagggcctgactgtgcgacgatgacactgaactgcaggagctccggcgagtgtgcggtccagtcaaggtgcgacgcggtcacccgctccaggaggggaccaatgtgcttgcggtagaggtcctggcagctgctgacaccctccaccatggccagtgagtccatcgtctcctgtgccttgtccctcaggccggtagcacctgcgagggccactattgtcagcagcacgtccaagagctgcaggctggccacgccacagtcctcatgacacacagacaccagagcctgcacacacagcagcaggcgctccaggtagaggtcgttttcagatgcctggcagatgtgggcctgtgccagctctgtggcgatggctgccaggtgcggctggagggcttctcgggggcaaccccgcatggcggaggccagcaccaggaggccggaggcagagggcgtcttcttcagcgtcgataagatcagcttcagaaacacctcagggctgacaaacgtcccgacgagctctgcggatctggtacaactttggaccacggctgcctcctcgtcggtgcaggcctggaacagggtccggaggacgacctccaggtgctgcgtggcgtggtcctcggcatgcagcagcagcactgggagcagctgtgccgacttcactcgggtccccaccacccagtcggtgatgtcgtggcacagggcagggaggatcttggagaggttcctgaagacgagctcccggcagcccagcacagggcggcgctcatgtggagggtaatggggtggggtgggaggggcaaagtccagcttgtccttcaggtcctcctcattctccttctgccactgcaggccaacgtcctcccagaggctggcagccagctgcctgacctcaggcacctcgtcgttgaggctactgagcagcagagggatgagcttgtggaagaaggagtaacggtcacgcagacacagcagccagccgcccaccacggaggccaccgcccgccggacctgcgggacgtcatcaaacagtcgctgagcaaaatgggaaagcacggtcgacgcggccgcgaatttagtagtagta

SEQ ID NO: 707677 - DNA, 1151 bp, Homo sapiens
cggaagcctggcgcgtgtcaactattcgccttagaccttgtaaccgcaacgccggcgcggttgtgtgctcgccgagcggagtacgactaatctcaccgttgtgggccttcatccagatccggcgtgcggctaactattcgcgcttatacctatgtaaaccagggaatgctgacaatcaagggtcggactggacttcgtaggacaccaaatgtccagtgaggatttagcatccaggtccaacagacaagggcgccaatccctgaaggagcacattgcacagtgttggtggaggttgtggatgtgaatgacaacgccccggaaatcacaggcagctccgtgtacagcccagtgacccgaggatgcccctctggggactgtcatcgctttggtcagtgtgactgacctggatgctggcgagaacgggctggtgacctgcgaagttccaccagtggtcatccgttacagccttactgcttccctcacgaatatacttcactagggaagaagcagagcagacctggatcgggagactgtgtcacgaatacgaagctcagcatcaccggaccgagacggcggaacccctatcacctctcagcccttacaatattgcgtgttcaaagtgtaccgattcaatgagaaacctccacgaaacttctcaatccttctacgacgtatacatcggaagaacacaagctccgcggggctccaataaataaacctagttgctgggaacccgaagacccgcagcattgctcggactacttacctcacccttggagcaaggaggtgagaccggacatagcaggggaccggcaaaatcagacactacatccgtgcaacatctgggaatagtggactccctaagtggccccatacaacacaaaggacggctgtcgcaactctggcactaaacagagccacttacaggcaagagggggacccaccgggagccaacaaataacaatcacacggtcaacataattcggcaatcgtcggaagtcacaaatgcctcaaaagggaaaacccaagcacacggacaccacaggaacatgagccatgatgatataccaggcccacagcccacgacgcagtcaacacaatgcaccctagtcatcaaaacccaccacaaaccgccacgccaccatgccccc

SEQ ID NO: 707678 - DNA, 1808 bp, Homo sapiens
  misc_feature (42)..(42): n is a, c, g, or t
  misc_feature (1201)..(1201): n is a, c, g, or t
  misc_feature (1217)..(1217): n is a, c, g, or t
gggcggcgttgggggtgcagcatgcttgctgctgcggcgcgngggggcgggcgtggagggcggcgccgctgcagtgcggggacccgctcgctcgctcgccagccgtccccgcgccccgcgtcccgcgcagccgcctcctggcctcgggcgccgcgcatccaggaaggaagcagccaccctcgccatggcctccccgcccgcctgcccctcggaggaggacgagagcctgaagggctgtgagctgtacgtgcagctgcacgggatccagcaggtcctcaaagactgtatcgtccacctctgcatctccaagcccgaacgccccatgaagttcctccgggagcacttcgagaagctggagaaggaagaaaacaggcagattttggcgcggcaaaagtcaaactcacagtcggactcccatgatgaggaggtgtcgcccacccccccgaaccctgtggtgaaggcccgccgccggcgaggaggcgtgagtgccgaggtgtacaccgaggaggacgccgtgtcctacgtcaggaaggtgattcccaaggactacaaaaccatgactgcgctggccaaggccatctccaagaacgtgctcttcgctcacctggatgacaacgagaggagtgacatattcgatgccatgttccctgtcactcacatcgctggggagactgttatacagcaagggaatgaaggagacaacttctatgtcgttgatcaaggggaagtggatgtgtacgtgaacggagagtgggtgaccaacatcagcgagggaggcagcttcggggagctggcgctcatctacggcacccccagggctgcgaccgtgaaagccaagacggacctcaagctctgggggatcgaccgggacagctaccggtcgcctctccctgtgatggagacagcacgtcgtggagcgaaagcagcatatgatgtgacgcaggagttaccttcagcgacagggtcatccattcctacgaggtccatggcagtaaggtgagtgcatgcgtctgatcacgtgagcgggagtgccgctggtgagtcgcacgcttcactagttgtattgagagcatgtgaggaagagataaatctggtgtgtaccaaggggaagagtcctgcgggacagaacttgtatacatttcatcgacgggatgtgctacacgcgatccagtgactgacgagcggccggtcaccgctaaanttgaagtgacgatacngttcggacgagttggggcgcgaagccttttggcgaaccatcgtagaacatacgtgtcttgcgtcgatgacttcggtcatcgcgttgcatgaaacctaggccctcgggagtgtggctcagccttgatcagtgggtcctgtaggggccaccatacgaagaagtgggttggtggagcgacgtgagcagacggaggccgcggggtatctcctgaagtccggtggtgggctagggggagtcccgcttgacgtccgtggaaggactcacatctagataacggaaaacctatttgcgagggtgttgttactagacgacgtctctccaggtctactcacttcaaccccgtaacttgtaggcccttcatgtttgccccggtacgctttgctatgtacactcaaggcgtacccccacaacatgtgttggggtcgggccgctgtggctcgcctggggtcgtttactggttgctcaagcgaggcacgcgcagttggcaggacacttactggctgcttgacggttggtggtgtgcccgggggttgcccgctgtgggtggtgccaccgggcccgtggttgcggggtgctttcgcccgtatgaacg

SEQ ID NO: 707679 - DNA, 962 bp, Homo sapiens
gaaactacaagaacttaacttggtataggccaagctcagggagaagagtagaggaaagctgtcatgccagcgagtacttcttgagtggagatcatccgcttgttgactgggtcaggtgggcctgtcaccatggataccgtgcggtacccttggaacctagtttaagggctgttctctctctgtcttgcttggatgatagcagtggttgcaagcattgttgttggccgaggtgtaagtgtctctctctgcttgtatggggctgtggtgcccggcagtccttgaggtgttctgccctctgacatgtggtccccgttgatctcattaatgtgtttatggcttctggtcccacttattcgtgggtatggtgacccggagtctaagggcgggtcagcttggaggggaattgggagaatgtaaactactgcacggcttttatggtgtggcttgcgaatcgcatgtacgtcatccacagaaactctgttttggaaatataaatatatcgcgcttggcggcaattggtgctgacgaaacgagatagaaatttctaggtataaatatggagttggataactggtagtataggtattgactgggccgataaatagtatgtgtgtgtcctggaaggaagtttatgagaagggatctcatggtgaaagctactgcagggcaggaccgaggctctgtgcgtttcagtgttatccagagggatcgttgggcaaacgtgaaggcctccgagggggtagttgccgcgcatagataactgtgggggcgaaccaatgccgtggacacactgggtccaacggggcggggggggattactccgtaagaggatacggcacggtcccctaacaattcgggagagtgctcaggtgccaaaaaaaaattgggccgcgcaagacaccgaaagggggacgcctttagaaccgtagccaccataagggagcgcattattacaacaggaa

SEQ ID NO: 707680 - DNA, 935 bp, Homo sapiens
  misc_feature (32)..(32): n is a, c, g, or t
  misc_feature (433)..(433): n is a, c, g, or t
  misc_feature (548)..(548): n is a, c, g, or t
  misc_feature (564)..(564): n is a, c, g, or t
  misc_feature (568)..(568): n is a, c, g, or t
  misc_feature (763)..(763): n is a, c, g, or t
  misc_feature (771)..(771): n is a, c, g, or t
  misc_feature (798)..(798): n is a, c, g, or t
  misc_feature (835)..(835): n is a, c, g, or t
ggcgccccaaacagagatgacagcagagtccncgagcacctggcctgttgctccaacattgcaaagacacattatcagtccctatttctagagggattactttgaattgagccatctataaaactgcaaggtcttgcccttttttttaatcaaaactgttctgtttaattcatgaattgtatagttaagcattacctttctacattccagaagagcctttatttctctctctctctctctctctctctctctctctctctctctctctctctactgagctgtaacaaagcctctgtaaatcggtgtatccttttgaagcagtcctttctcatattgagatgtactgtgatttcactgaggtttcatcacaagaagggagtgtttcttgtgccattaaccatgtagtttgtaccatcactaaatgcttggaacngtacacatgcaccacaacaaaggcccatcaaacaggtaaagtctcgaaggaagcgagaacgaaatctctcattgtgtgccgtgtggcccaaaaccgaaaacaatgaagcttggtnttaaaggataaagttntctnttttgttttcctctcagactttatggataatgtgaccgggtcttatgcaaattttctatttctaaaactactactatgatatacaagtgctgttgagcataattaaataaaatgctgctgctttgacagtaaagagaaggaagtattctgattagctgtatctggtattaattgcatgttaaaacactggaattnttaaaatngaaattagatcagtcattcttttcttntctcaagatatctcatggctgacactgaagaagaaangtaattcataacttgcactaaatgtatattttttttcttaaaaatttaccattcttatttatatttttatggattaaaatttataaaatacaaaaaaaaa

SEQ ID NO: 707681 - DNA, 426 bp, Homo sapiens
ggatttgaacgtcactgtcatcaattatatacacatgtgcagtctagactgtacttctgtatattttttaaatgcctagaaaaaagaggcatgtaaactgtaaaaatcaaattagatttgagacttactctttgatatgggttatttaaaagtatgttatcgaatttccaaaaatttgaggacattccgggtatccttctgttactgagttctagtttaagtctgttgtggtcagtgaacataatttgcatcatttcaatgcttttacacttattgaaatttacttaatagctcaaaatatgtctacaatgagtatggcatgtgcatttggacaaaaaactgtattttgctgttgaagggcacattctataaatgttgattgagcaacactaccggtcactctgattctcatcactccacaactga

SEQ ID NO: 707682 - DNA, 1599 bp, Homo sapiens
agagagttgggagatgtaggtgtgtggataggatgggagaatggtaggtgtagtgtaggtggagctggtgatatgggtaggtgtatgtgagtcgatggtaagactggtggtggtggtagagaggaggtgtttatatgggagtgtaagggggaataaggttttgagagagatgaaagggatgggtagtgtggttggtgagttattaaggattgttgggggatgggttatagtgttttataattgttgataattgtagttttgatttgtggagggtgtagatttggtgtagggagatttgtggcatgttagttgtgtcattaatagatgttagggtgcggtgtcccggaggtcccagggtgttgcgtggtttccgcgtttctcgacgcgtgtgttgggtggcgtgtgccgtgtcctttgcgtgtgggatttcgcgtttcgtttttgagtgggggtcgcccgctggggtgcgaggtgatagtgtcgtgggtgagggtgtaaagctgtggtgggcgcgcgttggtgggagatatggtgtggaggggtgccggcctgtttttgttgttttgtttttttttttttaaaacaaatatttttaattaaattttcaaacatgaaagtataaacgttaatatttgttgaaaaatatatacggcatttcccccgtgtgaacacaatggcttccggtaacactacccacttacaatgagatcttttaggcacttgggtgtagaatgtgcgagagggaaatgcaactttactttcctgctacctataggggcaaccacaattagatctcatgaaatattgttttcaacactgttagcattaacaccgacttaaaacatacggtgaccggacatataacctttaaagtcccagtatatttaaaacaggagaaatctggtaagttgttaggattctaaattccttttagtctgttcactgagatattaaatttcagtagacagaacccaaaaagagatttcatttctttctaatcactttggcttctttcttttttgttaagtaggtaaaaaccttcttggtgggcacctaagcaggatgcagccaatagttcatgaaccagctgcgcacgtgaggcttaaaatctaagatgctgctgaagtggctgcgggaggagcggctgcgacttacttttaatttcaaatcagctgcagatgtttgggagccctctcgatgaacagaacaaatcacataacatgcagaatccactcagaggctgttattccagggaaagagcgggcaggtgtcctgaggagtacattcttgctgtcacagtctcactgctggcacagaggtgccttgtttatgagatttaaaggccacaaactctggctcaggtggggacaagggtgtgccgtggctgaaaccagcgtggtcactgtgtggctggcacggcctgcacatgctgcaggagctgctcgcagtaggtggccgagcggtgcttgtggatgacggcctccgtctccctcaccaggagatctgggaacagcccgctgccctctttgaggacctctgtaaaacagaaaaacaccttgaacatgccagaaacaagcatgaaaccaatcttacctctcg

SEQ ID NO: 707683 - DNA, 441 bp, Homo sapiens
caaagatacagaatcaacctaagtgcccatcagtaacagattggataaagaaaatatggtacacatacaccatggaatagtatgcagccataagaaacaatgagatcatgtctcaggaacatggatagagctggaggctattatccttagcaaactaattcaggaacagaaaaccaaataccacatgttctcagttgtgagtgggagctaaatgatgagaactcatgaacacaatgaagggaacagacactagggtctacttgagggtggaagatgggaagagggagaggagcagaaaaagtacctattggtgatgaagtactctgtacaacaaacccgtgacaagagtttccctatataacaaaccttcacatatacccctgaacctaaaagtttttttaattgtaaataaatggatcattaaaaaaaattttaataata

SEQ ID NO: 707684 - DNA, 1830 bp, Homo sapiens
gtttatgaagaaaagaggtttaattgactcacagttctccatgggtggggaggcctcaggaaacttccaatcatggcagaaggtgaaggggaaccaggcacatctaaaattgcatcctggatggccctctctggatcgtcaaggtgaaccagcaactctcggtacaggtactggacactgctctgatagtaggattttgcgttggcacccttgacacactgcagccaggtgaccaaggtggaggcggctgccatcctcacatcgttggacacgtcatctaggcgttttaagagttcaggataaatcttgatgagtttctctggatccgtcatgccgcccgaggtttttaagaacgtgttgataatacggcatgagatcagtcgcgtcatcttcgaatcctcctccagggtggtcaggacctggggcatcagtgtttcctgcacgtcccgtatctgctctgccgacaggacctcgctgctggtgagcgcccagaggcaggacacggcagccgtgcggatggccgcggctgtcctccccgcatgccactgcagattgggggccaggatgtcctttgtcaccgtctcgaggtagctgggaaactgcccctgggagttgatggtgtccgtggctctgagcagcacggtggacaggatggagaacagcttcaggcgcatctgcgggtcttgggagggctgcagacaggccctcagcgtgggcacgacgtgtggcagggcttctcccagggcagggcctgactgtgcgacgatgacactgaactgcaggagctccggcgagtgtgcggtccagtcaaggtgcgacgcggtcacccgctccaggaggggaccaatgtgcttgcggtagaggtcctggcagctgctgacaccctccaccatggccagtgagtccatcgtctcctgtgccttgtccctcaggccggtagcacctgcgagggccactattgtcagcagcacgtccaagagctgcaggctggccacgccacagtcctcatgacacacagacaccagagcctgcacacacagcagcaggcgctccaggtagaggtcgttttcagatgcctggcagatgtgggcctgtgccagctctgtggcgatggctgccaggtgcggctggagggcttctcgggggcaaccccgcatggcggaggccagcaccaggaggccggaggcagagggcgtcttcttcagcgtcgataagatcagcttcagaaacacctcagggctgacaaacgtcccgacgagctctgcggatctggtacaactttggaccacggctgcctcctcgtcggtgcaggcctggaacagggtccggaggacgacctccaggtgctgcgtggcgtggtcctcggcatgcagcagcagcactgggagcagctgtgccgacttcactcgggtccccaccacccagtcggtgatgtcgtggcacagggcagggaggatcttggagaggttcctgaagacgagctcccggcagcccagcacagggcggcgctcatgtggagggtaatggggtggggtgggaggggcaaagtccagcttgtccttcaggtcctcctcattctccttctgccactgcaggccaacgtcctcccagaggctggcagccagctgcctgacctcaggcacctcgtcgttgaggctactgagcagcagagggatgagcttgtggaagaaggagtaacggtcacgcagacacagcagccagccgcccaccacggaggccaccgcccgccggacctgcgggacgtcatcaaacagtcgctgagcaaaatgggaaagcacggtcgacgcggccgcgaatttagtagtagta

SEQ ID NO: 707685 - DNA, 632 bp, Homo sapiens
ttttatttttagacaacctacatgacatgttgtctcttaaaaacaatgcgctccactccaaagaaatcagaggccgataaatgacgagctcaagatgagatcgagtcccatgtggagtggaggcatcgctaatagaagaacaaatgtcaaataagaagtcgaaaaattatacgcgtaagccgaaaaaaaaaaaacgaggcgcccggcacgtagcagcaacgcacacggaaagggcccggcacatggacaaacgataccaaaaagtcgcacagcgaaacacaccgtgggcacacacaaaacagaaccgcacaactcataaaccacaagcgccgcggcaccggacacacacaacaacaccccgcgcccccagcaaccgcgaaaccaccaccgcaccacgctgacgacagaaccctcgcgcgcacccaagaaacactccagcacccgccaggctgcaggcgcaaaaaacgacacaaaacaccaacacaaccaggacaaactcgaccaagcacaacccaaggacacaacacaaagccaagcaagcacaacaacacgccacacaacaccaccagcgaaaccacgacacgccagcaggacgacaaaacacaacaacgaccaacaacacagcaaaccac

SEQ ID NO: 707686 - DNA, 166 bp, Homo sapiens
atggaagcaattttggaggtggtggaagctacatgattttgggattacacatcagtctcaaattttggccctgaaggaggaattttgaagcagagtctggccctatgccgtggagccatacttgcaacccgacccagtgctatgcgtccgcgcgctgcttgctgcg

SEQ ID NO: 707687 - DNA, 698 bp, Homo sapiens
cacaccatcgagcacctcttgccccatcttcctggctcagactgaagggatgagtgcctctgaggtacctggttgaacatcatctctatacctggactgtgtgaacgaggtgattcggcatccggcagtctgtcccagtccctgcctccctgcccacttgtggcctctggcctgcaggagcgccaagtggcggggtgcggttgcgccatcatttgatgctacattgctcctctctctggcctggatccgctggcgcacgtggtagttctttgtatgtagcaaatttaacatccttgttgcatggcctggcgttgtggagtcaattgtagtattgaccatactccgcgaagtgcctatgtccagcctaagacatatcacttgaataagcaacgctaatgtagtgcagacgacatgtatttggtgaacggaagttgagagctccaatgtccaacaagtacaataccaccaaggttcttgcgaccattgtccgtgagaagcgcctcaaactaacctgcaaccggccatttaactatcgcatgcattctgccgacttcgaagtggtgcgttgtcgtgcatgcgttctgttcggaggcattcgcaccgagttcagcgcagccgacatggcaccagtggcgtgagccccaccgggtatcctggcctgtctagttgggcctttgcgtgcgatcgccgagttttcg

SEQ ID NO: 707688 - DNA, 541 bp, Homo sapiens
  misc_feature (505)..(505): n is a, c, g, or t
tcaacgcttatacttcatgctctacatcatcttcttttttttttttggagacagagtctggctctgtcccccaggctggagtgcaggggtgcgatctcagctcacggcaacctccgcctccggcgttcaagcaattctccagcctcagcctcctgagtaactatgattacaggcatgtgccaccacgccgggctaatttttctatttttcagtacagacagggtttcaccatggtgggccagggcgggtctggaactccttgacctcagggtaatctggcccacctacagcctcccaaaggggcggggattaacagggggtgagccaccgcaccgggccaactcattgacaccttttaatcccaggcggatttatttctttttcttagtataattggtttcatgaaagcaaagttattttagtattaacaaaatatattggagatgaaaaatctgagggggaacatttcactagtgagctctgaaggccagacagaaatcacggncaaggggtagtaaggcggttcctcagaggactaggt

SEQ ID NO: 707689 - DNA, 726 bp, Homo sapiens
  misc_feature (136)..(136): n is a, c, g, or t
  misc_feature (141)..(141): n is a, c, g, or t
  misc_feature (147)..(147): n is a, c, g, or t
  misc_feature (159)..(159): n is a, c, g, or t
  misc_feature (161)..(161): n is a, c, g, or t
  misc_feature (166)..(166): n is a, c, g, or t
  misc_feature (170)..(170): n is a, c, g, or t
  misc_feature (187)..(187): n is a, c, g, or t
  misc_feature (189)..(189): n is a, c, g, or t
  misc_feature (191)..(191): n is a, c, g, or t
  misc_feature (217)..(217): n is a, c, g, or t
  misc_feature (219)..(219): n is a, c, g, or t
  misc_feature (248)..(250): n is a, c, g, or t
  misc_feature (256)..(256): n is a, c, g, or t
  misc_feature (271)..(271): n is a, c, g, or t
  misc_feature (478)..(478): n is a, c, g, or t
tgcgcatgagtccggaagggagtgagtgcacaagtcgtcagcatgaatcacgtggtgctgttacgatcagtgaccagaagccttggtctggtattgttcctgatgacgctgcgtgtggctgtgtggctgcctgagngactnctggantgactccctggncnacccngccntccgtgcgctctgccancngngcgctcagcagagaccccgggctgcngnctgcacttgctgagtgcctctcccctgcnnncgcagnccagaggcgcccagnacctggagctcactggagctgagggtccgagctgagcgggctgttgtaaagccgaaaggcgagtcagtgactgggacctctgtcctggtggcgacggagagaaacagtgagcccgaggggcgcgggcacagaactgtccagctccgagaactggggtccgccagccggcggggaaagcagctgagcgcggaggcgagtgagcggacncgtccggggtctttgcagtccccgccgtgcccaatgggcacctgactctcggtcagttgggctgcggcagggctgggaggggcgcgccatggaggcgccgggtcgcgcctagtatgcctccatggccaagtgaagcggtccggctggggtcggcgggaccccgctgggccatgtacggcgacatattctaactgcctcgtggcgtgcccgaggcggctggtaggcagcgctgcttggcccaggagcct

SEQ ID NO: 707690 - DNA, 356 bp, Homo sapiens
  misc_feature (268)..(268): n is a, c, g, or t
aggctggaatgcaatgccacgatctcagctaaccacaacctccgcctcccgggttcatgccattctcctacctcagcctcctgaatagctgggactacaggcgcccgccaccacacctggctaattttttgtatttttagtagagacggggtttcaccgtgttagccaagatggtctcgatctcctgacctcgtgatccacccgcctcagcctcccaaagtgctgcgattacaggcgtgagccaccacgcctggccttaattattganttgaaataatttatttctttgggaaggactcaagatgctttttagtgatattcttggatcatttttctttacaaattcaccttaaaaa

SEQ ID NO: 707691 - DNA, 1019 bp, Homo sapiens
ggcgtggaggtcgcgcgccccttccggcgcggggagtggcgctgaacgatctggggccgctcgtgccgcaggcctgcctccagcgccgcgggatgtacgctgctggtgggacctgctggtccccaagcagagcccggcctgcccggcttgtctaccatcacgagggagatctctgccccctggggctgagagaccccaaacctttccccaatgctgaacgctgcagtggtatttgacgtgtaccagcccagatgtcttcccacaaacggatctgtggtggcacagggcgacctggggctccttgccagtaacagggaagctgacactggttggaacttggctttgaactgtggacccctgctacgacgacgaagggcaaaccgggtaatcgccaacccacccaaagctgaccggaagagcgaaacatgcccaagtgccccaggaagaagaggaggacggtgcgggtactgacacttccccttgcaaggcccacacgccatggcggaacgcatgtgaacgagctttagctcgtacacagcgtcctgggcacgggaccgttgggaccggaccatcacccaataatgaatggtggcccccatgtgactgtgctatcacggcacaccagagctatatcccgcgtaacacctgtgtctcatacgacactctgcccactagtgcccgtctcgcttatataggggcgactgtggaacagcaacggacgcactcgacccgcggcatcatcaatagcacgcgaacactgtggagcaaaccacgtgctgggaccccgcaatactcgcagctggggcttcactggcagcgctggatcgtcaacctgtaacagggggacgaaattcgggaggaccgccagcggccgtccacaaacccagaaagttactcagcacctaccagggcgcgcccgcaatataaccagaacacaagcggtaggccagagcgggaaatgacgaccttatatgggattcacgtgcgcccatcccgcactagcaccctctcgtggcgtc

SEQ ID NO: 707692 - DNA, 726 bp, Homo sapiens
  misc_feature (136)..(136): n is a, c, g, or t
  misc_feature (141)..(141): n is a, c, g, or t
  misc_feature (147)..(147): n is a, c, g, or t
  misc_feature (159)..(159): n is a, c, g, or t
  misc_feature (161)..(161): n is a, c, g, or t
  misc_feature (166)..(166): n is a, c, g, or t
  misc_feature (170)..(170): n is a, c, g, or t
  misc_feature (187)..(187): n is a, c, g, or t
  misc_feature (189)..(189): n is a, c, g, or t
  misc_feature (191)..(191): n is a, c, g, or t
  misc_feature (217)..(217): n is a, c, g, or t
  misc_feature (219)..(219): n is a, c, g, or t
  misc_feature (248)..(250): n is a, c, g, or t
  misc_feature (256)..(256): n is a, c, g, or t
  misc_feature (271)..(271): n is a, c, g, or t
  misc_feature (478)..(478): n is a, c, g, or t
aaaacagggagcgcatgcagcctggagtggagttgggacaagctcgctgaacactggtgcgtctcgacatgtggaccatgagcctgcagggacttgttcctgatgacgctgcgtgtggctgtgtggctgcctgagngactnctggantgactccctggncnacccngccntccgtgcgctctgccancngngcgctcagcagagaccccgggctgcngnctgcacttgctgagtgcctctcccctgcnnncgcagnccagaggcgcccagnacctggagctcactggagctgagggtccgagctgagcgggctgttgtaaagccgaaaggcgagtcagtgactgggacctctgtcctggtggcgacggagagaaacagtgagcccgaggggcgcgggcacagaactgtccagctccgagaactggggtccgccagccggcggggaaagcagctgagcgcggaggcgagtgagcggacncgtccggggtctttgcagtccccgccgtgcccaatgggcacctgactctcggtcagttgggctgcggcagggctgggaggggcgcgccatggaggcgccgggtcgcgcctagtatgcctccatggccaagtgaagcggtccggctggggtcggcgggaccccgctgggccatgtacggcgacatattctaactgcctcgtggcgtgcccgaggcggctggtaggcagcgctgcttggcccaggagcct

SEQ ID NO: 707693 - DNA, 1184 bp, Homo sapiens
ccttgtttgtgaccgttcgttgcccttagaggcgccaatcgccgtgcgcgtgctgtccgtgcggattacgttatccgggggactgtttctggccttctggtctgtcttcccgtgtggccccgtcgtttcccgtttactcgctcttgcacatcccgggtaccccgtgcttgctggtccctttgctgggccctattggtcactgggtcccgaccttatcttgtctcgtcgggcttcttttagtcccattggtcgtgcgtctgtttagcgttgctccgggaactttcccgtgtgttacgtacgttgtgtgcctattgtgtccctcgggcggtccttcgatgcagtagtgcctctatcgttccccctctcgtggtgggctactcttaacattcactgcttatcccctggcttgtgttcccctgcagcgcttcttagcagccctctgtaccctctatctggacgttatgtcatgaaagtatactatcctggccgcatggaatctacctgtggctcacccactccttgccaagttctatcatatctctctttcgatttaacgtcccgggagactgcagtcgtgtcaacgctatcgagtccgtctcatatgcctaaccgcacagtgccatttgcttgctaggcctttctgtctcagagggcctgcccatcgggggatatacccgtagatgcagccatatcgtggcctcgtccggcctccgggatcacctggtggatgtagtatgtgaacttgcgaaggagttatgtgcattatctatatgaggtctgatgcatggagagatcgccatgctctcgcggctgtgacccccagctctcacacctgcctctggttcccgcctggtcctccgagcttcaggaccccacctccaaaggcccctctgctcaatgcctacctccctagggccctagctgtgcacatgaggggcctgagtgcccatcgcaagggctctcaaggatcaccggtaaggcctccaggtcagtgagccctcacttctgccgttacacctctgcctgggacccgagtctgggctccgtgggaccattggtctcccagaagtatggcggcatagggcctcgaccgtccaggacagagaagggacggggtggactgaggcagtcagggaaggagggtcgcccggatccgacattttggagagattcatttactccgc

SEQ ID NO: 707694 - DNA, 208 bp, Homo sapiens
ccccaaacccttaaaaaccaaaactggtttgggtgttaaaaaaggggtaattaatggtttttgttagttcccttcagcttaataaggatttattgcaaatttgctatgtccccagtgggcccccacttaaagatatgtatcataaaaataaaatctgttaaccctagggaatggttatataaaaaacataaaatttttccatttttga

SEQ ID NO: 707695 - DNA, 351 bp, Homo sapiens
catttccggaggttttaaatttataaaaattaggggaaataaatccaatttggttttttaaatttttttaaataaaaaatttcttaaaatttttaaaattcatgtccatttccttttttccaacccataatttttggctgcctttttccaataaaaaaaaattttcagggggcaaaaaaaatcatttctgaaaatacctttaaccatgtttccggaaaaaacccaaaaaattacctcctgtaacaagaccattcgggggcggttaatttttcgggggaccctttcttttctggccataaaggtttggggaatttaatacctgggggggaaaaatggaccctgggggctttc

SEQ ID NO: 707696 - DNA, 260 bp, Homo sapiens
ggcacgagggcggagtctgcggccgttcccgcggcctcctcctcctccccgttcccttcacccccaccccgcacccctttccccatcccggctccgtcaccctcccgtcccccacactcaggacaagaatgccctgcccggaacaacccagcagcgcctagatggctttggtcacggtccagcggtcacctacccccagcaccacctccagcccctgcgcctcggaggcagacagtggggaggaaggaattggcccccgg

SEQ ID NO: 707697 - DNA, 690 bp, Homo sapiens
  misc_feature (28)..(28): n is a, c, g, or t
  misc_feature (130)..(130): n is a, c, g, or t
  misc_feature (177)..(178): n is a, c, g, or t
  misc_feature (185)..(185): n is a, c, g, or t
  misc_feature (196)..(196): n is a, c, g, or t
  misc_feature (203)..(203): n is a, c, g, or t
  misc_feature (298)..(298): n is a, c, g, or t
  misc_feature (537)..(537): n is a, c, g, or t
  misc_feature (578)..(578): n is a, c, g, or t
  misc_feature (589)..(589): n is a, c, g, or t
  misc_feature (597)..(597): n is a, c, g, or t
  misc_feature (599)..(599): n is a, c, g, or t
  misc_feature (610)..(610): n is a, c, g, or t
  misc_feature (622)..(622): n is a, c, g, or t
  misc_feature (642)..(642): n is a, c, g, or t
caatttttaccttttttttaaataagtnctcagaaatgggaacagttgcatctaatttgtgtgaaaagctgtttaaaacttcttacgttttcaggtaattttactccctggtgaaattctgatctacaangatagaaagccccaggaatttctcttagcacattatcagttcattannaaaaacnaaaaaaaaaangaaaaanaagaaaaaaaccttctacaagaaaaaaatgaaaacaaatagttagtggttggtaactgccttgaatgatttacctttatccttaaataacatgtnaacttacaaattgccgagcagaatacctataatgtttgttaaactctcactgtttgttaatttgcctaattttatttcatttttttgttttgttttaaagggggttttcacttacactttttggtatgatgaattttttgttaaataaacagatacaatagaattaaactaaggaccaattagtgcaaaaatgcattaaatacagctctccaggatttttaggatatgcctcatttctnagccataaaattaaaaggaaaaatcactatgatccacattncttttaaaagngaagctgnancagccatcttnttaataagaaancccatccagttagcaaacancattctcaggaaagagatcaccatgctctgggaaactataacctaatt

SEQ ID NO: 707698 - DNA, 262 bp, Homo sapiens
  misc_feature (179)..(179): n is a, c, g, or t
cgtcagaagcactttcacagcacgacggcttatattctggggctcattctaaaactagttccacgtgggataccggaatttaagaaacttccaaatcaccagtgtgttagttgaagatgataaagttgggaccagatatgctggaggagccagatcactgcttttgaggactatgtcgnagtccctggatgtggctgctttcccaccagattttaaatccatcctggatcatggcatttataattaaagattgaaagattta

SEQ ID NO: 707699 - DNA, 664 bp, Homo sapiens
aatcgagctcctacctttgctgaaggtcaagaagaggtgatcacgataggtgggagtgaaggacgcttgctggcatgtagtgggagggaaattagtgtgtggaggaaagtgtgtggcaaagagaagttgggccaggtgcagtaatcacgcctgcaaatcccagcattttgggaggccgaggcaggtggatcatttgaggtcaggagttcaagaccagcctgggcaatgtggcaaaaccccatctctacaaaacattcaaaaattagttgggcgtggtggcaaacacctgtggtctcagctacacaggaggctgaggttagaggctgcagtgagccgtgatcataccactgcactctagcctgagtgagagagcgagaccctatctgaaaaaaaaaaaaaattttttttttaggattttctttcacacacacacttaacttaagatttaccagattgccaagtgttcacacatagttggtagcgtccgaggagtcaagaggagcggacgtattctctagggagcccggagaaagtctgtttgcggtgtgtccattttctccctagtaggtcttgccattgccaaccaatctggtgaacctatctcctccttccaaacccagaagctggatcttcccggttacctttagaatttaagccttaggcg

SEQ ID NO: 707700 - DNA, 399 bp, Homo sapiens
tttttaaaaaaccccccgccccccggggctttgggcgggaaaaacaaaattttttttcaaaaacccaaggcctgggaccccatggggccccaaaaaaaaactcccccggggaaatttccccgtgccccccccattaaaaaaaaagccccaaacctttgggacgggggaccccccaatttaaaaatttttctttcccattgttcccacaaaacccatgggaatttgcccctaaaatgtttttaaaaaaaaaaagttttttttgaactttaaccttttttcccccccccccgggtttttttttttttgccaaaaaaccaaaaaaattggggttccccgggaatgggggggggaattttttttaaaaaagctttaaaaaaaaggggccatttcccagggccc

SEQ ID NO: 707701 - DNA, 601 bp, Homo sapiens
agcggagtgtccgaggaacttttcgccggcgccgggccgcctctgaggccaggcaggacacgaacgcgcggagcggcggcggcgactgagagccggggccgcggcggcgctccctaggaagggccgctacgaggcggcgtggcccggcgggcctcccggaggaggcggctgcgccatggcacgagccacccttcagcagaggcggcttctggagcaggcgctgggcgagccgtgcgatctggacgcggcgctgctgaccgacatcgaaggtgaagtcgcgcgctgggtgcaggggctagggccaacggcctggtacgccccaagggcgggcgcatgatcgctggatgccactggcattgcactttcgagagacatgcttcagcgttatcaatcaaccaaggactagtgacttccctgcgcctatttgagcccacccgtatgcttcggagttggggcaggtgggcatcgagatccctgccagtccgccgataccgagctccctcgggcacgcttgtctccacctcctgccatcggttgagctcctctctctgaagccttcctgagcgggccgcaggcagcgccctcagccgtgtgcccttcg

SEQ ID NO: 707702 - DNA, 418 bp, Homo sapiens
cacatgaaatttgttactttgcggcatgcagtgattttatgtacaattatattattaataacatacagtaagtcacattagaattagaggattttcccatacttttggaacatataccaataacacatttatacaaataacagcccaaagaaaaccaaacaccatttcacatttgataatgcttcctgagcaatttttgcaccaaataagccaaacgtcactcttgcattagtgcactgttgatgtcaaagccaattaattcttaatgaaatcttatagacaaatgtgttcaaacttaatcagtttggccataaggtaagtttctcataagcctttgataaccctttacacatttttattaaagagcaggtcataggcaggtttttgctcgaagaaaaaacctgttatgcttttattc

SEQ ID NO: 707703 - DNA, 2493 bp, Homo sapiens
  misc_feature (166)..(166): n is a, c, g, or t
  misc_feature (173)..(173): n is a, c, g, or t
cctatcttgtgtgtcgacaagagccagcgtgattgcagaaggcacaccgtgctaatattgcgcccactccctccctctctttttcaaagctattaagccaatcgtacattccaagtgtgagatggaccagcggattttaatgcactgagcgtggaaggctctgtgntgtgtgncctcaggccctgtgctgtgagtgaccttcaagggacggcctgtgtcgctgttggcgtggtattgaagaagtcccacgcctatctgaaaaggctactaaaatactcttcttttgtccaactacacttgaagccacaggcgaggccagattattttccacgtatttcagccagagccatacacatcatgactgactgtatggaagatgtgaaagtccagtgtcttccatcaagctacacatttaagacatttgcaaaaatcgttcttgcagatgattttgttttggaaagtatttttcaaaaacacaagccatctgtgtcaatatatactgggcttactattgttattttaaacaactaacaagtattctagaatactctcagttttgatttctgttagaggaaatgtcagcagctatcaccacaaagacagccgctctcagggtttgccaagaactcaagagtgtgccaggccggagctgaggcccctcctgtgccccagggccctgtggccggtcacacggctcagctacagatgcccgtggcaggcgccgaaagcaggcatcggaacgaaggccaagccgtcggagtctcatctaaaattgcatcctggatggccctctctggatcgtcaaggtgaaccagcaactctcggtacaggtactggacactgctctgatagtaggattttgcgttggcacccttgacacactgcagccaggtgaccaaggtggaggcggctgccatcctcacatcgttggacacgtcatctaggcgttttaagagttcaggataaatcttgatgagtttctctggatccgtcatgccgcccgaggtttttaagaacgtgttgataatacggcatgagatcagtcgcgtcatcttcgaatcctcctccagggtggtcaggacctggggcatcagtgtttcctgcacgtcccgtatctgctctgccgacaggacctcgctgctggtgagcgcccagaggcaggacacggcagccgtgcggatggccgcggctgtcctccccgcatgccactgcagattgggggccaggatgtcctttgtcaccgtctcgaggtagctgggaaactgcccctgggagttgatggtgtccgtggctctgagcagcacggtggacaggatggagaacagcttcaggcgcatctgcgggtcttgggagggctgcagacaggccctcagcgtgggcacgacgtgtggcagggcttctcccagggcagggcctgactgtgcgacgatgacactgaactgcaggagctccggcgagtgtgcggtccagtcaaggtgcgacgcggtcacccgctccaggaggggaccaatgtgcttgcggtagaggtcctggcagctgctgacaccctccaccatggccagtgagtccatcgtctcctgtgccttgtccctcaggccggtagcacctgcgagggccactattgtcagcagcacgtccaagagctgcaggctggccacgccacagtcctcatgacacacagacaccagagcctgcacacacagcagcaggcgctccaggtagaggtcgttttcagatgcctggcagatgtgggcctgtgccagctctgtggcgatggctgccaggtgcggctggagggcttctcgggggcaaccccgcatggcggaggccagcaccaggaggccggaggcagagggcgtcttcttcagcgtcgataagatcagcttcagaaacacctcagggctgacaaacgtcccgacgagctctgcggatctggtacaactttggaccacggctgcctcctcgtcggtgcaggcctggaacagggtccggaggacgacctccaggtgctgcgtggcgtggtcctcggcatgcagcagcagcactgggagcagctgtgccgacttcactcgggtccccaccacccagtcggtgatgtcgtggcacagggcagggaggatcttggagaggttcctgaagacgagctcccggcagcccagcacagggcggcgctcatgtggagggtaatggggtggggtgggaggggcaaagtccagcttgtccttcaggtcctcctcattctccttctgccactgcaggccaacgtcctcccagaggctggcagccagctgcctgacctcaggcacctcgtcgttgaggctactgagcagcagagggatgagcttgtggaagaaggagtaacggtcacgcagacacagcagccagccgcccaccacggaggccaccgcccgccggacctgcgggacgtcatcaaacagtcgctgagcaaaatgggaaagcacggtcgacgcggccgcgaatttagtagtagta

SEQ ID NO: 707704 - DNA, 243 bp, Homo sapiens
  misc_feature (176)..(176): n is a, c, g, or t
gccaagtctagaggatcggaaaaataactatgggtactaggcttaatacctgggtgatgaaataatctgtgcaacaaacccttgtgacacaggtttatctatgtacaaccctgtacttgtagccctgaacctaaaagttttttttaaaaaaaaaagaaagaaagaaaatacagatnagtctgagcccaaagtatttacccaacaatggtaaagtattttaataaattactttattactggttt

SEQ ID NO: 707705 - DNA, 936 bp, Homo sapiens
catacacagatgccctcctggacgaggctaacatcccgaacttagccgctaccctgcatctgctgcgtccccactcccttggtgtttgttgggtgatcgttgctctctgggcttttgggtttagggggcgcccggtctctgctccttctactgttccgctcctggtcttcccaatagatagtcgagccgtgttgcgtagaggtatccccatgagccgttgaaaaggggcaccaagagcccccgatcttcaatccgtgtgcaacagcccatacttctcacgtgcgccatgtcaagcatgcaagtgtggatcaatggagcggtgggtgctaggacccgcagggattcaccacaaggcgtagactttgtgctgtccgtccaattcgtacgtggggggctcaactttgttctatgcgctgtaccctcacatttccccttaactaccccgcgttacgtcacgggtttggtgcactatgccaccgcttcctggctcatcagcggcaagggagtgacgcgggttgacgtcgcccttagttcccctcttgtacacttagtggctccgacaacgtctcgcccctttttgccccgtcccggctcttgtgcccattcgtgaattccccattattcgtggggctgatatggatcgattcgtccgacacttgtgtatatgctgcaaagccgctagatcggctgcgaattgacgcgcgctggatggtccctgggcgaccattgagggtcgggtgccctaggtggtccttggtatcgccgggttaaaacccttgacctgtgtggtcgtttcctggcgcacatctttcccttattttactccaccgtccgtcaaggaaatgggggcaacctccttgacaaaggttgggcgttcggcacgaggccttcgatttgaagcccaccacactatttttcgccacctggttcgccttg

SEQ ID NO: 707706 - DNA, 110 bp, Homo sapiens
ttattgttgtaagaggaactattagaaggattatggatgcggttgcttgcgtgaggaaatacttgatgacagcttctgtggcaacgagggtttacttttttcggttagaa

SEQ ID NO: 707707 - DNA, 208 bp, Homo sapiens
gatctagcaggatctcctcccataatgtgtgccactctgcatttgcaagcaggggtgtaggattaagccagaagctaacagccatccaccactgggcgactctgtgcctccatccccttccctcccatgtagctaggtttcttgcctcccactgcatccctgtgcagccccactatggcttccatgcaatggcccacctcacactctg

SEQ ID NO: 707708 - DNA, 517 bp, Homo sapiens
gagcagggaactacggactcactgctggagctgagcaaacacagtcatgtaccaggaaggtactgaagccccgaggcaggagcatactccaggaccaggatagaggaaggtcccagggacaataatgagtacattgccagacgaccagataagcaggaaggggctttagaccccaaagaatatcctcacagtgcgacagatgaagcacatcctgttgaatcagcctagaggagaagcagcaggaatgatgctttgatactctggaggagaagttaactcaagatgggattcatgttctgatttgaggaatgaaaatgagatgatcaggcaggaaactgacattccaaggatctaatccaggaagtactctcagtggggaccacctgctttcatcccctggacattgtgggagaaattttgcaatgtatgctaatcaaaatgtctttatatgttctctgctgatgttttatagaggtctgtgaagaaaattcaacctcaggaacttcagaaaatgtcc

SEQ ID NO: 707709 - DNA, 795 bp, Homo sapiens
gagcaaaccagactccagcctgttttgatggatgaggagactgtgcgcagagcactctgatgcccgagggcgagactgcgccgtttgcattcacctgctggggatgcagcatggcccctcttgtaattgaattctacattatatctgtcgtgctgctaatttaccgagcccgggagattatagagacctatttatgggattcctgtagactctctctcgcacatacatacatacatatatatgtatgttacatatatatagaactacagctctctatattgtatatataagagatgtgtatactgtctcttatatctgcagggctgttgttatatggtgtctacactggaagtatcctactgttgtggacttgagctgagaggagactgtcgctactctagacctctctctgatatacgcggagatgacatactctcgcatgagctttccttcgtatcacttgcaggggcgagagtgctctcacttggagcagactgtgacatgtgcccgcatgctggcctatattaccctgctttgtgagctctgacaggatcagacatggctctgagcctatctaccccacttcatagcagacagttatactgatgcaggttcttgatgaggtcactgcatcttaccaccagttcgtggagcatcaggacacttgctgagctgtggtgtagccttcacatgctggacgcgcatctcaccgaccagggcgctagcgtggtttatgcttgatgcctgacggcctgtgggtactctcaccagcttttgagctagcctcacgacgct

SEQ ID NO: 707710 - DNA, 404 bp, Homo sapiens
aaataaaaatgcccgtcgaccagtaacaatccgatctctctttctcgtccccacaaatactacatgttctcacttataagtgggagctaaacaacaggcccacaagaacatacagaaagaaatagtaggccgggcgtggtggctcacacctgtaaccccagcactttgggaggccaaggtgggtgcatcatgaggtcaagagattgagaccatcctggccaacatggtgaaatcccatctctactaaaaatacaaaaattagctgggcatggtggcatgcacctgtagtcccagctactcgggaggctgagacgagaatcacttgaactggggaggcagaggttgcagtgagccgagatcgagtcactgcactccagtctaagtaacaagagtgaaactttgtc

SEQ ID NO: 707711 - DNA, 941 bp, Homo sapiens
  misc_feature (31)..(31): n is a, c, g, or t
aggagaacaaacttacggctaggtacgaggnctgggtgtgctagagcccagctgctggcggctgctggaatatcctacctgataggattaaaaggcctagtggagctgggggctctcagtggttaaacaatgcccaacaaccaaccagctggcccttggtctcctctctttcctcctttggttaaagagcatctcagccagcttttcccaccagtggtgctgttgagatattttaaaatattgcctccgttttatcgaggagagaaataataactaaaaaatataccctttaaaaaaacctatatttctctgtctaaaaatatgggagctgagattccgttcgtggaaaaaagacaaggccaccctctcgccctcagagaggtccacctggtttgtcattgcaatgcttttcattttttttttcggtaatggtttcatttcagttccgctggctattcttcctaatctatatccatagatctaaggggcaaacagatactagttaactgcccccacctctgtctccctgtcttctttagatcggtctgattgattttcaaaagtggacccaaacttagggaattctggattaaggggtggctggtggcaaggaggggcaggggatatggggacgtgactgggacaggttcctgccttatcattttctccctaggacattcccttgtagcccccagaattggtctgggcccaaaattgaatagaagcagaaaaacatttaggggataaccatcagggccagtagaattaagcctctccacctgttcccaaccataaaaagggtctcccagctttccatctctggccaatatgctttatcccaaaaaaaagcgataacgttcagacgtcggccattagaaatttaagggaatttccagcagcaagcatgctttgatatctggttcagactatcatcaggaaga

SEQ ID NO: 707712 - DNA, 1045 bp, Homo sapiens
  misc_feature (31)..(31): n is a, c, g, or t
  misc_feature (1040)..(1040): n is a, c, g, or t
aggagaacaaacttacggctaggtacgaggnctgggtgtgctagagcccagctgctggcggctgctggaatatcctacctgataggattaaaaggcctagtggagctgggggctctcagtggttaaacaatgcccaacaaccaaccagctggcccttggtctcctctctttcctcctttggttaaagagcatctcagccagcttttcccaccagtggtgctgttgagatattttaaaatattgcctccgttttatcgaggagagaaataataactaaaaaatataccctttaaaaaaacctatatttctctgtctaaaaatatgggagctgagattccgttcgtggaaaaaagacaaggccaccctctcgccctcagagaggtccacctggtttgtcattgcaatgcttttcattttttttttcggtaatggtttcatttcagttccgctggctattcttcctaatctatatccatagatctaaggggcaaacagatactagttaactgcccccacctctgtctccctgtcttctttagatcggtctgattgattttcaaaagtggacccaaacttagggaattctggattaaggggtggctggtggcaaggaggggcaggggatatggggacgtgactgggacaggttcctgccttatcattttctccctaggacattcccttgtagcccccagaattggtctgggcccaaaattgaatagaagcagaaaaacatttaggggataaccatcagggccagtagaattaagcctctccacctgttcccaaccataaaaagggtctcccagctttccatctctggccaatatgctttatcccaaccaataagcccccccaggaataaaggctttgttttggggatgcttaaatcttgactggcacttcccggctgtgggggctggggagccacttgtaacatttctgtgcagattttatgttagccactgctatgtaaaagcacgttcaaaatgaatttcagcagattatgtgttaccataatgaataaacgtcctctatcnccaaa

SEQ ID NO: 707713 - DNA, 688 bp, Homo sapiens
  misc_feature (194)..(194): n is a, c, g, or t
tcaaacagtaaaaacctgaggatgtgtacacgatgggctaatctccaactgtggcgttcaacctggtgaagttaggtttctcatctgggcgtggtgggtttcgcctgtaataccatctgtttgtaaggtcaggcatacggttctctttagcccaggttcttatgattaacaccacaacttatcactatcagtcnagctgtgttaattcaaacataaagctcttggaccttcatgtatttttcatccatgacagggtatggtctctccagcataagtcatggggcattcatctgcactttccacccaatggtatgttttgactgtcatcacgtggaaagggcatatggcaccatacataatccgccattagatccccttttagattagtgccatgctcagggggtaataaagtcatcatcccaggaatgtagcaatctataaccgatctaagcactgtaacatacgccctggtcttgtacggagcatgctgtgatccagtgaagattcctcatgctttgcctgtgtcagtgtaacctcaagttctccagtatggcatgctcgcaccaatctgttacaggcagtgcaatctgggtggaagttcgcatactttgctctcaaacaaactcgaatcttagttagatttcctgactagcattacgtcaggttgacataataaacatcttgtagt

SEQ ID NO: 707714 - DNA, 458 bp, Homo sapiens
  misc_feature (30)..(30): n is a, c, g, or t
  misc_feature (158)..(158): n is a, c, g, or t
  misc_feature (453)..(453): n is a, c, g, or t
aagtgaccactggaatgttttaatttcccnaagcttttttttcccccataaataagtttcactctttggcgattttcttcacttgtttaagataacgtgctagctattccaacaggtaacagctttcacagttctgcccctggcctgtctcccccatncccccaccctattcctgccagtgagtccttcctgtgcttctctcccttctcccctcccagccagctgacttcagtcacccctgtcccccctcccctgccaataagcccccccaggaataaaggctttgttttggggatgcttaaatcttgactggcacttcccggctgtgggggctggggagccacttgtaacatttctgtgcagattttatgttagccactgctatgtaaaagcacgttcaaaatgaatttcagcagattatgtgttaccataatgaataaacgtcctctatcnccaaa

SEQ ID NO: 707715 - DNA, 219 bp, Homo sapiens
aggcaatggggagatagtactatcatagaacacacgtcgggagaaggacactcctggtgaggcagtggcgtgatcttggcctcccaaagtgctaggtgattacaggtgtgagccacctcacctgtgctcaatgcctgtactgagtagttattccatatgggtgtactagaaatcagacaggttaaagggacagtactagataattgtagggggggggga

SEQ ID NO: 707716 - DNA, 375 bp, Homo sapiens
  misc_feature (333)..(333): n is a, c, g, or t
  misc_feature (364)..(364): n is a, c, g, or t
  misc_feature (374)..(374): n is a, c, g, or t
ctaatttttaaaaatgtattccttgccagggcaggcaaggtggctcacgcctgtaatcccagcacttcaggaggctgaggtgggcggatcacctgaggtcaggagtttgagaccagcctgatgaaaccctgtctctactaaaaatacaagaattagccgggcgtggtggcgcatgctgttagtatcagctactcaagaggctgaggtgagattatcgcttgaacccagggaaacggaggttgtagtgagcggagatcgcgccacttgcacttccagccttgagttgacagagtgaggaatccatcttcaaaaaaagacaaaaaacaaatttgnttgctaaaaggaagttggtctccttgaggtntttaaggacnt

SEQ ID NO: 707717 - DNA, 170 bp, Homo sapiens
gagacggggtccccagctggggatcccaggtgggggccagtgacccccccccagctttttgcggggttgcccccctggggttaaaccacccccctggaaggggggggttgcagtgagttgagattgggcccgggcccccccgcctgggccccagagccaggttttgtcca

SEQ ID NO: 707718 - DNA, 550 bp, Homo sapiens
  misc_feature (18)..(18): n is a, c, g, or t
  misc_feature (65)..(65): n is a, c, g, or t
  misc_feature (73)..(73): n is a, c, g, or t
  misc_feature (79)..(79): n is a, c, g, or t
  misc_feature (85)..(85): n is a, c, g, or t
  misc_feature (89)..(89): n is a, c, g, or t
  misc_feature (93)..(93): n is a, c, g, or t
  misc_feature (104)..(104): n is a, c, g, or t
  misc_feature (106)..(106): n is a, c, g, or t
  misc_feature (121)..(121): n is a, c, g, or t
  misc_feature (125)..(125): n is a, c, g, or t
  misc_feature (133)..(133): n is a, c, g, or t
  misc_feature (148)..(148): n is a, c, g, or t
  misc_feature (165)..(165): n is a, c, g, or t
  misc_feature (174)..(174): n is a, c, g, or t
  misc_feature (178)..(180): n is a, c, g, or t
  misc_feature (191)..(191): n is a, c, g, or t
  misc_feature (200)..(201): n is a, c, g, or t
  misc_feature (213)..(213): n is a, c, g, or t
  misc_feature (221)..(221): n is a, c, g, or t
  misc_feature (227)..(227): n is a, c, g, or t
  misc_feature (239)..(239): n is a, c, g, or t
  misc_feature (248)..(249): n is a, c, g, or t
  misc_feature (258)..(258): n is a, c, g, or t
  misc_feature (270)..(270): n is a, c, g, or t
  misc_feature (274)..(274): n is a, c, g, or t
  misc_feature (301)..(301): n is a, c, g, or t
  misc_feature (311)..(311): n is a, c, g, or t
  misc_feature (316)..(316): n is a, c, g, or t
  misc_feature (326)..(326): n is a, c, g, or t
  misc_feature (328)..(329): n is a, c, g, or t
  misc_feature (335)..(335): n is a, c, g, or t
  misc_feature (339)..(339): n is a, c, g, or t
  misc_feature (341)..(341): n is a, c, g, or t
  misc_feature (346)..(346): n is a, c, g, or t
  misc_feature (352)..(352): n is a, c, g, or t
  misc_feature (360)..(360): n is a, c, g, or t
  misc_feature (391)..(391): n is a, c, g, or t
  misc_feature (409)..(411): n is a, c, g, or t
  misc_feature (413)..(413): n is a, c, g, or t
  misc_feature (420)..(420): n is a, c, g, or t
  misc_feature (436)..(436): n is a, c, g, or t
  misc_feature (457)..(457): n is a, c, g, or t
  misc_feature (460)..(460): n is a, c, g, or t
  misc_feature (473)..(473): n is a, c, g, or t
  misc_feature (537)..(537): n is a, c, g, or t
gcttttagtttagggggngtttccatgaagccacaaactaaactaattatcaaacacattagttntttccagnctctantagatnctcnttcnaccaataagcngngaaagaagcttttcntgtnctctttcnttttgctataaagcnttttttcttttgactanatgcaaggngagnnnttgtttttttnctccttttnnttgccctcagangatgcacnatctanttcaggagtaanacgtttttnngggtgtttntcttcttccttncttngggggtctacaaccagcatatcttcgnggcggtgaanttcgnggcgggggantnngcggcngtcngngggangttccngactatcnatcacggcgggatgctcgttgctctcatcgntggcttgccgcttatatnnncngggctgntgggggcggggggttncagcccgctggtcatccagcngcntcgcttcatagcngtccttcccgcggctgtcccaatcaggaggcgcgttcaggtcctgggcaacggggatggccttntatgcaccattca

SEQ ID NO: 707719 - DNA, 357 bp, Homo sapiens
  misc_feature (20)..(20): n is a, c, g, or t
aataccccctaattatgatnggatagccatatacctcagacattagaatgggtagaccacccctatattattttaaaacaccatattaatattattccattaaaatataaccctatggaagattaaacatcactttggcaatcctctgtaacctaaacatgtcaaataatcctgtttaccctctctcttggatgctctaggggtcctctagcatccaaaagctaggggtcaggaaagacaatttttgaagctgaagtttgattttgggaaatatgttaaatatatatgttagaggttcaaaagcatgtgatattatggaatagaattccagattaccgtaagttcttttgccaaaat

SEQ ID NO: 707720 - DNA, 376 bp, Homo sapiens
  misc_feature (54)..(54): n is a, c, g, or t
aactcggccgcccgcctgccgcctcccgtaaccccgggcgcccgccagcggcangcatcgcgcctaattctcgtacggtttcacgccgggtgcggcctggactgcggaccagccgggccgctgcgcaatttgcgtacaacggcgccgccaggcgatttgggttgttggcggtagcgggatcggggagccggagccccgggtccccacgacctgagccggctctcccatcagcgatctggtgcgttccaatcgcttgtactcatatctgatcatgcaacgtggacgcggtgggggagggtggggcgggggcagctttcgagaattacgaggacaggaggcagaggcctccccatccgcattattggaggagagagag

SEQ ID NO: 707721 - DNA, 114 bp, Homo sapiens
accctcacgtctcatgtcacaaacgccgggcccacgcagccttctggtggcctgctgccctcgtgggatggggcaccctccacctccgaggtgtacccctgtacccagagacct

SEQ ID NO: 707722 - DNA, 244 bp, Homo sapiens
tgcactgtgtatgcgcgcgggaggaggaacgccggtctttagggtcgggccggctggcatggattcaatgcctgagccggtccgtgtcttctgcttcttcccttgctgctgctgctgctgttgtagtgccggccctggagctgggcccgagccaggccggagctgaggagaacgactgggttcgcctgcccagcaaagctaaatagcaaatagtataaggctcactggaaaatgtggctgggaa

SEQ ID NO: 707723 - DNA, 482 bp, Homo sapiens
ttactaatatgctgtctcacaattcagcttctataagcaagaggcatttttttctacaccggccctagagaaggagtaaaacagttttgtttctagaccataaccatgaagcaggtcatagtatttctgcaacttttttttttattggtggggttttctttgtgggacagagtctcgttctgtggccccggttgaagtagcagtgcccatttaagcaatatttgcttcattgcacaaagcgggcatttcacatccaaccacccaaaaaaaagtttttcagcagagttttaaaacacaaaacaaaccaaaacacacaaaccccagttctgaaatacacatctttgcgatggaatatttcacaaaatattaggagcctttacattcttacctagactatgatttcaatataattgggaccctatgttatagatgtcccataatattcttctaattatcctaaccaaacttcagtttaaaaccaa

SEQ ID NO: 707724 - DNA, 852 bp, Homo sapiens
  misc_feature (467)..(467): n is a, c, g, or t
  misc_feature (694)..(694): n is a, c, g, or t
  misc_feature (729)..(729): n is a, c, g, or t
ttcagattgggtgactgagacgcgtgatcactgtggacactaaggcggcaggcaaaggcaggagtgacgtgcaccagtggtgcatcgccctgatggactcaagaggtgtgactgtggcacgtggtgcgaggaatgacgcgacgggcactttcgacatcttctacacggccccccagccgggctgatacgatcatctgtgatgcgctttggtgtggcgagcacgtgcccaatcagccccttccaagtgacgggtctctggctggggacctagtcgcctcgtgtgcagccccctctacggtctcagctgcgtggccccgacaggtacacctacgcgcagggcggccagccagacttgcgagccccggataggcccctggtgggttgtcaatgggcttggatgtgccagcctgaggccctttgaccttgtcatccccttcaccatcaagaagggcgagatcacaggggangttctggactgccctgcatggcagaggtgtgcgtcgagcgcgcacctatctagctgacaagcaaagatcggcagccgtgaccgtggcggtatgcacccagcgaggctggcctgcacgagatggacatccggctatgacaacatgcacatcccaggaagccccttgcagttctatgtggattacgtcaactgtggccatgtactgcctatgggcctggctcacccatngagtagtgaacaagcctgccaccttcaccgtcaanaccaaggatgcaggagaggggggcctgtctctggccattgagggcccgtccaagcagaaatcaggtgcactgacaacaggatgggacatgcagcgtgtcctacctgcctgtgcctgccgggga

SEQ ID NO: 707725 - DNA, 139 bp, Homo sapiens
acccttttttttttttccccccttttcccccaattttttgggggtttttggcctccttttttttcccggggtggcccccggtttattccccggtgttttttgttccaaaataaaaaccccctgttgcccttggggggga

SEQ ID NO: 707726 - DNA, 137 bp, Homo sapiens
aatggctgtgtgcgggacgctgctatctgggtgggctggcagtagcccgacgatgactgggctcttctctggggagtccaacctggttccctacagaaatccaaggcgaatcctcggaagcttcgtcggatcaccac

SEQ ID NO: 707727 - DNA, 105 bp, Homo sapiens
gagaaaaaaacacaaaacagcaccacagaggaagagagacagacgcgagataaagaagaaacagaaaacgaagaaagaaaaaagaaaagaaagaacagaacagga

SEQ ID NO: 707728 - DNA, 530 bp, Homo sapiens
cgagtcaacttccggcagagggctcatggcagggcgagtaacaagcgtcggggcggtcctccaggccctcccatcagccggtggactgcccctttgtggagtgatggctggctgaaccacagttcccatcagcaaaggtagccgccccattgacaccttcacagattcaccaaggatcaccaagcctggctccatcgattctaacaaccagctctttgcacctggagggcgattgagctggggcaagggcagcagcggaggctcaggagccaagccctcagacgcagcatcagaagctgctcgcccagctactagtacttggaatcgcttctcagcccttcaacaagcggtacccacagaaggcacagatcctagacgtgtggtgcagaggagtagcttgagccgagaacgaggcgagaaagctggagaccgaggagaccgcctaaagcggagtgaccgggaaggggaccgtggggaccggcttgatcgtgcgcggacacctgctaccaagcggagcttcagcaaggaag

SEQ ID NO: 707729 - DNA, 297 bp, Homo sapiens
atcgagtcggtacctgcatactgggcgtatgctctgtaatagttgctgatccagccaatcccagcagcgtacttcaaccactcacagcagctgactgttgaaactgtattcaaataaggtaaacgccaagctgtaaccaacccggccgtttctgtacctcccttccgttttctgtgtgtagcttttcttttttgtctataaatttgctctgacaggacatccttggagtctctctcaatctgctgtgattctgggggcttcctgatttgcaaagtgtttctttttttttttttggag

SEQ ID NO: 707730 - DNA, 870 bp, Homo sapiens
ggaccaagccgtgggccctttcttgcttggcacacccggagcggagccgatctctggtttcacgtgatgtagggcaagcctagtgtgaggccccaggcctccgagcggccgagagagtatgctctagggcttcacgaagaggctcgccatcgtagtgtcgcatcgcgatagtggcaagaagaaggtctggttagaccccaagtgagaccaagtgaacatcgccatatgcctaagcgtcctcgtcagacagatccggaagctcatcaaacgatgggctagatcatcctgcaatgcctgtgacggtccattcccgggctcgactgtcggaacaaacaccttggccctgccggaacgggcacggcacatgggcatacgcgtaagcggaagggtacaggcaatgcccgaatgccagagaaggtcacatggatgaggagactgaggattttgctgccggcgtgctcagaagataccgtgaatcgtaagaagatcgatcgccgacatgtatcacagacctgtacctgcaaggtgaacggggaatgtgtgccaaaactaagcggattctcatggaacatatcgcagaagctgaacggcagacaacgggccgcaagaagctccatggctgaacaggctgagtgcccggaggtctaagaccaaggaagcacgcaagcgccgggaagagcgcctccaggccaagacggaggagcatcactcgagattttatccatggagggaagagaccaagaaattgagaactggcaattagtctgtgcatgacgtggcctctgtgattacatagatcaagccattaacataaacgaggcttaaaaagaaataagagagatcgggggttatattaaggggggggaaaag

SEQ ID NO: 707731 - DNA, 1209 bp, Homo sapiens
  misc_feature (169)..(173): n is a, c, g, or t
  misc_feature (178)..(178): n is a, c, g, or t
  misc_feature (319)..(319): n is a, c, g, or t
  misc_feature (518)..(518): n is a, c, g, or t
gaattttgctcttgttgccaggccggagtgcaatggtgcaatctcagctcactgcaacctccgcctcccgggttgaggcgattctcctgcctcggcctcccgagtagctgggattacaggcatgagccaccacgcctggctaattttgtatttctagtggagatgaggnnnnncatgntggtcaggctggtctcaaactcccgacctcaggtgatccacccacctcagcctcccaaagtggtgggattacaggcatgagccaccgtgccgagccttccttgaagttttttgtttggttttgatttgttttgttttgttntgttttgttttgtttttggagatagggtctcactctgttacccatgctggagtgcagtggcacaatcttggctcagagcaacctctgcctcccaggctcaagcaatcctcccacttcagtctaagtagctgggactacaggcacgtgccaccaggcccagctaatttttgtgttttgttagagatgaggttttgccatnttgcccaggctcgtcttgaacaccggggctcaaggaatctgcccatcttcgcctcccaaagttctgagatagcaggtgtgagtcatcatgcccagcctccttgaagtttactaacaattgggataactgagggaagagaagtgacaattccactcagtctattagaggtctggatataaggtagccacacaataactctaacttgacttctaaccattctatcttattgatttggaggctgtcttctgccagattttttgtggcttgagatgatattttcgaacccttctttcactacctttcttacccttaatgtgccaagcttgaaacaggatttgatttcctgagctacttgttcgccttctgtgcgtcaccaagtaatctggttcatctttcgtctcattcatgttattttcaagtgaaacaagacattttggggggtcaagtctctttggggtgtttggttttatgtatataaaaaatggattttggtgttccccttcccatgtaaagtaccactttatatgggaacttcccaatcataatgtaaagaaaaaatgaaagcctggtgttttgttcttccagatgcctcccttatggataaaatctccttggtaaaataaaatattgccttgtaaatcagtcttcccatccatattaattattaaatattaaagaaattttaaattcc
